United States Patent Application Publication US 2007/0099251 A1 - sequence listing, part 2

SEQ ID NO: 7211 - protein, 947 aa, Homo sapiens
MATRVRTASIWVPPLQERNSSWDRIRKLQGQESILGQGTPGLQPLPGTPRQKQKSRRIEKVLEWLFISQEQPKITKSWGPLSFMDVFVDFTWEEWQLLDPAQKCLYRSVMLENYSNLVSLGYQHTKPDIIFKLEQGEELCMVQAQVPNQTCPNTVWKIDDLMDWHQENKDKLGSTAKSFECTTFGKLCLLSTKYLSRQKPHKCGTHGKSLKYIDFTSDYARNNPNGFQVHGKSFFHSKHEQTVIGIKYCESIESGKTVNKKSQLMCQQMYMGEKPFGCSCCEKAFSSKSYLLVHQQTHAEEKPYGCNECGKDFSSKSYLIVHQRIHTGEKLHECSECRKTFSFHSQLVIHQRIHTGENPYECCECGKVFSRKDQLVSHQKTHSGQKPYVCNECGKAFGLKSQLIIHERIHTGEKPYECNECQKAFNTKSNLMVHQRTHTGEKPYVCSDCGKAFTFKSQLIVHQGIHTGVKPYGCIQCGKGFSLKSQLIVHQRSHTGMKPYVCNECGKAFRSKSYLIIHTRTHTGEKLHECNNCGKAFSFKSQLIIHQRIHTGENPYECHECGKAFSRKYQLISHQRTHAGEKPYECTDCGKAFGLKSQLIIHQRTHTGEKPFECSECQKAFNTKSNLIVHQRTHTGEKPYSCNECGKAFTFKSQLIVHKGVHTGVKPYGCSQCAKTFSLKSQLIVHQRSHTGVKPYGCSECGKAFRSKSYLIIHMRTHTGEKPHECRECGKSFSFNSQLIVHQRIHTGENPYECSECGKAFNRKDQLISHQRTHAGEKPYGCSECGKAFSSKSYLIIHMRTHSGEKPYECNECGKAFIWKSLLIVHERTHAGVNPYKCSQCEKSFSGKLRLLVHQRMHTREKPYECSECGKAFIRNSQLIVHQRTHSGEKPYGCNECGKTFSQKSILSAHQRTHTGEKPCKCTECGKAFCWKSQLIMHQRTHVDDKH

SEQ ID NO: 7212 - protein, 615 aa, Homo sapiens [sequence omitted]

SEQ ID NO: 7213 - protein, 617 aa, Homo sapiens
MDFSKLPKILDEDKESTFGYVHGVSGPVVTACDMAGAAMYELVRVGHSELVGEIIRLEGDMATIQVYEETSGVSVGDPVLRTGKPLSVELGPGIMGAIFDGIQRPLSDISSQTQSIYIPRGVNVSALSRDIKWDFTPCKNLRVGSHITGGDIYGIVSENSLIKHKIMLPPRNRGTVTYIAPPGNYDTSDVVLELEFEGVKEKFTMVQVWPVRQVRPVTEKLPANHPLLTGQRVLDALFPCVQGGTTAIPGAFGCGKTVISQSLSKYSNSDVIIYVGCGERGNEMSEVLRDFPELTMEVDGKVESIMKRTALVANTSNMPVAAREASIYTGITLSEYFRDMGYHVSMMADSTSRWAEALREISGRLAEMPADSGYPAYLGARLASFYERAGRVKCLGNPEREGSVSIVGAVSPPGGDFSDPVTSATLGIVQVFWGLDKKLAQRKHFPSVNWLISYSKYMRALDEYYDKHFTEFVPLRTKAKEILQEEEDLAEIVQLVGKASLAETDKITLEVAKLIKDDFLQQNGYTPYDRFCPFYKTVGMLSNMIAFYDMARRAVETTAQSDNKITWSIIREHMGDILYKLSSMKFKDPLKDGEAKIKSDYAQLLEDMQNAFRSLED

SEQ ID NO: 7214 - protein, 1431 aa, Homo sapiens [sequence omitted]

SEQ ID NO: 7215 - protein, 596 aa, Homo sapiens
MTSPSPRIQIISTDSAVASPQRIQIVTDQQTGQKIQIVTAVDASGSPKQQFILTSPDGAGTGKVILASPETSSAKQLIFTTSDNLVPGRIQIVTDSASVERLLGKTDVQRPQVVEYCVVCGDKASGRHYGAVSCEGCKGFFKRSVRKNLTYSCRSNQDCIINKHHRNRCQFCRLKKCLEMGMKMESVQSERKPFDVQREKPSNCAASTEKIYIRKDLRSPLIATPTFVADKDGARQTGLLDPGMLVNIQQPLIREDGTVLLATDSKAETSQGALGTLANVVTSLANLSESLNNGDTSEIQPEDQSASEITRAFDTLAKALNTTDSSSSPSLADGIDTSGGGSIHVISRDQSTPIIEVEGPLLSDTHVTFKLTMPSPMPEYLNVHYICESASRLLFLSMHWARSIPAFQALGQDCNTSLVRACWNELFTLGLAQCAQVMSLSTILAAIVNHLQNSIQEDKLSGDRIKQVMEHIWKLQEFCNSMAKLDIDGYEYAYLKAIVLFSPDHPGLTSTSQIEKFQEKAQMELQDYVQKTYSEDTYRLARILVRLPALRLMSSNITEELFFTGLIGNVSIDSIIPYILKMETAEYNGQITGASL

SEQ ID NO: 7216 - protein, 615 aa, Homo sapiens
MTSPSPRIQIISTDSAVASPQRIQGSEPASGPLSVFTSLNKEKIVTDQQTGQKIQIVTAVDASGSPKQQFILTSPDGAGTGKVILASPETSSAKQLIFTTSDNLVPGRIQIVTDSASVERLLGKTDVQRPQVVEYCVVCGDKASGRHYGAVSCEGCKGFFKRSVRKNLTYSCRSNQDCIINKHHRNRCQFCRLKKCLEMGMKMESVQSERKPFDVQREKPSNCAASTEKIYIRKDLRSPLIATPTFVADKDGARQTGLLDPGMLVNIQQPLIREDGTVLLATDSKAETSQGALGTLANVVTSLANLSESLNNGDTSEIQPEDQSASEITRAFDTLAKALNTTDSSSSPSLADGIDTSGGGSIHVISRDQSTPIIEVEGPLLSDTHVTFKLTMPSPMPEYLNVHYICESASRLLFLSMHWARSIPAFQALGQDCNTSLVRACWNELFTLGLAQCAQVMSLSTILAAIVNHLQNSIQEDKLSGDRIKQVMEHIWKLQEFCNSMAKLDIDGYEYAYLKAIVLFSPDHPGLTSTSQIEKFQEKAQMELQDYVQKTYSEDTYRLARILVRLPALRLMSSNITEELFFTGLIGNVSIDSIIPYILKMETAEYNGQITGASL

SEQ ID NO: 7217 - protein, 1288 aa, Homo sapiens [sequence omitted]

SEQ ID NO: 7218 - protein, 508 aa, Homo sapiens
MNENKDTDSKKSEEYEDDFEKDLEWLINENEKSDASIIEMACEKEENINQDLKENETVMEHTKRHSDPDKSLQDEVSPRRNDIISVPGIQPLDPISDSDSENSFQESKLESQKDLEEEEDEEVRRYIMEKIVQANKLLQNQEPVNDKRERKLKFKDQLVDLEVPPLEDTTTFKNYFENERNMFGKLSQLCISNDFGQEDVLLSLTNGSCEENKDRTILVERDGKFELLNLQDIASQGFLPPINNANSTENDPQQLLPRSSNSSVSGTKKEDSTAKIHAVTHSSTGEPLAYIAQPPLNRKTCPSSAVNSDRSKGNGKSNHRTQSAHISPVTSTYCLSPRQKELQKQLEEKREKLKREEERRKIEEEKEKKRENDIVFKAWLQKKREQVLEMRRIQRAKEIEDMNSRENRDPQQAFRLWLKKKHEEQMKERQTEELRKQEECLFFLKGTEGRERAFKQWLRRKRMEKMAEQQAVRERTRQLRLEAKRSKQLQHHLYMSEAKPFRFTDHYN

SEQ ID NO: 7219 - protein, 1175 aa, Homo sapiens
MNGDMPHVPITTLAGIASLTDLLNQLPLPSPLPATTTKSLLFNARIAEEVNCLLACRDDNLVSQLVHSLNQVSTDHIELKDNLGSDDPEGDIPVLLQAVLARSPNVFREKSMQNRYVQSGMMMSQYKLSQNSMHSSPASSNYQQTTISHSPSSRFVPPQTSSGNRFMPQQNSPVPSPYAPQSPAGYMPYSHPSSYTTHPQMQQASVSSPIVAGGLRNIHDNKVSGPLSGNSANHHADNPRHGSSEDYLHMVHRLSSDDGDSSTMRNAASFPLRSPQPVCSPAGSEGTPKGSRPPLILQSQSLPCSSPRDVPPDILLDSPERKQKKQKKMKLGKDEKEQSEKAAMYDIISSPSKDSTKLTLRLSRVRSSDMDQQEDMISGVENSNVSENDIPFNVQYPGQTSKTPITPQDINRPLNAAQCLSQQEQTAFLPANQVPVLQQNTSVAAKQPQTSVVQNQQQISQQGPIYDEVELDALAEIERIERESAIERERFSKEVQDKDKPLKKRKQDSYPQEAGGATGGNRPASQETGSTGNGSRPALMVSIDLHQTGRVDSQASITQDSDSIKKPEEIKQCSDAPVSVLQEDIVGSLKSTPENHPETPKKKSDPELSKSEMKQSESRLAESKPNENRLVETKSSENKLETKVETQIEELKQNESRTTECKQNESTIVEPKQNENRLSDTKPNDNKQNNGRSETTKSRPETPKQKGESRPETPKQKSDGHPETPKQKGDGRPETPKQKGESRPETPKQKNEGRPETPKHRHDNRRDSGKPSTEKKPEVSKHKQDTKSDSPRLKSERAEALKQRPDGRSVSESLRRDHDNKQKSDDRGESERHRGDQSRVRRPETLRSSSRNEHGIKSDSSKTDKLERKHRHESGDSRERPSSGEQKSRPDSPRVKQGDSNKSRSDKLGFKSPTSKDDKRTEGNKSKVDTNKAHPDNKAEFPSYLLGGRSGALKNFVIPKIKRDKDGNVTQETKKMEMKGEPKDKVEKIGLVEDLNKGAKPVVVLQKLSLDDVQKLIKDREDKSRSSLKPIKNKPSKSNKGSIDQSVLKELPPELLAEIESTMPLCERVKMNKRKRSTVNEKPKYAEISSDEDNDSDEAFESSRKRHKKDDDKAWEYEERDRRSSGDHRRSGHSHEGRRSSGGGRYRNRSPSDSDMEDYSPPPSLSEVARKKKKK

SEQ ID NO: 7220 - protein, 259 aa, Homo sapiens
MWSRDDHTCGIIRENTMARHPRTAGSFPAFKTEMQPSADTQQPTPPGPNHRGKRTANRYTHHPHGGQRALPVHMADAIGHGRADRKGLFPPTQKNALQIATPTIPMADSVHFPSTRQMLGLEETLSRLLSAFVLPRDPVTLEGAALASNRKRVNVAADQGSLPAGSSCLALGNIFPLQPRASTRLPRWIRPQRCVPASFLILSLKRSRDFSAAPQNTTQNFLVNGRIRKWMAWLTELRNSSWKFSANVLLVQHLQWWPT

SEQ ID NO: 7221 - protein, 882 aa, Homo sapiens
MAADKGPAAGPRSRAAMAQWRKKKGLRKRRGAASQARGSDSEDGEFEIQAEDDARARKLGPGRPLPTFPTSECTSDVEPDTREMVRAQNKKKKKSGGFQSMGLSYPVFKGIMKKGYKVPTPIQRKTIPVILDGKDVVAMARTGSGKTACFLLPMFERLKTHSAQTGARALILSPTRELALQTLKFTKELGKFTGLKTALILGGDRMEDQFAALHENPDIIIATPGRLVHVAVEMSLKLQSVEYVVFDEADRLFEMGFAEQLQEIIARLPGGHQTVLFSATLPKLLVEFARAGLTEPVLIRLDVDTKLNEQLKTSFFLVREDTKAAVLLHLLHNVVRPQDQTVVFVATKHHAEYLTELLTTQRVSCAHIYSALDPTARKINLAKFTLGKCSTLIVTDLAARGLDIPLLDNVINYSFPAKGKLFLHRVGRVARAGRSGTAYSLVAPDEIPYLLDLHLFLGRSLTLARPLKEPSGVAGVDGMLGRVPQSVVDEEDSGLQSTLEASLELRGLARVADNAQQQYVRSRPAPSPESIKRAKEMDLVGLGLHPLFSSRFEEEELQRLRLVDSIKNYRSRATIFEINASSRDLCSQVMRAKRQKDRKAIARFQQGQQGRQEQQEGPVGPAPSRPALQEKQPEKEEEEEAGESVEDIFSEVVGRKRQRSGPNRGAKRRREEARQRDQEFYIPYRPKDFDSERGLSISGEGGAFEQQAAGAVLDLMGDEAQNLTRGRQQLKWDRKKKRFVGQSGQEDKKKIKTESGRYISSSYKRDLYQKWKQKQKIDDRDSDEEGASDRRGPERRGGKRDRGQAGASRPHAPGTPAGRVRPELKTKQQILKQRRRAQKLHFLQRGGLKQLSARNRRRVQELQQGAFGRGARSKKGKMRKRM

SEQ ID NO: 7222 - protein, 138 aa, Homo sapiens
MDTQTHSLPITHTQLHSNSQPQSRTCTRHCQTFSQSCRQSHRGSRSQSSSQSPASHRNPTGAHSSSGHQSQSPNTSPPPKRHKKTMNSHHSPMRPTILHCRCPKNRKNLEGKLKKKKMAKRIQQVYKTKTRSSGWKSN

SEQ ID NO: 7223 - protein, 1093 aa, Homo sapiens
MADSSSSSFFPDFGLLLYLEELNKEELNTFKLFLKETMEPEHGLTPWNEVKKARREDLANLMKKYYPGEKAWSVSLKIFGKMNLKDLCERAKEEINWSAQTIGPDDAKAGETQEDQEAVLGDGTEYRNRIKEKFCITWDKKSLAGKPEDFHHGIAEKDRKLLEHLFDVDVKTGAQPQIVVLQGAAGVGKTTLVRKAMLDWAEGSLYQQRFKYVFYLNGREINQLKERSFAQLISKDWPSTEGPIEEIMYQPSSLLFIIDSFDELNFAFEEPEFALCEDWTQEHPVSFLMSSLLRKVMLPEASLLVTTRLTTSKRLKQLLKNHHYVELLGMSEDAREEYIYQFFEDKRWAMKVFSSLKSNEMLFSMCQVPLVCWAACTCLKQQMEKGGDVTLTCQTTTALFTCYISSLFTPVDGGSPSLPNQAQLRRLCQVAAKGIWTMTYVFYRENLRRLGLTQSDVSSFMDSNIIQKDAEYENCYVFTHLHVQEFFAAMFYMLKGSWEAGNPSCQPFEDLKSLLQSTSYKDPHLTQMKCFLFGLLNEDRVKQLERTFNCKMSLKIKSKLLQCMEVLGNSDYSPSQLGFLELFHCLYETQDKAFISQAMRCFPKVAINICEKIHLLVSSFCLKHCRCLRTIRLSVTVVFEKKILKTSLPTNTWDGDRITHCWQDLCSVLHTNEHLRELDLYHSNLDKSAMNILHHELRHPNCKLQKLLLKFITFPDGCQDISTSLIHNKNLMHLDLKGSDIGDNGVKSLCEALKHPECKLQTLRLESCNLTVFCCLNISNALIRSQSLIFLNLSTNNLLDDGVQLLCEALRHPKCYLERLSLESCGLTEAGCEYLSLALISNKRLTHLCLADNVLGDGGVKLMSDALQHAQCTLKSLVLRRCHFTSLSSEYLSTSLLHNKSLTHLDLGSNWLQDNGVKLLCDVFRHPSCNLQDLELMGCVLTNACCLDLASVILNNPNLRSLDLGNNDLQDDGVKILCDALRYPNCNIQRLGLEYCGLTSLCCQDLSSALICNKRLIKMNLTQNTLGYEGIVKLYKVLKSPKCKLQVLGLCKEAFDEEAQKLLEAVGVSNPHLIIKPDCNYHNEEDVSWWWCF

SEQ ID NO: 7224 - protein, 176 aa, Homo sapiens [sequence omitted]

SEQ ID NO: 7225 - protein, 669 aa, Homo sapiens
CRSRRGIRRVEPLRRARARVGPRFRPLCRMEIIRSNFKSNLHKVYQAIEEADFFAIDGEFSGISDGPSVSALTNGFDTPEERCFISLFQHSMDFLLFQFGLCTFKYDYTDSKYITKSFNFYVFPKPFNRSSPDVKFVCQSSSIDFLASQGFDFNKVFRNGIPYLNQEEERQLREQYDEKRSQANGAGALSYVSPNTSKCPVTIPEDQKKFIDQVVEKIEDLLQSEENKNLDLEPCTGFQRKLIYQTLSWKYPKGIHVETLETEKKERYIVISKVDEEERKRREQQKHAKEQEELNDAVGFSRVIHAIANSGKLVIGHNMLLDVMHTVHQFYCPLPADLSEFKEMTTCVFPRLLDTKLMASTQPFKDIINNTSLAELEKRLKETPFNPPKVESAEGFPSYDTASEQLHEAGYDAYITGLCFISMANYLGSFLSPPKIHVSARSKLIEPFFNKLFLMRVMDIPYLNLEGPDLQPKRDHVLHVTFPKEWKTSDLYQLFSAFGNIQISWIDDTSAFVSLSQPEQVKIAVNTSKYAESYRIQTYAEYMGRKQEEKQIKRKWTEDSWKEADSKRLNPQCIPYTLQNHYYRNNSFTAPSTVGKRNLSPSQEEAGLEDGVSGEISDTELEQTDSCAEPLSEGRKKAKKLKRMKKELSPAGSISKNSPATLFEVPDTW

SEQ ID NO: 7226 - protein, 1158 aa, Homo sapiens
MTHGEELGSDVHQDSIVLTYLEGLLMHQAAGGSGTAVDKKSAGHNEEDQNFNISGSAFPTCQSNGPVLNTHTYQGSGMLHLKKARLLQSSEDWNAAKRKRLSDSIMNLNVKKEALLAGMVDSVPKGKQDSTLLASLLQSFSSRLQTVALSQQIRQSLKEQGYALSHDSLKVEKDLRCYGVASSHLKTLLKKSKVKDQKPDTNLPDVTKNLIRDRFAESPHHVGQSGTKVMSEPLSCAARLQAVASMVEKRASPATSPKPSVACSQLALLLSSEAHLQQYSREHALKTQNANQAASERLAAMARLQENGQKDVGSYQLPKGMSSHLNGQARTSSSKLMASKSSATVFQNPMGIIPSSPKNAGYKNSLERNNIKQAANNSLLLHLLKSQTIPKPMNGHSHSERGSIFEESSTPTTIDEYSDNNPSFTDDSSGDESSYSNCVPIDLSCKHRTEKSESDQPVSLDNFTQSLLNTWDPKVPDVDIKEDQDTSKNSKLNSHQKVTLLQLLLGHKNEENVEKNTSPQGVHNDVSKFNTQNYARTSVIESPSTNRTTPVSTPPLLTSSKAGSPINLSQHSLVIKWNSPPYVCSTQSEKLTNTASNHSMDLTKSKDPPGEKPAQNEGAQNSATFSASKLLQNLAQCGMQSSMSVEEQRPSKQLLTGNTDKPIGMIDRLNSPLLSNKTNAVEENKAFSSQPTGPEPGLSGSEIENLLERRTVLQLLLGNPNKGKSEKKEKTPLRDESTQEHSERALSEQILMVKIKSEPCDDLQIPNTNVHLSHDAKSAPFLGMAPAVQRSAPALPVSEDFKSEPVSPQDFSFSKNGLLSRLLRQNQDSYLADDSDRSHRNNEMALLESKNLCMVPKKRKLYTEPLENPFKKMKNNIVDAANNHSAPEVLYGSLLNQEELKFSRNDLEFKYPAGHGSASESEHRSWARESKSFNVLKQLLLSENCVRDLSPHRSNSVADSKKKGHKNNVTNSKPEFSISSLNGLMYSSTQPSSCMDNRTFSYPGVVKTPVSPTFPEHLGCAGSRPESGLLNGCSMPSEKGPIKWVITDAEKNEYEKDSPRLTKTNPILYYMLQKGGNSVTSRETQDKDIWREASSAESVSQVTAKEELLPTAETKASFFNLRSPYNSHMGNNASRPHSANGEVYGLLGSVLTIKKESE

SEQ ID NO: 7227 - protein, 1734 aa, Homo sapiens
MKRSRCRDRPQPPPPDRREDGVQRAAELSQSLPPRRRAPPGRQRLEERTGPAGPEGKEQDVVTGVSPLLFRKLSNPDIFSSTGKVKLQRQLSQDDCKLWRGNLASSLSGKQLLPLSSSVHSSVGQVTWQSSGEASNLVRMRNQSLGQSAPSLTAGLKELSLPRRGSFCRTSNRKSLIVTSSTSPTLPRPHSPLHGHTGNSPLDSPRNFSPNAPAHFSFVPARRTDGRRWSLASLPSSGYGTNTPSSTVSSSCSSQEKLHQLPFQPTADELHFLTKHFSTESVPDEEGRQSPAMRPRSRSLSPGRSPVSFDSEIIMMNHVYKERFPKATAQMEERLAEFISSNTPDSVLPLADGALSFIHHQVIEMARDCLDKSRSGLITSQYFYELQENLEKLLQDAHERSESSEVAFVMQLVKKLMIIIARPARLLECLEFDPEEFYHLLEAAEGHAKEGQGIKCDIPRYIVSQLGLTRDPLEEMAQLSSCDSPDTPETDDSIEGHGASLPSKKTPSEEDFETIKLISNGAYGAVFLVRHKSTRQRFAMKKINKQNLILRNQIQQAFVERDILTFAENPFVVSMFCSFDTKRHLCMVMEYVEGGDCATLLKNIGALPVDMVRLYFAETVLALEYLHNYGIVHRDLKPDNLLITSMGHIKLTDFGLSKMGLMSLTTNLYEGHIEKDAREFLDKQVCGTPEYIAPEVILRQGYGKPVDWWAMGIILYEFLVGCVPFFGDTPEELFGQVISDEIVWPEGDEALPPDAQDLTSKLLHQNPLERLGTGSAYEVKQHPFFTGLDWTGLLRQKAEFIPQLESEDDTSYFDTRSERYHHMDSEDEEEVSEDGCLEIRQFSSCSPRFNKVYSSMERLSLLEERRTPPPTKRSLSEEKEDHSDGLAGLKGRDRSWVIGSPEILRKRLSVSESSHTESDSSPPMTVRRRCSGLLDAPRFPEGPEEASSTLRRQPQEGIWVLTPPSGEGVSGPVTEHSGEQRPKLDEEAVGRSSGSSPAMETRGRGTSQLAEGATAKAISDLAVRRARHRLLSGDSTEKRTARPVNKVIKSASATALSLLIPSEHHTCSPLASPMSPHSQSSNPSSRDSSPSRDFLPALGSMRPPIIIHRAGKKYGFTLRAIRVYMGDSDVYTVHHMVWHVEDGGPASEAGLRQGDLITHVNGEPVHGLVHTEVVELILKSGNKVAISTTPLENTSIKVGPARKGSYKAKMARRSKRSRGKDGQESRKRSSLFRKITKQASLLHTSRSLSSLNRSLSSGESGPGSPTHSHSLSPRSPTQGYRVTPDAVHSVGGNSSQSSSPSSSVPSSPAGSGHTRPSSLHGLAPKLQRQYRSPRRKSAGSIPLSPLAHTPSPPPPTASPQRSPSPLSGHVAQAFPTKLHLSPPLGRQLSRPKSAEPPRSPLLKRVQSAEKLAAALAASEKKLATSRKHSLDLPHSELKKELPPREVSPLEVVGARSVLSGKGALPGKGVLQPAPSRALGTLRQDRAERRESLQKQEAIREVDSSEDDTEEGPENSQGAQELSLAPHPEVSQSVAPKGAGESGEEDPFPSRGPRSLGPMVPSLLTGITLGPPRMESPSGPHRRLGSPQAIEEAASSSSAGPNLGQSGATDPIPPEGCWKAQHLHTQALTALSPSTSGLTPTSSCSPPSSTSGKLSMWSWKSLIEGPDRASPSRKATMAGGLANLQDLETQLQPSLRTCLPGSRGRHSHLVPPDWPIHLMRIPARAGYGSLSVHKQ

SEQ ID NO: 7228 - protein, 1461 aa, Homo sapiens
MAAGGGGGSSKASSSSASSAGALESSLDRKFQSVTNTMESIQGLSSWCIENKKHHSTIVYHWMKWLRRSAYPHRLNLFYLANDVIQNCKRKNAIIFRESFADVLPEAAALVKDPSVSKSVERIFKIWEDRNVYPEEMIVALREALSTTFKTQKQLKENLNKQPNKQWKKSQTSTNPKAALKSKIVAEFRSQALIEELLLYKRSEDQIELKEKQLSTMRVDVCSTETLKCLKDKTGGKKFSKEFEEASSKLEEFVNGLDKQVKNGPSLTEALENAGIFYEAQYKEVKVVANAYKTFANRVNNLKKKLDQLKSTLPDPEESPVPSPSMDAPSPTGSESPFQGMGGEESQSPTMESEKSATPEPVTDNRDVEDMELSDVEDDGSKIIVEDRKEKPAEKSAVSTSVPTKPTENISKASSCTPVPVTMTATPPLPKPVNTSLSPSPALALPNLANVDLAKISSILSSLTSVMKNTGVSPASRPSPGTPTSPSNLTSGLKTPAPATTTSHNPLANILSKVEITPESILSALSKTQTQSAPALQGLSSLLQSVTGNPVPASEAASQSTSASPANTTVSTIKGRNLPSSAQPFIPKSFNYSPNSSTSEVSSTSASKASIGQSPGLPSTTFKLPSNSLGFTATHNTSPAAPPTEVTICQSSEVSKPKLESESTSPSLEMKIHNFLKGNPGFSGLNLNIPILSSLGSSAPSESHPSDFQRGPTSTSIDNIDGTPVRDERSGTPTQDEMMDKPTSSSVDTMSLLSKIISPGSSTPSSTRSPPPGRDESYPRELSNSVSTYRPFGLGSESPYKQPSDGMERPSSLMDSSQEKFYPDTSFQEDEDYRDFEYSGPPPSAMMNLEKKPAKSILKSSKLSDTTEYQPILSSYSHRAQEFGVKSAFPPSVRALLDSSENCDRLSSSPGLFGAFSVRGNEPGSDRSPSPSKNDSFFTPDSNHNSLSQSTTGHLSLPQKQYPDSPHPVPHRSLFSPQNTLAAPTGHPPTSGVEKVLASTISTTSTIEFKNMLKNASRKPSDDKHFGQAPSKGTPSDGVSLSNLTQPSLTATDQQQQEEHYRIETRVSSSCLDLPDSTEEKGAPIETLGYHSASNRRMSGEPIQTVESIRVPGKGNRGHGREASRVGWFDLSTSGSSFDNGPSSASELASLGGGGSGGLTGFKTAPYKERAPQFQESVGSFRSNSFNSTFEHHLPPSPLEHGTPFQREPVGPSSAPPVPPKDHGGIFSRDAPTHLPSVDLSNPFTKEAALAHAAPPPPPGEHSGIPFPTPPPPPPPGEHSSSGGSGVPFSTPPPPPPPVDHSGVVPFPAPPLAEHGVAGAVAVFPKDHSSLLQGTLAEHFGVLPGPRDHGGPTQRDLNGPGLSRVRESLTLPSHSLEHLGPPHGGGGGGGSNSSSGPPLGPSHRDTISRSGIILRSPRPDFRPREPFLSRDPFHSLKRPRPPFARGPPFFAPKRPFFPPRY

SEQ ID NO: 7229 - protein, 1435 aa, Homo sapiens
MAAGGGGGSSKASSSSASSAGALESSLDRKFQSVTNTMESIQGLSSWCIENKKHHSTIVYHWMKWLRRSAYPHRLNLFYLANDVIQNCKRKNAIIFRESFADVLPEAAALVKDPSVSKSVERIFKIWEDRNVYPEEMIVALREALTSTNPKAALKSKIVAEFRSQALIEELLLYKRSEDQIELKEKQLSTMRVDVCSTETLKCLKDKTGGKKFSKEFEEASSKLEEFVNGLDKQVKNGPSLTEALENAGIFYEAQYKEVKVVANAYKTFANRVNNLKKKLDQLKSTLPDPEESPVPSPSMDAPSPTGSESPFQGMGGEESQSPTMESEKSATPEPVTDNRDVEDMELSDVEDDGSKIIVEDRKEKPAEKSAVSTSVPTKPTENISKASSCTPVPVTMTATPPLPKPVNTSLSPSPALALPNLANVDLAKISSILSSLTSVMKNTGVSPASRPSPGTPTSPSNLTSGLKTPAPATTTSHNPLANILSKVEITPESILSALSKTQTQSAPALQGLSSLLQSVTGNPVPASEAASQSTSASPANTTVSTIKGRNLPSSAQPFIPKSFNYSPNSSTSEVSSTSASKASIGQSPGLPSTTFKLPSNSLGFTATHNTSPAAPPTEVTICQSSEVSKPKLESESTSPSLEMKIHNFLKGNPGFSGLNLNIPILSSLGSSAPSESHPSDFQRGPTSTSIDNIDGTPVRDERSGTPTQDEMMDKPTSSSVDTMSLLSKIISPGSSTPSSTRSPPPGRDESYPRELSNSVSTYRPFGLGSESPYKQPSDGMERPSSLMDSSQEKFYPDTSFQEDEDYRDFEYSGPPPSAMMNLEKKPAKSILKSSKLSDTTEYQPILSSYSHRAQEFGVKSAFPPSVRALLDSSENCDRLSSSPGLFGAFSVRGNEPGSDRSPSPSKNDSFFTPDSNHNSLSQSTTGHLSLPQKQYPDSPHPVPHRSLFSPQNTLAAPTGHPPTSGVEKVLASTISTTSTIEFKNMLKNASRKPSDDKHFGQAPSKGTPSDGVSLSNLTQPSLTATDQQQQEEHYRIETRVSSSCLDLPDSTEEKGAPIETLGYHSASNRRMSGEPIQTVESIRVPGKGNRGHGREASRVGWFDLSTSGSSFDNGPSSASELASLGGGGSGGLTGFKTAPYKERAPQFQESVGSFRSNSFNSTFEHHLPPSPLEHGTPFQREPVGPSSAPPVPPKDHGGIFSRDAPTHLPSVDLSNPFTKEAALAHAAPPPPPGEHSGIPFPTPPPPPPPGEHSSSGGSGVPFSTPPPPPPPVDHSGVVPFPAPPLAEHGVAGAVAVFPKDHSSLLQGTLAEHFGVLPGPRDHGGPTQRDLNGPGLSRVRESLTLPSHSLEHLGPPHGGGGGGGSNSSSGPPLGPSHRDTISRSGIILRSPRPDFRPREPFLSRDPFHSLKRPRPPFARGPPFFAPKRPFFPPRY

SEQ ID NO: 7230 - protein, 3485 aa, Homo sapiens
MANRRVGRGCWEVSPTERRPPAGLRGPAAEEEASSPPVLSLSHFCRSPFLCFGDVLLGASRTLSLALDNPNEEVAEVKISHFPAADLGFSVSQRCFVLQPKEKIVISVNWTPLKEGRVREIMTFLVNDVLKHQAILLGNAEEQKKKKRSLWDTIKKKKISASTSHNRRVSNIQNVNKTFSVSQKVDRVRSPLQACENLAMNEGGPPTENNSLILEENKIPISPISPAFNECHGATCLPLSVRRSTTYSSLHASENRELLNVHSANVSKVSFNEKAVTETSFNSVNVNGQRGENSKLSLTPNCSSTLNITQSQIHFLSPDSFVNNSHGANNELELVTCLSSDMFMKDNSQPVHLESTIAHEIYQKILSPDSFIKDNYGLNQDLESESVNPILSPNQFLKDNMAYMCTSQQTCKVPLSNENSQVPQSPEDWRKSEVSPRIPECQGSKSPKAIFEELVEMKSNYYSFIKQNNPKFSAVQDISSHSHNKQPKRRPILSATVTKRKATCTRENQTEINKPKAKRCLNSAVGEHEKVINNQKEKEDFHSYLPIIDPILSKSKSYKNEVTPSSTTASVARKRKSDGSMEDANVRVAITEHTEVREIKRIHFSPSEPKTSAVKKTKNVTTPISKRISNREKLNLKKKTDLSIFRTPISKTNKRTKPIIAVAQSSLTFIKPLKTGNNLIVFLDIPRHPMPFAAKNMFYDERWKEKQEQGFTWWLNFILTPDDFTVKTNISEVNAATLLLGIENQHKISVPRAPTKEEMSLRAYTARCRLNRLRRAACRLFTSEKMVKAIKKLEIEIEARRLIVRKDRHLWKDVGERQKVLNWLLSYNPLWLRIGLETTYGELISLEDNSDVTGLAMFILNRLLWNPDIAAEYRHPTVPHLYRDGHEEALSKFTLKKLLLLVCFLDYAKISRLIDHDPCLFCKDAEFKASKEILLAFSRDFLSGEGDLSRHLGLLGLPVNHVQTPFDEFDFAVTNLAVDLQCGVRLVRTMELLTQNWDLSKKLRIPAISRLQKMHNVDIVLQVLKSRGIELSDEHGNTILSKDIVDRHREKTLRLLWKIAFAFQVDISLNLDQLKEEIAFLKHTKSIKKTISLLSCHSDDLINKKKGKRDSGSFEQYSENIKLLMDWVNAVCAFYNKKVENFTVSFSDGRVLCYLIHHYHPCYVPFDAICQRTTQTVECTQTGSVVLNSSSESDDSSLDMSLKAFDHENTSELYKELLENEKKNFHLVRSAVRDLGGIPAMINHSDMSNTIPDEKVVITYLSFLCARLLDLRKEIRAARLIQTTWRKYKLKTDLKRHQEREKAARIIQLAVINFLAKQRLRKRVNAALVIQKYWRRVLAQRKLLMLKKEKLEKVQNKAASLIQGYWRRYSTRQRFLKLKYYSIILQSRIRMIIAVTSYKRYLWATVTIQRHWRAYLRRKQDQQRYEMLKSSTLIIQSMFRKWKQRKMQSQVKATVILQRAFREWHLRKQAKEENSAIIIQSWYRMHKELRKYIYIRSCVVIIQKRFRCFQAQKLYKRRKESILTIQKYYKAYLKGKIERTNYLQKRAAAIQLQAAFRRLKAHNLCRQIRAACVIQSYWRMRQDRVRFLNLKKTIIKFQAHVRKHQQRQKYKKMKKAAVIIQTHFRAYIFAMKVLASYQKTRSAVIVLQSAYRGMQARKMYIHILTSVIKIQSYYRAYVSKKEFLSLKNATIKLQSTVKMKQTRKQYLHLRAAALFIQQCYRSKKIAAQKREEYMQMRESCIKLQAFVRGYLVRKQMRLQRKAVISLQSYFRMRKARQYYLKMYKAIIVIQNYYHAYKAQVNQRKNFLQVKKAATCLQAAYRGYKVRQLIKQQSIAALKIQSAFRGYNKRVKYQSVLQSIIKIQRWYRAYKTLHDTRTHFLKTKAAVISLQSAYRGWKVRKQIRREHQAALKIQSAFRMAKAQKQFRLFKTAALVIQQNFRAWTAGRKQCMEYIELRHAVLVLQSMWKGKTLRRQLQRQHKCAIIIQSYYRMHVQQKKWKIMKKAALLIQKYYRAYSIGREQNHLYLKTKAAVVTLQSAYRGMKVRKRIKDCNKAAVTIQSKYRAYKTKKKYATYRASAIIIQRWYRGIKITNHQHKEYLNLKKTAIKIQSVYRGIRVRRHIQHMHRAATFIKAMFKMHQSRISYHTMRKAAIVIQVRCRAYYQGKMQREKYLTILKAVKVLQASFRGVRVRRTLRKMQTAATLIQSNYRRYRQQTYFNKLKKITKTVQQRYWAMKERNIQFQRYNKLRHSVIYIQAIFRGKKARRHLKMMHIAATLIQRRFRTLMMRRRFLSLKKTAILIQRKYRAHLCTKHHLQFLQVQNAVIKIQSSYRRWMIRKRMREMHRAATFIQSTFRMHRLHMRYQALKQASVVIQQQYQANRAAKLQRQHYLRQRHSAVILQAAFRGMKTRRHLKSMHSSATLIQSRFRSLLVRRRFISLKKATIFVQRKYRATICAKHKLYQFLHLRKAAITIQSSYRRLMVKKKLQEMQRAAVLIQATFRMYRTYITFQTWKHASILIQQHYRTYRAAKLQRENYIRQWHSAVVIQAAYKGMKARQLLREKHKASIVIQSTYRMYRQYCFYQKLQWATKIIQEKYRANKKKQKVFQHNELKKETCVQAGFQDMNIKKQIQEQHQAAIIIQKHCKAFKIRKHYLHLRATVVSIQRRYRKLTAVRTQAVICIQSYYRGFKVRKDIQNMHRAATLIQSFYRMHRAKVDYETKKTAIVVIQNYYRLYVRVKTERKNFLAVQKSVRTIQAAFRGMKVRQKLKNVSEEKMAAIVNQSALCCYRSKTQYEAVQSEGVMIQEWYKASGLACSQEAEYHSQSRAAVTIQKAFCRMVTRKLETQKCAALRIQFFLQMAVYRRRFVQQKRAAITLQHYFRTWQTRKQFLLYRKAAVVLQNHYRAFLSAKHQRQVYLQIRSSVIIIQARSKGFIQKRKFQEIKNSTIKIQAMWRRYRAKKYLCKVKAACKIQAWYRCWRAHKEYLAILKAVKIIQGCFYTKLERTRFLNVRASAIIIQRKWRAILPAKIAHEHFLMIKRHRAACLIQAHYRGYKGRQVFLRQKSAALIIQKYIRAREAGKHERIKYIEFKKSTVILQALVRGWLVRKRFLEQRAKIRLLHFTAAAYYHLNAVRIQRAYKLYLAVKNANKQVNSVICIQRWFRARLQEKRFIQKYHSIKKIEHEGQECLSQRNRAASVIQKAVRHFLLRKKQEKFTSGIIKIQALWRGYSWRKKNDCTKIKAIRLSLQVVNREIREENKLYKRTALALHYLLTYKHLSAILEALKHLEVVTRLSPLCCENMAQSGAISKIFVLIRSCNRSIPCMEVIRYAVQVLLNVSKYEKTTSAVYDVENCIDILLELLQIYREKPGNKVADKGGSIFTKTCCLLAILLKTTNRASDVRSRSKVVDRIYSLYKLTAHKHKMNTERILYKQKKNSSISIPFIPETPVRTRIVSRLKPDWVLRRDNMEEITNPLQAIQMVMDTLGIPY

SEQ ID NO: 7231 - protein, 929 aa, Homo sapiens
MLGPHLPPPPLAPSEGRPTPCAFQIPDGSYRCLALEAEESSGEEGLQGEVGPTDLEEDEGVSRSGDDSACRVTQGTPQLPKALGIQPPSCSREERGASQHDDRASQDWDVVKAGQMMTASPSPGPGPRVAQKPALGRSTSLTEKDLKEAKARSQQIAAQLTTPPSSNSRGVQLFNRRRQRVNEFTLESHGQRGQKPSQESLRVLPSSLPGHAPGLSLSSTSLPEPGPPRHPSPQSPDRGVPGHSMEGYSEEASLLRHLEKVASEEEEVPLVVYLKENAALLTANGLHLSQNREAQQSSPAPPPAEVHSPAADVNQNLASPSATLTTPTSNSSHNPPATDVNQNPPATVVPQSLPLSSIQQNSSEAQLPSNGTGPASKPSTLCADGQPQAPAEEVRCSTLLIDKVSTPATTTSTFSREATLIPSSRPPASDFMSSSLLIDIQPNTLVVSADQEMSGRAAATTPTKVYSEVHFTLAKPPSVVNRTARPFGIQAPGGTSQMERSPMLERRHFGEKAPAPQPPSLPDRSPRPQRHIMSRSPMVERRMMGQRSPASERRPLGNFTAPPTYTETLSTAPLASWVRSPPSYSVLYPSSDPKSSHLKGQAVPASKTGILEESMARRGSRKSMFTFVEKPKVTPNPDLLDLVQTADEKRRQRDQGEVGVEEEPFALGAEASNFQQEPAPRDRASPAAAEEVVPEWASCLKSPRIQAKPKPKPNQNLSEASGKGAELYARRQSRMEKYVIESSSHTPELARCPSPTMSLPSSWKYPTNAPGAFRVASRSPARTPPASLYHGYLPENGVLRPEPTKQPPYQLRPSLFVLSPIKEPAKVSPRAASPAKPSSLDLVPNLPKGALPPSPALPRPSRSSPGLYTSPGQDSLQPTAVSPPYGGDISPVSPSRAWSPRAKQAPRPSFSTRNAGIEAQVWKPSFCFK

SEQ ID NO: 7232 - protein, 903 aa, Homo sapiens
MEGYSEEASLLRHLEKVASEEEEVPLVVYLKENAALLTANGLHLSQNREAQQSSPAPPPAEVHSPAADVNQNLASPSATLTTPTSNSSHNPPATDVNQNPPATVVPQSLPLSSIQQNSSEAQLPSNGTGPASKPSTLCADGQPQAPAEEVRCSTLLIDKVSTPATTTSTFSREATLIPSSRPPASDFMSSSLLIDIQPNTLVVSADQEMSGRAAATTPTKVYSEVHFTLAKPPSVVNRTARPFGIQAPGGTSQMERSPMLERRHFGEKAPAPQPPSLPDRSPRPQRHIMSRSPMVERRMMGQRSPASERRPLGNFTAPPTYTETLSTAPLASWVRSPPSYSVLYPSSDPKSSHLKGQAVPASKTGILEESMARRGSRKSMFTFVEKPKVTPNPDLLDLVQTADEKRRQRDQGEVGVEEEPFALGAEASNFQQEPAPRDRASPAAAEEVVPEWASCLKSPRIQAKPKPKPNQNLSEASGKGAELYARRQSRMEKYVIESSSHTPELARCPSPTMSLPSSWKYPTNAPGAFRVASRSPARTPPASLYHGYLPENGVLRPEPTKQPPYQLRPSLFVLSPIKEPAKVSPRAASPAKPSSLDLVPNLPKGALPPSPALPRPSRSSPGLYTSPGQDSLQPTAVSPPYGGDISPVSPSRAWSPRAKQAPRPSFSTRNAGIEAQDRRESLPTSPPWTPGASRPPSSLDGWVSPGPWEPGRGSSMSSPPPLPPPPPMSPSWSERSVSPLRPETEARPPSRQLQALLARNIINAARRKSASPRSAGAENPRPFSPPRAPPPPPPPPPPPPRMRSPQPARPGSAAVPGAAFAPIPRSPLPAGPSSCTSPRSPLPAPPRPFLYRRSPTDSDVSLDSEDSGAKSPGILGYNICPRGWNGSLRLKRGSLPAEASCTT

SEQ ID NO: 7233 - protein, 979 aa, Homo sapiens [sequence omitted]

SEQ ID NO: 7234 - protein, 1033 aa, Homo sapiens
MAESDSTDFDLLWYLENLSDKEFQSFKKYLARKILDFKLPQFPLIQMTKEELANVLPISYEGQYIWNMLFSIFSMMRKEDLCRKIIGRRNRNQEACKAVMRRKFMLQWESHTFGKFHYKFFRDVSSDVFYILQLAYDSTSYYSANNLNVFLMGERASGKTIVINLAVLRWIKGEMWQNMISYVVHLTSHEINQMTNSSLAELIAKDWPDGQAPIADILSDPKKLLFILEDLDNIRFELNVNESALCSNSTQKVPIPVLLVSLLKRKMAPGCWFLISSRPTRGNNVKTFLKEVDCCTTLQLSNGKREIYFNSFFKDRQRASAALQLVHEDEILVGLCRVAILCWITCTVLKRQMDKGRDFQLCCQTPTDLHAHFLADALTSEAGLTANQYHLGLLKRLCLLAAGGLFLSTLNFSGEDLRCVGFTEADVSVLQAANILLPSNTHKDRYKFIHLNVQEFCTAIAFLMAVPNYLIPSGSREYKEKREQYSDFNQVFTFIFGLLNANRRKILETSFGYQLPMVDSFKWYSVGYMKHLDRDPEKLTHHMPLFYCLYENREEEFVKTIVDALMEVTVYLQSDKDMMVSLYCLDYCCHLRTLKLSVQRIFQNKEPLIRPTASQMKSLVYWREICSLFYTMESLRELHIFDNDLNGISERILSKALEHSSCKLRTLKLSYVSTASGFEDLLKALARNRSLTYLSINCTSISLNMFSLLHDILHEPTCQISHLSLMKCDLRASECEEIASLLISGGSLRKLTLSSNPLRSDGMNILCDALLHPNCTLISLVLVFCCLTENCCSALGRVLLFSPTLRQLDLCVNRLKNYGVLHVTFPLLFPTCQLEELHLSGCFFSSDICQYIAIVIATNEKLRSLEIGSNKIEDAGMQLLCGGLRHPNCMLVNIGLEECMLTSACCRSLASVLTTNKTLERLNLLQNHLGNDGVAKLLESLISPDCVLKVVGLPLTGLNTQTQQLLMTVKERKPSLIFLSETWSLKEGREIGVTPASQPGSIIPNSNLDYMFFKFPRMSAAMRTSNTASRQPL

SEQ ID NO: 7235 - protein, 569 aa, Homo sapiens
MRDNTSPISVILVSSGSRGNKLLFRYPFQRSQEHPASQTSKPRSRYAASNTGDHADEQDGDSRFSDVILATILATKSEMCGQKFELKIDNVRFVGHPTLLQHALGQISKTDPSPKREAPTMILFNVVFALRANADPSVINCLHNLSRRIATVLQHEERRCQYLTREAKLILALQDEVSAMADGNEGPQSPFHHILPKCKLARDLKEAYDSLCTSGVVRLHINSWLEVSFCLPHKIHYAASSLIPPEAIERSLKAIRPYHALLLLSDEKSLLGELPIDCSPALVRVIKTTSAVKNLQQLAQDADLALLQVFQLAAHLVYWGKAIIIYPLCENNVYMLSPNASVCLYSPLAEQFSHQFPSHDLPSVLAKFSLPVSLSEFRNPLAPAVQETQLIQMVVWMLQRRLLIQLHTYVCLMASPSEEEPRPREDDVPFTARVGGRSLSTPNALSFGSPTSSDDMTLTSPSMDNSSAELLPSGDSPLNQRMTENLLASLSEHERAAILSVPAAQNPEDLRMFARLLHYFRGRHHLEEIMYNENTRRSQLLMLFDKFRSVLVVTTHEDPVIAVFQALLP

SEQ ID NO: 7236 - protein, 958 aa, Homo sapiens
MSSCRSLCCGDISQSAVLFLCQGTLAMLDWQNGSMGRSGEALLLDTAHVLFTLSSQIKEPTLEMFLSRILASWTNSAIQVLESSSPSLTDSLNGNSSIVGRLLEYVYTHWEHPLDALRHQTKIMFKNLLQMHRLTVEGADFVPDPFFVELTESLLRLEWHIKGKYTCLGCLVECIGVEHILAIDKTIPSQILEVMGDQSLVPYASDLLETMFRNHKSHLKSQTAESSWIDQWHETWVSPLLFILCEGNLDQKSYVIDYYLPKLLSYSPESLQYMVKILQTSIDAKTGQEQSFPSLGSCNSRGALGALMACLRIARAHGHLQSATDTWENLVSDARIKQGLIHQHCQVRIDTLGLLCESNRSTEIVSMEEMQWIQFFITYNLNSQSPGVRQQICSLLKKLFCRIQESSQVLYKLEQSKSKREPENELTKQHPSVSLQQYKNFMSSICNSLFEALFPGSSYSTRFSALTILGSIAEVFHVPEGRIYTVYQLSHDIDVGRFQTLMECFTSTFEDVKILAFDLLMKLSKTAVHFQDSGKLQGLFQAALELSTSTKPYDCVTASYLLNFLIWQDALPSSLSAYLTQQVACDNGDRPAAVVERNTLMVIKCLMENLEEEVSQAENSLLQAAAAFPMYGRVHCITGALQKLSLNSLQLVSEWRPVVEKLLLMSYRLSTVVSPVIQSSSPEGLIPMDTDSESASRLQMILNEIQPRDTNDYFNQAKILKEHDSFDMKDLNASVVNIDTSTEIKGKEVKTCDVTAQMVLVCCWRSMKEVALLLGMLCQLLPMQPVPESSDGLLTVEQVKEIGDYFKQHLLQSRHRGAFELAYTGFVKLTEVLNRCPNVSLQKLPEQWLWSVLEEIKCSDPSSKLCATRRSAGIPFYIQALLASEPKKGRMDLLKITMKELISLAGPTDDIQSTVPQVHALNILRALFRDTRLGENIIPYVADGAKAAILGFTSPVWA

SEQ ID NO: 7237 - protein, 1953 aa, Homo sapiens
MGVKKKKEMQVAALTICHQDLETLKSFADVEGKNLASLLLHCVQLTDGVSQIHYIKQIVPLLEKADKNGMCDPTIQSCLDILAGIYLSLSLKNPLKKVLASSLNSLPDFFLPEAMHRFTSRLQEELNTTDLYSYRKVTDNISSCMENFNLGRASVNNLLKNVLHFLQKSLIEILEENRKCAGNHIIQTQLMNDLLVGIRVSMMLVQKVQDFQGNLWKTSDSPIWQNMCGLLSIFTKVLSDDDLLQTVQSTSGLAIILFIKTMFHPSEKIPHLISSVLLRSVDCTSVPEWFMSSCRSLCCGDISQSAVLFLCQGTLAMLDWQNGSMGRSGEALLLDTAHVLFTLSSQIKEPTLEMFLSRILASWTNSAIQVLESSSPSLTDSLNGNSSIVGRLLEYVYTHWEHPLDALRHQTKIMFKNLLQMHRLTVEGADFVPDPFFVELTESLLRLEWHIKGKYTCLGCLVECIGVEHILAIDKTIPSQILEVMGDQSLVPYASDLLETMFRNHKSHLKSQTAESSWIDQWHETWVSPLLFILCEGNLDQKSYVIDYYLPKLLSYSPESLQYMVKILQTSIDAKTGQEQSFPSLGSCNSRGALGALMACLRIARAHGHLQSATDTWENLVSDARIKQGLIHQHCQVRIDTLGLLCESNRSTEIVSMEEMQWIQFFITYNLNSQSPGVRQQICSLLKKLFCRIQESSQVLYKLEQSKSKREPENELTKQHPSVSLQQYKNFMSSICNSLFEALFPGSSYSTRFSALTILGSIAEVFHVPEGRIYTVYQLSHDIDVGRFQTLMECFTSTFEDVKILAFDLLMKLSKTAVHFQDSGKLQGLFQAALELSTSTKPYDCVTASYLLNFLIWQDALPSSLSAYLTQQVACDNGDRPAAVVERNTLMVIKCLMENLEEEVSQAENSLLQAAAAFPMYGRVHCITGALQKLSLNSLQLVSEWRPVVEKLLLMSYRLSTVVSPVIQSSSPEGLIPMDTDSESASRLQMILNEIQPRDTNDYFNQAKILKEHDSFDMKDLNASVVNIDTSTEIKGKEVKTCDVTAQMVLVCCWRSMKEVALLLGMLCQLLPMQPVPESSDGLLTVEQVKEIGDYFKQHLLQSRHRGAFELAYTGFVKLTEVLNRCPNVSLQKLPEQWLWSVLEEIKCSDPSSKLCATRRSAGIPFYIQALLASEPKKGRMDLLKITMKELISLAGPTDDIQSTVPQVHALNILRALFRDTRLGENIIPYVADGAKAAILGFTSPVWAVRNSSTLLFSALITRIFGVKRAKDEHSKTNRMTGREFFSRFPELYPFLLKQLETVANTVDSDMGEPNRHPSMFLLLLVLERLYASPMDGTSSALSMGPFVPFIMRCGHSPVYHSREMAARALVPFVMIDHIPNTIRTLLSTLPSCTDQCFRQNHIHGTLLQVFHLLQAYSDSKHGTNSDFQHELTDITVCTKAKLWLAKRQNPCLVTRAVYIDILFLLTCCLNRSAKDNQPVLESLGFWEEVRGIISGSELITGFPWAFKVPGLPQYLQSLTRLAIAAVWAAAAKSGERETNVPISFSQLLESAFPEVRSLTLEALLEKFLAAASGLGEKGVPPLLCNMGEKFLLLAMKENHPECFCKILKILHCMDPGEWLPQTEHCVHLTPKEFLIWTMDIASNERSEIQSVALRLASKVISHHMQTCVENRELIAAELKQWVQLVILSCEDHLPTESRLAVVEVLTSTTPLFLTNPHPILELQDTLALWKCVLTLLQSEEQAVRDAATETVTTAMSQENTCQSTEFAFCQVDASIALALALAVLCDLLQQWDQLAPGLPILLGWLLGESDDLVACVESMHQVEEDYLFEKAEVNFWAETLIFVKYLCKHLFCLLSKSGWRPPSPEMLCHLQRMVSEQCHLLSQFFRELPPAAEFVKTVEFTRLRIQEERTLACLRLLAFLEGKEGEDTLVLSVWDSYAESRQLTLPRTEAAC

SEQ ID NO: 7238 - protein, 353 aa, Homo sapiens
DAWAAGVGGPPKMGNTTSCCVSSSPKLRRNAHSRLESYRPDTDLSREDTGCNLQHISDRENIDDLNMEFNPSDHPRASTIFLSKSQTDVREKRKSLFINHHPPGQIARKYSSCSTIFLDDSTVSQPNLKYTIKCVALAIYYHIKNRDPDGRMLLDIFDENLHPLSKSEVPPDYDKHNPEQKQIYRFVRTLFSAAQLTAECAIVTLVYLERLLTYAEIDICPANWKRIVLGAILLASKVWDDQAVWNVDYCQILKDITVEDMNELERQFLELLQFNINVPSSVYAKYYFDLRSLAEANNLSFPLEPLSRERAHKLEAISRLCEDKYKDLRRSARKRSASADNLTLPRWSPAIIS

SEQ ID NO: 7239 - protein, 316 aa, Homo sapiens [sequence omitted]

SEQ ID NO: 7240 - protein, 287 aa, Homo sapiens
MEFNPSDHPRASTIFLSKSQTDVREKRKSLFINHHPPGQIARKYSSCSTIFLDDSTVSQPNLKYTIKCVALAIYYHIKNRDPDGRMLLDIFDENLHPLSKSEVPPDYDKHNPEQKQIYRFVRTLFSAAQLTAECAVVTLVYLERLLTYAEIDICPANWKRIVLGAILLASKVWDDQAVWNVDYCQILKDITVEDMSELERQFLELLQFNINVPSSVYAKYYFDLRSLAEANNLSFPLEPLSRERAHKLEAISRLCEDKYKDLRRSARKRSASADNLTLPRWSPAIIS

SEQ ID NO: 7241 - protein, 122 aa, Homo sapiens
MPNTTVYRRVDSVFSVRTGGWISLSPLGGIRSKGAIAPPEVTVPAQNTSLGPKKSFFFQALGITTKISRVTIGILSDVQLMRTGDKLEASEATLLNMLNTAQLFSFGLIIKRVFNNSSISHP

SEQ ID NO: 7242 - protein, 1704 aa, Homo sapiens [sequence omitted]

SEQ ID NO: 7243 - protein, 1704 aa, Homo sapiens
MSSVSEVNVDIKDFLMSINLEQYLLHFHESGFTTVKDCAAINDSLLQKIGISPTGHRRRILKQLQIILSKMQDIPIYANVHKTKKNDDPSKDYHVPSSDQNICIELSNSGSVQTSSPPQLETVRKNLEDSDASVERSQYPQSDDKLSPPKRDFPTAEEPHLNLGSLNDSLFGSDNIKIESLITKKTVDHTVEEQQTEKVKLITENLSKLPNADSECLSFVGCSTSGTNSGNGTNGLLEGSPPSPFFKFQGEMIVNDLYVPSSPILAPVRSRSKLVSRPSRSFLLRHRPVPEIPGSTKGVSGSYFRERRNVATSTEKSVAWQNSNEENSSSIFPYGETFLFQRLENSKKRSIKNEFLTQGEALKGEAATATNSFIIKSSIYDNRKEKISEDKVEDIWIPREDKNNFLIDTASESEYSTVEECFQSLRRKNSKASKSRTQKALILDSVNRHSYPLSSTSGNADSSAVSSQAISPYACFYGASAKKVKSGWLDKLSPQGKRMFQKRWVKFDGLSISYYNNEKEMYSKGIIPLSAISTVRVQGDNKFEVVTTQRTFVFRVEKEEERNDWISILLNALKSQSLTSQSQAVVTPEKCGYLELRGYKAKIFTVLSGNSVWLCKNEQDFKSGLGITIIPMNVANVKQVDRTVKQSFEIITPYRSFSFTAETEKEKQDWIEAVQQSIAETLSDYEVAEKIWFNESNRSCADCKAPDPDWASINLCVVICKKCAGQHRSLGPKDSKVRSLKMDASIWSNELIELFIVIGNKRANDFWAGNLQKDEELHMDSPVEKRKNFITQKYKEGKFRKTLLASLTKEELNKALCAAVVKPDVLETMALLFSGADVMCATGDPVHSTPYLLAKKAGQSLQMEFLYHNKFSDFPQHDIHSEGVLSQESSQSTFLCDFLYQAPSAASKLSSEKKLLEETNKKWCVLEGGFLSYYENDKSTTPNGTININEVICLAIHKEDFYLNTGPIFIFEIYLPSERVFLFGAETSQAQRKWTEAIAKHFVPLFAENLTEADYDLIGQLFYKDCHALDQWRKGWFAMDKSSLHFCLQMQEVQGDRMHLRRLQELTISTMVQNGEKLDVLLLVEKGRTLYIHGHTKLDFTVWHTAIEKAAGTDGNALQDQQLSKNDVPIIVNSCIAFVTQYGLGCKYIYQKNGDPLHISELLESFKKDARSFKLRAGKHQLEDVTAVLKSFLSDIDDALLTKELYPYWISALDTQDDKERIKKYGAFIRSLPGVNRATLAAIIEHLYRVQKCSEINHMNAHNLALVFSSCLFQTKGQTSEEVNVIEDLINNYVEIFEVKEDQVKQMDIENSFITKWKDTQVSQAGDLLIEVYVERKEPDCSIIIRISPVMEAEELTNDILAIKNIIPTKGDIWATFEVIENEELERPLHYKENVLEQVLRWSSLAEPGSAYLVVKRFLTADTIKHCSDRSTLGSIKEGILKIKEEPSKILSGNKFQDRYFVLRDGFLFLYKDVKSSKHDKMFSLSSMKFYRGVKKKMKPPTSWGLTAYSEKHHWHLCCDSSQTQTEWMTSIFIAQHEYDIWPPAGKERKRSITKNPKIGGLPLIPIQHEGNATLARKNIESARAELERLRLSEKCDKESVDSSLKERASMVAHCLEHKDDKLRNRPRKHRSFNCLEDTEPEAPLGQPKGHKGLKTLRKTEDRNSKATLDSDHKLPSRVIEELNVVLQRSRTLPKELQDEQILK

SEQ ID NO: 7244 - protein, 893 aa, Homo sapiens
MTAEETVNVKEVEIIKLILDFLNSKKLHISMLALEKESGVINGLFSDDMLFLRFRYIILKQKFLEALCVNNAMSAEDEPQHLEFTMQEAVQCLHALEEYCPSKDDYSKLCLLLTLPRLTNHAEFKDWNPSTARVHCFEEACVMVAEFIPADRKLSEAGFKASNNRLFQLVMKGLLYECCVEFCQSKATGEEITESEVLLGIDLLCGNGCDDLDLSLLSWLQNLPSSVFSCAFEQKMLNIHVDKLLKPTKAAYADLLTPLISKLSPYPSSQMRRPQSADAYMTRSLNPALDGLTCGLTSHDKRISDLGNKTSPMSHSFANFHYPGVQNLSRSLMLENTECHCIYEESPERDTPVDAQRPIGSEILGQSSVSEKEPANGAQNPGPAKQEKNELRDSTEQFQEYYRQRLRYQQHLEQKEQQRQIYQQMLLEGGVNQEDGPDQQQNLTEQFLNRSIQKLGELNIGMDGLGNEVSALNQQCNGSKGNGSNGSSVTSFTTPPQDSSQRLTHDASNIHTSTPRNPGSTNHIPFLEESPCGSQISSEHSVIKPPLGDSPGSLSRSKGEEDDKSKKQFVCINILEDTQAVRAVAFHPAGGLYAVGSNSKTLRVCAYPDVIDPSAHETPKQPVVRFKRNKHHKGSIYCVAWSPCGQLLATGSNDKYVKVLPFNAETCNATVSGPDLEFSMHDGTIRDLAFMEGPESGGAILISAGAGDCNIYTTDCQRGQGLHALSGHTGHILALYTWSGWMIASGSQDKTVRFWDLRVPSCVRVVGTTFHGTGSAVASVAVDPSGRLLATGQEDSSCMLYDIRGGRMVQSYHPHSSDVRSVRFSPGAHYLLTGSYDMKIKVTDLQGDLTKQLPIMVVGEHKDKVIQCRWHTQDLSFLSSSADRTVTLWTYNG

SEQ ID NO: 7245 - protein, 920 aa, Homo sapiens
MTAEETVNVKEVEIIKLILDFLNSKKLHISMLALEKESGVINGLFSDDMLFLRQLILDGQWDEVLQFIQPLECMEKFDKKRFRYIILKQKFLEALCVNNAMSAEDEPQHLEFTMQEAVQCLHALEEYCPSKDDYSKLCLLLTLPRLTNHAEFKDWNPSTARVHCFEEACVMVAEFIPADRKLSEAGFKASNNRLFQLVMKGLLYECCVEFCQSKATGEEITESEVLLGIDLLCGNGCDDLDLSLLSWLQNLPSSVFSCAFEQKMLNIHVDKLLKPTKAAYADLLTPLISKLSPYPSSPMRRPQSADAYMTRSLNPALDGLTCGLTSHDKRISDLGNKTSPMSHSFANFHYPGVQNLSRSLMLENTECHSIYEESPERSDTPVDAQRPIGSEILGQSSVSEKEPANGAQNPGPAKQEKNELRDSTEQFQEYYRQRLRYQQHLEQKEQQRQIYQQMLLEGGVNQEDGPDQQQNLTEQFLNRSIQKLGELNIGMDGLGNEVSALNQQCNGSKGNGSNGSSVTSFTTPPQDSSQRLTHDASNIHTSTPRNPGSTNHIPFLEESPCGSQISSEHSVIKPPLGDSPGSLSRSKGEEDDKSKKQFVCINILEDTQAVRAVAFHPAGGLYAVGSNSKTLRVCAYPDVIDPSAHETPKQPVVRFKRNKHHKGSIYCVAWSPCGQLLATGSNDKYVKVLPFNAETCNATGPDLEFSMHDGTIRDLAFMEGPESGGAILISAGAGDCNIYTTDCQRGQGLHALSGHTGHILALYTWSGWMIASGSQDKTVGFWDLRVPSCARVVGTTFHGTGSAVASVAVDPSGRLLATGQEDSSCMLYDIRGGRMVQSYHPHSSDVRSVRFSPGAHYLLTGSYDMKIKVTDLQGDLTKQLPIMVVGEHKDKVIQCRWHTQDLSFLSSSADRTVTLWTYNG

SEQ ID NO: 7246 - protein, 3683 aa, Homo sapiens
MLMSGKKDRNNTEVERFSEVFCSVQRLSQAFIDLHSAGNMLFRTWIAMAYCSPKQGVSLQMDFGLDLVTELKEGGDVTELLAALCRQMEHFLDSWKRFVTQKRMEHFYLNFYTAEQLVYLSTELRKQPPSDAALTMLSFIKSNCTLRDVLRASVGCGSEAARYRMRRVMEELPLMLLSEFSLVDKLRIIMEQSMRCLPAFLPDCLDLETLGHCLAHLAGMGGSPVERCLPRGLQVGQPNLVVCGHSEVLPAALAVYMQTPSQPLPTYDEVLLCTPATTFEEVALLLRRCLTLGSLGHKVYSLLFADQLSYEVARQAEELFHNLCTQQHREDYQLVMVCDGDWEHCYLPSAFSQHKVFVTPQAPLEAIQAYLAGHYRVPKQTLSAAAVFNDRLCVGIVASERAGVGKSLYVKRLHDKMKMQLNVKNVPLKTIRLIDPQVDESRVLGALLPFLDAQYQKVPVLFHLDVTSSVQTGIWVFLFKLLILQYLMDINGKMWLRNPCHLYIVEILERRTSVPSRSSSALRTRVPQFSFLDIFPKVTCRPPKEVIDMELSALRSDTEPGMDLWEFCSETFQRPYQYLRRFNQNQDLDTFQYQEGSVEGTPEECLQHFLFHCGVINPSWSELRNFARFLNYQLRDCEASLFCNPSFIGDTLRGFKKFVVTFMIFMARDFATPSLHTSDQSPGKHMVTMDGVREEDLAPFSLRKRWESEPHPYVFFNDDHTTMTFIGFHLQPNINGSVDAISHLTGKVIKRDVMTRDLYQGLLLQRVPFNVDFDKLPRHKKLERLCLTLGIPQATDPDKTYELTTDNMLKILAIEMRFRCGIPVIIMGETGCGKTRLIKFLSDLRRGGTNADTIKLVKVHGGTTADMIYSRVREAENVAFANKDQHQLDTILFFDEANTTEAISCIKEVLCDHMVDGQPLAEDSGLHIIAACNPYRKHSEEMICRLESAGLGYRVSMEETADRLGSIPLRQLVYRVHALPPSLIPLVWDFGQLSDVAEKLYIQQIVQRLVESISLDENGTRVITEVLCASQGFMRKTEDECSFVSLRDVERCVKVFRWFHEHSAMLLAQLNAFLSKSSVSKNHTERDPVLWSLMLAIGVCYHASLEKKDSYRKAIARFFPKPYDDSRLLLDEITRAQDLFLDGVPLRKTIAKNLALKENVFMMVVCIELKIPLFLVGKPGSSKSLAKTIVADAMQGPAAYSDLFRSLKQVHLVSFQCSPHSTPQGIISTFRQCARFQQGKDLQQYVSVVVLDEVGLAEDSPKMPLKTLHPLLEDGCIEDDPAPHKKVGFVGISNWALDPAKMNRGIFVSRGSPNETELIESAKGICSSDILVQDRVQGYFASFAKAYETVCKRQDKEFFGLRDYYSLIKMVFAAAKASNRKPSPQDIAQAVLRNFSGKDDIQALDIFLANLPEAKCSEEVSPMQLIKQNIFGPSQKVPGGEQEDAESRYLLVLTKNYVALQILQQTFFEGDQQPEIIFGSGFPKDQEYTQLCRNINRVKICMETGKMVLLLNLQNLYESLYDALNQYYVHLGGQKYVDLGLGTHRVKCRVHPNFRLIVIEEKDVVYKHFPIPLINRLEKHYLDINTVLEKWQKSIVEELCAWVEKFINVKAHHFQKRHKYSPSDVFIGYHSDACASVVLQVIERQGPRALTEELHQKVSEEAKSILLNCATPDAVVRLSAYSLGGFAAEWLSQEYFHRQRHNSFADFLQAHLHTADLERHAIFTEITTFSRLLTSHDCEILESEVTGRAPKPTLLWLQQFDTEYSFLKEVRNCLTNTAKCKILIFQTDFEDGIRSAQLIASAKYVFSIFLRNYVKNPKLRGLNLNKKLALAIGHLKGMALRTELFVEMERYSVINEINKIRENEDRIFVYFITKLSRVGRGTAYVGFHGGLWQSVHIDDLRRSTLMVSDVTRLQHVTISQLFAPGDLPERARGHICRTDWWLIIEHQGRAVGLEHRAEDGHEEAMETEASTSGEVAEVAEEAMETESSEKVGKETSELGGSDVSILDTTRLLRSCVQSAVGMLRDQNESCTRNMRRVVLLLGLLNEDDACHASFLRVSKMRLSVFLKKQEESQFHPLEWLAREACNQDALQEAGTFRHTLWKRVQGAVTPLLASMISFIDRDGNLELLTRPDTPPWARDLWMFIFSDTMLLNIPLVMNNERHKGEMAYIVVQNHMNLSENASNNVPFSWKIKDYLEELWVQAQYITDAEGLPKKFVDIFQQTPLGRFLAQLHGEPQQELLQCYLKDFILLTMRVSTEEELKFLQMALWSCTRKLKAASEAPEEEVSLPWVHLAYQRFRSRLQNFSRILTIYPQVLHSLMEARWNHELAGCEMTLDAFAAMACTEMLTRNTLKPSPQAWLQLVKNLSMPLELICSDEHMQGSGSLAQAVIREVRAQWSRIFSTALFVEHVLLGTESRVPELQGLVTEHVFLLDKCLRENSDVKTHGPFEAVMRTLCECKETASKTLSRFGIQPCSICLGDAKDPVCLPCDHVHCLRCLRAWFASEQMICPYCLTALPDEFSPAVSQAHREAIEKHARFRQMCNSFFVDLVSTICFKDNAPPEKEVIESLLSLLFVQKGRLRDAAQRHCEHTKSLSPFNDVVDKTPVIRSVILKLLLKYSFHDVKDYIQEYLTLLKKKAFITEDKTELYMLFINCLEDSILEKTSAYSRNDELNHLEEEGRFLKAYSPASRGREPANEASVEYLQEVARIRLCLDRAADFLSEPEGGPEMAKEKQCYLQQVKQFCIRVENDWHRVYLVRKLSSQRGMEFVQGLSKPGRPHQWVFPKDVVKQQGLRQDHPGQMDRYLVYGDEYKALRDAVAKAVLECKPLGIKTALKACKTPQSQQSAYFLLTLFREVAILYRSHNASLHPTPEQCEAVSKFIGECKILSPPDISRFATSLVDNSVPLLRAGPSDSNLDGTVTEMAIHAAAVLLCGQNELLEPLKNLAFSPATMAHAFLPTMPEDLLAQARRWKGLERVHWYTCPNGHPCSVGECGRPMEQSICIDCHAPIGGIDHKPRDGFHLVKDKADRTQTGHVLGNPQRRDVVTCDRGLPPVVFLLIRLLTHLALLLGASQSSQALINIIKPPVRDPKGFLQQHILKDLEQLAKMLGHSADETIGVVHLVLRRLLQEQHQLSSRRLLNFDTELSTKEMRNNWEKEIAAVISPELEHLDKTLPTMNNLISQDKRISSNPVAKIIYGDPVTFLPHLPRKSVVHCSKIWSCRKRITVEYLQHIVEQKNGKERVPILWHFLQKEAELRLVKFLPEILALQRDLVKQFQNVQQVEYSSIRGFLSKHSSDGLRQLLHNRITVFLSTWNKLRRSLETNGEINLPKDYCSTDLDLDTEFEILLPRRRGLGLCATALVSYLIRLHNEIVYAVEKLSKENNSYSVDAAEVTELHVISYEVERDLTPLILSNCQYQVEEGRETVQEFDLEKIQRQIVSRFLQGKPRLSLKGIPTLVYRHDWNYEHLFMDIKNKMAQDSLPSSVISAISGQLQSYSDACEVLSVVEVTLGFLSTAGGDPNMQLNVYTQDILQMGDQTIHVLKALNRCQLKHTIALWQFLSAHKSEQLLRLHKEPFGEISSRYKADLSPENAKLLSTFLNQTGLDAFLLELHEMIILKLKNPQTQTEERFRPQWSLRDTLVSYMQTKESEILPEMASQFPEEILLASCVSVWKTAAVLKWNREMR

SEQ ID NO: 7247 - protein, 1320 aa, Homo sapiens
NLSMPLELICSDEHMQGSGSLAQAVIREVRAQWSRIFSTALFVEHVLLGTESRVPELQGLVTEHVFLLDKCLRENSDVKTHGPFEAVMRTLCECKETASKTLSRFGIQPCSICLGDAKDPVCLPCDHVHCLRCLRAWFASEQMICPYCLTALPDEFSPAVSQAHREAIEKHARFRQMCNSFFVDLVSTICFKDNAPPEKEVIESLLSLLFVQKGRLRDAAQRHCEHTKSLSPFNDVVDKTPVIRSVILKLLLKYSFHDVKDYIQEYLTLLKKKAFITEDKTELYMLFINCLEDSILEKTSAYSRNDELNHLEEEGRFLKAYSPASRGREPANEASVEYLQEVARIRLCLDRAADFLSEPEGGPEMAKEKQCYLQQVKQFCIRVENDWHRVYLVRKLSSQRGMEFVQGLSKPGRPHQWVFPKDVVKQQGLRQDHPGQMDRYLVYGDEYKALRDAVAKAVLECKPLGIKTALKACKTPQSQQSAYFLLTLFREVAILYRSHNASLHPTPEQCEAVSKFIGECKILSPPDISRFATSLVDNSVPLLRAGPSDSNLDGTVTEMAIHAAAVLLCGQNELLEPLKNLAFSPATMAHAFLPTMPEDLLAQARRWKGLERVHWYTCPNGHPCSVGECGRPMEQSICIDCHAPIGGIDHKPRDGFHLVKDKADRTQTGHVLGNPQRRDVVTCDRGLPPVVFLLIRLLTHLALLLGASQSSQALINIIKPPVRDPKGFLQQHILKDLEQLAKMLGHSADETIGVVHLVLRRLLQEQHQLSSRRLLNFDTELSTKEMRNNWEKEIAAVISPELEHLDKTLPTMNNLISQDKRISSNPVAKIIYGDPVTFLPHLPRKSVVHCSKIWSCRKRITVEYLQHIVEQKNGKERVPILWHFLQKEAELRLVKFLPEILALQRDLVKQFQNVQQVEYSSIRGFLSKHSSDGLRQLLHNRITVFLSTWNKLRRSLETNGEINLPKDYCSTDLDLDTEFEILLPRRRGLGLCATALVSYLIRLHNEIVYAVEKLSKENNSYSVDAAEVTELHVISYEVERDLTPLILSNCQYQVEEGRETVQEFDLEKIQRQIVSRFLQGKPRLSLKGIPTLVYRHDWNYEHLFMDIKNKMAQDSLPSSVISAISGQLQSYSDACEVLSVVEVTLGFLSTAGGDPNMQLNVYTQDILQMGDQTIHVLKALNRCQLKHTIALWQFLSAHKSEQLLRLHKEPFGEISSRYKADLSPENAKLLSTFLNQTGLDAFLLELHEMIILKLKNPQTQTEERFRPQWSLRDTLVSYMQTKESEILPEMASQFPEEILLASCVSVWKTAAVLKWNREMR

SEQ ID NO: 7248 - protein, 474 aa, Homo sapiens
MTTFKEAVTFKDVAVFFTEEELGLLHPAQRKLYQDVMLENFTNLLSVGHQPFHPFHFLREEKFWMMETATQREGNSGGKTIAEAGPHEDCPVQQIWEQTASDLTQSQDSIINNSHFFEQGDVPSQVEAGLSIIHTGQKPSQNGKCKQSFSDVAIFDPPQQFHSGEKSHTCNECGKSFCYISALRIHQRVHLREKLSKCDMCGKEFSQSSCLQTHERVHTREKPFKCEQCGKGFRCRAILQVHCKLHTGEKPYICEKCGRAFIHDLKLQKHQIIHTGEKPSKCEICGKSFCLRSSLNRHYMVHTAEKLSKCEECGKGFTDSLDLHKHQIIHTGQKPYNCKECGKSFRWSSYLLIHQRIHSGEKPYRCEECGKGYISKSGLNLHPEGHTGERPYNCKECGKSFSRASSILNHKKLHCRKKPFKCEDCGKRLVHRSFCKDQQGDHNGENSSKCEDCGKRYKRRLNLDIILSLFLNDM

SEQ ID NO: 7249 - protein, 356 aa, Homo sapiens
MGGKGCLSFPRTLDSNPRGEGDTPSGPVNNLYRIPQSVVNHIDYFRLEADRLRLDVNSATRSQKLGWLSMASREDLMKMVRPPYSYSALIAMAIQSAPERKLTLSHIYQFVADSFPFYQRSKAGWQNSIRHNLSLNDCFKKVPRDEDDPGKGNYWTLDPNCEKMFDNGNFRRKRKRRSEASNGSTVAAGTSKSEEGLSSGLGSGVGGKPEEESPSTLLRPSHSPEPPEGTKSTASSPGGPMLTSTPCLNTFFSSLSSLSVSSSVSTQRALPGSRHLGIQGAQLPSSGVFSPTSISEASADTLQLSNSTSNSTGQRSSYYSPFPASTSGGQSSPFSSPFHNFSMVNSLIYPREGSEV

SEQ ID NO: 7250 - protein, 279 aa, Homo sapiens
  VARIANT 243: Xaa = Any Amino Acid
MNEDNDELTAGKKMGFGFVTYTTVEEVDAAMNARPHEVDGRVVEPKRAVSREDSQRPGAHLTVKKIFVGGIKEDTEEHHLRDYFELCGKMELIEIITDRGSGKKRGFAFVTFDDYDSMDKTVIQKCYTVNGHNCEVRKALSKQEMSSASSSQRGRSGSGNFGGGHGGSFWNDNFGHGGNFNGCGDGYNGFGNDGSNFGSGRSCNDFGSYNNQSSNFGPMKAGDFGGRNSGPYGGGGQYFAKPXNQGGYGGSSSSRAMAVAEDFNYCQETNLSRRGEPGK

SEQ ID NO: 7251 - protein, 508 aa, Homo sapiens
MAPTLFQKLFSKRTGLGAPGRDARDPDCGFSWPLPEFDPSQIRLIVYQDCERRGRNVLFDSSVKRRNEDISVSKLCSDAQVKVFGKCCQLKPGGDSSSSLDSSVTSSSDIKDQCLKYQGSRCSSDANMLGEMMFGSVAMSYKGSTLKIHQIRSPPQLMLSKVFTARTGSSICGSLNTLQDSLEFINQDNNTLKADNNTVINGLLGNIGLSQFCSPRRAFSEQGPLRLIRSASFFAVHSNPMDMPGRELNEDRDSGIARSASLSSLLITPFPSPNSSLTRSCASSYQRRWRRSQTTSLENGVFPRWSIEESFNLSDESCGPNPGIVRKKKIAIGVIFSLSKDEDENNKFNEFFFSHFPLFESHMNKLKSAIEQAMKMSRRSADASQRSLAYNRIVDALNEFRTTICNLYTMPRIGEPVWLTMMSGTPEKNHLCYRFMKEFTFLMENASKNQFLPALITAVLTNHLAWVPTVMPNGQPPIKIFLEKHSSQSVDMLAKTHPYNPLWAQLGM

SEQ ID NO: 7252 - protein, 943 aa, Homo sapiens
NNTVINGLLGNIVHSNPMDMPGRELNEDRDSGIARSASLSSLLITPFPSPNSSLTRSCASSYQRRWRRSQTTSLENGVFPRWSIEESFNLSDESCGPNPGIVRKKKIAIGVIFSLSKDEDENNKFNEFFFSHFPLFESHMNKLKSAIEQAMKMSRRSADASQRSLAYNRIVDALNEFRTTICNLYTMPRIGEPVWLTMMSGTPEKNHLCYRFMKEFTFLMENASKNQFLPALITAVLTNHLAWVPTVMPNGQPPIKIFLEKHSSQSVDMLAKTHPYNPLWAQLGDLYGAIGSPVRLARTVVVGKRQDMVQRLLYFLTYFIRCSELQETHLLENGEDEAIVMPGTVITTTLEKGEIEESEYVLVTMHRNKSSLLFKESEEIRTPNCNCKYCSHPLLGQNVENISQQEREDIQNSSKELLGISDECRMISPSDCQEENAVDVKQYRDKLRTCFDAKLETVVCTGSVPVDKCALSESGLESTEETWQSEKLLDSDSHTGKAMRSTGMVVEKKPPDKIVPASFSCEAAQTKVTFLIGDSMSPDSDTELRSQAVVDQITRHHTKPLKEERGAIDQHQETKQTTKDQSGESDTQNMVSEEPCELPCWNHSDPESMSLFDEYFNDDSIETRTIDDVPFKTSTDSKDHCCMLEFSKILCTKNNKQNNEFCKCIETVPQDSCKTCFPQQDQRDTLSILVPHGDKESSDKKIAVGTEWDIPRNESSDSALGDSESEDTGHDMTRQVSSYYGGEQEDWAEEDEIPFPGSKLIEVSAVQPNIANFGRSLLGGYCSSYVPDFVLQGIGSDERFRQCLMSDLSHAVQHPVLDEPIAEAVCIIADMDKWTVQVASSQRRVTDNKLGKEVLVSSLVSNLLHSTLQLYKHNLSPNFCVMHLEDRLQELYFKSKMLSEYLRGQMRVHVKELGVVLGIESSDLPLLAAVASTHSPYVAQILL

SEQ ID NO: 7253 - protein, 415 aa, Homo sapiens
IFVSFHTGLKEDILEVEVGREPERPMAQRYDDLPHYGGMDGVGIPSTMYGDPHAARSMQPVHHLNHGPPLHSHQYPHTAHTNAMAPSMGSSVNDALKRDKDAIYGHPLFPLLALIFEKCELATCTPREPGVAGGDVCSSESFNEDIAVFAKQIRAEKPLFSSNPELDNLMIQAIQVLRFHLLELEKVHELCDNFCHRYISCLKGKMPIDLVIDDREGGSKSDSEDITRSANLTDQPSWNRDHDDTASTRSGGTPGPSSGGHTSHSGDNSSEQGDGLDNSVASPSTGDDDDPDKDKKRHKKRGIFPKVATNIMRAWLFQHLTHPYPSEEQKKQLAQDTGLTILQVNNWFINARRRIVQPMIDQSNRAGNQGTPYNPDGQPMGGFVMDGQQHMGIRAPGPMSGMGMNMGMEGQWHYM

SEQ ID NO: 7254 - protein, 613 aa, Homo sapiens [sequence omitted]

SEQ ID NO: 7255 - protein, 1012 aa, Homo sapiens
MAEAALEAVRSELREFPAAARELCVPLAVPYLDKPPTPLHFYRDWVCPNRPCIIRNALQHWPALQKWSLPYFRATVGSTEVSVAVTPDGYADAVRGDRFMMPAERRLPLSFVLDVLEGRAQHPGVLYVQKQCSNLPSELPQLLPDLESHVPWASEALGKMPDAVNFWLGEAAAVTSLHKDHYENLYCVVSGEKHFLFHPPSDRPFIPYELYTPATYQLTEEGTFKVVDEEAMEKAEVSRTCLLTVRVLQAHRLPSKDLVTPSDCYVTLWLPTACSHRLQTRTVKNSSSPVWNQSFHFRIHRQLKNVMELKVFDQDLVTGDDPVLSVLFDAGTLRAGEFRRESFSLSPQGEGRLEVEFRLQSLADRGEWLVSNGVLVARELSCLHVQLEETGDQKSSEHRVQLVVPGSCEGPQEASVGTGTFRFHCPACWEQELSIRLQDAPEEQLKAPLSALPSGQVVRLVFPTSQEPLMRVELKKEAGLRELAVRLGFGPCAEEQAFLSRRKQVVAAALRQALQLDGDLQEDEIPVVAIMATGGGIRAMTSLYGQLAGLKELGLLDCVSYITGASGSTWALANLYEDPEWSQKDLAGPTELLKTQVTKNKLGVLAPSQLQRYRQELAERARLGYPSCFTNLWALINEALLHDEPHDHKLSDQREALSHGQNPLPIYCALNTKGQSLTTFEFGEWCEFSPYEVGFPKYGAFIPSELFGSEFFMGQLMKRLPESRICFLEGIWSNLYAANLQDSLYWASEPSQFWDRWVRNQANLDKEQVPLLKIEEPPSTAGRIAEFFTDLLTWRPLAQATHNFLRGLHFHKDYFQHPHFSTWKATTLDGLPNQLTPSEPHLCLLDVGYLINTSCLPLLQPTRDVDLILSLDYNLHGAFQQLQLLGRFCQEQGIPFPPISPSPEEQLQPRECHTFSDPTCPGAPAVLHFPLVSDSFREYSAPGVRRTPEEAAAGEVNLSSSDSPYHYTKVTYSQEDVDKLLHLTHYNVCNNQEQLLEALRQAVQRRRQRRPH

SEQ ID NO: 7256 - protein, 2525 aa, Homo sapiens
RLRLQCISIVTGRGGAQIGAQQSQKPTRRSSENMTAEPMSESKLNTLVQKLHDFLAHSSEESEETSSPPRLAMNQNTDKISGSGSNSDMMENSKEEGTSSSEKSKSSGSSRSKRKPSIVTKYVESDDEKPLDDETVNEDASNENSENDITMQSLPKGTVIVQPEPVLNEDKDDFKGPEFRSRSKMKTENLKKRGEDGLHGIVSCTACGQQVNHFQKDSIYRHPSLQVLICKNCFKYYMSDDISRDSDGMDEQCRWCAEGGNLICCDFCHNAFCKKCILRNLGRKELSTIMDENNQWYCYICHPEPLLDLVTACNSVFENLEQLLQQNKKKIKVDSEKSNKVYEHTSRFSPKKTSSNCNGEEKKLDDSCSGSVTYSYSALIVPKEMIKKAKKLIETTANMNSSYVKFLKQATDNSEISSATKLRQLKAFKSVLADIKKAHLALEEDLNSEFRAMDAVNKEKNTKEHKVIDAKFETKARKGEKPCALEKKDISKSEAKLSRKQVDSEHMHQNVPTEEQRTNKSTGGEHKKSDRKEEPQYEPANTSEDLDMDIVSVPSSVPEDIFENLETAMEVQSSVDHQGDGSSGTEQEVESSSVKLNISSKDNRGGIKSKTTAKVTKELYVKLTPVSLSNSPIKGADCQEVPQDKDGYKSCGLNPKLEKCGLGQENSDNEHLVENEVSLLLEESDLRRSPRVKTTPLRRPTETNPVTSNSDEECNETVKEKQKLSVPVRKKDKRNSSDSAIDNPKPNKLPKSKQSETVDQNSDSDEMLAILKEVSRMSHSSSSDTDINEIHTNHKTLYDLKTQAGKDDKGKRKRKSSTSGSDFDTKKGKSAKSSIISKKKRQTQSESSNYDSELEKEIKSMSKIGAARTTKKRIPNTKDFDSSEDEKHSKKGMDNQGHKNLKTSQEGSSDDAERKQERETFSSAEGTVDKDTTIMELRDRLPKKQQASASTDGVDKLSGKEQSFTSLEVRKVAETKEKSKHLKTKTCKKVQDGLSDIAEKFLKKDQSDETSEDDKKQSKKGTEEKKKPSDFKKKVIKMEQQYESSSDGTEKLPEREEICHFPKGIKQIKNGTTDGEKKSKKIRDKTSKKKDELSDYAEKSTGKGDSCDSSEDKKSKNGAYGREKKRCKLLGKSSRKRQDCSSSDTEKYSMKEDGCNSSDKRLKRIELRERRNLSSKRNTKEIQSGSSSSDAEESSEDNKKKKQRTSSKKKAVIVKEKKRNSLRTSTKRKQADITSSSSSDIEDDDQNSIGEGSSDEQKIKPVTENLVLSSHTGFCQSSGDEALSKSVPVTVDDDDDDNDPENRIAKKMLLEEIKANLSSDEDGSSDDEPEEGKKRTGKQNEENPGDEEAKNQVNSESDSDSEESKKPRYRHRLLRHKLTVSDGESGEEKKTKPKEHKEVKGRNRRKVSSEDSEDSDFQESGVSEEVSESEDEQRPRTRSAKKAELEENQRSYKQKKKRRRIKVQEDSSSENKSNSEEEEEEKEEEEEEEEEEEEEEEDENDDSKSPGKGRKKIRKILKDDKLRTETQNALKEEEERRKRIAEREREREKLREVIEIEDASPTKCPITTKLVLDEDEETKEPLVQVHRNMVIKLKPHQVDGVQFMWDCCCESVKKTKKSPGSGCILAHCMGLGKTLQVVSFLHTVLLCDKLDFSTALVVCPLNTALNWMNEFEKWQEGLKDDEKLEVSELATVKRPQERSYMLQRWQEDGGVMIIGYEMYRNLAQGRNVKSRKLKEIFNKALVDPGPDFVVCDEGHILKNEASAVSKAMNSIRSRRRIILTGTPLQNNLIEYHCMVNFIKENLLGSIKEFRNRFINPIQNGQCADSTMVDVRVMKKRAHILYEMLAGCVQRKDYTALTKFLPPKHEYVLAVRMTSIQCKLYQYYLDHLTGVGNNSEGGRGKAGAKLFQDFQMLSRIWTHPWCLQLDYISKENKGYFDEDSMDEFIASDSDETSMSLSSDDYTKKKKKGKKGKKDSSSSGSGSDNDVEVIKVWNSRSRGGGEGNVDETGNNPSVSLKLEESKATSSSNPSSPAPDWYKDFVTDADAEVLEHSGKMVLLFEILRMAEEIGDKVLVFSQSLISLDLIEDFLELASREKTEDKDKPLIYKGEGKWLRNIDYYRLDGSTTAQSRKKWAEEFNDETNVRGRLFIISTKAGSLGINLVAANRVIIFDASWNPSYDIQSIFRVYRFGQTKPVYVYRFLAQGTMEDKIYDRQVTKQSLSFRVVDQQQVERHFTMNELTELYTFEPDLLDDPNSEKKKKRDTPMLPKDTILAELLQIHKEHIVGYHEHDSLLDHKEEEELTEEERKAAWAEYEAEKKGLTMRFNIPTGTNLPPVSFNSQTPYIPFNLGALSAMSNQQLEDLINQGREKVVEATNSVTAVRIQPLEDIISAVWKENMNLSEAQVQALALSRQASQELDVKRREAIYNDVLTKQQMLISCVQRILMNRRLQQQYNQQQQQQMTYQQATLGHLMMPKPPNLIMNPSNYQQIDMRGMYQPVAGGMQPPPLQRAPPPMRSKNPGPSQGKSM

SEQ ID NO: 7257 - protein, 1972 aa, Homo sapiens
MDPTGSQLDSDFSQQDTPCLIIEDSQPESQVLEDDSGSHFSMLSRHLPNLQTHKENPVLDVVSNPEQTAGEERGDGNSGFNEHLKENKVADPVDSSNLDTCGSISQVIEQLPQPNRTSSVLGMSVESAPAVEEEKGEELEQKEKEKEEDTSGNTTHSLGAEDTASSQLGFGVLELSQSQDVEENTVPYEVDKEQLQSVTTNSGYTRLSDVDANTAIKHEEQSNEDIPIAEQSSKDIPVTAQPSKDVHVVKEQNPPPARSEDMPFSPKASVAAMEAKEQLSAQELMESGLQIQKSPEPEVLSTQEDLFDQSNKTVSSDGCSTPSREEGGCSLASTPATTLHLLQLSGQRSLVQDSLSTNSSDLVAPSPDAFRSTPFIVPSSPTEQEGRQDKPMDTSVLSEEGGEPFQKKLQSGEPVELENPPLLPESTVSPQASTPISQSTPVFPPGSLPIPSQPQFSHDIFIPSPSLEEQSNDGKKDGDMHSSSLTVECSKTSEIEPKNSPEDLGLSLTGDSCKLMLSTSEYSQSPKMESLSSHRIDEDGENTQIEDTEPMSPVLNSKFVPAENDSILMNPAQDGEVQLSQNDDKTKGDDTDTRDDISILATGCKGREETVAEDVCIDLTCDSGSQAVPSPATRSEALSSVLDQEEAMEIKEHHPEEGSSGSEVEEIPETPCESQGEELKEENMESVPLHLSLTETQSQGLCLQKEMPKKECSEAMEVETSVISIDSPQKLAILDQELEHKEQEAWEEATSEDSSVVIVDVKEPSPRVDVSCEPLEGVEKCSDSQSWEDIAPEIEPCAENRLDTKEEKSVEYEGDLKSGTAETEPVEQDSSQPSLPLVRADDPLRLDQELQQPQTQEKTSNSLTEDSKMANAKQLSSDAEAQKLGKPSAHASQSFCESSSETPFHFTLPKEGDIIPPLTGATPPLIGHLKLEPKRHSTPIGISNYPESTIATSDVMSESMVETHDPILGSGKGDSGAAPDVDDKLCLRMKLVSPETEASEESLQFNLEKPATGERKNGSTAVAESVASPQKTMSVLSCICEARQENEARSEDPPTTPIRGNLLHFPSSQGEEEKEKLEGDHTIRQSQQPMKPISPVKDPVSPASQKMVIQGPSSPQGEAMVTDVLEDQKEGRSTNKENPSKALIERPSQNNIGIQTMECSLRVPETVSAATQTIKNVCEQGTSTVDQNFGKQDATVQTERGSGEKPVSAPGDDTESLHSQGEEEFDMPQPPHGHVLHRHMRTIREVRTLVTRVITDVYYVDGTEVERKVTEETEEPIVECQECETEVSPSQTGGSSGDLGDISSFSSKASSLHRTSSGTSLSAMHSSGSSGKGAGPLRGKTSGTEPADFALPSSRGGPGKLSPRKGVSQTGTPVCEEDGDAGLGIRQGGKAPVTPRGRGRRGRPPSRTTGTRETAVPGPLGIEDISPNLSPDDKSFSRVVPRVPDSTRRTDVGAGALRRSDSPEIPFQAAAGPSDGLDASSPGNSFVGLRVVAKWSSNGYFYSGKITRDVGAGKYKLLFDDGYECDVLGKDILLCDPIPLDTEVTALSEDEYFSAGVVKGHRKESGELYYSIEKEGQRKWYKRMAVILSLEQGNRLREQYGLGPYEAVTPLTKAADISLDNLVEGKRKRRSNVSSPATPTASSSSSTTPTRKITESPRASMGVLSGKRKLITSEEERSPAKRGRKSATVKPGAVGAGEFVSPCESGDNTGEPSALEEQRGPLPLNKTLFLGYAFLLTMATTSDKLASRSKLPDGPTGSSEEEEEFLEIPPFNKQYTESQLRAGAGYILEDFNEAQCNTAYQCLLIADQHCRTRKYFLCLASGIPCVSHVWVHDSCHANQLQNYRNYLLPAGYSLEEQRILDWQPRENPFQNLKVLLVSDQQQNFLELWSEILMTGGAASVKQHHSSAHNKDIALGVFDVVVTDPSCPASVLKCAEALQLPVVSQEWVIQCLIVGERIGFKQHPKYKHDYVSH

SEQ ID NO: 7258 - protein, 1043 aa, Homo sapiens
MDKGRAAKVCHHADCQQLHRRGPLNLCEACDSKFHSTMHYDGHVRFDLPPQGSVLARNVSTRSCPPRTSPAVDLEEEEEESSVDGKGDRKSTGLKLSKKKARRRHTDDPSKECFTLKFDLNVDIETEIVPAMKKKSLGEVLLPVFERKGIALGKVDIYLDQSNTPLSLTFEAYRFGGHYLRVKAPAKPGDEGKVEQGMKDSKSLSLPILRPAGTGPPALERVDAQSRRESLDILAPGRRRKNMSEFLGEASIPGQEPPTPSSCSLPSGSSGSTNTGDSWKNRAASRFSGFFSSGPSTSAFGREVDKMEQLEGKLHTYSLFGLPRLPRGLRFDHDSWEEEYDEDEDEDNACLRLEDSWRELIDGHEKLTRRQCHQQEAVWELLHTEASYIRKLRVIINLFLCCLLNLQESGLLCEVEAERLFSNIPEIAQLHRRLWASVMAPVLEKARRTRALLQPGDFLKGFKMFGSLFKPYIRYCMEEEGCMEYMRGLLRDNDLFRAYITWAEKHPQCQRLKLSDMLAKPHQRLTKYPLLLKSVLRKTEEPRAKEAVVAMIGSVERFIHHVNACMRQRQERQRLAAVVSRIDAYEVVESSSDEVDKLLKEFLHLDLTAPIPGASPEETRQLLLEGSLRMKEGKDSKMDVYCFLFTDLLLVTKAVKKAERTRVIRPPLLVDKIVCRELRDPGSFLLIYLNEFHSAVGAYTFQASGQALCRGWVDTIYNAQNQLQQLRAQEPPGSQQPLQSLEEEEDEQEEEEEEEEEEEEGEDSGTSAASSPTIMRKSSGSPDSQHCASDGSTETLAMVVVEPGDTLSSPEFDSGPFSSQSDETSLSTTASSATPTSELLPLGPVDGRSCSMDSAYGTLSPTSLQDFVAPGPMAELVPRAPESPRVPSPPPSPRLRRRTPVQLLSCPPHLLKSKSEASLLQLLAGAGTHGTPSAPSRSLSELCLAVPAPGIRTQGSPQEAGPSWDCRGAPSPGSGPGLVGCLAGEPAGSHRKRCGDLPSGASPRVQPEPPPGVSAQHRKLTLAQLYRIRTTLLLNSTLTASEV

SEQ ID NO: 7259 - protein, 729 aa, Homo sapiens
MNSVLTKHGSPPRSWLSLCSGTDDQSPAEKKGLRCQNPACMDKGRAAKVCHHADCQQLHRRGPLNLCEACDSKFHSTMHYDGHVRFDLPPQGSVLARNVSTRSCPPRTSPAVDLEEEEEESSVDGKGDRKSTGLKLSKKKARRRHTDDPSKECFTLKFDLNVDIETEIVPAMKKKSLGEVLLPVFERKGIALGKVDIYLDQSNTPLSLTFEAYRFGGHYLRVKAPAKPGDEGKVEQGMKDSKSLSLPILRPAGTGPPALERVDAQSRRESLDILAPGRRRKNMSEFLGEASIPGQEPPTPSSCSLPSGSSGSTNTGDSWKNRAASRFSGFFSSGPSTSAFGREVDKMEQLEGKLHTYSLFGLPRLPRGLRFDHDSWEEEYDEDEDEDNACLRLEDSWRELIDGHEKLTRRQCHQQEAVWELLHTEASYIRKLRVIINLFLCCLLNLQESGLLCEVEAERLFSNIPEIAQLHRRLWASVMAPVLEKARRTRALLQPGDFLKGFKMFGSLFKPYIRYCMEEEGCMEYMRGLLRDNDLFRAYITWAEKHPQCQRLKLSDMLAKPHQRLTKYPLLLKSVLRKTEEPRAKEAVVANRLRGALHPPRERVHAAAAGAAAAGGRGEPHRRLRGGGKQQRRSGQAPEGISAPGLDSAHPWRLPGGDAAAAAGGEPEDEGGEGQQDGCVLLPLHGSAVGDQSSEEGREDQGHQATPARGQDCVPGATGPWVLPPYLPE

SEQ ID NO: 7260 - protein, 141 aa, Homo sapiens
KRRRINSSVTTETISETTEVLNEPFDNSDEERPMPQLEPTCEIEVEEDGRKPVLRKAFQHQPGKKRQTEEEEGKDNHCFKNADPCRNFGSLFDLENDLPDELIPNGGELGLLNSGNLVPDAASKHKQLSELLRGGSGSSIN

SEQ ID NO: 7261 - protein, 864 aa, Homo sapiens
MGNRGMEDLIPLVNRLQDAFSAIGQNADLDLPQIAVVGGQSAGKSSVLENFVGRDFLPRGSGIVTRRPLVLQLVNATTEYAEFLHCKGKKFTDFEEVRLEIEAETDRVTGTNKGISPVPINLRVYSPHVLNLTLVDLPGMTKVPVGDQPPDIEFQIRDMLMQFVTKENCLILAVSPANSDLANSDALKVAKEVDPQGQRTIGVITKLDLMDEGTDARDVLENKLLPLRRGYIGVVNRSQKDIDGKKDITAALAAERKFFLSHPSYRHLADRMGTPYLQKVLNQQLTNHIRDTLPGLRNKLQSQLLSIEKEVEEYKNFRPDDPARKTKALLQMVQQFAVDFEKRIEGSGDQIDTYELSGGARINRIFHERFPFELVKMEFDEKELRREISYAIKNIHGIRTGLFTPDMAFETIVKKQVKKIREPCLKCVDMVISELISTVRQCTKKLQQYPRLREEMERIVTTHIREREGRTKEQVMLLIDIELAYMNTNHEDFIGFANAQQRSNQMNKKKTSGNQDEILVIRKGWLTINNIGIMKGGSKEYWFVLTAENLSWYKDDEEKEKKYMLSVDNLKLRDVEKGFMSSKHIFALFNTEQRNVYKDYRQLELACETQEEVDSWKASFLRAGVYPERVGDKEKASETEENGSDSFMHSMDPQLERQVETIRNLVDSYMAIVNKTVRDLMPKTIMHLMINNTKEFIFSELLANLYSCGDQNTLMEESAEQAQRRDEMLRMYHALKEALSIIGNINTTTVSTPMPPPVDDSWLQVQSVPAGRRSPTSSPTPQRRAPAVPPARPGSRGPAPGPPPAGSALGGAPPVPSRPGASPDPFGPPPQVPSRPNRAPPGVPSRSGQASPSRPESPRPPFDL

SEQ ID NO: 7262 - protein, 1662 aa, Homo sapiens
MEDDSLYLRGEWQFNHFSKLTSSRPDAAFAEIQRTSLPEKSPLSCETRVDLCDDLAPVARQLAPREKLPLSSRRPAAVGAGLQNMGNTCYVNASLQCLTYTPPLANYMLSREHSQTCHRHKGCMLCTMQAHITRALHNPGHVIQPSQALAAGFHRGKQEDAHEFLMFTVDAMKKACLPGHKQVDHHSKDTTLIHQIFGGYWRSQIKCLHCHGISDTFDPYLDIALDIQAAQSVQQALEQLVKPEELNGENAYHCGVCLQRAPASKTLTLHTSAKVLILVLKRFSDVTGNKIAKNVQYPECLDMQPYMSQPNTGPLVYVLYAVLVHAGWSCHNGHYFSYVKAQEGQWYKMDDAEVTASSITSVLSQQAYVLFYIQKSEWERHSESVSRGREPRALGAEDTDRRATQGELKRDHPCLQAPELDEHLVERATQESTLDHWKFLQEQNKTKPEFNVRKVEAKLPAKPLFVDPDTSGVHEHWHTRFPAREGQEIQREEQTQQEGSACVPVISVEVPTHTDNWIVMATSQDEPAYGKHQVLGSTLYIRHRKPSDGAHLAHEKTRERNGAKVDMEDDSLYLRGEWQFNHFSKLTSSRPDAAFAEIQRTSLPEKSPLSCETRVDLCDDLAPVARQLAPREKLPLSSRRPAAVGAGLQNMGNTCYVNASLQCLTYTPPLANYMLSREHSQTCHRHKGCMLCTMQAHITRALHNPGHVIQPSQALAAGFHRGKQEDAHEFLMFTVDAMKKACLPGHKQVDHHSKDTTLIHQIFGGYWRSQIKCLHCHGISDTFDPYLDIALDIQAAQSVQQALEQLVKPEELNGENAYHCGVCLQRAPASKTLTLHTSAKVLILVLKRFSDVTGNKIAKNVQYPECLDMQPYMSQPNTGPLVYVLYAVLVHAGWSCHNGHYFSYVKAQEGQWYKMDDAEVTASSITSVLSQQAYVLFYIQKSEWERHSESVSRGREPRALGAEDTDRRATQGELKRDHPCLQAPELDEHLVERATQESTLDHWKFLQEQNKTKPEFNVRKVEAKLPAKPLFVDPDTSGVHEHWHTRFPAREGQEIQREEQTQQEGSACVPVISVEVPTHTDNWIVMATSQDEPAYGKHQVLGSTLYIRHRKPSDGAHLAHEKTRERNGAKVDMEDDSLYLRGEWQFNHFSKLTSSRPDAAFAEIQRTSLPEKSPLSCETRVDLCDDLAPVARQLAPREKLPLSSRRPAAVGAGLQNMGNTCYVNASLQCLTYTPPLANYMLSREHSQTCHRHKGCMLCTMQAHITRALHNPGHVIQPSQALAAGFHRGKQEDAHEFLMFTVDAMKKACLPGHKQVDHHSKDTTLIHQIFGGYWRSQIKCLHCHGISDTFDPYLDIALDIQAAQSVQQALEQLAKPEELNGENAYHCGVCLQRAPASKTLTLHTSAKVLILVLKRFSDVTGNKIAKNVQYPECLDMQPYMSQPNTGPLVYVLYAVLVHAGWSCHNGHYFSYVKAQEGQWYKMDDAEVTASSITSVLSQQAYVLFYIQKSEWERHSESVSRGREPRALGAEDTDRRATQGELKRDHPCLQAPELDEHLVERATQESTLDHWKFLQEQNKTKPEFNVRKVEGTLPPDVLVIHQSKYKCGMKNHHPEQQSSLLNLSSSTPTHQESMNTGTLASLRGRARRSKGKNKHSKRALLVCQ

SEQ ID NO: 7263 - protein, 542 aa, Homo sapiens
SLPEKSPLSSETRVDLCDDLAPVARQLAPREKLPLSSRRPAAVGAGLQNMGNTCYENASLQCLTYTLPLANYMLSREHSQTCQRPKCCMLCTMQAHITWALHSPGHVIQPSQALASGFHRGKQEDVHEFLMFTVDAMKKACLPGHKQVDHHSKDTTLIHQIFGGCWRSQIKCLHCHGISDTFDPYLDIALDIQAAQSVKQALEQLVKPEELNGENAYHCGLCLQRAPASNTLTLHTSAKVLILVLKRFSDVAGNKLAKNVQYPECLDMQPYMSQQNTGPLVYVLYAVLVHAGWSCHDGHYFSYVKAQEGQWYKMDDAEVTVCSITSVLSQQAYVLFYIQKSEWERHSESVSRGREPRALGAEDTDRRAKQGELKRDHPCLQAPELDEHLVERATQESTLDHWKFLQEQNKTKPEPATQGELKRDHPCLQVPELDEHLVERATEESTLDHWKFPQEQNKMKPEFNVRKVEGTLPPNVLVIHQSKYKCGMKNHHPEQQSSLLNLSSMNSTDQESMNTGTLASLQGRTRRSKGKNKHSKRSLLVC

SEQ ID NO: 7264 - protein, 530 aa, Homo sapiens
MEDDSLYLGGEWQFNHFSKLTSSRPDAAFAEIQRTSLPEKSPLSSEARVDLCDDLAPVARQLAPRKKLPLSSRRPAAVGAGLQNMGNTCYENASLQCLTYTPPLANYMLSREHSQTCQRPKCCMLCTMQAHITWALHSPGHVIQPSQALAAGFHRGKQEDAHEFLMFTVDAMKKACLPGHKQVDHHSKDTTLIHQIFGGCWRSQIKCLHCHGISDTFDPYLDIALDIQAAQSVKQALEQLVKPEELNGENAYHCGLCLQRAPASKTLTLHTSAKVLILVLKRFSDVTGNKLAKNVQYPECLDMQPYMSQQNTGPLVYVLYAVLVHAGWSCHDGHYFSYVKAQEGQWYKMDDAKVTACSITSVLSQQAYVLFYIQKSEWERHSESVSRGREPRALGAEDTDRRATQGELKRDHPCLQAPELDERLVERATQESTLDHWKFPQEQNKTKPEFNVRKVEGTLPPNVLVIHQSKYKCGMKNHHPEQQSSLLNLSSTTRTDQESVNTGTLASLQGRTRRSKGKNKHSKRALLVCQ

SEQ ID NO: 7265 - protein, 530 aa, Homo sapiens
MGDDSLYLGGEWQFNHFSKLTSSRPDAAFAEIQRTSLPEKSPLSSETRVDLCDDLAPVARQLAPREKLPLSSRRPAAVGAGLQNMGNTCYENASLQCLTYTLPLANYMLSREHSQTCQRPKCCMLCTMQAHITWALHSPGHVIQPSQALAAGFHRGKQEDVHEFLMFTVDAMKKACLPGHKQVDHHCKDTTLIHQIFGGCWRSQIKCLHCHGISDTFDPYLDIALDIQAAQSVKQALEQLVKPEELNGENAYHCGLCLQRAPASNTLTLHTSAKVLILVLKRFSDVAGNKLAKNVQYPECLDMQPYMSQQNTGPLVYVLYAVLVHAGWSCHDGHYFSYVKAQEVQWYKMDDAEVTVCSIISVLSQQAYVLFYIQKSEWERHSESVSRGREPRALGAEDTDRRAKQGELKRDHPCLQAPELDEHLVERATQESTLDHWKFLQEQNKTKPEFNVGKVEGTLPPNALVIHQSKYKCGMKNHHPEQQSSLLNLSSTTRTDQESMNTGTLASLQGRTRRAKGKNKHSKRALLVCQ

SEQ ID NO: 7266 - protein, 134 aa, Homo sapiens
MTPLPYRSRVKPRSPTNTHAHLELTLVKCSKKDVGWSLGIIPWSSGYPRPLSSHSSPEHIPLEKLCTCAQAPAAGVPSTAQLFMKNRNQPKHLYEEKRRNAEWHVHMMEYYAAENMNNWSHGMNEAERFEASTK

SEQ ID NO: 7267 - protein, 730 aa, Homo sapiens
MSKNSEFINLSFLLDHEKEMILGVLKRDEYLKKVEDKRIRKLKNELLEAKRRSGKTQQEASRVCVHCHRNLGLIFDRGDPCQACSLRVCRECRVAGPNGSWKCTVCDKIAQLRIITGEWFFEEKAKRFKQVNVLGTDVVRQSILRRSPGAEEVQSQEQTRQDAEKSDTSPVAGKKASHDGPKRKGFLLSKFRSATRGEIITPKTDTGRSYSLDLDGQHFRSLKSPPGSDRGSTGSSDLNDQEPGPRTPKSSRSNGVTPGTQSSPAPSTRTVTSVISREYGFENSMDLAAIEGTSQELTKSHRRNTSGTPSIAVSGTSLSSDQSRSELDLSESFTEDSEDTVSIRSKSVPGALDKDSLEETEESIDALVSSQLSTNTHRLASGLSTTSLNSMMSVYSETGDYGNVKVSGEILLHISYCYKTGGLYIFVKNCRNLAIGDEKKQRTDAYVKSYLLPDKSRNNKRKTKIRTGTNPEFNETLKYTISHTQLETRTLQLSVWHYDRFGRNSFLGEVEIPFDSWNFENPTDEWFVLQPKVEFAPDIGLQYKGELTVVLRYIPPEENLMLPPEQLQGNKTFKKGKKKESPVISGGILEVFIKEAKNLTAVKSGGTSDSFVKGYLLPDDSKATKHKTLVIKKSVNPQWNHTFMFSGIHPQDIKNVCLELTIWDKEAFSSNIFLGGVRLNSGSGVSHGKNVDWMDSQGEEQRLWQKMANNPGTPFEGVLMLRSSMGKCRL

SEQ ID NO: 7268 - protein, 1048 aa, Homo sapiens
MSNKTGGKRPATTNSDIPNHNMVSEVPPERPSVRATRTARKAIAFGKRSHSMKRNPNAPVTKAGWLFKQASSGVKQWNKRWFVLVDRCLFYYKDEKEESILGSIPLLSFRVAAVQPSDNISRKHTFKAEHAGVRTYFFSAESPEEQEAWIQAMGEAARVQIPPAQKSVPQAVRHSHEKPDSENVPPSKHHQQPPHNSLPKPEPEAKTRGEGDGRGCEKAERRPERPEVKKEPPVKANGLPAGPEPASEPGSPYPEGPRVPGGGEQPAQPNGWQYHSPSRPGSTAFPSQDGETGGHRRSFPPRTNPDKIAQRKSSMNQLQQWVNLRRGVPPPEDLRSPSRFYPVSRRVPEYYGPYSSQYPDDYQYYPPGVRPESICSMPAYDRISPPWALEDKRHAFRNGGGPAYQLREWKEPASYGRQDATVWIPSPSRQPVYYDELDAASSSLRRLSLQPRSHSVPRSPSQGSYSRARIYSPVRSPSARFERLPPRSEDIYADPAAYVMRRSISSPKVPPYPEVFRDSLHTYKLNEQDTDKLLGKLCEQNKVVREQDRLVQQLRAEKESLESALMGTHQELEMFGSQPAYPEKLRHKKDSLQNQLINIRVELSQATTALTNSTIEYEHLESEVSALHDDLWEQLNLDTQNEVLNRQIQKEIWRIQDVMEGLRKNNPSRGTDTAKHRGGLGPSATYSSNSPASPLSSASLTSPLSPFSLVSGSQGSPTKPGSNEPKANYEQSKKDPHQTLPLDTPRDISLVPTRQEVEAEKQAALNKVGVVPPRTKSPTDDEVTPSAVVRRNASGLTNGLSSQERPKSAVFPGEGKVKMSVEEQIDRMRRHQSGSMKEKRRSLQLPASPAPDPSPRPAYKVVRRHRSIHEVDISNLEAALRAEEPGGHAYETPREEIARLRKMELEPQHYDVDINKELSTPDKVLIPERYIDLEPDTPLSPEELKEKQKKVERIKTLIAKSSMQNVVPIGEGDSVDVPQDSESQLQEQEKRIEISCALATEASRRGRMLSVQCATPSPPTSPASPAPPANPLSSESPRGADSSYTMRV

SEQ ID NO: 7269 - protein, 165 aa, Homo sapiens
MNPRDKQVSRFSPLKDVYTWVALAGIQRSGSPGRTRSAARRMESNTSSSLENLATAPVNQIQETISDNCVVIFSKTSCSYCTMAKKLFHDMNVNYKVVELDLLEYGNQFQDALYKMTGERTVPRIFVNGTFIGGATDTHRLHKEGKLLPLVHQCYLKKSKRKEFQ

SEQ ID NO: 7270 - protein, 201 aa, Homo sapiens
MAARTAFGAVCRRLWQGLGNFSVNTSKGNTAKNGGLLLSTNMKWVQFSNLHVDVPKDLTKPVVTISDEPDILYKRLSVLVKGHDKAVLDSYEYFAVLAAKELGISIKVHEPPRKIERFTLLQSVHIYKKHRVQYEMRTLYRCLELEHLTGSTADVYLEYIQRNLPEGVAMEVTKTQLEQLPEHIKEPIWETLSEEKEESKS

SEQ ID NO: 7271 - protein, 471 aa, Homo sapiens [sequence omitted]

SEQ ID NO: 7272 - protein, 271 aa, Homo sapiens
MAKVPDMFEDLKNCYSENEEDSSSIDHLSLNQKSFYHVSYGPLHEGCMDQSVSLSISETSKTSKLTFKESMVVVATNGKVLKKRRLSLSQSITDDDLEAIANDSEEEIIKPRSAPFSFLSNVKYNFMRIIKYEFILNDALNQSIIRANDQYLTAAALHNLDEAVKFDMGAYKSSKDDAKITVILRISKTQLYVTAQDEDQPVLLKEMPEIPKTITGSETNLLFFWETHGTKNYFTSVAHPNLFIATKQDYWVCLAGGPPSITDFQILENQA

SEQ ID NO: 7273 - protein, 1032 aa, Homo sapiens
MSQQGYVATPPYSQPQPGIGLSPPHYGHYGDPSHTASPTGMMKPAGPLGATATRGMLPPGPPPPGPHQFGQNGAHATGHPPQRFPGPPPVNNVASSHAPYQPSAQSSYPGPISTSSVTQLGSQLSAMQINSYGSGMAPPSQGPPGPLSATSLQTPPRPPQPSILQPGSQVLPPPPTTLNGPGASPLPLPMYRPDGLSGPPPPNAQYQPPPLPGQTLGAGYPPQQANSGPQMAGAQLSYPGGFPGGPAQMAGPPQPQKKLDPDSIPSPIQVIENDRASRGGQVYATNTRGQIPPLVTTDCMIQDQGNASPRFIRCTTYCFPCTSDMAKQAQIPLAAVIKPFATIPSNESPLYLVNHGESGPVRCNRCKAYMCPFMQFIEGGRRYQCGFCNCVNDVPPFYFQHLDHIGRRLDHYEKPELSLGSYEYVATLDYCRKSKPPNPPAFIFMIDVSYSNIKNGLVKLICEELKTMLEKIPKEEQEETSAIRVGFITYNKVLHFFNVKSNLAQPQMMVVTDVGEVFVPLLDGFLVNYQESQSVIHNLLDQIPDMFADSNENETVFASVIQAGMEALKAADCPGKLFIFHSSLPTAEAPGKLKNRDDKKLVNTDKEKILFQPQTNVYDSLAKDCVAHGCSVTLFLFPSQYVDVASLGLVPQLTGGTLYKYNNFQMHLDRQQFLNDLRNDIEKKIGFDAIMRVRTSTGFRATDFFGGILMNNTTDVEMAAIDCDKAVTVEFKHDDKLSEDSGALIQCAVLYTTISGQRRLRIHNLGLNCSSQLADLYKSCETDALINFFAKSAFKAVLHQPLKVIREILVNQTAHMLACYRKNCASPSAASQLILPDSMKVLPVYMNCLLKNCVLLSRPEISTDERAYQRQLVMTMGVADSQLFFYPQLLPIHTLDVKSTMLPAAVRCSESRLSEEGIFLLANGLHMFLWLGVSSPPELIQGIFNVPSFAHINTDMTLLPEVGNPYSQQLRMIMGIIQQKRPYSMKLTIVKQREQPEMVFRQFLVEDKGLYGGSSYVDFLCCVHKEICQLLN

SEQ ID NO: 7274 - protein, 894 aa, Homo sapiens
MSRRKQGNPQHLSQRELITPEADHVEAAILEEDEGLEIEEPSGLGLMVGGPDPDLLTCGQCQMNFPLGDILVFIEHKRKQCGGSLGACYDKALDKDSPPPSSRSELRKVSEPVEIGIQVTPDEDDHLLSPTKGICPKQENIAGPCRPAQLPAVAPIAASSHPHSSVITSPLRALGALPPCLPLPCCSARPVSGDGTQGEGQTEAPFGCQCQLSGKDEPSSYICTTCKQPFNSAWFLLQHAQNTHGFRIYLEPGPASSSLTPRLTIPPPLGPEAVAQSPLMNFLGDSNPFNLLRMTGPILRDHPGFGEGRLPGTPPLFSPPPRHHLDPHRLSAEEMGLVAQHPSAFDRVMRLNPMAIDSPAMDFSRRLRELAGNSSTPPPVSPGRGNPMHRLLNPFQPSPKSPFLSTPPLPPMPPGGTPPPQPPAKSKSCEFCGKTFKFQSNLIVHRRSHTGEKPYKCQLCDHACSQASKLKRHMKTHMHKAGSLAGRSDDGLSAASSPEPGTSELAGEGLKAADGDFRHHESDPSLGHEPEEEDEEEEEEEEELLLENESRPESSFSMDSELSRNRENGGGGVPGVPGAGGGAAKALADEKALVLGKVMENVGLGALPQYGELLADKQKRGAFLKRAAGGGDAGDDDDAGGCGDAGAGGAVNGRGGGFAPGTEPFPGLFPRKPAPLPSPGLNSAAKRIKVEKDLELPPAALIPSENVYSQWLVGYAASRHFMKDPFLGFTDARQSPFATSSEHSSENGSLRFSTPPGDLLDGGLSGRSGTASGGSTPHLGGPGPGRPSSKEGRRSDTCEYCGKVFKNCSNLTVHRRSHTGERPYKCELCNYACAQSSKLTRHMKTHGQIGKEVYRCDICQMPFSVYSTLEKHMKKWHGEHLLTNDVKIEQAERS

SEQ ID NO: 7275 - protein, 823 aa, Homo sapiens
MSRRKQGNPQHLSQRELITPEADHVEAAILEEDEGLEIEEPSGLGLMVGGPDPDLLTCGQCQMNFPLGDILVFIEHKRKQCGGSLGACYDKALDKDSPPPSSRSELRKVSEPVEIGIQVTPDEDDHLLSPTKGICPKQENIAGKDEPSSYICTTCKQPFNSAWFLLQHAQNTHGFRIYLEPGPASSSLTPRLTIPPPLGPEAVAQSPLMNFLGDSNPFNLLRMTGPILRDHPGFGEGRLPGTPPLFSPPPRHHLDPHRLSAEEMGLVAQHPSAFDRVMRLNPMAIDSPAMDFSRRLRELAGNSSTPPPVSPGRGNPMHRLLNPFQPSPKSPFLSTPPLPPMPPGGTPPPQPPAKSKSCEFCGKTFKFQSNLIVHRRSHTGEKPYKCQLCDHACSQASKLKRHMKTHMHKAGSLAGRSDDGLSAASSPEPGTSELAGEGLKAADGDFRHHESDPSLGHEPEEEDEEEEEEEEELLLENESRPESSFSMDSELSRNRENGGGGVPGVPGAGGGAAKALADEKALVLGKVMENVGLGALPQYGELLADKQKRGAFLKRAAGGGDAGDDDDAGGCGDAGAGGAVNGRGGGFAPGTEPFPGLFPRKPAPLPSPGLNSAAKRIKVEKDLELPPAALIPSENVYSQWLVGYAASRHFMKDPFLGFTDARQSPFATSSEHSSENGSLRFSTPPGDLLDGGLSGRSGTASGGSTPHLGGPGPGRPSSKEGRRSDTCEYCGKVFKNCSNLTVHRRSHTGERPYKCELCNYACAQSSKLTRHMKTHGQIGKEVYRCDICQMPFSVYSTLEKHMKKWHGEHLLTNDVKIEQAERS

SEQ ID NO: 7276 - protein, 684 aa, Homo sapiens
  VARIANT 60, 130, 516, 584, 629: Xaa = Any Amino Acid
MATDKSHCSNFYNPIIKEMNIFIFLNKSHHLNKPGAPMNHPGNGDEVNEDKVMVKQLHGXETHISKKCCAELFSISEFLEHKKNRTKNPPVLTMNDSEESVPSEDFCAAVPSHQPPSSSSDSPKENGGSXGYIKEKLGAESLLHLKTETALPSTLQNISYLPKGKVANINVTLQALQGDKGVANTLKTLDSHMSKQVSVAVALLSQKAGSQGLSLDTLNKPSYLTSIPSAASSVTPWLTPFTLKLDRTRVLLNIVSQLPSALLPQALGSVLFQSPFSTVALYPSKKEKDKPPNTEMCVKPKDEAILYKHNCKNCSKVWETGSSLQIYPHMHTGERPFMFSVCGHGFTTKESKGGPTLPGVVPNHNSPRVGGFQGSGTTKPGSETMKLQQLVENSNKATSDPTFSTKGNVKTLLRVHGTNSSISTYPISQKKFASVVMLQQHIWMNMGTQIPSMSPPENPCDFRGPEPMMVSENGNTSAICHDDVEEDTTVDKVSSQDAPSSYSKVLTPLLSIHLIXPTLGFATKASLAVTRKARSLATSQAESIMTKSPDAGSKAEHPKNSHTEMGCLPSTALQIHKWTHTREXPFVCSIHGQAFTTKGNLKVHCMTHGANNNSAHQRRKLAIENTMAXLVSVGANSAVNNTAESKMDGSQSGISANVEKPGATETVPTHWFPHFLEENKIVVS

SEQ ID NO: 7277 - protein, 502 aa, Homo sapiens
  VARIANT 395, 434, 453, 473: Xaa = Any Amino Acid
MLSSPAHSAMHTAPPSPSEEGIYRAHTAVQRGTTPSAAHFRLGFCERRINMSFVEVKDKKILRPGYRSKSNLLHSQSPSFESSAQSLPVLTNAVSSRGSMVLAYSGSLDTSCIFVWLKEQGNDIIAYLGNIGQKEDFKEARALKPGAKKVFTEDVSREFVEEFIWLAIQSSTLYEDHLLGSSLPRPCIAHKQVEITQQEGAKCVSHGTTGKGNDQARFSSPATRWPPQIKVIAPWCMFEFYNRIKCLNDLMEYAKPHGIPIPVTPKNPWSMDENLMHISYEAGILESPKNQAPPGCCTKTQDPAKSPNTPDILKIEFTKGVPVKVTNIKDGTIHQTSLELFVYLNEVAGKHRVGSIDIMDNRFIGMRSRGIYETPADTILYHAHLDIEAFTMDQXVCKIKQGLDLKLAELVYTGFWHSPECERVRHCITKSQEXVEGKVQVSVLKGQVYILRXDSPLSLYNEELVNMNVQDHXEPIDATGFININSLRLKEYHRVQNKVTAK

SEQ ID NO: 7278 - protein, 917 aa, Homo sapiens
MFAVHLMAFYFSKLKEDQIKKVDRFLYHMRLSDDTLLDIMRRFRAEMEKGLAKDTNPTAAVKMLPTFVRAIPDGSENGEFLSLDLGGSKFRVLKVQVAEEGKRHVQMESQFYPTPNEIIRGNGIELFEYVADCLADFMKTKDLKHKKLPLGLTFSFPCRQTKLEEGVLLSWTKKFKARGVQDTDVVSRLTKAMRRHKDMDVDILALVNDTVGTMMTCAYDDPYCEVGVIIGTGTNACYMEDMSNIDLVEGDEGRMCINTEWGAFGDDGALEDIRTEFDRELDLGSLNPGKQLFEKMISGLYLGELVRLILLKMAKAGLLFGGEKSSALHTKGKIETRHVAAMEKYKEGLANTREILVDLGLEPSEADCIAVQHVCTIVSFRSANLCAAALAAILTRLRENKKVERLRTTVGMDGTLYKIHPQYPKRLHKVVRKLVPSCDVRFLLSESGSTKGAAMVTAVASRVQAQRKQIDRVLALFQLTREQLVDVQAKIRAELEYGLKKKSHGLATVRMLPTYVCGLPDGTEKGKFLALDLGGTNFRVLLVKIRSGRRSVRMYNKIFAIPLEIMQGTGEELFDHIVQCIADFLDYMGLKGASLPLGFTFSFPCRQMSIDKGTLIGWTKGFKATDCEGEDVVDMLREAIKRRNEFDLDIVAVVNDTVGTMMTCGYEDPNCEIGLIAGTGSNMCYMEDMRNIEMVEGGEGKMCINTEWGGFGDNGCIDDIRTRYDTEVDEGSLNPGKQRYEKMTSGMYLGEIVRQILIDLTKQGLLFRGQISERLRTRGIFETKFLSQIESDRLALLQVRRILQQLGLDSTCEDSIVVKEVCGAVSRRAAQLCGAGLAAIVEKRREDQGLEHLRITVGVDGTLYKLHPHFSRILQETVKELAPRCDVTFMLSEDGSGKGAALITAVAKRLQQAQKEK

SEQ ID NO: 7279 - protein, 1087 aa, Homo sapiens
MMTSVGTNRARGNWEQPQNQNQTQHKQRPQATAEQIRLAQMISDHNDADFEEKVKQLIDITGKNQDECVIALHDCNGDVNRAINVLLEGNPDTHSWEMVGKKKGVSGQKDGGQTESNEEGKENRDRDRDYSRRRGGPPRRGRGASRGREFRGQENGLDGTKSGGPSGRGTERGRRGRGRGRGGSGRRGGRFSAQGMGTFNPADYAEPANTDDNYGNSSGNTWNNTGHFEPDDGTSAWRTATEEWGTEDWNEDLSETKIFTASNVSSVPLPAENVTITAGQRIDLAVLLGKTPSTMENDSSNLDPSQAPSLAQPLVFSNSKQTAISQPASGNTFSHHSMVSMLGKGFGDVGEAKGGSTTGSQFLEQFKTAQALAQLAAQHSQSGSTTTSSWDMGSTTQSPSLVQYDLKNPSDSAVHSPFTKRQAFTPSSTMMEVFLQEKSPAVATSTAAPPPPSSPLPSKSTSAPQMSPGSSDNQSSSPQPAHQKLKQQKKKASLTSKIPALAVEMPGSADISGLNLQFGALQFGSEPVLSDYESTPTTSASSSQAPSSLYTSTASESSSTISSNQSQESGYQSGPIQSTTYTSQNNAQGPLYEQRSTQTRRYPSSISSSPQKDLTQAKNGFSSVQATQLQTTQSVEGATGSAVKSDSPSTSSIPPLNETVSAASLLTTTNQHSSSLGGLSHSEEIPNTTTTQHSSTLSTQQNTLSSSTSSGRTSTSTLLHTSVESEANLHSSSSTFSTTSSTVSAPPPVVSVSSSLNSGSSLGLSLGSNSTVTASTRSSVATTSGKAPPNLPPGVPPLLPNPYIMAPGLLHAYPPQVYGYDDLQMLQTRFPLDYYSIPFPTPTTPLTGRDGSLASNPYSGDLTKFGRGDASSPAPATTLAQPQQNQTQTHHTTQQTFLNPALPPGYSYTSLPYYTGVPGLPSTFQYGPAVFPVAPTSSKQHGVNVSVNASATPFQQPSGYGSHGYNTGVSVTSSNTGVPDISGSVYSKTQQSFEKQGFHSGTPAASFNLPSALGSGGPINPATAAAYPPAPFMHILTPHQQPHSQILHHHLQQDGQTGSGQRSQTSSIPQKPQTNKSAYNSYSWGAN

SEQ ID NO: 7280 - protein, 1130 aa, Homo sapiens
MKRSEKPEGYRQMRPKTFPASNYTVSSRQMLQEIRESLRNLSKPSDAAKAEHNMSKMSTEDPRQVRNPPKFGTHHKALQEIRNSLLPFANETNSSRSTSEVNPQMLQDLQAAGFDEDMVIQALQKTNNRSIEAAIEFISKMSYQDPRREQMAAAAARPINASMKPGNVQQSVNRKQSWKGSKESLVPQRHGPPLGESVAYHSESPNSQTDVGRPLSGSGISAFVQAHPSNGQRVNPPPPPQVRSVTPPPPPRGQTPPPRGTTPPPPSWEPNSQTKRYSGNMEYVISRISPVPPGAWQEGYPPPPLNTSPMNPPNQGQRGISSVPVGRQPIIMQSSSKFNFPSGRPGMQNGTGQTDFMIHQNVVPAGTVNRQPPPPYPLTAANGQSPSALQTGGSAAPSSYTNGSIPQSMMVPNRNSHNMELYNISVPGLQTNWPQSSSAPAQSSPSSGHEIPTWQPNIPVRSNSFNNPLGNRASHSANSQPSATTVTAITPAPIQQPVKSMRVLKPELQTALAPTHPSWIPQPIQTVQPSPFPEGTASNVTVMPPVAEAPNYQGPPPPYPKHLLHQNPSVPPYESISKPSKEDQPSLPKEDESEKSYENVDSGDKEKKQITTSPITVRKNKKDEERRESRIQSYSPQAFKFFMEQHVENVLKSHQQRLHRKKQLENEMMRVGLSQDAQDQMRKMLCQKESNYIRLKRAKMDKSMFVKIKTLGIGAFGEVCLARKVDTKALYATKTLRKKDVLLRNQVAHVKAERDILAEADNEWVVRLYYSFQDKDNLYFVMDYIPGGDMMSLLIRMGIFPESLARFYIAELTCAVESVHKMGFIHRDIKPDNILIDRDGHIKLTDFGLCTGFRWTHDSKYYQSGDHPRQDSMDFSNEWGDPSSCRCGDRLKPLERRAARQHQRCLAHSLVGTPNYIAPEVLLRTGYTQLCDWWSVGVILFEMLVGQPPFLAQTPLETQMKVINWQTSLHIPPQAKLSPEASDLIIKLCRGPEDRLGKNGADEIKAHPFFKTIDFSSDLRQQSASYIPKITHPTDTSNFDPVDPDKLWSDDNEEENVNDTLNGWYKNGKHPEHAFYEFTFRRFFDDNGYPYNYPKPIEYEYINSQGSEQQSDEDDQNTGSEIKNRDLVYV

SEQ ID NO: 7281 - protein, 218 aa, Homo sapiens
MGPLSSQRRVMGISQDNWHKRRKTGSKRKPYDKKRKYELGHLAANTKIGPHHIHTVRVRGGNNKYGALRRDMGNFSWGSECCTRKTRITDVVYDAPNSKLVRTKTLVENCFVLTDSTPYHQWYESHYALPLGCKKGAKLTPEEEKTLNKKRSKKIQKKYDEREKNAKISRLLGEQFQQGKLLACVASRLGQCGQAHVYVPGGKEMEFYLRKIKARKGK

SEQ ID NO: 7282 - protein, 485 aa, Homo sapiens
MAAAPPLSKAEYLKRYLSGADAGVDRGSESGRKRRKKRPKPGGAGGKGMRIVDDDVSWTAISTTKLEKEEEEDDGDLPVVAEFVDERPEEVKQMEAFRSSAKWKLLGGHNEDLPSNRHFRHDTPDSSPRRVRHGTPDPSPRKDRHDTPDPSPRRARHDTPDPSPLRGARHDSDTSPPRRIRHDSSDTSPPRRARHDSPDPSPPRRPQHNSSGDCQKATDSDLSSPRHKQSPGHQDSDSDLSPPRNRPRHRSSDSDLSPPRRRQRTKSSDSDLSPPRRSQPPGKKAAHMYSGAKTGLVLTDIQREQQELKEQDQETMAFEAEFQYAETVFRDKSGRKRNLKLERLEQRRKAEKDSERDELYAQWGKGLAQSRQQQQNVEDAMKEMQKPLARYIDDEDLDRMLREQEREGDPMANFIKKNKAKENKNKKVRPRYSGPAPPPNRFNIWPGYRWDGVDRSNGFEQKRFARLASKKAVEELAYKWSVEDM

SEQ ID NO: 7283 - protein, 619 aa, Homo sapiens
MAAAPPLSKAEYLKRYLSGADAGVDRGSESGRKRRKKRPKPGGAGGKGMRIVDDDVSWTAISTTKLEKEEEEDDGDLPVVAEFVDERPEEVKQMEAFRSSAKWKLLGGHNEDLPSNRHFRHDTPDSSPRRVRHGTPDPSPRKDRHDTPDPSPRRARHDTPDPSPLRGARHDSDTSPPRRIRHDSSDTSPPRRARHDSPDPSPPRRPQHNSSGASPRRVRHDSPDPSPPRRARHGSSDISSPRRVHNNSPDTSRRTLGSSDTQQLRRARHDSPDLAPNVTYSLPRTKSGKAPERASSKTSPHWKESGASHLSFPKNSKYEYDPDISPPRKKQAKSHFGDKKQLDSKGDCQKATDSDLSSPRHKQSPGHQDSDSDLSPPRNRPRHRSSDSDLSPPRRRQRTKSSDSDLSPPRRSQPPGKKAAHMYSGAKTGLVLTDIQREQQELKEQDQETMAFEAEFQYAETVFRDKSGRKRNLKLERLEQRRKAEKDSERDELYAQWGKGLAQSRQQQQNVEDAMKEMQKPLARYIDDEDLDRMLREQEREGDPMANFIKKNKAKENKNKKVRPRYSGPAPPPNRFNIWPGYRWDGVDRSNGFEQKRFARLASKKAVEELAYKWSVEDM

SEQ ID NO: 7284 - protein, 764 aa, Homo sapiens
MEESSSVAMLVPDIGEQEAILTAESIISPSLEIDEQRKTKPDPLIHVIQKLSKIVENEKSQKCLLIGKKRPRSSAATHSLETQELCEIPAKVIQSPAADTRRAEMSQTNFTPDTLAQNEGKAMSYQCSLCKFLSSSFSVLKDHIKQHGQQNEVILMCSECHITSRSQEELEAHVVNDHDNDANIHTQSKAQQCVSPSSSLCRKTTERNETIPDIPVSVDNLQTHTVQTASVAEMGRRKWYAYEQYGMYRCLFCSYTCGQQRMLKTHAWKHAGEVDCSYPIFENENEPLGLLDSSAAAAPGGVDAVVIAIGESELSIHNGPSVQVQICSSEQLSSSSPLEQSAERGVHLSQSVTLDPNEEEMLEVISDAEENLIPDSLLTSAQKIISSSPNKKGHVNVIVERLPSAEETLSQKRFLMNTEMEEGKDLSLTEAQIGREGMDDVYRADKCTVDIGGLIIGWSSSEKKDELMNKGLATDENAPPGRRRTNSESLRLHSLAAEALVTMPIRAAELTRANLGHYGDINLLDPDTSQRQVDSTLAAYSKMMSPLKNSSDGLTSLNQSNSTLVALPEGRQELSDGQVKTGISMSLLTVIEKLRERTDQNASDDDILKELQDNAQCQPNSDTSLSGNNVVEYIPNAERPYRCRLCHYTSGNKGYIKQHLRVHRQRQPYQCPICEHIADNSKDLESHMIHHCKTRIYQCKQCEESFHYKSQLRNHEREQHSLPDTLSIATSNEPRISSDTADGKCVQEGIYVFCYAGCSDLHMT

SEQ ID NO: 7285 - protein, 989 aa, Homo sapiens
SFGRLNALNMKSLKAKFRKSDTNEWNKNDDRLLQAVENGDAEKVASLLGKKGASATKHDSEGKTAFHLAAAKGHVECLRVMITHGVDVTAQDTTGHSALHLAAKNSHHECIRKLLQSKCPAESVDSSGKTALHYAAAQGCLQAVQILCEHKSPINLKDLDGNIPLLLAVQNGHSEICHFLLDHGADVNSRNKSGRTALMLACEIGSSNAVEALIKKGADLNLVDSLGYNALHYSKLSENAGIQSLLLSKISQDADLKTPTKPKQHDQVSKISSERSGTPKKRKAPPPPISPTQLSDVSSPRSITSTPLSGKESVFFAEPPFKAEISSIRENKDRLSDSTTGADSLLDISSEADQQDLLSLLQAKVASLTLHNKELQDKLQAKSPKEAEADLSFDSYHSTQTDLGPSLGKPGETSPPDSKSSPSVLIHSLGKSTTDNDVRIQQLQEILQDLQKRLESSEAERKQLQVELQSRRAELVCLNNTEISENSSDLSQKLKETQSKYEEAMKEVLSVQKQMKLGLVSPESMDNYSHFHELRVTEEEINVLKQDLQNALEESERNKEKVRELEEKLVEREKGTVIKPPVEEYEEMKSSYCSVIENMNKEKAFLFEKYQEAQEEIMKLKDTLKSQMTQEASDEAEDMKEAMNRMIDELNKQVSELSQLYKEAQAELEDYRKRKSLEDVTAEYIHKAEHEKLMQLTNVSRAKAEDALSEMKSQYSKVLNELTQLKQLVDAQKENSVSITEHLQVITTLRTAAKEMEEKISNLKEHLASKEVEVAKLEKQLLEEKAAMTDAMVPRSSYEKLQSSLESEVSVLASKLKESVKEKEKVHSEVVQIRSEVSQVKREKENIQTLLKSKEQEVNELLQKFQQAQEELAEMKRYSESSSKLEEDKDKKINEMSKEVTKLKEALNSLSQLSYSTSSSKRQSQQLEALQQQVKQLQNQLAECKKQHQEVISVYRMHLLYAVQGQMDEDVQKVLKQILTMCKNQSQKK

SEQ ID NO: 7286 - protein, 505 aa, Homo sapiens
MKFKLHVNSARQYKDLWNMSDDKPFLCTAPGCGQRFTNEDHLAVHKHKHEMTLKFGPARNDSVIVADQTPTPTRFLKNCEEVGLFNELASPFENEFKKASEDDIKKMPLDLSPLATPIIRSKIEEPSVVETTHQDSPLPHPESTTSDEKEVPLAQTAQPTSAIVRPASLQVPNVLLTSSDSSVIIQQAVPSPTSSTVITQAPSSNRPIVPVPGPFPLLLHLPNGQTMPVAIPASITSSNVHVPAAVPLVRPVTMVPSVPGIPGPSSPQPVQSEAKMRLKAALTQQHPPVTNGDTVKGHGSGLVRTQSEESRPQSLQQPATSTTETPASPAHTTPQTQSTSGRRRRAANEDPDEKRRKFLERNRAAASRCRQKRKVWVQSLEKKAEDLSSLNGQLQSEVTLLRNEVAQLKQLLLAHKDCPVTAMQKKSGYHTADKDDSSEDISVPSSPHTEAIQHSSVSTSNGVSSTSKAEAVATSVLTQMADQSTEPALSQIVMAPSSQSQPSGS

SEQ ID NO: 7287 - protein, 1015 aa, Homo sapiens
MPINGTDLMFQHTTEGSCVISQAEGTGAKKWTLMGDLLFVLSPIYSATLSGPGAGRGSVGTCGRRPDGPSPLCATCRARSQSLMLKSLLPLTAENTEGRHSVSMLILAELADESDKCCCRKQTAAARHRQEQVASQGRPNKRKHLFGLIQKDVGKEEAVEGDDALEGLGAKDIKLAVTREPSQGAGGEMSPCGRKMGEGRQQRRAPVGKLLLLPGRRDTPHGRSGSSGARTQRSLLWLLVHVWLWAASGSSAQLFNLTLSVDEGLPPDTLVGDIRAGLPAAQQQEGSGFFLSEDSDDSPLLDDFHVHPDTGIIRTARRLDRERRDHYSFVAATLLGAVVQVEIRVNDVNDHSPRFPLDSLQLDVSELSPPGTAFRLPVAHDPDAGLFSTQGYTLVQPSDLPKDPAGPFFQLRYRTPGPLPSPLLPGSSSPLEPLDLVLLRRLDREEAAAHRLQIEAWDGGRPRRTGLLSVELRVLDENDNPPVFEQDEYRAAVREDAQPGAEVCRVRATDRDLGPNGFVRYSVRARQVPGAGSGGGALGDAAYFAVEELSGVVRVWRPLDREAQAWHQLVVEARDGGAEPEVATVRVSIAVLDVNDNRPAIHVLFLTEGGVARVSEGARPGDYVARVSVSDADGDWEKEDEATGELGVGLGDGSISLSLEGGEGDFALLPGGPPGVFFLCVEGPLDRESRDLYELLLVATDAGSPPLSTEETLLLRVADLNDQPPLFSQQHYKASVSEAAAPGTVVMWVSASDADEAGSDHAWLRYTVVQLSAPCNLGSLQSKMVHTAECGPSFAIDSESGAISTIRTLDREVQEAVELKVVAQDLGEPPLSATCLVSITVDDVNDNEPIFWRQVYNATIAEHAPVGHCFLQVTASDADSGLYGFIEYSLYDGFLSYEAPQAFRIDPHDGQICVSQDIDRERDPATYDLLVEAKDGGGLSAQAFVRVDLEDVNDNHPVFNPSTYVTSISDETQPGTEIINVLATDQDSGIYGTVAYELIPGNVSSLFTIDSTTGM

SEQ ID NO: 7288 - protein, 841 aa, Homo sapiens
MLERKYGGRLVTRHAARTIQTAFRQYQMNKNFERLRSSMSENRMSRRIVLSNMRMQFSFEGPEKVHSSYFEGKQVSVTNDGSQLGALVSPECGDLSEPTTLKSPAPSSDFADAITELEDAFSRQVKSLAESIDDALNCRSLHTEEAPALDAARARDTEPQTALHGMDHRKLDEMTASYSDVTLYIDEEELSPPLPLSQAGDRPSSTESDLRLRAGGAAPDYWALAHKEDKADTDTSCRSTPSLERQEQRLRVEHLPLLTIEPPSDSSVDLSDRSERGSLKRQSAYERSLGGQQGSPKHGPHSGAPKSLPREEPELRPRPPRPLDSHLAINGSANRQSKSESDYSDGDNDSINSTSNSNDTINCSSESSSRDSLREQTLSKQTYHKEARNSWDSPAFSNDVIRKRHYRIGLNLFNKKPEKGVQYLIERGFVPDTPVGVAHFLLQRKGLSRQMIGEFLGNRQKQFNRDVLDCVVDEMDFSTMELDEALRKFQAHIRVQGEAQKVERLIEAFSQRYCICNPGVVRQFRNPDTIFILAFAIILLNTDMYSPNVKPERKMKLEDFIKNLRGVDDGEDIPREMLMGIYERIRKRELKTNEDHVSQVQKVEKLIVGKKPIGSLHPGLGCVLSLPHRRLVCYCRLFEVPDPNKPQKLGLHQREIFLFNDLLVVTKIFQKKKNSVTYSFRQSFSLYGMQVLLFENQYYPNGIRLTSSVPGADIKVLINFNAPNPQDRKKFTDDLRESIAEVQEMEKHRIESELEKQKGVVRPSMSQCSSLKKESGNGTLSRACLDDSYASGEGLKRSALSSSLRDLSEAGKRGRRSSAGSLESNVEFQPFEPLQPSVLCS

SEQ ID NO: 7289 - protein, 701 aa, Homo sapiens
MDIEDEENMSSSSTDVKENRNLDNVSPKDGSTPGPGEGSQLSNGGGGGPGRKRPLEEGSNGHSKYRLKKRRKTPGPVLPKNALMQLNEIKPGLQYTLLSQTGPVHAPLFVMSVEVNGQVFEGSGPTKKKAKLHAAEKALRSFVQFPNASEAHLAMGRTLSVNTDFTSDQADFPDTLFNGFETPDKAEPPFYVGSNGDDSFSSSGDLSLSASPVPASLAQPPLPVLPPFPPPSGKNPVMILNELRPGLKYDFLSESGESHAKSFVMSVVVDGQFFEGSGRNKKLAKARAAQSALAAIFNLHLDQTPSRQPIPSEGLQLHLPQVLADAVSRLVLGKFGDLTDNFSSPHARRKVLAGVVMTTGTDVKDAKVISVSTGTKCINGEYMSDRGLALNDCHAEIISRRSLLRFLYTQLELYLNNKDDQKRSIFQKSERGGFRLKENVQFHLYISTSPCGDARIFSPHEPILEEPADRHPNRKARGQLRTKIESGEGTIPVRSNASIQTWDGVLQGERLLTMSCSDKIARWNVVGIQGSLLSIFVEPIYFSSIILGSLYHGDHLSRAMYQRISNIEDLPPLYTLNKPLLSGISNAEARQPGKAPNFSVNWTVGDSAIEVINATTGKDELGRASRLCKHALYCRWMRVHGKVPSHLLRSKITKPNVYHESKLAAKEYQAAKARLFTAFIKAGLGAWVEKPTEQDQFSLTP

SEQ ID NO: 7290 - protein, 741 aa, Homo sapiens
MDIEDEENMSSSSTDVKENRNLDNVSPKDGSTPGPGEGSQLSNGGGGGPGRKRPLEEGSNGHSKYRLKKRRKTPGPVLPKNALMQLNEIKPGLQYTLLSQTGPVHAPLFVMSVEVNGQVFEGSGPTKKKAKLHAAEKALRSFVQFPNASEAHLAMGRTLSVNTDFTSDQADFPDTLFNGFETPDKAEPPFYVGSNGDDSFSSSGDLSLSASPVPASLAQPPLPVLPPFPPPSGKNPVMILNELRPGLKYDFLSESGESHAKSFVMSVVVDGQFFEGSGRNKKLAKARAAQSALAAIFNLHLDQTPSRQPIPSEGLQLHLPQVLADAVSRLVLGKFGDLTDNFSSPHARRKVLAGVVMTTGTDVKDAKVISVSTGTKCINGEYMSDRGLALNDCHAEIISRRSLLRFLYTQLELYLNNKDDQKRSIFQKSERGGFRLKENVQFHLYISTSPCGDARIFSPHEPILEGSRSYTQAGVQWCNHGSLQPRPPGLLSDPSTSTFQGAGTTEPADRHPNRKARGQLRTKIESGEGTIPVRSNASIQTWDGVLQGERLLTMSCSDKIARWNVVGIQGSLLSIFVEPIYFSSIILGSLYHGDHLSRAMYQRISNIEDLPPLYTLNKPLLSGISNAEARQPGKAPNFSVNWTVGDSAIEVINATTGKDELGRASRLCKHALYCRWMRVHGKVPSHLLRSKITKPNVYHESKLAAKEYQAAKARLFTAFIKAGLGAWVEKPTEQDQFSLTP

SEQ ID NO: 7291 - protein, 714 aa, Homo sapiens
MDIEDEENMSSSSTDVKENRNLDNVSPKDGSTPGPGEGSQLSNGGGGGPGRKRPLEEGSNGHSKYRLKKRRKTPGPVLPKNALMQLNEIKPGLQYTLLSQTGPVHAPLFVMSVEVNGQVFEGSGPTKKKAKLHAAEKALRSFVQFPNASEAHLAMGRTLSVNTDFTSDQADFPDTLFNGFETPDKAEPPFYVGSNGDDSFSSSGDLSLSASPVPASLAQPPLPVLPPFPPPSGKNPVMILNELRPGLKYDFLSESGESHAKSFVMSVVVDGQFFEGSGRNKKLAKARAAQSALAAIFNLHLDQTPSRQPIPSEGLQLHLPQVLADAVSRLVLGKFGDLTDNFSSPHARRKVLAGVVMTTGTDVKDAKVISVSTGTKCINGEYMSDRGLALNDCHAEIISRRSLLRFLYTQLELYLNNKDDQKRSIFQKSERGGFRLKENVQFHLYISTSPCGDARIFSPHEPILEGSRSYTQAGVQWCNHGSLQPRPPGLLSDPSTSTFQGAGTTEPADRHPNRKARGQLRTKIESGEGTIPVRSNASIQTWDGVLQGERLLTMSCSDKIARWNVVGIQGSLLSIFVEPIYFSSIILGSLYHGDHLSRAMYQRISNIEDLPPLYTLNKPLLSGISNAEARQPGKAPNFSVNWTVGDSAIEVINATTGKDELGRASRLCKHALYCRWMRVHGKVPSHLLRSKITKPNVYHESKLAAKEYQAAKVH

SEQ ID NO: 7292 - protein, 1877 aa, Homo sapiens [sequence omitted]

SEQ ID NO: 7293 - protein, 2843 aa, Homo sapiens
MAAASYDQLLKQVEALKMENSNLRQELEDNSNHLTKLETEASNMKEVLKQLQGSIEDEAMASSGQIDLLERLKELNLDSSNFPGVKLRSKMSLRSYGSREGSVSSRSGECSPVPMGSFPRRGFVNGSRESTGYLEELEKERSLLLADLDKEEKEKDWYYAQLQNLTKRIDSLPLTENFSLQTDMTRRQLEYEARQIRVAMEEQLGTCQDMEKRAQRRIARIQQIEKDILRIRQLLQSQATEAERSSQNKHETGSHDAERQNEGQGVGEINMATSGNGQGSTTRMDHETASVLSSSSTHSAPRRLTSHLGTKVEMVYSLLSMLGTHDKDDMSRTLLAMSSSQDSCISMRQSGCLPLLIQLLHGNDKDSVLLGNSRGSKEARARASAALHNIIHSQPDDKRGRREIRVLHLLEQIRAYCETCWEWQEAHEPGMDQDKNPMPAPVEHQICPAVCVLMKLSFDEEHRHAMNELGGLQAIAELLQVDCEMYGLTNDHYSITLRRYAGMALTNLTFGDVANKATLCSMKGCMRALVAQLKSESEDLQQVIASVLRNLSWRADVNSKKTLREVGSVKALMECALEVKKESTLKSVLSALWNLSAHCTENKADICAVDGALAFLVGTLTYRSQTNTLAIIESGGGILRNVSSLIATNEDHRQILRENNCLQTLLQHLKSHSLTIVSNACGTLWNLSARNPKDQEALWDMGAVSMLKNLIHSKHKMIAMGSAAALRNLMANRPAKYKDANIMSPGSSLPSLHVRKQKALEAELDAQHLSETFDNIDNLSPKASHRSKQRHKQSLYGDYVFDTNRHDDNRSDNFNTGNMTVLSPYLNTTVLPSSSSSRGSLDSSRSEKDRSLERERGIGLGNYHPATENPGTSSKRGLQISTTAAQIAKVMEEVSAIHTSQEDRSSGSTTELHCVTDERNALRRSSAAHTHSNTYNFTKSENSNRTCSMPYAKLEYKRSSNDSLNSVSSSDGYGKRGQMKPSIESYSEDDESKFCSYGQYPADLAHKIHSANHMDDNDGELDTPINYSLKYSDEQLNSGRQSPSQNERWARPKHIIEDEIKQSEQRQSRNQSTTYPVYTESTDDKHLKFQPHFGQQECVSPYRSRGANGSETNRVGSNHGINQNVSQSLCQEDDYEDDKPTNYSERYSEEEQHEEEERPTNYSIKYNEEKRHVDQPIDYSLKYATDIPSSQKQSFSFSKSSSGQSSKTEHMSSSSENTSTPSSNAKRQNQLHPSSAQSRSGQPQKAATCKVSSINQETIQTYCVEDTPICFSRCSSLSSLSSAEDEIGCNQTTQEADSANTLQIAEIKEKIGTRSAEDPVSEVPAVSQHPRTKSSRLQGSSLSSESARHKAVEFSSGAKSPSKSGAQTPKSPPEHYVQETPLMFSRCTSVSSLDSFESRSIASSVQSEPCSGMVSGIISPSDLPDSPGQTMPPSRSKTPPPPPQTAQTKREVPKNKAPTAEKRESGPKQAAVNAAVQRVQVLPDADTLLHFATESTPDGFSCSSSLSALSLDEPFIQKDVELRIMPPVQENDNGNETESEQPKESNENQEKEAEKTIDSEKDLLDDSDDDDIEILEECIISAMPTKSSRKAKKPAQTASKLPPPVARKPSQLPVYKLLPSQNRLQPQKHVSFTPGDDMPRVYCVEGTPINFSTATSLSDLTIESPPNELAAGEGVRGGAQSGEFEKRDTIPTEGRSTDEAQGGKTSSVTIPELDDNKAEEGDILAECINSAMPKGKSHKPFRVKKIMDQVQQASASSSAPNKNQLDGKKKKPTSPVKPIPQNTEYRTRVRKNADSKNNLNAERVFSDNKDSKKQNLKNNSKDFNDKLPNNEDRVRGSFAFDSPHHYTPIEGTPYCFSRNDSLSSLDFDDDDVDLSREKAELRKAKENKESEAKVTSHTELTSNQQSANKTQAIAKQPINRGQPKPILQKQSTFPQSSKDIPDRGAATDEKLQNFAIENTPVCFSHNSSLSSLSDIDQENNNKENEPIKETEPPDSQGEPSKPQASGYAPKSFHVEDTPVCFSRNSSLSSLSIDSEDDLLQECISSAMPKKKKPSRLKGDNEKHSPRNMGGILGEDLTLDLKDIQRPDSEHGLSPDSENFDWKAIQEGANSIVSSLHQAAAAACLSRQASSDSDSILSLKSGISLGSPFHLTPDQEEKPFTSNKGPRILKPGEKSTLETKKIESESKGIKGGKKVYKSLITGKVRSNSEISGQMKQPLQANMPSISRGRTMIHIPGVRNSSSSTSPVSKKGPPLKTPASKSPSEGQTATTSPRGAKPSVKSELSPVARQTSQIGGSSKAPSRSGSRDSTPSRPAQQPLSRPIQSPGRNSISPGRNGISPPNKLSQLPRTSSPSTASTKSSGSGKMSYTSPGRQMSQQNLTKQTGLSKNASSIPRSESASKGLNQMNNGNGANKKVELSRMSSTKSSGSESDRSERPVLVRQSTFIKEAPSPTLRRKLEESASFESLSPSSRPASPTRSQAQTPVLSPSLPDMSLSTHSSVQAGGWRKLPPNLSPTIEYNDGRPAKRHDIARSHSESPSRLPINRSGTWKREHSKHSSSLPRVSTWRRTGSSSSILSASSESSEKAKSEDEKHVNSISGTKQSKENQVSAKGTWRKIKENEFSPTNSTSQTVSSGATNGAESKTLIYQMAPAVSKTEDVWVRIEDCPINNPRSGRSPTGNTPPVIDSVSEKANPNIKDSKDNQAKQNVGNGSVPMRTVGLENRLNSFIQVDAPDQKGTEIKPGQNNPVPVSETNESSIVERTPFSSSSSSKHSSPSGTVAARVTPFNYNPSPRKSSADSTSARPSQIPTPVNNNTKKRDSKTDSTESSGTQSPKRHSGSYLVTSV

SEQ ID NO: 7294 - protein, 2742 aa, Homo sapiens [sequence omitted]

SEQ ID NO: 7295 - protein, 900 aa, Homo sapiens
MSSKESCGKKETSQRKDTTTSSPNFGEKDKKERKTPASSTSSSSIRSVSSEKRKLKSDHTDVLYYNIKRRQGLKRLSVEIDTLRRRPKIGSSSQRPIKLKEASYSNDNQIILQSPSSNGTKKDIHKCVDFKPKDIKLTNAGSKLDHGVKSLSSPKIASDVKPKAEGQASENKWSHLLVQREKMKELKKGRNSKFRDNSEKCVLEKWKRNQFSQDYNSNKIIKEPLGSRRQKISFKIPIKSRDTLQKLVEENVFNIDSNNSKTKQEEREYLESSQVSLNVTRQKTEHLLSDFTYKRTVHEWKRKHHYDHQESNDSHSRENLTQSFEAPCCSVSSESIQDADQEMQIVEELHAARVGKSVDLPGELMSMEIDLEDDVHSSSANNTSDRKLLIVIDTNILMNHLKFVRILKTTEVPGFDKLVLIIPWVVMQELDRMKEGKLLKRAQHKAIPAVHFINDSLKNQDRKLWGQSIQLASQKHYGLSDENNDDRVLKCCLQHQELFPCSFVILCTDDRNLRNKGLISGVKSLSKEELSAELLRLSLNTDVCHQPCIPKQQLKAETTPLKESYKEESTSSGLSILLESIVSDLEKSLGTGLSSILETEMKIAFGNLWMEILYLKPPWTLLHLLQCFKKHWLAVFGLVMEKNLLLTIESLYKNLRKANKAVDFTTVKFLLQDSRSLLHAFSTRSNYDGILPQTFAQVNNLLQTFAEVKTKLKPNSSENTVTKKQEGTSLKNSHNQEITVFSSSHLPQPSRHQEIWSILESVWITIYQNSTDVFQRLGSNSALTTSNIASFEEAFICLQKLMAAVRDILEGIQRILAPNSDYQDVETLYNFLIKYEVNKNVKFTAQEIYDCVSQTEYREKLTIGCRQLVEMEYTMQQCNASVYMEAKNRGWCEDMLNYRI

SEQ ID NO: 7296 - protein, 888 aa, Homo sapiens
MAGAAAESGRELWTFAGSRDPSAPRLAYGYGPGSLRELRAREFSRLAGTVYLDHAGATLFSQSQLESFTSDLMENTYGNPHSQNISSKLTHDTVEQVRYRILAHFHTTAEDYTVIFTAGSTAALKLVAEAFPWVSQGPESSGSRFCYLTDSHTSVVGMRNVTMAINVISIPVRPEDLWSAEERGASASNPDCQLPHLFCYPAQSNFSGVRYPLSWIEEVKSGRLRPVSTPGKWFVLLDAASYVSTSPLDLSAHQADFVPISFYKIFGFPTGLGALLVHNRAAPLLRKTYFGGGTASAYLAGEDFYIPRQSVAQRFEDGTISFLDVIALKHGFDTLERLTGGMENIKQHTFTLAQYTYMALSSLQYPNGAPVVRIYSDSEFSSPEVQGPIINFNVLDDKGNIIGYSQVDKMASLYNIHLRTGCFCNTGACQRHLGISNEMVRKHFQAGHVCGDNMDLIDGQPTGSVRISFGYMSTLDDVQAFLRFIIDTRLHSSGDWPVPQAHADTGETGAPSADSQADVIPAVMGRRSLSPQEDALTGSRVWNNSSTVNAVPVAPPVCDVARTQPTPSEKAAGVLEGALGPHVVTNLYLYPIKSCAAFEVTRWPVGNQGLLYDRSWMVVNHNGVCLSQKQEPRLCLIQPFIDLRQRIMVIKAKGMEPIEVPLEENSERTQIRQSRVCADRVSTYDCGEKISSWLSTFFGRPCHLIKQSSNSQRNAKKKHGKDQLPGTMATLSLVNEAQYLLINTSSILELHRQLNTSDENGKEELFSLKDLSLRFRANIIINGKRAFEEEKWDEISIGSLRFQVLGPCHRCQMICIDQQTGQRNQHVFQKLSESRETKVNFGMYLMHASLDLSSPCFLSVGSQVLPVLKENVEGHDLPASEKHQDVTS

SEQ ID NO: 7297 - protein, 650 aa, Homo sapiens
SDTNIFDSNVPSNKSNFSRGDERRHEAAVPPLAIPSARPEKRDSRVSTSSQESKTTNVRQTYDDGAATRLMSTVKPLREPAPSEDVIDIKPEPDDLIDEDLNFVQENPLSQKKPTVTLTYGSSRPSIEIYRPPASRNADSGVHLNRLQFQQQQNSIHAAKQLDMQSSWVYETGRLCEPEVLNSLEETYSPFFRNNSEKMSMEDENFRKRKLPVVSSVVKVKKFNHDGEEEEEDDDYGSRTGSISSSVSVPAKPERRPSLPPSKQANKNLILKAISEAQESVTKTTNYSTVPQKQTLPVAPRTRTSQEELLAEVVQGQSRTPRISPPIKEEETKGDSVEKNQGTQQRQLLSRLQIDPVMAETLQMSQDYYDMESMVHADTRSFILKKPKLSEEVVVAPNQESGMKTADSLRVLSGHLMQTRDLVQPDKPASPKFIVTLDGVPSPPGYMSDQEEDMCFEGMKPVNQTAASNKGLRGLLHPQQLHLLSRQLEDPNGSFSNAEMSELSVAQKPEKLLERCKYWPACKNGDECAYHHPISPCKAFPNCKFAEKCLFVHPNCKYDAKCTKPDCPFTHVSRRIPVLSPKPVAPPAPPSSSQLCRYFPACKKMECPFYHPKHCRFNTQCTRPDCTFYHPTINVPPRHALKWIRPQTSE

SEQ ID NO: 7298 - protein, 344 aa, Homo sapiens
KTTNYSTVPQKQTLPVAPRTRTSQEELLAEVVQGQSRTPRISPPIKEEETKGDSVEKNQDYYDMESMVHADTRSFILKKPKLSEEVVVAPNQESGMKTADSLRVLSGHLMQTRDLVQPDKPASPKFIVTLDGVPSPPGYMSDQEEDMCFEGMKPVNQTAASNKGLRGLLHPQQLHLLSRQLEDPNGSFSNAEMSELSVAQKPEKLLERCKYWPACKNGDECAYHHPISPCKAFPNCKFAEKCLFVHPNCKYDAKCTKPDCPFTHVSRRIPVLSPKPAVAPPAPPSSSQLCRYFPACKKMECPFYHPKHCRFNTQCTRPDCTFYHPTINVPPRHALKWIRPQTSE

SEQ ID NO: 7299 - protein, 587 aa, Homo sapiens
MNDSLFVSLDRLLLEFVFQYEQDISTKEEMIQRINKCCEDIKENKVTICRIHETINATDEEIDHYCKHSEEIKDNCRNWKPTCDVFRKHEDYMQDQFTVYQGTVEKDKEMYHDYICQYKEVLKQYQLKYSETPFSREYYEKKREHEEIQSRVLACTEQLKMNETIFMKFRVPAPFPSLTKWTLNIVNLRCETQDILKHASNLTKSSSELKKEVDEMEIEINYLNQQISRHNETKALSETLEEKNKNTENRKELKERIFGKDEHVLTLNKTQSSQLFLPYESQKLVRPIKMHSSEPRVADIKEESSVKQSKLANIDFRQKENDTQIFNDSAVDNHSKCSHITTITSSQKFMQVRLLTPQKQSNSNQWSEKGDKDAEYGDKGTVRQVRESKCTSQAIYTEHFGKSIENDSDEVEERAENFPRTSEIPIFLGTPKAVKAPESLEKIKFPKTPPFEINRNRNAVPEVQTEKESPGLSFLMSYTSRSPGLNLFDSSVFDTEISSDQFNEHYSARNLNPLSSEQEIGNLFEKPEGEDGFTFSFPSDTSTHTFGAGKDDFSFPFSFGQGQNSIPSSSLKGFSSSSQNTTQFTFF

SEQ ID NO: 7300 - protein, 497 aa, Homo sapiens
MTNPPVEVRKNMEVFLPQSYCAFDFATMPHQLQDTFLRIPLLVELWHKDKMSKDLLLGIARIQLSNILSSEKTRFLGSNGEQCWRQTYSESVPVIAAQGSNNRIADLSYTVTLEDYGLVKMREIFISDSSQGVSAVQQKPSSLPPAPCPSEIQTEPRETLEYKAALELEMWKEMQEDIFENQLKQKELAHMQALAEEWKKRDRERESLVKKKVAEYTILEGKLQKTLIDLEKREQQLASVESELQREKKELQSERQRNLQELQDSIRRAKEDCIHQVELERLKIKQLEEDKHRLQQQLNDAENKYKILEKEFQQFKDQQNNKPEIRLQSEINLLTLEKVELERKLESATKSKLHYKQQWGRALKELARLKQREQESQMARLKKQQEELEQMRLRYLAAEEKDTVKTERQELLDIRNELNRLRQQEQKQYQDSTEIASGKKDGPHGSVLEEGLDDYLTRLIEERDTLMRTGVYNHEDRIISELDRQIREILAKSNASN

SEQ ID NO: 7301 - protein, 421 aa, Homo sapiens
MTSQEKTEEYPFADIFDEDETERNFLLSKPVCFVVFGKPGVGKTTLARYITQAWKCIRVEALPILEEQIAAETESGVMLQSMLISGQSIPDELVIKLMLEKLNSPEVCHFGYIITEIPSLSQDAMTTLQQIELIKNLNLKPDVIINIKCPDYDLCQRISGQRQHNNTGYIYSRDQWDPEVIENHRKKKKEAQKDGKGEEEEEEEEQEEEEAFIAEMQMVAEILHHLVQRPEDYLENVENIVKLYKETILQTLEEVMAEHNPQYLIELNGNKPAEELFMIVMDRLKYLNLKRAAILTKLQGAEEEINDTMENDELFRTLASYKLIAPRYRWQRSKWGRTCPVNLKDGNIYSGLPDYSVSFLGKIYCLSSEEALKPFLLNPRPYLLPPMPGPPCKVFILGPQYSGKTTLCNMLAENYKGKVTN

SEQ ID NO: 7302 - protein, 279 aa, Homo sapiens
MLLAASKVLDRLKPVIGVNTDPERSEGHLCLPVRYTHSFPEALQKFYRGEFRWLWRQRIRLYLEGTGINPVPVDLHEQQLSLNQHNRALNIERAHDERSEASGPQLLPVRALNEVFIGESLSSRASYYEISVDDGPWEKQKSSGLNLCTGTGSKAWSFNINRVATQAVEDVLNIAKRQGNLSLPLNRELVEKVTNEYNESLLYSPEEPKILFSIREPIANRVFSSSRQRCFSSKVCVRSRCWDACMVVDGGTSFEFNDGAIASMMINKEDELRTVLLEQ

SEQ ID NO: 7303 - protein, 873 aa, Homo sapiens
PLGSLCSAPRPGRAPTGAARGWPASSLLRRPSLLPRGPPGRGSAALRPLNARPPRLLRGAAWPGPGPGWPQCPAAPLRSAQRVPFAPALRPSLSAGGMALSSEPAEMPRQFPKLNISEVDEQVRLLAEKVFAKVLREEDSKDALSLFTVPEDCPIGQKEAKERELQKELAEQKSVETAKRKKSFKMIRSQSLSLQMPPQQDWKGPPAASPAMSPTTPVVTGATSLPTPAPYAMPEFQRVTISGDYCAGITLEDYEQAAKSLAKALMIREKYARLAYHRFPRITSQYLGHPRADTAPPEEGLPDFHPPPLPQEDPYCLDDAPPNLDYLVHMQGGILFVYDNKKMLEHQEPHSLPYPDLETYTVDMSHILALITDGPTKTYCHRRLNFLESKFSLHEMLNEMSEFKELKSNPHRDFYNVRKVDTHIHAAACMNQKHLLRFIKHTYQTEPDRTVAEKRGRKITLRQVFDGLHMDPYDLTVDSLDVHAGRQTFHRFDKFNSKYNPVGASELRDLYLKTENYLGGEYFARMVKEVARELEESKYQYSEPRLSIYGRSPEEWPNLAYWFIQHKVYSPNMRWIIQVPRIYDIFRSKKLLPNFGKMLENIFLPLFKATINPQDHRELHLFLKYVTGFDSVDDESKHSDHMFSDKSPNPDVWTSEQNPPYSYYLYYMYANIMVLNNLRRERGLSTFLFRPHCGEAGSITHLVSAFLTADNISHGLLLKKSPVLQYLYYLAQIPIAMSPLSNNSLFLEYSKNPLREFLHKGLHVSLSTDDPMQFHYTKEALMEEYAIAAQVWKLSTCDLCEIARNSVLQSGLSHQEKQKFLGQNYYKEGPEGNDIRKTNVAQIRMAFRYETLCNELSFLSDAMKSEEITALTN

SEQ ID NO: 7304 - protein, 767 aa, Homo sapiens
MPRQFPKLNISEVDEQVRLLAEKVFAKVLREEDSKDALSLFTVPEDCPIGQKEAKERELQKELAEQKSVETAKRKKSFKMIRSQSLSLQMPPQQDWKGPPAASPAMSPTTPVVTGATSLPTPAPYAMPEFQRVTISGDYCAGITLEDYEQAAKSLAKALMIREKYARLAYHRFPRITSQYLGHPRADTAPPEEGLPDFHPPPLPQEDPYCLDDAPPNLDYLVHMQGGILFVYDNKKMLEHQEPHSLPYPDLETYTVDMSHILALITDGPTKTYCHRRLNFLESKFSLHEMLNEMSEFKELKSNPHRDFYNVRKVDTHIHAAACMNQKHLLRFIKHTYQTEPDRTVAEKRGRKITLRQVFDGLHMDPYDLTVDSLDVHAGRQTFHRFDKFNSKYNPVGASELRDLYLKTENYLGGEYFARMVKEVARELEESKYQYSEPRLSIYGRSPEEWPNLAYWFIQHKVYSPNMRWIIQVPRIYDIFRSKKLLPNFGKMLENIFLPLFKATINPQDHRELHLFLKYVTGFDSVDDESKHSDHMFSDKSPNPDVWTSEQNPPYSYYLYYMYANIMVLNNLRRERGLSTFLFRPHCGEAGSITHLVSAFLTADNISHGLLLKKSPVLQYLYYLAQIPIAMSPLSNNSLFLEYSKNPLREFLHKGLHVSLSTDDPMQFHYTKEALMEEYAIAAQVWKLSTCDLCEIARNSVLQSGLSHQEKQKFLGQNYYKEGPEGNDIRKTNVAQIRMAFRYETLCNELSFLSDAMKSEEITALTN

SEQ ID NO: 7305 - protein, 399 aa, Homo sapiens
MVSKLTSLQQELLSALLSSGVTKEVLVQALEELLPSPNFGVKLETLPLSPGSGAEPDTKPVFHTLTNGHAKGRLSGDEGSEDGDDYDTPPILKELQALNTEEAAEQRAEVDRMLSEDPWRAAKMIKGYMQQHNIPQREVVDVTGLNQSHLSQHLNKGTPMKTQKRAALYTWYVRKQREILRQFNQTVQSSGNMTDKSSQDQLLFLFPEFSQQSHGPGQSDDACSEPTNKKMRRNRFKWGPASQQILYQAYDRQKNPSKEEREALVEECNRAECLQRGVSPSKAHGLGSNLVTEVRVYNWFANRRKEEAFRQKLAMDAYSSNQTHSLNPLLSHGSPHHQPSSSPPNKLSGKQRLGLTASATQPSWFLPRILSGLRVFRGANAFEMILGPLSHCQNILPWK

SEQ ID NO: 7306 - protein, 557 aa, Homo sapiens
MVSKLTSLQQELLSALLSSGVTKEVLVQALEELLPSPNFGVKLETLPLSPGSGAEPDTKPVFHTLTNGHAKGRLSGDEGSEDGDDYDTPPILKELQALNTEEAAEQRAEVDRMLSEDPWRAAKMIKGYMQQHNIPQREVVDVTGLNQSHLSQHLNKGTPMKTQKRAALYTWYVRKQREILRQFNQTVQSSGNMTDKSSQDQLLFLFPEFSQQSHGPGQSDDACSEPTNKKMRRNRFKWGPASQQILYQAYDRQKNPSKEEREALVEECNRAECLQRGVSPSKAHGLGSNLVTEVRVYNWFANRRKEEAFRQKLAMDAYSSNQTHSLNPLLSHGSPHHQPSSSPPNKLSGVRYSQQGNNEITSSSTISHHGNSAMVTSQSVLQQVSPASLDPGHNLLSPDGKMISVSGGGLPPVSTLTNIHSLSHHNPQQSQNLIMTPLSGVMAIAQSLNTSQAQSVPVINSVAGSLAALQPVQFSQQLHSPHQQPLMQQSPGSHMAQQPFMAAVTQLQNSHMYAHKQEPPQYSHTSRFPSAMVVTDTSSISTLTNMSSSKQCPLQAW

SEQ ID NO: 7307 - protein, 441 aa, Homo sapiens
MLQCPSVEVSFLPLIVNTVALPDELSYICTHGEDWDVAYIIHLYPSLTLRNLLPYSLRYLLEGTAETHELAEGSTADVLHSRISGEIMELVLVKYQGKNWNGHFRIRDTLPEFFPVCFSSDSTEVTTVDLSVHVRRIGSRMVLSVFSPYWLINKTTRVLQYRSEDIHVKHPADFRDIILFSFKKKNIFTKNKVQLKISTSAWSSSFSLDTVGSYGCVKCPANNMEYLVGVSIKMSSFNLSRIVTLTPFCTIANKSSLELEVGEIASDGSMPTNKWNYIASSECLPFWPENLSGKLCVRVVGCEGSSKPFFYNRQDNGTLLSLEDLNGGILVDVNTAEHSTVITFSDYHEGSAPALIMNHTPWDILTYKQSGSPEEMVLLPRQARLFAWADPTGTRKLTWTYAANVGEHDLLKVSFDVNECYMSYLTVKEVEKLSSLTPCPN

SEQ ID NO: 7308 - protein, 1916 aa, Homo sapiens
MLLSIQRNLAAAWYVQIPGMEIKGKLKPMQVALSEDDLTVLMKILLENLGEASSQPSPTQSVQETVRVRKVDVSSVPDHLKEQEDWTDSKLSMNQIVSLQFDFHFESLSIILYNNDINQESGVAFHNDSFQLGELRLHLMASSGKMFKDGSMNVSVKLKTCTLDDLREGIERATSRMIDRKNDQDNNSSMIDISYKQDKNGSQIDAVLDKLYVCASVEFLMTVADFFIKAVPQSPENVAKETQILPRQTATGKVKIEKDDSVRPNMTLKAMITDPEVVFVASLTKADAPALTASFQCNLSLSTSKLEQMMEASVRDLKVLACPFLREKRGKNITTVLQPCSLFMEKCTWASGKQNINIMVKEFIIKISPIILNTVLTIMAALSPKTKEDGSKDTSKEMENLWGIKSINDYNTWFLGVDTATEITESFKGIEHSLIEENCGVVVESIQVTLECGLGHRTVPLLLAESKFSGNIKNWTSLMAAVADVTLQVHYYNEIHAVWEPLIERVEGKRQWNLRLDVKKNPVQDKSLLPGDDFIPEPQMAIHISSGNTMNITISKSCLNVFNNLAKGFSEGTASTFDYSLKDRAPFTVKNAVGVPIKVKPNCNLRVMGFPEKSDIFDVDAGQNLELEYASMVPSSQGNLSILSRQESSFFTLTIVPHGYTEVANIPVARPGRRLYNVRNPNASHSDSVLVQIDATEGNKVITLRSPLQIKNHFSIAFIIYKFVKNVKLLERIGIARPEEEFHVPLDSYRCQLFIQPAGILEHQYKESTTYISWKEELHRSREVRCMLQCPSVEVSFLPLIVNTVALPDELSYICTHGEDWDVAYIIHLYPSLTLRNLLPYSLRYLLEGTAETHELAEGSTADVLHSRISGEIMELVLVKYQGKNWNGHFRIRDTLPEFFPVCFSSDSTEVTTVDLSVHVRRIGSRMVLSVFSPYWLINKTTRVLQYRSEDIHVKHPADFRDIILFSFKKKNIFTKNKVQLKISTSAWSSSFSLDTVGSYGCVKCPANNMEYLVGVSIKMSSFNLSRIVTLTPFCTIANKSSLELEVGEIASDGSMPTNKWNYIASSECLPFWPESLSGKLCVRVVGCEGSSKPFFYNRQDNGTLLSLEDLNGGILVDVNTAEHSTVITFSDYHEGSAPALIMNHTPWDILTYKQSGSPEEMVLLPRQARLFAWADPTGTRKLTWTYAANVGEHDLLKDGCGQFPYDANIQIHWVSFLDGRQRVLLFTDDVALVSKALQAEEMEQADYEITLSLHSLGLSLVNNESKQEVSYIGITSSGVVWEVKPKQKWKPFSQKQIILLEQSYQKHQISRDHGWIKLDNNFEVNFDKDPMEMRLPIRSPIKRDFLSGIQIEFKQSSHQRSLRARLYWLQVDNQLPGAMFPVVFHPVAPPKSIALDSEPKPFIDVSVITRFNEYSKVLQFKYFMVLIQEMALKIDQGFLGAIIALFTPTTDPEAERRRTKLIQQDIDALNAELMETSMTDMSILSFFEHFHISPVKLHLSLSLGSGGEESDKEKQEMFAVHSVNLLLKSIGATLTDVDDLIFKLAYYEIRYQFYKRDQLIWSVVRHYSEQFLKQMYVLVLGLDVLGNPFGLIRGLSEGVEALFYEPFQGAVQGPEEFAEGLVIGVRSLFGHTVGGAAGVVSRITGSVGKGLAAITMDKEYQQKRREELSRQPRDFGDSLARGGKGFLRGVVGGVTGIITKPVEGAKKEGAAGFFKGIGKGLVGAVARPTGGIVDMASSTFQGIQRAAESTEEVSSLRPPRLIHEDGIIRPYDRQESEGSDLLENHIKKLEGETYRYHCAIPGSKKTILMVTNRRVLCIKEVEILGLMCVDWQCPFEDFVFPPSVSENVLKISVKEQGLFHKKDSANQGCVRKVYLKDTATAERACNAIEDAQSTRQQQKLMKQSSVRLLRPQLPS

SEQ ID NO: 7309 - protein, 875 aa, Homo sapiens
MKPSTFINRSNSCQKTLIPGVCYSGQWQPEPGPRSLQQSRLHHHCSQIGGVGSANSSADSTISVISGSLSHSEPSHGLADRVINCREVLEAFNLLVLQVSSFPYTLQTQQSRISSSNEVHWIQLDTGEDVGCEEKLYFGLSEYSKSLQWGITSPLLRCDETFEKMVNTLLERYPRLHSMVVRCYLLIQQYSEALMALTTMASLRDHSTPETLSIMDDLISSPGKNKSGRGHMLIIRVPSVQLAMLAKERLQEVRDKLGLQYRFEIILGNPATELSVATHFVARLKSWRGNEPEEWIPRTYQDLDGLPCIVILTGKDPLGETFPRSLKYCDLRLIDSSYLTRTALEQEVGLACCYVSKEVIRGPTVALDLSGKEQERAAVSENDSDELLIDLERPQSNSSAVTGTSGSIMENGVSSSNTADKSQKQSLTPSFQSPATSLGLDEGVSASSAGAGAGETLKQECDSLGPQMASSTTSKPSSSSSGPRTLPWPGQPIRGCRGPQAALPPVVILSKAAYSLLGSQKSGKLPSSSSLLPHADVAWVSSLRPLLNKDMSSEEQSLYYRQWTLARQHHADYSNQLDPASGTRNFHPRRLLLTGPPQVGKTGSYLQFLRILFRMLIRLLEVDVYDEEEINTDHNESSEVSQSEGEPWPDIESFSKMPFDVSVHDPKYSLMSLVYTEKLAGVKQEVIKESKVEEPRKRETVSIMLTKYAAYNTFHHCEQCRQYMDFTSASQMSDSTLHAFTFSSSMLGEEVQLYFIIPKSKESHFVFSKQGKHLESMRLPLVSDKNLNAVKSPIFTPSSGRHEHGLLNLFHAMEGISHLHLLVVKEYEMPLYRKYWPNHIMLVLPGMFNNAGVGKGPPWDGEKGFEDKLSSIPLA

SEQ ID NO: 7310 - protein, 1036 aa, Homo sapiens [sequence omitted]

SEQ ID NO: 7311 - protein, 1036 aa, Homo sapiens
MEVVGDFEYSKRDLVGHGAFAVVFRGRHRQKTDWEVAIKSINKKNLSKSQILLGKEIKILKELQHENIVALYDVQELPNSVFLVMEYCNGGDLADYLQAKGTLSEDTIRVFLHQIAAAMRILHSKGIIHRDLKPQNILLSYANRRKSSVSGIRIKIADFGFARYLHSNMMAATLCGSPMYMAPEVIMSQHYDAKADLWSIGTVIYQCLVGKPPFQANSPQDLRMFYEKNRSLMPSIPRETSPYLANLLLGLLQRNQKDRMDFEAFFSHPFLEQGPVKKSCPVPVPMYSGSVSGSSCGSSPSCRFASPPSLPDMQHIQEENLSSPPLGPPNYLQVSKDSASTSSKNSSCDTDDFVLVPHNISSDHSCDMPMGTAGRRASNEFLVCGGQCQPTVSPHSETAPIPVPTQIRNYQRIEQNLTSTASSGTNVHGSPRSAVVRRSNTSPMGFLRPGSCSPVPADTAQTVGRRLSTGSSRPYSPSPLVGTIPEQFSQCCCGHPQGHDSRSRNSSGSPVPQAQSPQSLLSGARLQSAPTLTDIYQNKQKLRKQHSDPVCPSHTGAGYSYSPQPSRPGSLGTSPTKHLGSSPRSSDWFFKTPLPTIIGSPTKTTAPFKIPKTQASSNLLALVTRHGPAEEQSKDGNEPRECAHCLLVQGSERQRAEQQSKAVFGRSVSTGKLSDQQGKTPICRHQGSTDSLNTERPMDIAPAGACGGVLAPPAGTAASSKAVLFTVGSPPHSAAAPTCTHMFLRTRTTSVGPSNSGGSLCAMSGRVCVGSPPGPGFGSSPPGAEAAPSLRYVPYGASPPSLEGLITFEAPELPEETLMEREHTDTLRHLNVMLMFTECVLDLTAMRGGNPELCTSAVSLYQIQESVVVDQISQLSKDWGRVEQLVLYMKAAQLLAASLHLAKAQIKSGKLSPSTAVKQVVKNLNERYKFCITMRKKLTEKLNRFFSDKQRFIDEINSVTAEKLIYNCAVEMVQSAALDEMFQQTEDIVYRYHKAALLLEGLSRILQDPADIENVHKYKCSIERRLSALCHSTATV

SEQ ID NO: 7312 - protein, 1056 aa, Homo sapiens
MEVAEVESPLNPSCKIMTFRPSMEEFREFNKYLAYMESKGAHRAGLAKVIPPKEWKPRQCYDDIDNLLIPAPIQQMVTGQSGLFTQYNIQKKAMTVKEFRQLANSGKYCTPRYLDYEDLERKYWKNLTFVAPIYGADINGSIYDEGVDEWNIARINTVLDVVEEECGISIEGVNTPYLYFGMWKTTFAWHTEDMDLYSINYLHFGEPKSWYAIPPEHGKRLERLAQGFFPSSSQGCDAFLRHKMTLISPSVLKKYGIPFDKITQEAGEFMITFPYGYHAGFNHGFNCAESTNFATVRWIDYGKVAKLCTCRKDMVKISMDIFVRKFQPDRYQLWKQGKDIYTIDHTKPTPASTPEVKAWLQRRRKVRKASRSFQCARSTSKRPKADEEEEVSDEVDGAEVPNPDSVTDDLKVSEKSEAAVKLRNTEASSEEESSASRMQVEQNLSDHIKLSGNSCLSTSVTEDIKTEDDKAYAYRSVPSISSEADDSIPLSTGYEKPEKSDPSELSWPKSPESCSSVAESNGVLTEGEESDVESHGNGLEPGEIPAVPSGERNSFKVPSIAEGENKTSKSWRHPLSRPPARSPMTLVKQQAPSDEELPEVLSIEEEVEETESWAKPLIHLWQTKSPNFAAEQEYNATVARMKPHCAICTLLMPYHKPDSSNEENDARWETKLDEVVTSEGKTKPLIPEMCFIYSEENIEYSPPNAFLEEDGTSLLISCAKCCVRVHASCYGIPSHEICDGWLCARCKRNAWTAECCLCNLRGGALKQTKNNRWAHVMCAVAVPEVRFTNVPERTQIDVGRIPLQRLKLKCIFCRHRVKRVSGACIQCSYGRCPASFHVTCAHAAGVLMEPDDWPYVVNITCFRHKVNPNVKSKACEKVISVGQTVITKHRNTRYYSCRVMAVTSQTFYEVMFDDGSFSRDTFPEDIVSRDCLKLGPPAEGEVVQVKWPDGKLYGAKYFGSNIAHMYQVEFEDGSQIAMKREDIYTLDEELPKRVKARFSTASDMRFEDTFYGADIIQGERKRQRVLSSRFKNEYVADPVYRTFLKSSFQKKCQKRQ

SEQ ID NO: 7313 - protein, 1100 aa, Homo sapiens
GPVRVRSEQLSPSAEQVSQISQISLGRRPLSSLPPPPSRALAPTRAPDTALTIMEVAEVESPLNPSCKIMTFRPSMEEFREFNKYLAYMESKGAHRAGLAKVIPPKEWKPRQCYDDIDNLLIPAPIQQMVTGQSGLFTQYNIQKKAMTVKEFRQLANSGKYCTPRYLDYEDLERKYWKNLTFVAPIYGADINGSIYDEGVDEWNIARLNTVLDVVEEECGISIEGVNTPYLYFGMWKTTFAWHTEDMDLYSINYLHFGEPKSWYAIPPEHGKRLERLAQGFFPSSSQGCDAFLRHKMTLISPSVLKKYGIPFDKITQEAGEFMITFPYGYHAGFNHGFNCAESTNFATVRWIDYGKVAKLCTCRKDMVKISMDIFVRKFQPDRYQLWKQGKDIYTIDHTKPTPASTPEVKAWLQRRRKVRKASRSFQCARSTSKRPKADEEEEVSDEVDGAEVPNPDSVTDDLKVSEKSEAAVKLRNTEASSEEESSASRMQVEQNLSDHIKLSGNSCLSTSVTEDIKTEDDKAYAYRSVPSISSEADDSIPLSTGYEKPEKSDPSELSWPKSPESCSSVAESNGVLTEGEESDVESHGNGLEPGEIPAVPSGERNSFKVPSIAEGENKTSKSWRHPLSRPPARSPMTLVKQQAPSDEELPEVLSIEEEVEETESWAKPLIHLWQTKSPNFAAEQEYNATVARMKPHCAICTLLMPYHKPDSSNEENDARWETKLDEVVTSEGKTKPLIPEMCFIYSEENIEYSPPNAFLEEDGTSLLISCAKCCVRVHASCYGIPSHEICDGWLCARCKRNAWTAECCLCNLRGGALKQTKNNKWAHVMCAVAVPEVRFTNVPERTQIDVGRIPLQRLKLKCIFCRHRVKRVSGACIQCSYGRCPASFHVTCAHAAGVLMEPDDWPYVVNITCFRHKVNPNVKSKACEKVISVGQTVITKHRNTRYYSCRVMAVTSQTFYEVMFDDGSFSRDTFPEDIVSRDCLKLGPPAEGEVVQVKWPDGKLYGAKYFGSNIAHMYQVEFEDGSQIAMKREDIYTLDEELPKRVKARFVSAGRCHLGTCQVNSLSSPHVSQAQQETYLGFWINSKKSQCNIFLSGTY

SEQ ID NO: 7314 - protein, 392 aa, Homo sapiens
MNCFSFQLYHGVSESANLAGTFCGSTVPAPFISSGNFLMVQFISDLTLEREGFNATYTIMDMPCGGTYNATWTPQNISSPNSSDPDVPFSICTWVIDTPPHQQVKITVWVLTAELIRLHAELLTASGLTTGQNPYYPVVPLLEGLRAKWNKSHGNSRIQFCGRNALAMPVFYSSMSTAIVIFKSGVLNRNSRMNFTYQIADCNRDYHKAFGNLRSTGWPDNYDSDMDCTITLTAPHNHTLFFHLFGIENSIECRNDFLESNSVISDRGYEIIWTSSPSGCGGTLYGDRGSFTSPGYPGTYPNNTNCEWALVAPAGRLLTVNFYFISIDDPGDCVQNYLTLYDGPNVSSPSYGPYCRGDTSIAPFVASSNQVFIKFHAAYAWHPSTLQLTWDC

SEQ ID NO: 7315 - protein, 1579 aa, Homo sapiens
MGHNCKMPRTGAQDGAWIQKQVVFEGQMASTYEQDEVIAIDDISFSSGCLPANDGILLCQEALNAERELCHPDTDLCRFDATDEELRLCQACGFEFDMCEWTSEASAGQISWMRTKAREIPAFESTPQQDQGGDDEGYYVWVGAKHGFTLNHLDSRAYLNSSVCHCLGKSCHLQFYYAMESSVLRVRLYNNKEEEIFWTYNISTHSQWVKADVLIPEDLKTFKTQSRKLCSADEFPCTSGQCIAKESVCDSRQDCSDESDEDPATCSKHLTCDFESGFCGWEPFLTEDSHWKLMKGLNNGEHHFPAADHTANINHVSKCDFEANSCDWFEAISGDHFDWIRSSQSELSADFEHQAPPRDHSLNASQGHFMFILKKSSSLWQVAKLQSPTFSQTGPGCILSFWFYNYGLSVGAAELQLHMENSHDSTVIWRVLYNQGKQWLEATIQLGRLSQPFHLSLDKVSLGIYDGVSAIDDIRFENCTLPLPAESCEGLDHFWCRHTRACIEKLRLCDLVDDCGDRTDEVNCAPELQCNFETGICNWEQDAKDDFDWTRSQGPTPTLNTGPMKDNTLGTAKGHYLYIESSEPQAFQDSAALLSPILNATDTKGCTFRFYYHMFGKRIYRLAIYQRIWSDSRGQLLWQIFGNQGNRWIRKHLNISSRQPFQILVEASVGDGFTGDIAIDDLSFMDCTLYPGNLPADLPTPPETSVPVTLPPHNCTDNEFICRSDGHCIEKMQKCDFKYDCPDKSDEASCVMEVCSFEKRSLCKWYQPIPVHLLQDSNTFRWGLGNGISIHHGEENHRPSVDHTQNTTDGWYLYADSSNGKFGDTADILTPIISLTGPKCTLVFWTHMNGATVGSLQVLIKKDNVTSKLWAQTGQQGAQWKRAEVFLGIRSHTQIVFRAKRGISYIGDVAVDDISFQDCSPLLSPERKCTDHEFMCANKHCIAKDKLCDFVNDCADNSDETTFICRTSSGRCDFEFDLCSWKQEKDEDFDWNLKASSIPAAGTEPAADHTLGNSSGHYIFIKSLFPQQPMRAARISSPVISKRSKNCKIIFHYHMYGNGIGALTLMQVSVTNQTKVLLNLTVEQGNFWRREELSLFGDEDFQLKFEGRVGKGQRGDIALDDIVLTENCLSLHDSVQEELAVPLPTGHFMYLEATAVGLRGDKAHFRSTMWRESSAACTMSFWYFVSAKATGSIQILIKVACGLRELTWLEKAPCFSKVPSPVAEMIYGVWVVANVIDISRNSINVFASPAHYTSTTGSCNFETSSGNWTTACSLTQDSEDDLDWAIGSRIPAKALIPDSDHTPGSGQHFLYVNSSGSKEGSVARITTSKSFPASLGMCTVRFWFYMIDPRSMGILKVYTIEESGLNILVWSVIGNKRTGWTYGSVPLSSNSPFKVAFEADLDGNEDIFIALDDISFTPECVTGGPVPVQPSPCEADQFSCIYTLQCVPLSGKCDGHEDCIDGSDEMDCPLSPTPPLCSNMEFPCSTDECIPSLLLCDGVPDCHFNEDELICSNKSCSNGALVCASSNSCIPAHQRCDGFADCMDFQLDESSCSGTPFPFRYSCDMNQQLNLQHNENIKT

SEQ ID NO: 7316 - protein, 868 aa, Homo sapiens
  VARIANT 176, 559: Xaa = Any Amino Acid
MESSLAISKARESYENDLRGLCAAGCDRKCFFSFPVEASVISMLLTVISAGNEISSKSWLQECIKLRNRDLNNSSINLTKVKILVNNRPPTGVSENCYRAVPSVCLKQQSLIALNLPQDFSRFSSLSLPRHNFRKSNITAKSLDLSSECECPNCLEGPPNESDWNTCSNESGNGSXHSRSRKKSMLSSSMQCFPSQCCPTKPESGNKEDSAVPPSDEESYVGSSQNNHLILSLEDMKRKIKPLREWTIHELLREFGDNGKFQPNSMSLSYFRDPVVMNFRRALYYSGIWVTHIRGYKPQKHFTANYFKRNPGCLHRLVPWLEGELTAVYGDYGYTVKNILITILHHMTEYDLDSESFIHLLEPYLLQHTHHFLHEFISFVHSPYNMETYDQRAIYQCSAASPCVNKKPLVSAPVSPLPKDHSLLISQHNTKQSKNTQGQWNKEERPLLGLKQFPNGNSSLKKSEIPPVCDKTVSKIYGGIKDKAESGDHKSIISMNNILQKWATPRERCPGLLNCKKKFKRKKTEGIKLFPDHVHDLGKSDTTAHTFSTPAISNQVQPXKYSLRERKDLSLGQKINFQKKEEDNNKYSDSSPKTFQRLSRERSLKRCKSRERDPSWSCISENAFSPKRDGRKLSSFRKKRMKCRQPSQFVEIGSHSRRRIQRRSRSNTHRSKSWCVGSRKRSVSRELSNLSLRGSHRSEHFTQNICCEPSKDKHAHGNESDCGRPSSTTVQYVKLSSTAGKRPKCASKSEGTSQAGRRCNSPTCLQLQKHRSPSKQEIKQETTFPRARRTRAVRHRKTKCHYSDIHTTEDVSDELGNLDDIRQMSGLSVHPPAGGKSTKNSIGIFRIFTGSRKNTKETYYQKHWCKLF

SEQ ID NO: 7317 - protein, 2442 aa, Homo sapiens
MAENLLDGPPNPKRAKLSSPGFSANDSTDFGSLFDLENDLPDELIPNGGELGLLNSGNLVPDAASKHKQLSELLRGGSGSSINPGIGNVSASSPVQQGLGGQAQGQPNSANMASLSAMGKSPLSQGDSSAPSLPKQAASTSGPTPAASQALNPQAQKQVGLATSSPATSQTGPGICMNANFNQTHPGLLNSNSGHSLINQASQGQAQVMNGSLGAAGRGRGAGMPYPTPAMQGASSSVLAETLTQVSPQMTGHAGLNTAQAGGMAKMGITGNTSPFGQPFSQAGGQPMGATGVNPQLASKQSMVNSLPTFPTDIKNTSVTNVPNMSQMQTSVGIVPTQAIATGPTADPEKRKLIQQQLVLLLHAHKCQRREQANGEVRACSLPHCRTMKNVLNHMTHCQAGKACQVAHCASSRQIISHWKNCTRHDCPVCLPLKNASDKRNQQTILGSPASGIQNTIGSVGTGQQNATSLSNPNPIDPSSMQRAYAALGLPYMNQPQTQLQPQVPGQQPAQPQTHQQMRTLNPLGNNPMNIPAGGITTDQQPPNLISESALPTSLGATNPLMNDGSNSGNIGTLSTIPTAAPPSSTGVRKGWHEHVTQDLRSHLVHKLVQAIFPTPDPAALKDRRMENLVAYAKKVEGDMYESANSRDEYYHLLAEKIYKIQKELEEKRRSRLHKQGILGNQPALPAPGAQPPVIPQAQPVRPPNGPLSLPVNRMQVSQGMNSFNPMSLGNVQLPQAPMGPRAASPMNHSVQMNSMGSVPGMAISPSRMPQPPNMMGAHTNNMMAQAPAQSQFLPQNQFPSSSGAMSVGMGQPPAQTGVSQGQVPGAALPNPLNMLGPQASQLPCPPVTQSPLHPTPPPASTAAGMPSLQHTTPPGMTPPQPAAPTQPSTPVSSSGQTPTPTPGSVPSATQTQSTPTVQAAAQAQVTPQPQTPVQPPSVATPQSSQQQPTPVHAQPPGTPLSQAAASIDNRVPTPSSVASAETNSQQPGPDVPVLEMKTETQAEDTEPDPGESKGEPRSEMMEEDLQGASQVKEETDIAEQKSEPMEVDEKKPEVKVEVKEEEESSSNGTASQSTSPSQPRKKIFKPEELRQALMPTLEALYRQDPESLPFRQPVDPQLLGIPDYFDIVKNPMDLSTIKRKLDTGQYQEPWQYVDDVWLMFNNAWLYNRKTSRVYKFCSKLAEVFEQEIDPVMQSLGYCCGRKYEFSPQTLCCYGKQLCTIPRDAAYYSYQNRYHFCEKCFTEIQGENVTLGDDPSQPQTTISKDQFEKKKNDTLDPEPFVDCKECGRKMHQICVLHYDIIWPSGFVCDNCLKKTGRPRKENKFSAKRLQTTRLGNHLEDRVNKFLRRQNHPEAGEVFVRVVASSDKTVEVKPGMKSRFVDSGEMSESFPYRTKALFAFEEIDGVDVCFFGMHVQEYGSDCPPPNTRRVYISYLDSIHFFRPRCLRTAVYHEILIGYLEYVKKLGYVTGHIWACPPSEGDDYIFHCHPPDQKIPKPKRLQEWYKKMLDKAFAERIIHDYKDIFKQATEDRLTSAKELPYFEGDFWPNVLEESIKELEQEEEERKKEESTAASETTEGSQGDSKNAKKKNNKKTNKNKSSISRANKKKPSMPNVSNDLSQKLYATMEKHKEVFFVIHLHAGPVINTLPPIVDPDPLLSCDLMDGRDAFLTLARDKHWEFSSLRRSKWSTLCMLVELHTQGQDRFVYTCNECKHHVETRWHCTVCEDYDLCINCYNTKSHAHKMVKWGLGLDDEGSSQGEPQSKSPQESRRVSIQRCIQSLVHACQCRNANCSLPSCQKMKRVVQHTKGCKRKTNGGCPVCKQLIALCCYHAKHCQENKCPVPFCLNIKHKLRQQQIQHRLQQAQLMRRRMATMNTRNVPQQSLPSPTSAPPGTPTQQPSTPQTPQPPAQPQPSPVSMSPAGFPSVARTQPPTTVSTGKPTSQVPAPPPPAQPPPAAVEAARQIEREAQQQQHLYRVNINNSMPPGRTGMGTPGSQMAPVSLNVPRPNQVSGPVMPSMPPGQWQQAPLPQQQPMPGLPRPVISMQAQAAVAGPRMPSVQPPRSISPSALQDLLRTLKSPSSPQQQQQVLNILKSNPQLMAAFIKQRTAKYVANQPGMQPQPGLQSQPGMQPQPGMHQQPSLQNLNAMQAGVPRPGVPPQQQAMGGLNPQGQALNIMNPGHNPNMASMNPQYREMLRRQLLQQQQQQQQQQQQQQQQQQGSAGMAGGMAGHGQFQQPQGPGGYPPAMQQQQRMQQHLPLQGSSMGQMAAQMGQLGQMGQPGLGADSTPNIQQALQQRILQQQQMKQQIGSPGQPNPMSPQQHMLSGQPQASHLPGQQIATSLSNQVRSPAPVQSPRPQSQPPHSSPSPRIQPQPSPHHVSPQTGSPHPGLAVTMASSIDQGHLGNPEQSAMLPQLNTPSRSALSSELSLVGDTTGDTLEKFVEGL

SEQ ID NO: 7318 - protein, 1403 aa, Homo sapiens
ATQGRLRRRPEGARVPSARRGRPRARWRAPQNNPEVDSIMAELKVEAPASVDWQKRCLTLETQLFRFRLQASKIRELLADKMQELEQRLLEAEQRAENAETQVGVMEEKVKLSNLKNVDSEGSLHRKYQELLKAIKGKDELISQLEAQLEKQKQMRAEEAKTVQEKAAKIKEWVTLKLAKLEMENQHLKSHNQRLVEQVGSLQDALEAIQIAPSRKLLVPPYGAAEQDSVPSEPGIQPMGQDSGSQAQGLKAAVLAPSPGALQSKDSVSEAASPLEDSSSSTVHSGETVEAKPLQPHLGRESPPHQPCMKLLTFRCSSASWGEGLVTAQRGMLPGTKTSAREGGPGSSLTLPKVRAPGTPRDSIQLAKRHHSQPQVGHGHFGRVVNIETEAFSALHPSGLPELESRARSREEPEKMEMEEPPPAGKNEERESPKALGAELEEVELGNKPPTPPLHQFSSWESRIYAVATSGMRLSDMSPRSNTACCASSPPALVSPGSFSGLVYKNVTVPVYTALKGRATQISNMPFMDESSGSDDDCSSQASFRISVPSSESRKTSGLGSPRAIKRGVSMSSLSSEGDYAIPPDACSLDSDYSEPEHKLQRTSSYSTDGLGLGGESLEKSGYLLKMGSQVKTWKRRWFVLRQGQIMYYKSPSDVIRKPQGQVDLNSRCQIVRGEGSQTFQLISEKKTYYLTADSPSLLEEWIRVLQSLLKVQATGPPALLRGGTKPTVKGWLTKVKHGHSKVVWCALVGKIFYYYRSHEDKRPLGCLPVRDAHIEEVDRSCDSDEDYEAGGTRRLLSSHCTLVIHPTEHSPTYLLIGTKHEKDTWLYHLTVAAGGSSAKVGTAYEQLIGKLMDGEGDPDSPLWRHPMLCYSKDGLYASLTTLPSEALQTEALKLFKSCQLFINVPVEAASVDYHVSLAQTALQVCLVHPELQSEIYCQLMKQTSCRPPQKYSLMQCWQLLALCAPLFLPQHHFLWYVKQQLQRHADPRSETGQYATYCQRAVERTLRTGEREARPSRMEVVSILLRNPFHHSLPFSIPVHFTNGTYHVVGFDGSSTVDEFLQRLNQEIGMRKPSHSGFALFTDDPSGRDLEHCLQGSVKICDAISKWEQAMKELHPGKSEGGTRVVKLMYKNRLYFRSQVKGETDRERLLLASQTSREIVAGRFPINKELALEMAALMAQVEYGDLEKPALPGPGGTSPAKAQHLLQQVLDRFHPRRYRHGAPAEQLRHLADMLTTKWATLQGCSPPECIRIYLTVARKWPFFGAKLFAAQPAQLSSKENALVWIAVNEDGVSILDHNTMQVHITYPYSSVTTFGGCRDDFMLVIRSIPDKSSGKSHIEKLIFRMAAPKIAEATFIMASYMNHCTTTVNPPTNPPGACQLWELDGRQFFSSVSCATKGPTLL

SEQ ID NO: 7319 - protein, 223 aa, Homo sapiens
MPLGASSLTYQPSYGQGLRTSSLSHSACPTPNPLSRHSPAPFSKSSTFYRNSPARELHLPIRDGNTLEMHGDTCQPGIFNYATRLGRRSKSPQAMASHGSRPGSRLKQPIGQIPLESSPPVGLSIEEVERLNTPRPRNPSICSADHGRSSSEEDCRRPLSRTRNPADGIPAPESSSDSDSHESSLAQKWNMTGRSQWYILPECPNYLKSMNLMQMMKIIMEPD

SEQ ID NO: 7320 - protein, 288 aa, Homo sapiens
MILLQHAVLPPPKQPSPSPPMSVATRSTGTLQLPPQKPFGQEASLPLAGEEELSKGGEQDCALEELCKPLYCKLCNVTLNSAQQAQAHYQGKNHGKKLRNYYAANSCPPPARMSNVVEPAATPVVPVPPQMGSFKPGGRVILATENDYCKLCDASFSSPAVAQAHYQGKNHAKRLRLAEAQSNSFSESSELGQRRARKEGNEFKMMPNRRNMYTVQNNSGPYFNPRSRQRIPRDLAMCVTPSGQFYCSMCNVGAGEEMEFRQHLESKQHKSKVSEQRYRNEMENLGYV

SEQ ID NO: 7321 - protein, 998 aa, Homo sapiens
MAAVKEPLEFHAKRPWRPEEAVEDPDEEDEDNTSEAENGFSLEEVLRLGGTKQDYLMLATLDENEEVIDGGKKGAIDDLQQGELEAFIQNLNLAKYTKASLIEEDEPAEKENSSKKEVKIPKINNKNTAESQRTSVNKVKNKNRPEPHSDENGSTTPKVKKDKQNIFEFFERQTLLLRPGGKWYDLEYSNEYSLKPQPQDVVSKYKTLAQKLYQHEINLFKSKTNSQKGASSTWMKAIVSSGTLGDRMAAMILLIQDDAVHTLQFVETLVNLVKKKGSKQQCLMALDTFKELLITDLLPDNRKLRIFSQRPFDKLEQLSSGNKDSRDRRLILWYFEHQLKHLVAEFVQVLETLSHDTLVTTKTRALTVAHELLCNKPEEEKALLVQVVNKLGDPQNRIATKASHLLETLLCKHPNMKGVVSGEVERLLFRSNISSKAQYYAICFLNQMALSHEESELANKLITVYFCFFRTCVKKKDVESKMLSALLTGVNRAYPYSQTGDDKVREQIDTLFKVLHIVNFNTSVQALMLLFQVMNSQQTISDRYYTALYRKMLDPGLMTCSKQAMFLNLVYKSLKADIVLRRVKAFVKGLLQVTCQQMPPFICGALYLVSEILKAKPGLRSQLDDHPESDDEENFIDANDDEDMEKFTDADKETEIVKKLETEETVPETDVETKKPEVASWVHFDNLKGGKQLNKYDPFSRNPLFCGAENTSLWELKKLSVHFHPSVALFAKTILQGNYIQYSGDPLQDFTLMRFLDRFVYRNPKPHKGKENTDSVVMQPKRKHFIKDIRHLPVNSKEFLAKEESQIPVDEVFFHRYYKKVAVKEKQKRDADEESIEDVDDEEFEELIDTFEDDNCFSSGKDDMDFAGNVKKRTKGAKDNTLDEDSEGSDDELGNLDDDEVSLGSMDDEEFAEVDEDGGTFMDVLDDESESVPELEVHSKVSTKKSKRKGTDDFDFAGSFQGPRKKKRNLNDSSLFVSAEEFGHLLDENMGSKFDNIA

SEQ ID NO: 7322 - protein, 854 aa, Homo sapiens
MMAYSDTTMMSDDIDWLRSHRGVCKVDLYNPEGQQDQDRKVICFVDVSTLNVEDKDYKDAASSSSEGNLNLGSLEEKEIIVIKDTEKKDQSKTEGSVCLFKQAPSDPVSVLNWLLSDLQKYALGFQHALSPSTSTCKHKVGDTEGEYHRASSENCYSVYADQVNIDYLMNRPQNLRLEMTAAKNTNNNQSPSAPPAKPPSTQRAVISPDGECSIDDLSFYVNRLSSLVIQMAHKEIKEKLEGKSKCLHHSICPSPGNKERISPRTPASKIASEMAYEAVELTAAEMRGTGEESREGGQKSFLYSELSNKSKSGDKQMSQRESKEFADSISKGLMVYANQVASDMMVSLMKTLKVHSSGKPIPASVVLKRVLLRHTKEIVSDLIDSCMKNLHNITGVLMTDSDFVSAVKRNLFNQWKQNATDIMEAMLKRLVSALIGEEKETKSQSLSYASLKAGSHDPKCRNQSLEFSTMKAEMKERDKGKMKSDPCKSLTSAEKVGEHILKEGLTIWNQKQGNSCKVATKACSNKDEKGEKINASTDSLAKDLIVSALKLIQYHLTQQTKGKDTCEEDCPGSTMGYMAQSTQYEKCGGGQSAKALSVKQLESHRAPGPSTCQKENQHLDSQKMDMSNIVLMLIQKLLNENPFKCEDPCEGENKCSEPRASKAASMSNRSDKAEEQCQEHQELDCTSGMKQANGQFIDKLVESVMKLCLIMAKYSNDGAALAELEEQAASANKPNFRGTRCIHSGAMPQNYQDSLGHEVIVNNQCSTNSLQKQLQAVLQWIAASQFNVPMLYFMGDKDGQLEKLPQVSAKAAEKGYSVGGLLQEVMKFAKERQPDEAVGKVARKQLLDWLLANL

SEQ ID NO: 7323 - protein, 548 aa, Homo sapiens
MAKFMTPVIQDNPSGWGPCAVPEQFRDMPYQPFSKGDRLGKVADWTGATYQDKRYTNKYSSQFGGGSQYAYFHEEDESSFQLVDTARTQKTAYQRNRMRFAQRNLRRDKDRRNMLQFNLQILPKSAKQKERERIRLQKKFQKQFGVRQKWDQKSQKPRDSSVEVRSDWEVKEEMDFPQLMKMRYLEVSEPQDIECCGALEYYDKAFDRITTRSEKPLRSIKRIFHTVTTTDDPVIRKLAKTQGNVFATDAILATLMSCTRSVYSWDIVVQRVGSKLFFDKRDNSDFDLLTVSETANEPPQDEGNSFNSPRNLAMEATYINHNFSQQCLRMGKERYNFPNPNPFVEDDMDKNEIASVAYRYRRWKLGDDIDLIVRCEHDGVMTGANGEVSFINIKTLNEWDSRHCNGVDWRQKLDSQRGAVIATELKNNSYKLARWTCCALLAGSEYLKLGYVSRYHVKDSSRHVILGTQQFKPNEFASQINLSVENAWGILRCVIDICMKLEEGKYLILKDPNKQVIRVYSLPDGTFSSDEDEEEEEEEEEEEEEEET

SEQ ID NO: 7324 - protein, 785 aa, Homo sapiens
MPGVIPSESNGLSRGSPSKKNRLSLKFFQKKETKRALDFTDSQENEEKASEYRASEIDQVVPAAQSSPINCEKRENLLPFVGLNNLGNTCYLNSILQVLYFCPGFKSGVKHLFNIISRKKEALKDEANQKDKGNCKEDSLASYELICSLQSLIISVEQLQASFLLNPEKYTDELATQPRRLLNTLRELNPMYEGYLQHDAQEVLQCILGNIQETCQLLKKEEVKNVAELPTKVEEIPHPKEEMNGINSIEMDSMRHSEDFKEKLPKGNGKRKSDTEFGNMKKKVKLSKEHQSLEENQRQTRSKRKATSDTLESPPKIIPKYISENESPRPSQKKSRVKINWLKSATKQPSILSKFCSLGKITTNQGVKGQSKENECDPEEDLGKCESDNTTNGCGLESPGNTVTPVNVNEVKPINKGEEQIGFELVEKLFQGQLVLRTRCLECESLTERREDFQDISVPVQEDELSKVEESSEISPEPKTEMKTLRWAISQFASVERIVGEDKYFCENCHHYTEAERSLLFDKMPEVITIHLKCFAASGLEFDCYGGGLSKINTPLLTPLKLSLEEWSTKPTNDSYGLFAVVMHSGITISSGHYTASVKVTDLNSLELDKGNFVVDQMCEIGKPEPLNEEEARGVVENYNDEEVSIRVGGNTQPSKVLNKKNVEAIGLLGGQKSKADYELYNKASNPDKVASTAFAENRNSETSDTTGTHESDRNKESSDQTGINISGFENKISYVVQSLKEYEGKWLLFDDSEVKVTEEKDFLNSLSPSTSPTSTPYLLFYKKL

SEQ ID NO: 7325 - protein, 414 aa, Homo sapiens
MEMQQNCSISCFWETQPLGCVKISCIFYHSKPRNINGLFLPPSSNITLQKEIQEGIPLQSQSQEPLKPQENISRPIHHPLVLKTNFEEEEEVDEQNDASSLWTKTPEEIEEKRAIKEMCYKSGEYYRFHTPPDILSSKSMTPTAEKQLEKPLENGSELQEGDSLTVPTKLSQYERQGEIKTSLHGKPKTDIAAFENGGGDCYVPQRVIFLGVDESEALTEEKEITISKCSNTKDNKDSPHPKHSLTTRLVPTTHVLNATENISMKCREDPSSMNDVQPVKKPHFKGVKKRKWIYDEPQNFPNSGMQRAVQAPRPQNKMSYHRNNKNRNAENASYIHVQRDAVRTVALNAPSRSRPTHGSYNKVHANREPKPNLSPDKYTSTSYNDSAWRKRIPFSKTYSKSEKIYPEPRRNGSK

SEQ ID NO: 7326 - protein, 1105 aa, Homo sapiens
MAAGKSGGSAGEITFLEALARSESKRDGGFKNNWSFDHEEESEGDTDKDGTNLLSVDEDEDSETSKGKKLNRRSEIVANSSGEFILKTYVRRNKSESFKTLKGNPIGLNMLSNNKKLSENTQNTSLCSGTVVHGRRFHHAHAQIPVVKTAAQRKEYPPHVQKVEINPVRLSRLQGVERIMKKTEESESQVEPEIKRKVQQKRHCSTYQPTPPLSPASKKCLTHLEDLQRNCRQAITLNESTGPLLRTSIHQNSGGQKSQNTGLTTKKFYGNNVEKVPIDIIVNCDDSKHTYLQTNGKVILPGAKIPKITNLKERKTSLSDLNDPIILSSDDDDDNDRTNRRESISPQPADSACSSPAPSTGKVEAALNENTCRAERELRSIPEDSELNTVTLPRKARMKDQFGNSIINTPLKRRKVFSQEPPDALALSCQSSFDSVILNCRSIRVGTLFRLLIEPVIFCLDFIKIQLDEPDHDPVEIILNTSDLTKCEWCNVRKLPVVFLQAIPAVYQKLSIQLQMNKEDKVWNDCKGVNKLTNLEEQYIILIFQNGLDPPANMVFESIINEIGIKNNISNFFAKIPFEEANGRLVACTRTYEESIKGSCGQKENKIKTVSFESKIQLRSKQEFQFFDEEEETGENHTIFIGPVEKLIVYPPPPAKGGISVTNEDLHCLNEGEFLNDVIIDFYLKYLVLEKLKKEDADRIHIFSSFFYKRLNQRERRNHETTNLSIQQKRHGRVKTWTRHVDIFEKDFIFVPLNEAAHWFLAVVCFPGLEKPKYEPNPHYHENAVIQKCSTVEDSCISSSASEMESCSQNSSAKPVIKKMLNKKHCIAVIDSNPGQEESDPRYKRNICSVKYSVKKINHTASENEEFNKGESTSQKVADRTKSENGLQNESLSSTHHTDGLSKIRLNYSDESPEAGKMLEDELVDFSEDQDNQDDSSDDGFLADDNCSSEIGQWHLKPTICKQPCILLMDSLRGPSRSNVVKILREYLEVEWEVKKGSKRSFSKDVMKGSNPKVPQQNNFSDCGVYVLQYVESFFQNPILSFELPMNLANWFPPPRMRTKREEIRNIILKLQEDQSKEKRKHKDTYSTEAPLGEGTEQYVNSISD

SEQ ID NO: 7327 - protein, 1112 aa, Homo sapiens [sequence omitted]

SEQ ID NO: 7328 - protein, 318 aa, Homo sapiens
MSSEAETQQPPAAPPAAPALPPTPSPALRRRRERWPGRTSAAPAGGDKKVIATKVLGTVKWFNVRNGYGFINRNDTKEDVFVHQTAIKKNNPRKYLRSVGDGETVEFDVVEGEKGAEAANVTGPGGVPVQGSKYAADRNHYRRYPRRRGPPRNYQQNYQNSESGEKNEGSESAPEGQAQQRRPYRRRRFPPYYMRRPYGRRPQYSNPPVQGEVMEGADNQGAGEQGRPVRQCIGDIDHDSAGALLARQPREDGNEEDKENQGDETQGQQPPQRRYRRNFNYRRRRPENPKPQDGKETKAADPPAENSSAPEAEQGGAE

SEQ ID NO: 7329 - protein, 342 aa, Homo sapiens [sequence omitted]

SEQ ID NO: 7330 - protein, 324 aa, Homo sapiens
MSSEAETQQPPAAPPAAPALSAADTKPGTTGSGAGSGGPGGLTSAAPAGGDKKVIATKVLGTVKWFNVRNGYGFINRNDTKEDVFVHQTAIKKNNPRKYLRSVGDGETVEFDVVEGEKGAEAANVTGPGGVPVQGSKYAADRNHYRRYPRRRGPPRNYQQNYQNSESGEKNEGSESAPEGQAQQRRPYRRRRFPPYYMRRPYGRRPQYSNPPVQGEVMEGADNQGAGEQGRPVRQNMYRGYRPRFRRGPPRQRQPREDGNEEDKENQGDETQGQQPPQRRYRRNFNYRRRRPENPKPQDGKETKAADPPAENSSAPEAEQGGAE

SEQ ID NO: 7331 - protein, 318 aa, Homo sapiens
MSSEAETQQPPAAPPAAPALSAADTKPGTTGSGAGSGGPGGLTSAAPAGGDKKVIATKVLGTVKWFNVRNGYGFINRNDTKEDVFVHQTAIKKNNPRKYLRSVGDGETVEFDVVEGEKGAEAANVTGPGGVPVQGSKYAADRNHYRRYPRRRGPPRNYQQNYQNSESGEKNEGSESAPERPNNAGPQAKVPTLLHAEYGRRPQYSNPPVQGEVMEGADNQGAGEQGRPVRQCIGDIDHDSAGALLARQPREDGNEEDKENQGDETQGQQPPQRRYRRNFNYRRRRPENPKPQDGKETKAADPPAENSSAPEAEQGGAE

SEQ ID NO: 7332 - protein, 303 aa, Homo sapiens
MSEAGEATTTTTTTLPQAPTEAAAAAPQDPAPKSPVGSGAPQAAAPAPAAHVAGNPGGDAAPAATGTAAAASLATAAGSEDAEKKVLATKVLGTVKWFNVRNGYGFINRNDTKEDVFVHQTAIKKNNPRKYLRSVGDGETVEFDVVEGEKGAEAANVTGPDGVPVEGSRYAADRRRYRRGYYGRRRGPPRNAGEIGEMKDGVPEGAQLQGPVHRNPTYRPRYRSRGPPRPRPAPAVGEAEDKENQQATSGPNQPSVRRGYRRPYNYRRRPRPPNAPSQDGKEAKAGEAPTENPAPPTQQSSAE

SEQ ID NO: 7333 - protein, 372 aa, Homo sapiens
MSEAGEATTTTTTTLPQAPTEAAAAAPQDPAPKSPVGSGAPQAAAPAPAAHVAGNPGGDAAPAATGTAAAASLAAAAGSEDAEKKVLATKVLGTVKWFNVRNGYGFINRNDTKEDVFVHQTAIKKNNPRKYLRSVGDGETVEFDVVEGEKGAEAANVTGPDGVPVEGSRYAADRRRYRRGYYGRRRGPPRNYAGEEEEEGSGSSEGFDPPATDRQFSGARNQLRRPQYRPQYRQRRFPPYHVGQTFDRRSRVLPHPNRIQAGEIGEMKDGVPEGAQLQGPVHRNPTYRPRYRSRGPPRPRPAPAVGEAEDKENQQATSGPNQPSVRRGYRRPYNYRRRPRPPNAPSQDGKEAKAGEAPTENPAPPTQQSSAE

SEQ ID NO: 7334 - protein, 320 aa, Homo sapiens [sequence omitted]

SEQ ID NO: 7335 - protein, 303 aa, Homo sapiens [sequence omitted]

SEQ ID NO: 7336 - protein, 763 aa, Homo sapiens
MDHLNEATQGKEHSEMSNNVSDPKGPPAKIARLEQNGSPLGRGRLGSTGAKMQGVPLKHSGHLMKTNLRKGTMLPVFCVVEHYENAIEYDCKEEHAEFVLVRKDMLFNQLIEMALLSLGYSHSSAAQAKGLIQVGKWNPVPLSYVTDAPDATVADMLQDVYHVVTLKIQLHSCPKLEDLPPEQWSHTTVRNALKDLLKDMNQSSLAKECPLSQSMISSIVNSTYYANVSAAKCQEFGRWYKHFKKTKDMMVEMDSLSELSQQGANHVNFGQQPVPGNTAEQPPSPAQLSHGSQPSVRTPLPNLHPGLVSTPISPQLVNQQLVMAQLLNQQYAVNRLLAQQSLNQQYLNHPPPVSRSMNKPLEQQVSTNTEVSSEIYQWVRDELKRAGISQAVFARVAFNRTQGLLSEILRKEEDPKTASQSLLVNLRAMQNFLQLPEAERDRIYQDERERSLNAASAMGPAPLISTPPSRPPQVKTATIATERNGKPENNTMNINASIYDEIQQEMKRAKVSQALFAKVAATKSQGWLCELLRWKEDPSPENRTLWENLSMIRRFLSLPQPERDAIYEQESNAVHHHGDRPPHIIHVPAEQIQQQQQQQQQQQQQQQAPPPPQPQQQPQTGPRLPPRQPTVASPAESDEENRQKTRPRTKISVEALGILQSFIQDVGLYPDEEAIQTLSAQLDLPKYTIIKFFQNQRYYLKHHGKLKDNSGLEVDVAEYKEEELLKDLEESVQDKNTNTLFSVKLEEELSVEGNTDINTDLKD

SEQ ID NO: 7337 - protein, 853 aa, Homo sapiens
MCCEKWSRVAEMFLFTEEREDCKILCLCSRAFVEDRKLYNLGLKGYYIRDSGNNSGDQATEEEEGGYSCGTAESHDSKGIGLDESELDSEAELMRSMGLPLQFGRITAHKDFEVSMNTRNKVKIKKKKHQKKYLDEIVQESWRKEYEEDDILASDDPSSIEQYENTRTYELQSKKDTETENPPVENTLSPKLEITEKWEKYWNEYGGGLLWQSWQEKHPGQALSSEPWNFPDTKEEWEQHYSQLYWYYLEQFQYWEAQGWTFDASQSCDTDTYTSKTEADDKNDEKCMKVDLVSFPSSPIMVDNDSSGTSDKDHSEILDGISNIKLNSEEVTQSQLDSCTSHDGHQQLSEVSSKRECPASGQSEPRNGGTNEESNSSGNTNTDPPAEDSQKSSGANTSKDRPHASGTDGDESEEDPPEHKPSKLKRSHELDIDENPASDFDDSGSLLGFKYGSGQKYGGIPNFSHRQVRYLEKNVKLKSKYLDMRRQIKMKNKHIFFTKESEKPFFKKSKILSKVEKFLTWVNKPMDEEASQESSSHDNVHDASTSSDSEEQDMSVKKGDDLLETNNPEPEKCQSVSSAGELETENYERDSLLATVPDEQDCVTQEVPDSRQAETEAEVKKKKTKKKTKKVNGLPPEIAAVPELAKYWAQRYRLFSRFDDGIKLDREGWFSVTPEKIAEHIAGRVSQSFKCDVVVDAFCGVGGNTIQFALTGMRVIAIDIDPVKIALARNNAEVYGIADKIEFICGDFLLLASFLKADVVFLSPPWGGPDYATAETFDIRTMMSPDGFEIFRLSKKITNNIVYFLPRNADIDQVASLAGPGGQVEIEQNFLNNKLKTITAYFGDLIRRPASET

SEQ ID NO: 7338 - protein, 853 aa, Homo sapiens [sequence omitted]

SEQ ID NO: 7339 - protein, 1663 aa, Homo sapiens
MTDRFWDQWYLWYLRLLRLLDRGSFRNDGLKASDVLPILKEKVAFVSGGRDKRGGPILTFPARSNHDRIRQEDLRKLVTYLASVPSEDVCKRGFTVIIDMRGSKWDLIKPLLKTLQEAFPAEIHVALIIKPDNFWQKQKTNFGSSKFIFETSMVSVEGLTKLVDPSQLTEEFDGSLDYNHEEWIELRLSLEEFFNSAVHLLSRLEDLQEMLARKEFPVDVEGSRRLIDEHTQLKKKVLKAPVEELDREGQRLLQCIRCSDGFSGRNCIPGSADFQSLVPKITSLLDKLHSTRQHLHQMWHVRKLKLDQCFQLRLFEQDAEKMFDWISHNKELFLQSHTEIGVSYQYALDLQTQHNHFAMNSMNAYVNINRIMSVASRLSEAGHYASQQIKQISTQLDQEWKSFAAALDERSTILAMSAVFHQKAEQFLSGVDAWCKMCSEGGLPSEMQDLELAIHHHQTLYEQVTQAYTEVSQDGKALLDVLQRPLSPGNSESLTATANYSKAVHQVLDVVHEVLHHQRRLESIWQHRKVRLHQRLQLCVFQQDVQQVLDWIENHGEAFLSKHTGVGKSLHRARALQKRHDDFEEVAQNTYTNADKLLEAAEQLAQTGECDPEEIYKAARHLEVRIQDFVRRVEQRKLLLDMSVSFHTHTKELWTWMEDLQKEMLEDVCADSVDAVQELIKQFQQQQTATLDATLNVIKEGEDLIQQLRSAPPSLGEPSEARDSAVSNNKTPHSSSISHIESVLQQLDDAQVQMEELFHERKIKLDIFLQLRIFEQYTIEVTAELDAWNEDLLRQMNDFNTEDLTLAEQRLQRHTERKLAMNNMTFEVIQQGQDLHQYITEVQASGIELICEKDIDLAAQVQELLEFLHEKQHELELNAEQTHKRLEQCLQLRHLQAEVKQVLGWIRNGESMLNASLVNASSLSEAEQLQREHEQFQLAIESLFHATSLQKTHQSALQVQQKAEVLLQAGHYDADAIRECAEKVALHWQQLMLKMEDRLKLVNASVAFYKTSEQVCSVLESLEQEYRRDEDWCGGRDKLGPAAEIDHVIPLISKHLEQKEAFLKACTLARRNAEVFLKYIHRNNVSMPSVASHTRGPEQQVKAILSELLQRENRVLHFWTLKKRRLDQCQQYVVFERSAKQALDWIQETGEFYLSTHTSTGETTEETQELLKEYGEFRVPAKQTKEKVKLLIQLADSFVEKGHIHATEIRKWVTTVDKHYRDFSLRMGKYRYSLEKALGVNTEDNKDLELDIIPASLSDREVKLRDANHEVNEEKRKSARKKEFIMAELLQTEKAYVRDLHECLETYLWEMTSGVEEIPPGILNKEHIIFGNIQEIYDFHNNIFLKELEKYEQLPEDVGHCFVTWADKFQMYVTYCKNKPDSNQLILEHAGTFFDEIQQRHGLANSISSYLIKPVQRITKYQLLLKELLTCCEEGKGELKDGLEVMLSVPKKANDAMHVSMLEGFDENLDVQGELILQDAFQVWDPKSLIRKGRERHLFLFEISLVFSKEIKDSSGHTKYVYKNKLLTSELGVTEHVEGDPCKFALWSGRTPSSDNKTVLKASNIETKQEWIKNIREVIQERIIHLKGALKEPLQLPKTPAKQRNNSKRDGVEDIDSQGDGSSQPDTISIASRTSQNTVDSDKDGNLVPRWHLGPGDPFSTYV

SEQ ID NO: 7340 - protein, 723 aa, Homo sapiens
MPSGTEQQTEGTSVTFSPLKSPPQLEREMASPPECSEMPLDLSSKSNRQKLPLPNQRKTPPMPVLTPVHTSSKALLSTVLSRSQRTTQAAGGNVTSCLGSTSSPFVIFPEIVRNGDPSTWVKNSTALISTIPGTYVGVANPVPASLLLNKDPNLGLNRDPRHLPKQEPISIIDQGEPKGTGATCGKKGSQAGAEGQPSTVKRYTPARIAPGLPGCQTKELSLWKPTGPANIYPRCSVNGKPTSTQVLPVGWSPYHQASLLSIGISSAGQLTPSQGAPIRPTSVVSEFSGVPSLSSSEAVHGLPEGQPRPGGSFVPEQDPVTKNKTCRIAAKPYEEQVNPVLLTLSPQTGTLALSVQPSGGDIRMNQGPEESESHLCSDSTPKMEGPQGACGLKLAGDTKPKNQVLATYMSHELVLATPQNLPKMPELPLLPHDSHPKELILDVVPSSRRGSSTERPQLGSQVDLGRVKMEKVDGDVVFNLATCFRADGLPVAPQRGQAEVRAKAGQARVKQESVGVFACKNKWQPDDVTESLPPKKMKCGKEKDSEEQQLQPQAKAVVRSSHRPKCRKLPSDPQESTKKSPRGASDSGKEHNGVRGKHKHRKPTKPESQSPGKRADSHEEGSLEKKAKSSFRDFIPVVLSTRTRSQSDLKARKQKTSSSQSLEHRLRNRNLLLPNKVQGISDSPNGFLPNNLEEPACLENSEKPSGKRKCKTKHMATVSEEAK

SEQ ID NO: 7341 - protein, 1719 aa, Homo sapiens
MISTAPLYSGVHNWTSSDRIRMCGINEERRAPLSDEESTTGDCQHFGSQEFCVSSSFSKVELTAVGSGSNARGADPDGSATEKLGHKSEDKPDDPQPKMDYAGNVAEAEGFLVPLSSPGDGLKLPASDSAEASNSRADCSWTPLNTQMSKQVDCSPAGVKALDSRQGVGEKNTFILATLGTGVPVEGTLPLVTTNFSPLPAPICPPAPGSASVPHSVPDAFQVPLSVPAPVPHSGLVPVQVATSVPAPSPPLAPVPALAPAPPSVPTLISDSNPLSVSASVLVPVPASAPPSGPVPLSAPAPAPLSVPVSAPPLALIQAPVPPSAPTLVLAPVPTPVLAPMPASTPPAAPAPPSVPMPTPTPSSGPPSTPTLIPAFAPTPVPAPTPAPIFTPAPTPMPAATPAAIPTSAPIPASFSLSRVCFPAAQAPAMQKVPLSFQPGTVLTPSQPLVYIPPPSCGQPLSVATLPTTLGVSSTLTLPVLPSYLQDRCLPGVLASPELRSYPYAFSVARPLTSDSKLVSLEVNRLPCTSPSGSTTTQPAPDGVPGPLADTSLVTASAKVLPTPQPLLPAPSGSSAPPHPAKMPSGTEQQTEGTSVTFSPLKSPPQLEREMASPPECSEMPLDLSSKSNRQKLPLPNQRKTPPMPVLTPVHTSSKALLSTVLSRSQRTTQAAGGNVTSCLGSTSSPFVIFPEIVRNGDPSTWVKNSTALISTIPGTYVGVANPVPASLLLNKDPNLGLNRDPRHLPKQEPISIIDQGEPKGTGATCGKKGSQAGAEGQPSTVKRYTPARIAPGLPGCQTKELSLWKPTGPANIYPRCSVNGKPTSTQVLPVGWSPYHQASLLSIGISSAGQLTPSQGAPIRPTSVVSEFSGVPSLSSSEAVHGLPEGQPRPGGSFVPEQDPVTKNKTCRIAAKPYEEQVNPVLLTLSPQTGTLALSVQPSGGDIRMNQGPEESESHLCSDSTPKMEGPQGACGLKLAGDTKPKNQVLATYMSHELVLATPQNLPKMPELPLLPHDSHPKELILDVVPSSRRGSSTERPQLGSQVDLGRVKMEKVDGDVVFNLATCFRADGLPVAPQRGQAEVRAKAGQARVKQESVGVFACKNKWQPDDVTESLPPKKMKCGKEKDSEEQQLQPQAKAVVRSSHRPKCRKLPSDPQESTKKSPRGASDSGKEHNGVRGKHKHRKPTKPESQSPGKRADSHEEGSLEKKAKSSFRDFIPVVLSTRTRSQSGSICSSFAGMADSDMGSQEVFPTEEEEEVTPTPAKRRKVRKTQRDTQYRSHHAQDKSLLSQGRRHLWRAREMPWRTEAARQMWDTNEEEEEEEEEGLLKRKKRRRQKSRKYQTGEYLTEQEDEQRRKGRADLKARKQKTSSSQSLEHRLRNRNLLLPNKVQGISDSPNGFLPNNLEEPACLENSEKPSGKRKCKTKHMATVSEEAKDVVLYCLQKDSEDVNHRDNAGYTALHEACSRGWTDILNILLEHGANVNCSAQDGTRQEGCISPQPVHDAVVNDNLETIWLLLSYGADPTLATYSGQTAMKLASSDTMKRFLSDHLSDLQGRAEGDPGVSWDFYSSSVLEEKDGFACDLLHNPPGSSDQEGDDPMEEDDFMFELSDKPLLPCYNLQVSVSRGPCNWFLFSDVLKRLKLSSRIFQARFPHFEITTMPKAEFYRQVASSQLLTPAERPGGLDDRSPPGSSETVELVRYEPDLLRLLGSEVEFQSCNS

SEQ ID NO: 7342 - protein, 684 aa, Homo sapiens
MSAIPAEESDQLLIRPLGAGQEVGRSCIILEFKGRKIMLDCGIHPGLEGMDALPYIDLIDPAEIDLLLISHFHLDHCGALPWFLQKTSFKGRTFMTHATKAIYRWLLSDYVKVSNISADDMLYTETDLEESMDKIETINFHEVKEVAGIKFWCYHAGHVLGAAMFMIEIAGVKLLYTGDFSRQEDRHLMAAEIPNIKPDILIIESTYGTHIHEKREEREARFCNTVHDIVNRGGRGLIPVFALGRAQELLLILDEYWQNHPELHDIPIYYASSLAKKCMAVYQTYVNAMNDKIRKQININNPFVFKHISNLKSMDHFDDIGPSVVMASPGMMQSGLSRELFESWCTDKRNGVIIAGYCVEGTLAKHIMSEPEEITTMSGQKLPLKMSVDYISFSAHTDYQQTSEFIRALKPPHVILVHGEQNEMARLKAALIREYEDNDEVHIEVHNPRNTEAVTLNFRGEKLAKVMGFLADKKPEQGQRVSGILVKRNFNYHILSPCDLSNYTDLAMSTVKQTQAIPYTGPFNLLCYQLQKLTGDVEELEIQEKPALKVFKNITVIQEPGMVVLEWLANPSNDMYADTVTTVILEVQSNPKIRKGAVQKVSKKLEMHVYSKRLEIMLQDIFGEDCVSVKDDSILSVTVDGKTANLNLETRTVECEEGSEDDESLREMVELAAQRLYEALTPVH

SEQ ID NO: 7343 - protein, 748 aa, Homo sapiens
THEEHHAAKTLGIGKAIAVLTSGGDAQGMNAAVRAVVRVGIFTGARVFFVHEGYQGLVDGGDHIKEATWESVSMMLQLGGTVIGSARCKDFREREGRLRAAYNLVKRGITNLCVIGGDGSLTGADTFRSEWSDLLSDLQKAGKITDEEATKSSYLNIVGLVGSIDNDFCGTDMTIGTDSALHRIMEIVDAITTTAQSHQRTFVLEVMGRHCGYLALVTSLSCGADWVFIPECPPDDDWEEHLCRRLSETRTRGSRLNIIIVAEGAIDKNGKPITSEDIKNGSRMGVEAVMALLEGTPDTPACVVSLSGNQAVRLPLMECVQVTKDVTKAMDEKKFDEALKLRGRSFMNNWEVYKLLAHVRPPVSKSGSHTVAVMNVGAPAAGMNAAVRSTVRIGLIQGNRVLVVHDGFEGLAKGQIEEAGWSYVGGWTGQGGSKLGTKRTLPKKSFEQISANITKFNIQGLVIIGGFEAYTGGLELMEGRKQFDELCIPFVVIPATVSNNVPGSDFSVGADTALNTICTTCDRIKQSAAGTKRRVFIIETMGGYCGYLATMAGLAAGADAAYIFEEPFTIRDLQANVEHLVQKMKTTVKRGLVLRNEKCNENYTTDFIFNLYSEEGKGIFDSRKNVLGHMQQGGSPTPFDRNFATKMGAKAMNWMSGKIKESYRNGRIFANTPDSGCVLGMRKRALVFQPVAELKDQTDFEHRIPKEQWWLKLRPILKILAKYEIDLDTSDHAHLEHITRKRSGEAAV

SEQ ID NO: 7344 - protein, 780 aa, Homo sapiens
MTHEEHHAAKTLGIGKAIAVLTSGGDAQGMNAAVRAVVRVGIFTGARVFFVHEGYQGLVDGGDHIKEATWESVSMMLQLGGTVIGSARCKDFREREGRLRAAYNLVKRGITNLCVIGGDGSLTGADTFRSEWSDLLSDLQKAGKITDEEATKSSYLNIVGLVGSIDNDFCGTDMTIGTDSALHRIMEIVDAITTTAQSHQRTFVLEVMGRHCGYLALVTSLSCGADWVFIPECPPDDDWEEHLCRRLSETRTRGSRLNIIIVAEGAIDKNGKPITSEDIKNLVVKRLGYDTRVTVLGHVQRGGTPSAFDRILGSRMGVEAVMALLEGTPDTPACVVSLSGNQAVRLPLMECVQVTKDVTKAMDEKKFDEALKLRGRSFMNNWEVYKLLAHVRPPVSKSGSHTVAVMNVGAPAAGMNAAVRSTVRIGLIQGNRVLVVHDGFEGLAKGQIEEAGWSYVGGWTGQGGSKLGTKRTLPKKSFEQISANITKFNIQGLVIIGGFEAYTGGLELMEGRKQFDELCIPFVVIPATVSNNVPGSDFSVGADTALNTICTTCDRIKQSAAGTKRRVFIIETMGGYCGYLATMAGLAAGADAAYIFEEPFTIRDLQANVEHLVQKMKTTVKRGLVLRNEKCNENYTTDFIFNLYSEEGKGIFDSRKNVLGHMQQGGSPTPFDRNFATKMGAKAMNWMSGKIKESYRNGRIFANTPDSGCVLGMRKRALVFQPVAELKDQTDFEHRIPKEQWWLKLRPILKILAKYEIDLDTSDHAHLEHITRKRSGEAAV

SEQ ID NO: 7345 - protein, 2285 aa, Homo sapiens [sequence omitted]

SEQ ID NO: 7346 - protein, 505 aa, Homo sapiens
MDPGNENSATEAAAIIDLDPDFEPQSRPRSCTWPLPRPEIANQPSEPPEVEPDLGEKVHTEGRSEPILLPSRLPEPAGAPQPGILGAVTGPRKGGSRRNAWGNQSYAELISQAIESAPEKRLTLAQIYEWMVRTVPYFKDKGDSNSSAGWKNSIRHNLSLHSKFIKVHNEATGKSSWWMLNPEGGKSGKAPRRRAASMDSSSKLLRGRSKAPKKKPSVLPAPPEGATPTSPVGHFAKWSGSPCSRNREEADMWTTFRPRSSSNASSVSTRLSPLRPESEVLAEEIPASVSSYAGGVPPTLNEGLELLDGLNLTSSHSLLSRSGLSGFSLQHPGVTGPLHTYSSSLFSPAEGPLSAGEGCFSSSQALEALLTSDTPPPPADVLMTQVDPILSQAPTLLLLGGLPSSSKLATGVGLCPKPLEARGPSSLVPTLSMIAPPPVMASAPIPKALGTPVLTPPTEAASQDRMPQDLDLDMYMENLECDMDNIISDLMDEGEGLDFNFEPDP

SEQ ID NO: 7347 - protein, 401 aa, Homo sapiens
MKRRQLQNSVQQTEKGLFGSSRVQYVVDHAMKIVFLNTDPSIVTTYDAVQNVHSVWTLRRVKSEEENVVLKFSEQGGTPQNVATSSSLTAHLRSLSKGDSPVISPFRNYSSIHSQSRSTSSPSLHSRSPSISNMAALSRAHSPALGVHSFSGVQRFNISSHNQSPKRHSISHSPNSNSNDSFLAPETEPIVPELCIDHLWTEMITNISCVKFQESNDKTQLIFDSVTNIPAKDAAPVEKIDTMLVLEGSGNLVLYTGVVRATECGGASTELCSVSLCAFTMLMDYEVNNILGLGHTFWALLASPKMEHKEVVLLLLLFLKSGQGEPLDDYVNAQGASLFSVTKKQLGAGSREECAAKCEEDKEFTCRAFQYHSKEQQCVIMAENKKSSIIIRMRDVVLFEK

SEQ ID NO: 7348 - protein, 2286 aa, Homo sapiens
MSLRSGGRRRADPGADGEASRDDGATSSVSALKRLERSQWTDKMDLRFGFERLKEPGEKTGWLINMHPTEILDEDKRLGSAVDYYFIQDDGSRFKVALPYKPYFYIATRKGCEREVSSFLSKKFQGKIAKVETVPKEDLDLPNHLVGLKRNYIRLSFHTVEDLVKVRKEISPAVKKNREQDHASDAYTALLSSVLQRGGVITDEEETSKKIADQLDNIVDMREYDVPYHIRLSIDLKIHVAHWYNVRYRGNAFPVEITRRDDLVERPDPVVLAFDIETTKLPLKFPDAETDQIMMISYMIDGQGYLITNREIVSEDIEDFEFTPKPEYEGPFCVFNEPDEAHLIQRWFEHVQETKPTIMVTYNGDFFDWPFVEARAAVHGLSMQQEIGFQKDSQGEYKAPQCIHMDCLRWVKRDSYLPVGSHNLKAAAKAKLGYDPVELDPEDMCRMATEQPQTLATYSVSDAVATYYLYMKYVHPFIFALCTIIPMEPDEVLRKGSGTLCEALLMVQAFHANIIFPNKQEQEFNKLTDDGHVLDSETYVGGHVEALESGVFRSDIPCRFRMNPAAFDFLLQRVEKTLRHALEEEEKVPVEQVTNFEEVCDEIKSKLASLKDVPSRIECPLIYHLDVGAMYPNIILTNRLQPSAMVDEATCAACDFNKPGANCQRKMAWQWRGEFMPASRSEYHRIQHQLESEKFPPLFPEGPARAFHELSREEQAKYEKRRLADYCRKAYKKIHITKVEERLTTICQRENSFYVDTVRAFRDRRYEFKGLHKVWKKKLSAAVEVGDAAEVKRCKNMEVLYDSLQLAHKCILNSFYGYVMRKGARWYSMEMAGIVCFTGANIITQARELIEQIGRPLELDTDGIWCVLPNSFPENFVFKTTNVKKPKVTISYPGAMLNIMVKEGFTNDQYQELAEPSSLTYVTRSENSIFFEVDGPYLAMILPASKEEGKKLKKRYAVFNEDGSLAELKGFEVKRRGELQLIKIFQSSVFEAFLKGSTLEEVYGSVAKVADYWLDVLYSKAANMPDSELFELISENRSMSRKLEDYGEQKSTSISTAKRLAEFLGDQMVKDAGLSCRYIISRKPEGSPVTERAIPLAIFQAEPTVRKHFLRKWLKSSSLQDFDIRAILDWDYYIERLGSAIQKIITIPAALQQVKNPVPRVKHPDWLHKKLLEKNDVYKQKKISELFTLEGRRQVTMAEASEDSPRPSAPDMEDFGLVKLPHPAAPVTVKRKRVLWESQEESQDLTPTVPWQEILGQPPALGTSQEEWLVWLRFHKKKWQLQARQRLARRKRQRLESAEGVLRPGAIRDGPATGLGSFLRRTARSILDLPWQIVQISETSQAGLFRLWALVGSDLHCIRLSIPRVFYVNQRVAKAEEGASYRKVNRVLPRSNMVYNLYEYSVPEDMYQEHINEINAELSAPDIEGVYETQVPLLFRALVHLGCVCVVNKQLVRHLSGWEAETFALEHLEMRSLAQFSYLEPGSIRHIYLYHHAQAHKALFGIFIPSQRRASVFVLDTVRSNQMPSLGALYSAEHGLLLEKVGPELLPPPKHTFEVRAETDLKTICRAIQRFLLAYKEERRGPTLIAVQSSWELKRLASEIPVLEEFPLVPICVADKINYGVLDWQRHGARRMIRHYLNLDTCLSQAFEMSRYFHIPIGNLPEDISTFGSDLFFARHLQRHNHLLWLSPTARPDLGGKEADDNCLVMEFDDQATVEINSSGCYSTVCVELDLQNLAVNTILQSHHVNDMEGADSMGISFDVIQQASLEDMITGGQAASAPASYDETALCSNTFRILKSMVVGWVKEITQYHNIYADNQVMHFYRWLRSPSSLLHDPALHRTLHNMMKKLFLQLIAEFKRLGSSVIYANFNRIILCTKKRRVEDAIAYVEYITSSIHSKETFHSLTISFSRCWEFLLWMDPSNYGGIKGKVSSRIHCGLQDSQKAGGAEDEQENEDDEEERDGEEEEEAEESNVEDLLENNWNILQFLPQAASCQNYFLMIVSAYIVAVYHCMKDGLRRSAPGSTPVRRRGASQLSQEAEGAVGALPGMITFSQDYVANELTQSFFTITQKIQKKVTGSRNSTELSEMFPVLPGSHLLLNNPALEFIKYVCKVLSLDTNITNQVNKLNRDLLRLVDVGEFSEEAQFRDPCRSYVLPEVICRSCNFCRDLDLCKDSSFSEDGAVLPQWLCSNCQAPYDSSAIEMTLVEVLQKKLMAFTLQDLVCLKCRGVKETSMPVYCTCAGDFALTIHTQVFMEQIGIFRNIAQHYGMSYLLETLEWLLQKNPQLGH

SEQ ID NO: 7349 - protein, 1917 aa, Homo sapiens
MQLRIRQEIEKEKKTEPWKEKFFERFYGEKLGMSREESVKLTTGPNNAGAQSSSSCGTSGLPVSAQTALAEQQPKSMKSPASPEPGFCATLCPMVEIPPKDIMAELESEDILIPEESVIQEEIAEEVETSICECQDENHKTIPEFSEEAESLTNSHEEPQIAPPEDNLESCVMMNDVLETLPHIEVKIEGKSESPQEEMTVVIDQLEVCDSLIPSTSSMTHVSDTEHKESETAVETSTPKIKTGSSSLEGQFPNEGIAIDMELQSDPEEQLSENACISETSFSSESPEGACTSLPSPGGETQSTSEESCTPASLETTFCSEVSSTENTDKYNQRNSTDENFHASLMSEISPISTSPEISEASLMSNLPLTSEASPVSNLPLTSETSPMSDLPLTSETSSVSSMLLTSETTFVSSLPLPSETSPISNSSINERMAHQQRKSPSVSEEPLSPQKDESSATAKPLGENLTSQQKNLSNTPEPIIMSSSSIAPEAFPSEDLHNKTLSQQTCKSHVDTEKPYPASIPELASTEMIKVKNHSVLQRTEKKVLPSPLELSVFSEGTDNKGNELPSAKLQDKQYISSVDKAPFSEGSRNKTHKQGSTQSRLETSHTSKSSEPSKSPDGIRNESRDSEISKRKTAEQHSFGICKEKRARIEDDQSTRNISSSSPPEKEQPPREEPRVPPLKIQLSKIGPPFIIKSQPVSKPESRASTSTSVSGGRNTGARTLADIKARAQQARAQREAAAAAAVAAAASIVSGAMGSPGEGGKTRTLAHIKEQTKAKLFAKHQARAHLFQTSKETRLPPPLSSKEGPPNLEVSSTPETKMEGSTGVIIVNPNCRSPSNKSAHLRETTTVLQQSLNPSKLPETATDLSVHSSDENIPVSHLSEKIVSSTSSENSSVPMLFNKNSVPVSVCSTAISGAIKEHPFVSSVDKSSVLMSVDSANTTISACNISMLKTIQGTDTPCIAIIPKCIESTPISATTEGSSISSSMDDKQLLISSSSASNLVSTQYTSVPTPSIGNNLPNLSTSSVLIPPMGINNRFPSEKIAIPGSEEQATVSMGTTVRAALSCSDSVAVTDSLVAHPTVAMFTGNMLTINSYDSPPKLSAESLDKNSGPRNRADNSGKPQQPPGGFAPAAINRSIPCKVIVDHSTTLTSSLSLTVSVESSEASLDLQGRPVRTEASVQPVACPQVSVISRPEPVANEGIDHSSTFIAASAAKQDSKTLPATCTSLRELPLVPDKLNEPTAPSHNFAEQARGPAPFKSEADTTCSNQYNPSNRICWNDDGMRSTGQPLVTHSGSSKQKEYLEQSCPKAIKTEHANYLNVSELHPRNLVTNVALPVKSELHEADKGFRMDTEDFPGPELPPPAAEGASSVQQTQNMKASTSSPMEEAISLATDALKRVPGAGSSGCRLSSVEANNPLVTQLLQGNLPLEKVLPQPRLGAKLEINRLPLPLQTTSVGKTAPERNVEIPPSSPNPDGKGYLAGTLAPLQMRKRENHPKKRVARTVGEHTQVKCEPGKLLVEPDVKGVPCVISSGISQLGHSQPFKQEWLNKHSMQNRIVHSPEVKQQKRLLPSCSFQQNLFHVDKNGGFHTDAGTSHRQQFYQMPVAARGPIPTAALLQASSKTPVGCNAFAFNRHLEQKGLGEVSLSSAPHQLRLANMLSPNMPMKEGDEVGGTAHTMPNKALVHPPPPPPPPPPPPLALPPPPPPPPPLPPPLPNAEVPSDQKQPPVTMETTKRLSWPQSTGICSNIKSEPLSFEEGLSSSCELGMKQVSYDQNEMKEQLKAFALKSADFSSYLLSEPQKPFTQLAAQKMQVQQQQQLCGNYPTIHFGSTSFKRAASAIEKSIGILGSGSNPATGLSGQNAQMPVQNFADSSNADELELKCSCRLKAMIVCKGCGAFCHDDCIGPSKLCVACLVVR

SEQ ID NO: 7350 - protein, 541 aa, Homo sapiens
MRLKMTTRNFPEREVPCDVEVERFTREVPCLSSLGDGWDCENQEGHLRQSALTLEKPGTQEAICEYPGFGEHLIASSDLPPSQRVLATNGFHAPDSNVSGLDCDPALPSYPKSYADKRTGDNDACGKGFNHSMEVIHGRNPVREKPYKYPESVKSFNHFTSLGHQKIMKRGKKSYEGKNFENIFTLSSSLNENQRNLPGEKQYRCTECGKCFKRNSSLVLHHRTHTGEKPYTCNECGKSFSKNYNLIVHQRIHTGEKPYECSKCGKAFSDGSALTQHQRIHTGEKPYECLECGKTFNRNSSLILHQRTHTGEKPYRCNECGKPFTDISHLTVHLRIHTGEKPYECSKCGKAFRDGSYLTQHERTHTGEKPFECAECGKSFNRNSHLIVHQKIHSGEKPYECKECGKTFIESAYLIRHQRIHTGEKPYGCNQCQKLFRNIAGLIRHQRTHTGEKPYECNQCGKAFRDSSCLTKHQRIHTKETPYQCPECGKSFKQNSHLAVHQRLHSREGPSRCPQCGKMFQKSSSLVRHQRAHLGEQPMET

SEQ ID NO: 7351 - protein, 314 aa, Homo sapiens
MIATPLKHSRIYLPPEASSQRRNLPMDAIFFDSIPSGTLTPVKDLVKYQNSSLKLNDHKKNQFLKMTTFNNKNIFQSTMLTEATTSNSSLDISAIKPNKDGLKNKANYESPGKIFLRMKEKVLRDKQEQPSRNSSLLEPQKSGNNETFTPNRVEKKKLQHTYLCEEKENNKSFQSDDSSLRASVQGVPLESSNNDIFLPVKQKIQCQQEKKAPLHNLTYELPTLNQEQENFLAVEARNKTLTRAQLAKQIFHSKESIVATTKSKKDTFVLESVDSADEQFQNTNAETLSTNCIPIKNGSLLMVSDSERTTEGTS

SEQ ID NO: 7352 - protein, 179 aa, Homo sapiens
MIATPLKHSRIYLPPEASSQRRNLPMDAIFFDSIPSGTLTPVKDLVKYQNSSLKLNDHKKNQFLKMTTFNNKNIFQSTMLTEATTSNSSLDISAIKPNKDGLKNKANYESPGKIFLRMKEKVLRDKQEQPSRNSSLLEPQKSGNNETFTPNRVEKKNCSIPTYVKKRKTTNHSSQMTVH

SEQ ID NO: 7353 - protein, 721 aa, Homo sapiens
MAQGLEVALTDLQSSRNNVRHHTEEITVDHLLVRRGQAFNLTLYFRNRSFQPGLDNIIFVVETGPLPDLALGTRAVFSLARHHSPSPWIAWLETNGATSTEVSLCAPPTAAVGRYLLKIHIDSFQGSVTAYQLGEFILLFNPWCPEDAVYLDSEPQRQEYVMNDYGFIYQGSKNWIRPCPWNYGQFEDKIIDICLKLLDKSLHFQTDPATDCALRGSPVYVSRVVCAMINSNDDNGVLNGNWSENYTDGANPAEWTGSVAILKQWNATGCQPVRYGQCWVFAAVMCTVMRCLGIPTRVITNFDSGHDTDGNLIIDEYYDNTGRILGNKKKDTIWNFHVWNECWMARKDLPPAYGGWQVLDATPQEMSNGVYCCGPASVRAIKEGEVDLNYDTPFVFSMVNADCMSWLVQGGKEQKLHQDTSSVGNFISTKSIQSDERDDITENYKYEEGSLQERQVFLKALQKLKARSFHGSQRGAELQPSRPTSLSQDSPRSLHTPSLRPSDVVQVSLKFKLLDPPNMGQDICFVLLALNMSSQFKDLKVNLSAQSLLHDGSPLSPFWQDTAFITLSPKEAKTYPCKISYSQYSQYLSTDKLIRISALGEEKSSPEKILVNKIITLSYPSITINVGRRAAVVNQPLSIQVIFSNPLSEQVEDCVLTVEGSGLFKKQQKVFLGVLKPQHQASIILETVPFKSGQRQIQANMRSNKFKDIKGYRNVYVDFAL

SEQ ID NO: 7354 - protein, 2134 aa, Homo sapiens
MPGLDRPLSRQNPHDGVVTPAASPSLPQPGLQMPGQWGPVQGGPQPSGQHRSPCPEGPVPSGVPCATSVPHFPTPSILHQGPGHEQHSPLVAPPAALPSDGRDEVSHLQSGSHLANNSDPESTFRQNPRIVNHWASPELRQNPGVKNEHRPASALVNPLARGDSPENRTHHPLGAGAGSGCAPLEADSGASGALAMFFQGGETENEENLSSEKAGLSGQADFDDFCSSPGLGRPPAPTHVGAGSLCQALLPGPSNEAAGDVWGDTASTGVPDASGSQYENVENLEFVQNQEVLPSEPLNLDPSSPSDQFRYGPLPGPAVPRHGAVCHTGAPDATLHTVHPDSVSSSYSSRSHGRLSGSARPQELVGTFIQQEVGKPEDEASGSFFKQIDSSPVGGETDETTVSQNYRGSVSQPSTPSPPKPTGIFQTSANSSFEPVKSHLVGVKPFEADRANVVGEVRETCVRQKQCRPAAALPDASPGNLEQPPDNMETLCAPQVCPLPLNSTTEAVHMLPHAGAPPLDTVYPAPEKRPSARTQGPVKCESPATTLWAQSELPDFGGNVLLAPAAPALYVCAKPQPPVVQPPEEAMSGQQSRNPSSAAPVQSRGGIGASENLENPPKMGEEEALQSQASSGYASLLSSPPTESLQNPPVLIAQPDHSYNLAQPINFSVSLSNSHEKNQSWREALVGDRPAVSSWALGGDSGENTSLSGIPTSSVLSLSLPSSVAQSNFPQGSGASEMVSNQPANLLVQPPSQPVPENLVPESQKDRKAGSALPGFANSPAGSTSVVLVPPAHGTLVPDGNKANHSSHQEDTYGALDFTLSRTLENPVNVYNPSHSDSLASQQSVASHPRQSGPGAPNLDRFYQQVTKDAQGQPGLERAQQELVPPQQQASPPQLPKAMFSELSNPESLPAQGQAQNSAQSPASLVLVDAGQQLPPRPPQSSSVSLVSSGSGQAAVPSEQPWPQPVPALAPGPPPQDLAAYYYYRPLYDAYQPQYSLPYPPEPGAASLYYQDVYSLYEPRYRPYDGAASAYAQNYRYPEPERPSSRASHSSERPPPRQGYPEGYYSSKSGWSSQSDYYASYYSSQYDYGDPGHWDRYHYSARVRDPRTYDRRYWCDAEYDAYRREHSAFGDRPEKRDNNWRYDPRFTGSFDDDPDPHRDPYGEEVDRRSVHSEHSARSLHSAHSLASRRSSLSSHSHQSQIYRSHNVAAGSYEAPLPPGSFHGDFAYGTYRSNFSSGPGFPEYGYPADTVWPAMEQVSSRPTSPEKFSVPHVCARFGPGGQLIKVIPNLPSEGQPALVEVHSMEALLQHTSEQEEMRAFPGPLAKDDTHKVDVINFAQNKAMKCLQNENLIDKESASLLWNFIVLLCRQNGTVVGTDIAELLLRDHRTVWLPGKSPNEANLIDFTNEAVEQVEEEESGEAQLSFLTGGPAAAASSLERETERFRELLLYGRKKDALESAMKNGLWGHALLLASKMDSRTHARVMTRFANSLPINDPLQTVYQLMSGRMPAASTCCGDEKWGDWRPHLAMVLSNLNNNMDVESRTMATMGDTLASRGLLDAAHFCYLMAQAGFGVYTKKTTKLVLIGSNHSLPFLKFATNEAIQRTEAYEYAQSLGAETCPLPSFQVFKFIYSCRLAEMGLATQAFHYCEAIAKSILTQPHLYSPVLISQLVQMASQLRLFDPQLKEKPEEESLAAPTWLVHLQQVERQIKEGAGVWHQDGALPQQCPGTPSSEMEQLDRPGLSQPGALGIANPLLAVPAPSPEHSSPSVRLLPSAPQTLPDGPLASPARVPMFPVPLPPGPLEPGPGCVTPGPALGFLEPSGPGLPPGVPPLQERRHLLQEARSPDPGIVPQEAPVGNSLSELSEENFDGKFANLTPSRTVPDSEAPPGWDRADSGPTQPPLSLSPAPETKRPGQAAKKETKEPKKGESWFFRWLPGKKKTEAYLPDDKNKSIVWDEKKNQWVNLNEPEEEKKAPPPPPTSMPKTVQAAPPALPGPPGAPVNMYSRRAAGTRARYVDVLNPSGTQRSEPALAPADFVAPLAPLPIPSNLFVPTPDAEEPQLPDGTGREGPAAARGLANPEPAPEPKAPGDLPAAGGPPSGAMPFYNPAQLAQACATSGSSRLGRIGQRKHLVLN

SEQ ID NO: 7355 - protein, 343 aa, Homo sapiens
VHNNSKHGRRARRLDPSEATPCIKAISPSEGWTTGGAMVIIIGDNFFDGLQVVFGTMLVWSELITPHAIRVQTPPRHIPGVVEVTLSYKSKQFCKGAPGRFIYTALNEPTIDYGFQRLQKVIPRHPGDPERLAKEMLLKRAADLVEALYGTPHNNQDIILKRAADIAEALYSVPRNPSQLPALSSSPAHSGMMGINSYGSQLGVSISESTQGNNQGYIRNTSSISPRGYSSSSTPQQSNYSTSSNSMNGYSNVPMANLGVPGSPGFLNGSPTGSPYGIMSLSPTVGSSSTSSILPFSSSVFPAVKQKSAFAPVIRPQGSPSPACSSGNGNGFRAMTGLVVPPM

SEQ ID NO: 7356 - protein, 1128 aa, Homo sapiens
MIAVSFKCRCQILRRLTKDESPYTKSASQTKPPDGALAVRRQSIPEEFKGSTVVELMKKEGTTLGLTVSGGIDKDGKPRVSNLRQGGIAARSDQLDVGDYIKAVNGINLAKFRHDEIISLLKNVGERVVLEVEYELPPVSVQGSSVIFRTVEVTLHKEGNTFGFVIRGGAHDDRNKSRPVVITCVRPGGPADREGTIKPGDRLLSVDGIRLLGTTHAEAMSILKQCGQEAALLIEYDVSVMDSVATASGPLLVEVAKTPGASLGVALTTSMCCNKQVIVIDKIKSASIADRCGALHVGDHILSIDGTSMEYCTLAEATQFLANTTDQVKLEILPHHQTRLALKGPDHVKIQRSDRQLTWDSWASNHSSLHTNHHYNTYHPDHCRVPALTFPKAPPPNSPPALVSSSFSPTSMSAYSLSSLNMGTLPRSLYSTSPRGTMMRRRLKKKDFKSSLSLASSTVGLAGQVVHTETTEVVLTADPVTGFGIQLQGSVFATETLSSPPLISYIEADSPAERCGVLQIGDRVMAINGIPTEDSTFEEASQLLRDSSITSKVTLEIEFDVAESVIPSSGTFHVKLPKKHNVELGITISSPSSRKPGDPLVISDIKKGSVAHRTGTLELGDKLLAIDNIRLDNCSMEDAVQILQQCEDLVKLKIRKDEDNSDEQESSGAIIYTVELKRYGGPLGITISGTEEPFDPIIISSLTKGGLAERTGAIHIGDRILAINSSSLKGKPLSEAIHLLQMAGETVTLKIKKQTDAQSASSPKKFPISSHLSDLGDVEEDSSPAQKPGKLSDMYPSTVPSVDSAVDSWDGSAIDTSYGTQGTSFQASGYNFNTYDWRSPKQRGSLSPVTKPRSQTYPDVGLSYEDWDRSTASGFAGAADSAETEQEENFWSQALEDLETCGQSGILRELEEKADRRVSLRNMTLLATIMSGSTMSLNHEAPTPRSQLGRQASFQERSSSRPHYSQTTRSNTLPSDVGRKSVTLRKMKQEIKEIMSPTPVELHKVTLYKDSDMEDFGFSVADGLLEKGVYVKNIRPAGPGDLGGLKPYDRLLQVNHVRTRDFDCCLVVPLIAESGNKLDLVISRNPLASQKSIDQQSLPGDWSEQNSAFFQQPSHGGNLETREPTNTL

SEQ ID NO: 7357 - protein, 592 aa, Homo sapiens
MAPGQLALFSVSDKTGLVEFARNLTALGLNLVASGGTAKALRDAGLAVRDVSELTGFPEMLGGRVKTLHPAVHAGILARNIPEDNADMARLDFNLIRVVACNLYPFVKTVASPGVTVEEAVEQIDIGGVTLLRAAAKNHARVTVVCEPEDYVVVSTEMQSSESKDTSLETRRQLALKAFTHTAQYDEAISDYFRKQYSKGVSQMPLRYGMNPHQTPAQLYTLQPKLPITVLNGAPGFINLCDALNAWQLVKELKEALGIPAAASFKHVSPAGAAVGIPLSEDEAKVCMVYDLYKTLTPISAAYARARGADRMSSFGDFVALSDVCDVPTAKIISREVSDGIIAPGYEEEALTILSKKKNGNYCVLQMDQSYKPDENEVRTLFGLHLSQKRNNGVVDKSLFSNVVTKNKDLPESALRDLIVATIAVKYTQSNSVCYAKNGQVIGIGAGQQSRIHCTRLAGDKANYWWLRHHPQVLSMKFKTGVKRAEISNAIDQYVTGTIGEDEDLIKWKALFEEVPELLTEAEKKEWVEKLTEVSISSDAFFPFRDNVDRAKRSGVAYIAAPSGSAADKVVIEACDELGIILAHTNLRLFHH

SEQ ID NO: 7358 - protein, 231 aa, Homo sapiens
LKYVDDIEKGNTIKRIPIHRRAKQAKFSTLPRNFSLPDICEEDPGAPAGAVELPGAWVPGAGQRHQAASLQAQQHPEPAAELPQPAAVEISPSTSLKSIMKKKDYGFRAGGNGTKKNLQFVGVNGGRKSSSPAVVASYLHEVQPHSPHFLKLLVNLADHNGNTALHYSVSHSNFSIVKLLLETGVCNVDHQNKAGYTAVMITPLASAETNEDMAVVWKLLREGNVNIQATQ

SEQ ID NO: 7359 - protein, 318 aa, Homo sapiens
MPNIKIFSGSSHQDLSQKIADRLGLELGKVVTKKFSNQETCVEIGESVRGEDVYIVQSGCGEINDNLMELLIMINACKIASASRVTAVIPCFPYARQDKKDKSRAPISAKLVANMLSVAGADHIITMDLHASQIQGFFDIPVDNLYAEPAVLKWIRENISEWRNCTIVSPDAGGAKRVTSIADRLNVDFALIHKERKKANEVDRMVLVGDVKDRVAILVDDMADTCGTICHAADKLLSAGATRVYAILTHGIFSGPAISRINNACFEAVVVTNTIPQEDKMKHCSKIQVIDISMILAEAIRRTHNGESVSYLFSHVPL

SEQ ID NO: 7360 - protein, 2004 aa, Homo sapiens
MVKLANPLYTEWILEAIKKVKKQKQRPSEERICNAVSSSHGLDRKTVLEQLELSVKDGTILKVSNKGLNSYKDPDNPGRIALPKPRNHGKLDNKQNVDWNKLIKRAVEGLAESGGSTLKSIERFLKGQKDVSALFGGSAASGFHQQLRLAIKRAIGHGRLLKDGPLYRLNTKATNVDGKESCESLSCLPPVSLLPHEKDKPVAEPIPICSFCLGTKEQNREKKPEELISCADCGNSGHPSCLKFSPELTVRVKALRWQCIECKTCSSCRDQGKNADNMLFCDSCDRGFHMECCDPPLTRMPKGMWICQICRPRKKGRKLLQKKAAQIKRRYTNPIGRPKNRLKKQNTVSKGPFSKVRTGPGRGRKRKITLSSQSASSSSEEGYLERIDGLDFCRDSNVSLRFNKKTKGLIDGLTKFFTPSPDGRKARGEVVDYSEQYRIRKRGNRKSSTSDWPTDNQDGWDGKQENEERLFGSQEIMTEKDMELFRDIQEQALQKVGVTGPPDPQVRCPSVIEFGKYEIHTWYSSPYPQEYSRLPKLYLCEFCLKYMKSRTILQQHMKKCGWFHPPANEIYRKNNISVFEVDGNVSTIYCQNLCLLAKLFLDHKTLYYDVEPFLFYVLTQNDVKGCHLVGYFSKEKHCQQKYNVSCIMILPQYQRKGYGRFLIDFSYLLSKREGQAGSPEKPLSDLGRLSYMAYWKSVILECLYHQNDKQISIKKLSKLTGICPQDITSTLHHLRMLDFRSDQFVIIRREKLIQDHMAKLQLNLRPVDVDPECLRWTPVIVSNSVVSEEEEEEAEEGENEEPQCQERELEISVGKSVSHENKEQDSYSVESEKKPEVMAPVSSTRLSKQVLPHDSLPANSQPSRRGRWGRKNRKTQERFGDKDSKLLLEETSSAPQEQYGECGEKSEATQEQYTESEEQLVASEEQPSQDGKPDLPKRRLSEGVEPWRGQLKKSPEALKCRLTEGSERLPRRYSEGDRAVLRGFSESSEEEEEPESPRSSSPPILTKPTLKRKKPFLHRRRRVRKRKHHNSSVVTETISETTEVLDEPFEDSDSERPMPRLEPTFEIDEEEEEEDENELFPREYFRRLSSQDVLRCQSSSKRKSKDEEEDEESDDADDTPILKPVSLLRKRDVKNSPLEPDTSTPLKKKKGWPKGKSRKPIHWKKRPGRKPGFKLSREIMPVSTQACVIEPIVSIPKAGRKPKIQESEETVEPKEDMPLPEERKEEEEMQAEAEEAEEGEEEDAASSEVPAASPADSSNSPETETKEPEVEEEEEKPRVSEEQRQSEEEQQELEEPEPEEEEDAAAETAQNDDHDADDEDDGHLESTKKKELEEQPTREDVKEEPGVQESFLDANMQKSREKIKDKEETELDSEEEQPSHDTSVVSEQMAGSEDDHEEDSHTKEELIELKEEEEIPHSELDLETVQAVQSLTQEESSEHEGAYQDCEETLAACQTLQSYTQADEDPQMSMVEDCHASEHNSPISSVQSHPSQSVRSVSSPNVPALESGYTQISPEQGSLSAPSMQNMETSPMMDVPSVSDHSQQVVDSGFSDLGSIESTTENYENPSSYDSTMGGSICGNSSSQSSCSYGGLSSSSSLTQSSCVVTQQMASMGSSCSMMQQSSVQPAANCSIKSPQSCVVERPPSNQQQQPPPPPPQQPQPPPPQPQPAPQPPPPQQQPQQQPQPQPQQPPPPPPPQQQPPLSQCSMNNSFTPAPMIMEIPESGSTGNISIYERIPGDFGAGSYSQPSATFSLAKLQQLTNTIMDPHAMPYSHSPAVTSYATSVSLSNTGLAQLAPSHPLAGTPQAQATMTPPPNLASTTMNLTSPLLQCNMSATNIGIPHTQRLQGQMPVKGHISIRSKSAPLPSAAAHQQQLYGRSPSAVAMQAGPRALAVQRGMNMGVNLMPTPAYNVNSMNMNTLNAMNSYRMTQPMMNSSYHSNPAYMNQTAQYPMQMQMGMMGSQAYTQQPMQPNPHGNMMYTGPSHHSYMNAAGVPKQSLNGPYMRR

SEQ ID NO: 7361 - protein, 524 aa, Homo sapiens
MHVETGPNGEQIRKHAGQKRTYKAISESYAFLPREAVTRFLMSCSECQKRMHLNPDGTDHKDNGKPPTLVTSMIDYNMPITMAYMKHMKLQLLNSQQDEDESSIESDEFDMSDSTRMSAVNSDLSSNLEERMQSPQNLHGQQDDDSAAESFNGNETLGHSSIASGGTHSREMGDSNSDGKTGLEQDEQPLNLSDSPLSAQLTSEYRIDDHNSNGKNKYKNLLISDLKMEREARENGSKSPAHSYSSYDSGKNESVDRGAEDLSLNRGDEDEDDHEDHDDSEKVNETDGVEAERLKAFNMFVRLFVDENLDRMVPISKQPKEKIQAIIDSCRRQFPEYQERARKRIRTYLKSCRRMKRSGFEMSRPIPSHLTSAVAESILASACESESRNAAKRMRLERQQDESAPADKQCKPEATQATYSTSAVPGSQDVLYINGNGTYSYHSYRGLGGGLLNLNDASSSGPTDLSMKRQLATSSGSSSSSNSRPQLSPTEINAVRQLVAGYRESAAFLLRSADELENLILQQN

SEQ ID NO: 7362 - protein, 422 aa, Homo sapiens
MHVETGPNGEQIRKHAGQKRTYKAISESYAFLPREAVTRFLMSCSECQKRMHLNPDGTDHKDNGKPPTLVTSMIDYNMPITMAYMKHMKLQLLNSQQDEDESSIESDEFDMSDSTRMSAVNSDLSSNLEERMQSPQNLHGQQDDDSAAESFNGNETLGHSSIASGGTHSREMGDSNSDGKTGLEQDEQPLNLSDSPLSAQLTSEYRIDDHNSNGKNKYKNLLISDLKMEREARENGSKSPAHSYSSYDSGKNESVDRGAEDLSLNRGDEDEDDHEDHDDSEKVNETDGVEAERLKAFNDESAPADKQCKPEATQATYSTSAVPGSQDVLYINGNGTYSYHSYRGLGGGLLNLNDASSSGPTDLSMKRQLATSSGSSSSSNSRPQLSPTEINAVRQLVAGYRESAAFLLRSADELENLILQQN

SEQ ID NO: 7363 - protein, 2969 aa, Homo sapiens
MDPRNTAMLGLGSDSEGFSRKSPSAISTGTLVSKREVELEKNTKEEEDLRKRNRERNIEAGKDDGLTDAQQQFSVKETNFSEGNLKLKIGLQAKRTKKPPKNLENYVCRPAIKTTIKHPRKALKSGKMTDEKNEHCPSKRDPSKLYKKADDVAAIECQSEEVIRLHSQGENNPLSKKLSPVHSEMADYINATPSTLLGSRDPDLKDRALLNGGTSVTEKLAQLIATCPPSKSSKTKPKKLGTGTTAGLVSKDLIRKAGVGSVAGIIHKDLIKKPTISTAVGLVTKDPGKKPVFNAAVGLVNKDSVKKLGTGTTAVFINKNLGKKPGTITTVGLLSKDSGKKLGIGIVPGLVHKESGKKLGLGTVVGLVNKDLGKKLGSTVGLVAKDCAKKIVASSAMGLVNKDIGKKLMSCPLAGLISKDAINLKAEALLPTQEPLKASCSTNINNQESQELSESLKDSATSKTFEKNVVRQNKESILEKFSVRKEIINLEKEMFNEGTCIQQDSFSSSEKGSYETSKHEKQPPVYCTSPDFKMGGASDVSTAKSPFSAVGESNLPSPSPTVSVNPLTRSPPETSSQLAPNPLLLSSTTELIEEISESVGKNQFTSESTHLNVGHRSVGHSISIECKGIDKEVNDSKTTHIDIPRISSSLGKKPSLTSESSIHTITPSVVNFTSLFSNKPFLKLGAVSASDKHCQVAESLSTSLQSKPLKKRKGRKPRWTKVVARSTCRSPKGLELERSELFKNVSCSSLSNSNSEPAKFMKNIGPPSFVDHDFLKRRLPKLSKSTAPSLALLADSEKPSHKSFATHKLSSSMCVSSDLLSDIYKPKRGRPKSKEMPQLEGPPKRTLKIPASKVFSLQSKEEQEPPILQPEIEIPSFKQGLSVSPFPKKRGRPKRQMRSPVKMKPPVLSVAPFVATESPSKLESESDNHRSSSDFFESEDQLQDPDDLDDSHRPSVCSMSDLEMEPDKKITKRNNGQLMKTIIRKINKMKTLKRKKLLNQILSSSVESSNKGKVQSKLHNTVSSLAATFGSKLGQQINVSKKGTIYIGKRRGRKPKTVLNGILSGSPTSLAVLEQTAQQAAGSALGQILPPLLPSSASSSEILPSPICSQSSGTSGGQSPVSSDAGFVEPSSVPYLHLHSRQGSMIQTLAMKKASKGRRRLSPPTLLPNSPSHLSELTSLKEATPSPISESHSDETIPSDSGIGTDNNSTSDRAEKFCGQKKRRHSFEHVSLIPPETSTVLSSLKEKHKHKCKRRNHDYLSYDKMKRQKRKRKKKYPQLRNRQDPDFIAELEELISRLSEIRITHRSHHFIPRDLLPTIFRINFNSFYTHPSFPLDPLHYIRKPDLKKKRGRPPKMREAMAEMPFMHSLSFPLSSTGFYPSYGMPYSPSPLTAAPIGLGYYGRYPPTLYPPPPSPSFTTPLPPPSYMHAGHLLLNPAKYHKKKHKLLRQEAFLTTSRTPLLSMSTYPSVPPEMAYGWMVEHKHRHRHKHREHRSSEQPQVSMDTGSSRSVLESLKRYRFGKDAVGERYKHKEKHRCHMSCPHLSPSKSLINREEQWVHREPSESSPLALGLQTPLQIDCSESSPSLSLGGFTPNSEPASSDEHTNLFTSAIGSCRVSNPNSSGRKKLTDSPGLFSAQDTSLNRLHRKESLPSNERAVQTLAGSQPTSDKPSQRPSESTNCSPTRKRSSSESTSSTVNGVPSRSPRLVASGDDSVDSLLQRMVQNEDQEPMEKSIDAVIATASAPPSSSPGRSHSKDRTLGKPDSLLVPAVASDSCNNSISLLSEKLTSSCSPHHIKRSVVEAMQRQARKMCNYDKILATKKNLDHVNKILKAKKLQRQARTGNNFVKRRPGRPRKCPLQAVVSMQAFQAAQFVNPELNRDEEGAALHLSPDTVTDVIEAVVQSVNLNPEHKKGLKRKGWLLEEQTRKKQKPLPEEEEQENNKSFNEAPVEIPSPSETPAKPSEPESTLQPVLSLIPREKKPPRPPKKKYQKAGLYSDVYKTTDPKSRLIQLKKEKLEYTPGEHEYGLFPAPIHVVFFVSGKYLRQKRIDFQLPYDILWQWKHNQLYKKPDVPLYKKIRSNVYVDVKPLSGYEATTCNCKKPDDDTRKGCVDDCLNRMIFAECSPNTCPCGEQCCNQRIQRHEWVQCLERFRAEEKGWGIRTKEPLKAGQFIIEYLGEVVSEQEFRNRMIEQYHNHSDHYCLNLDSGMVIDSYRMGNEARFINHSCDPNCEMQKWSVNGVYRIGLYALKDMPAGTELTYDYNFHSFNVEKQQLCKCGFEKCRGIIGGKSQRVNGLTSSKNSQPMATHKKSGRSKEKRKSKHKLKKRRGHLSEEPSENINTPTRLTPQLQMKPMSNRERNFVLKHHVFLVRNWEKIRQKQEEVKHTSDNIHSASLYTRWNGICRDDGNIKSDVFMTQFSALQTARSVRTRRLAAAEENIEVARAARLAQIFKEICDGIISYKDSSRQALAAPLLNLPPKKKNADYYEKISDPLDLITIEKQILTGYYKTVEAFDADMLKVFRNAEKYYGRKSPVGRDVCRLRKAYYNARHEASAQIDEIVGETASEADSSETSVSEKENGHEKDDDVIRCICGLYNDEGLMIQCDKCMVWQHCDCMGVNSDVEHYLCEQCDPRPVDREVPMIPRPHYAQPGCVYFICLLRDDLLLRQGDCVYLMRDSRRTPDGHPVRQSYRLLSHINRHKLDIFRIEKLWKNEKEERFAFGHHYFRPHETHHSPSRRFYHNELFRVPLYEIIPLEAVVGTCCVLDLYTYCKGRPKGVKEQDVYICDYRLDKSAHLFYKIHRNRYPVCTKPYAFDHFPKKLTPKKDFSPHYVPDNYKRNGGRSSWKSERSKPPLKDLGQEDDALPLIEEVLASQEQAANEIPSLEEPEREGATANVSEGEKKTEESSQEPQSTCTPEERRHNQRERLNQILLNLLEKIPGKNAIDVTYLLEEGSGRKLRRRTLFIPENSFRK

SEQ ID NO: 7364 - protein, 1630 aa, Homo sapiens
MPFAKRIVEPQWLCRQRRPAPGPAVDASGGSAEPPPPLQPPGRRDLDEVEAPGPEEPARAVPAPSGLPPPPPPLPAPADQTQPPHGEASVAGEESTAGIPEAAPAAGEASSAAAAAAVLLMLDLCAVSNAALARVLRQLSDVARHACSLFQELESDIQLTHRRVWALQGKLGGVQRVLSTLDPKQEAVPVSNLDIESKLSVYYRAPWHQQRNIFLPATRPPCVEELHRHARQSLQALRREHRSRSDRREQRAAAPLSIAAPPLPAYPPAHSQRRREFKDRHFLTSHPPEDEDTDVMLGQRPKNPIHNIPSTLDKQTNWSKALPLPTPEEKMKQDAQVISSCIIPINVTGVGFDREASIRCSLVHSQSVLQRRRKLRRRKTISGIPRRVQQEIDSDESPVARERNVIVHTNPDPSNTVNRISGTRDSECQTEDILIAAPSRRRIRAQRGQSIAASLSHSAGNISALADKGDTMFTPAVSSRTRSRSLPREGNRGGDAEPKVGAKPSAYEEGESFVGDHERTPNDFSEAPSSPSAQDHQPTLGLACSQHLHSPQHKLSERGRSRLSRMAADSGSCDISSNSDTFGSPIHCISTAGVLLSSHMDQKDDHQSSSGNWSGSSSTCPSQTSETIPPAASPPLTGSSHCDSELSLNTAPHANEDASVFVTEQYNDHLDKVRGHRANSFTSTVADLLDDPNNSNTSDSEWNYLHHHHDASCRQDFSPERPKADSLGCPSFTSMATYDSFLEKSPSDKADTSSHFSVDTEGYYTSMHFDCGLKGNKSYVCHYAALGPENGQGVGASPGLPDCAWQDYLDHKRQGRPSISFRKPKAKPTPPKRSSSLRKSDGNADISEKKEPKISSGQHLPHSSREMKLPLDFANTPSRMENANLPTKQEPSWINQSEQGIKEPQLDASDIPPFKDEVAESTHYADLWLLNDLKTNDPYRSLSNSSTATGTTVIECIKSPESSESQTSQSESRATTPSLPSVDNEFKLASPEKLAGLASPSSGYSSQSETPTSSFPTAFFSGPLSPGGSKRKPKVPERKSSLQQPSLKDGTISLSKDLELPIIPPTHLDLSALHNVLNKPFHHRHPLHVFTHNKQNTVGETLRSNPPPSLAITPTILKSVNLRSINKSEEVKQKEENNTDLPYLEESTLTTAALSPSKIRPHTANKSVSRQYSTEDTILSFLDSSAVEMGPDKLHLEKNSTFDVKNRCDPETITSAGSSLLDSNVTKDQVRTETEPIPENTPTKNCAFPTEGFQRVSAARPNDLDGKIIQYGPGPDETLEQVQKAPSAGLEEVAQPESVDVITSQSDSPTRATDVSNQFKHQFVMSRHHDKVPGTISYESEITSVNSFPEKCSKQENIASGISAKSASDNSKAEETQGNVDEASLKESSPSDDSIISPLSEDSQAEAEGVFVSPNKPRTTEDLFAVIHRSKRKVLGRKDSGDMSVRSKSRAPLSSSSSSASSITSPSSNVTTPNSQRSPGLIYRNAKKSNTSNEEFKLLLLKKGSRSDSSYRMSATEILKSPILPKPPGELTAESPQSTDDAHQGSQGAEALSPLSPCSPRVNAEGFSSKSFATSASARVGRSRAPPAASSSRYSVRCRLYNTPMQAISEGETENSDGSPHDDRSSQSST

SEQ ID NO: 7365 - protein, 3036 aa, Homo sapiens
MHLHQVLTGAVNPGDNCYSVGSVGDVPFTAYGSGCDIVILANDFECVQIIPGAKHGNIQVSCVECSNQQGRIAASYGNAVCIFEPLGINSHKRNCQLKCQWLKTGQFFLSSVTYNLAWDPQDNRLLTTTDSIQLWAPPGDDILEEEEEIDNTVPPVLNDWKCVWQCKTSVSVHLMEWSPDGEYFATAGKDDCLLKVWYPMTGWKSSIIPQDHHEVKRRQSSTQFSFVYLAHPRAVTGFSWRKTSKYMPRGSVCNVLLTSCHDGVCRLWAETLLPEDCLLGEQICETTTSSIASSLSHAGRHKDRIQHALETIHHLKNLRKGQRRSSVLVTHAELMPDQTAMHEVQRHISHHANALCHFHIAASINPATDIPNVLVGTAFNVDDGNGGFVVHWLNNKEFHFTSSTEVFMHQLRKLSDKQVDHENDDADREDEEHSQEDRERGLHMKLDHDLSLDRESEAGTGSSEHEDGEREGSPRTYSRLSVPMPLPTVLLDRKIETLLTEWNKNPDMLFTIHPVDGTFLVWHVKYLDEYNPGIFRQVQVSFSSRIPVAFPSGDASSLSKNIMMYACINATKDSHHTLLHQEGMSVGSPHGSQPHSRSHSTHMNILAPTVMMISKHIDGSLNQWAVTFADKSAFTTVLTVSHKFRYCGHRFHLNDLACHSVLPLLLTSSHHNALLTPELDCQWDSDNKLSRLMDPVKHIKGSSKQPLRNAATRTFHDPNAIYSELILWRVDPIGPLSYTGGVSELARINSLHTSAFSNVAWLPTLIPSYCLGTYCNSASACFVASDGKNLRLYQAVVDARKLLDELSDPESSKLIGEVFNIVSQQSTARPGCIIELDAITNQCGSNTQLLHVFQEDFIIGYKPHKEDMEKKETEIFFQPSQGYRPPPFSEKFFLVVIEKDSNNNSILHMWHLHLKSVQACLAKASEGASSESLLSVPGQKNVDSSPETSPSVSPMPHSSSIANLQTASKLILSFRLVYSQPLDLPESVEVIRATPSAGHLSSSSIYPVCLAPYLVVTTCSDNKVRFWKCCMEANPECNKSDEKEIYHWKRWPLMNDEGEDNSSTVSIVGRPVAVSCSYTGRLAVAYKQPIHHNGFVSKEFSMHVCIFECESTGGSEWVLEQTIHLDDLVKVGSVLDSRVSVDSNLFVYSKSDALLSKDRYLIPNIKHLVHLDWVSKEDGSHILTVGVGANIFMYGRLSGIVTEQTNSKDGVAVITLPLGGSIKQGVKSRWVLLRSIDLVSSVDGTPSLPVSLSWVRDGILVVGMDCEMHVYAQWKHAVKFGDTEADSSNAEEAAMQDHSTFKSNMLARKSVVEGTAISDDVFCSPTVIQDGGLFEAAHVLSPTLPQYHPTQLLELMDLGKVRRAKAILSHLVKCIAGEVAIVRDPDAGEGTKRHLSRTISVSGSTAKETVTVGKDGTRDYTEIDSIPPLPLYALLAADQDTSYRISEESTKIPQSYEDQTVSQPEDQYSELFQIQDIPTDDIDLEPEKRENKSKVINLSQYGPAYFGQEHARVLSSHLMHSSLPGLTRLEQMFLVALADTVATTSTELDESRDKSCSGRDTLDECGLRYLLAMRLHTCLLTSLPPLYRVQLLHQGVSTCHFAWAFHSEAEEELINMIPAIQRGDPQWSELRAMGIGWWVRNINTLRRCIEKVAKASFQRNNDALDAALFYLSMKKKAVVWGLFRSQHDEKMTTFFSHNFNEDRWRKAALKNAFSLLGKQRFEQSAAFFLLAGSLKDAIEVCLEKMEDIQLAMVIARLYESEFETSSTYISILNQKILGCQKDGSGFSCKRLHPDPFLRSLAYWVMKDYTRALDTLLEQTPKEDDEHQVIIKSCNPVAFSFYNYLRTHPLLIRRNLASPEGTLATLGLKTEKNFVDKINLIERKLFFTTANAHFKVGCPVLALEVLSKIPKVTKTSALSAKKDQPDFISHRMDDVPSHSKALSDGNGSSGIEWSNVTSSQYDWSQPIVKVDEEPLNLDWGEDHDSALDEEEDDAVGLVMKSTDAREKDKQSDQKASDPNMLLTPQEEDDPEGDTEVDVIAEQLKFRACLKILMTELRTLATGYEVDGGKLRFQLYNWLEKEIAALHEICNHESVIKEYSSKTYSKVESDLLDQEEMVDKPDIGSYERHQIERRRLQAKREHAERRKSWLQKNQDLLRVFLSYCSLHGAQGGGLASVRMELKFLLQESQQETTVKQLQSPLPLPTTLPLLSASIASTKTVIANPVLYLNNHIHDILYTIVQMKTPPHPSIEDVKVHTLHSLAASLSASIYQALCDSHSYSQTEGNQFTGMAYQGLLLSDRRRLRTESIEEHATPNSSPAQWPGVSSLINLLSSAQDEDQPKLNILLCEAVVAVYLSLLIHALATNSSSELFRLAAHPLNNRMWAAVFGGGVKLVVKPRRQSENISAPPVLSEDIDKHRRRFNMRMLVPGRPVKDATPPPVPAERPSYKEKFIPPELSMWDYFVAKPFLPLSDSGVIYDSDESIHSDEEDDAFFSDTQIQEHQDPNSYSWALLHLTMVKLALHNVKNFFPIAGLEFSELPVTSPLGIAVIKNLENWEQILQEKMDQFEGPPPNYINTYPTDLSVGAGPAILRNKAMLEPENTPFKSRDSSAFPVKRLWHFLVKQEVLQETFIRYIFTKKRKQSEVEADLGYPGGKAKVIHKESDMIMAFSVNKANCNEIVLASTHDVQELDVTSLLACQSYIWIGEEYDRESKSSDDVDYRGSTTTLYQPSATSYSASQVHPPSSLPWLGTGQTSTGASVLMKRNLHNVKRMTSHPVHQYYLTGAQDGSVRMFEWTRPQQLVCFRQAGNARVTRLYFNSQGNKCGVADGEGFLSIWQVNQTASNPKPYMSWQCHSKATSDFAFITSSSLVATSGHSNDNRNVCLWDTLISPGNSLIHGFTCHDHGATVLQYAPKQQLLISGGRKGHVCIFDIRQRQLIHTFQAHDSAIKALALDPYEEYFTTGSAEGNIKVWRLTGHGLIHSFKSEYAKQSIFRNIGAGVMQIDIIQGNRLFSCGADGTLKTRVLPNAFNIPNRILDIL

SEQ ID NO: 7366 - protein, 403 aa, Homo sapiens
MDSRECLLFKNECRKVYQDMTHPLNDYFISSSHNTYLVSDQLLGPSDLWGYVSALVKGCRCLEIDCWDGAQNEPVVYHGYTLTSKLLFKTVIQAIHKYAFMTSDYPVVLSLENHCSTAQQEVMADNLQATFGESLLSDMLDDFPDTLPSPEALKFKILVKNKKIGTLKETHERKGSDKRGDNQDKETGVKKLPGVMLFKKKKTRKLKIALALSDLVIYTKAEKFKSFQHSRLYQQFNENNSIGETQARKLSKLRVHEFIFHTRKFITRIYPKATRADSSNFNPQEFWNIGCQMVALNFQTPGLPMDLQNGKFLDNGGSGYILKPHFLRESKSYFNPSNIKEGMPITLTIRLISGIQLPLTHSSSNKGDSLVIIEVFGVPNDQMKQQTRVIKKNGQGNMVIIPA

SEQ ID NO: 7367 - protein, 608 aa, Homo sapiens
MEMRWFLSKIQDDFRGGKINLEKTQRLLEKLDIRCSYIHVKQIFKDNDRLKQGRITIEEFRAIYRIITHREEIIEIFNTYSENRKILLASNLAQFLTQEQYAAEMSKAIAFEIIQKYEPIEEVRKAHQMSLEGFTRYMDSRECLLFKNECRKVYQDMTHPLNDYFISSSHNTYLVSDQLLGPSDLWGYVSALVKGCRCLEIDCWDGAQNEPVVYHGYTLTSKLLFKTVIQAIHKYAFMTSDYPVVLSLENHCSTAQQEVMADNLQATFGESLLSDMLDDFPDTLPSPEALKFKILVKNKKIGTLKETHERKGSDKRGDNQDKETGVKKLPGVMLFKKKKTRKLKIALALSDLVIYTKAEKFKSFQHSRLYQQFNENNSIGETQARKLSKLRVHEFIFHTRKFITRIYPKATRADSSNFNPQEFWNIGCQMVALNFQTPGLPMDLQNGKFLDNGGSGYILKPHFLRESKSYFNPSNIKEGMPITLTIRLISGIQLPLTHSSSNKGDSLVIIEVFGVPNDQMKQQTRVIKKNAFSPRWNETFTFIIHVPELALIRFVVEGQGLIAGNEFLGQYTLPLLCMNKGYRRIPLFSRMGESLEPASLFVYVWYVR

SEQ ID NO: 7368 - protein, 390 aa, Homo sapiens
MADNLQATFGESLLSDMLDDFPDTLPSPEALKFKILVKNKKIGTLKETHERKGSDKRGKVEEWEEEVADGEEEEEEEEEEEEEEEDKFKESEVLESVLGDNQDKETGVKKLPGVMLFKKKKTRKLKIALALSDLVIYTKAEKFKSFQHSRLYQQFNENNSIGETQARKLSKLRVHEFIFHTRKFITRIYPKATRADSSNFNPQEFWNIGCQMVALNFQTPGLPMDLQNGKFLDNGGSGYILKPHFLRESKSYFNPSNIKEGMPITLTIRLISGIQLPLTHSSSNKGDSLVIIEVFGVPNDQMKQQTRVIKKNAFSPRWNETFTFIIHVPELALIRFVVEGQGLIAGNEFLGQYTLPLLCMNKGYRRIPLFSRMGESLEPASLFVYVWYVR

SEQ ID NO: 7369 - protein, 1046 aa, Homo sapiens
LLPKMADAFGDELFSVFEGDSTTAAGTKKDKEKDKGKWKGPPGSADKAGKRFDGKLQSESTNNGKNKRDVDFEGTDEPIFGKKPRIEESITEDLSLADLMPRVKVQSVETVEGCTHEVALPAEEDYLPLKPRVGKAAKEYPFILDAFQREAIQCVDNNQSVLVSAHTSAGKTVCAEYAIALALREKQRVIFTSPIKALSNQKYREMYEEFQDVGLMTGDVTINPTASCLVMTTEILRSMLYRGSEVMREVAWVIFDEIHYMRDSERGVVWEETIILLPDNVHYVFLSATIPNARQFAEWICHLHKQPCHVIYTDYRPTPLQHYIFPAGGDGLHLVVDENGDFREDNFNTAMQVLRDAGDLAKGDQKGRKGGTKGPSNVFKIVKMIMERNFQPVIIFSFSKKDCEAYALQMTKLDFNTDEEKKMVEEVFSNAIDCLSDEDKKLPQVEHVLPLLKRGIGIHHGGLLPILKETIEILFSEGLIKALFATETFAMGINMPARTVLFTNARKFDGKDFRWISSGEYIQMSGRAGRRGMDDRGIVILMVDEKMSPTIGKQLLKGSADPLNSAFHLTYNMVLNLLRVEEINPEYMLEKSFYQFQHYRAIPGVVEKVKNSEEQYNKIVIPNEESVVIYYKIRQQLAKLGKEIEEYIHKPKYCLPFLQPGRLVKVKNEGDDFGWGVVVNFSKKSNVKPNSGELDPLYVVEVLLRCSKESLKNSATEAAKPAKPDEKGEMQVVPVLVHLLSAISSVRLYIPKDLRPVDNRQSVLKSIQEVQKRFPDGIPLLDPIDDMGIQDQGLKKVIQKVEAFEHRMYSHPLHNDPNLETVYTLCEKKAQIAIDIKSAKRELKKARTVLQMDELKCRKRVLRRLGFATSSDVIEMKGRVACEISSADELLLTEMMFNGLFNDLSAEQATALLSCFVFQENSSEMPKLTEQLAGPLRQMQECAKRIAKVSAEAKLEIDEETYLSSFKPHLMDVVYTWATGATFAHICKMTDVFEGSIIRCMRRLEELLRQMCQAAKAIGNTELENKFAEGITKIKRDIVFAASLYL

SEQ ID NO: 7370 - protein, 1585 aa, Homo sapiens
MGRSTKLVIIERLLLLAERYVITIEAHSNETIGSVRWKIAKQLCSPVDNIQIFTNDSLLTVNKDQKLLHQLGFSDEQILTVKTSGSGTPSGSSADSSTSSSSSSSGVFSSSYAMEQEKSLPGVVMALVCNVFDMLYQLANLEEPRITLRVRKLLLLIPTDPAIQEALDQLDSLGRKVLSSKLMPTADDDMARSCAKSFCENFLKAGGLRFLLVGQTMPTLLDEDLTKDGIEALSSRPFRNVSRQTSRQMSLCGTPEKSSYRQLSVSDRSSIRVEEIIPAARVAIQTMEVSDFTSTVACFMRLSWAAAAGRLDLVGSSQPIKESNSLCPAGIRNRLSSSGSNCSSGSEGEPVALHAGICVRQQSVSTKDSLIAGEALSLLVTCLQLRSQQLASFYNLPCVADFIIDILLGSPSAEIRRVACDQLYTLSQTDTSAHPDVQKPNQFLLGVILTAQLPLWSPTSIMRGVNQRLLSQCMEYFDLRCQLLDDLTTSEMEQLRISPATMLEDEITWLDNFEPNRTAECETSEADNILLAGHLRLIKTLLSLCGAEKEMLGSSLIKPLLDDFLFRASRIILNSHSPAGSAAISQQDFHPKCSTANSRLAAYEVLVMLADSSPSNLQIIIKELLSMHHQPDPALTKEFDYLPPVDSRSSSGFVGLRNGGATCYMNAVFQQLYMQPGLPESLLSVDDDTDNPDDSVFYQVQSLFGHLMESKLQYYVPENFWKIFKMWNKELYVREQQDAYEFFTSLIDQMDEYLKKMGRDQIFKNTFQGIYSDQKICKDCPHRYEREEAFMALNLGVTSCQSLEISLDQFVRGEVLEGSNAYYCEKCKEKRITVKRTCIKSLPSVLVIHLMRFGFDWESGRSIKYDEQIRFPWMLNMEPYTVSGMARQDSSSEVGENGRSVDQGGGGSPRKKVALTENYELVGVIVHSGQAHAGHYYSFIKDRRGCGKGKWYKFNDTVIEEFDLNDETLEYECFGGEYRPKVYDQTNPYTDVRRRYWNAYMLFYQRVSDQNSPVLPKKSRVSVVRQEAEDLSLSAPSSPEISPQSSPRPHRPNNDRLSILTKLVKKGEKKGLFVEKMPARIYQMVRDENLKFMKNRDVYSSDYFSFVLSLASLNATKLKHPYYPCMAKVSLQLAIQFLFQTYLRTKKKLRVDTEEWIATIEALLSKSFDACQWLVEYFISSEGRELIKIFLLECNVREVRVAVATILEKTLDSALFYQDKLKSLHQLLEVLLALLDKDVPENCKNCAQYFFLFNTFVQKQGIRAGDLLLRHSALRHMISFLLGASRQNNQIRRWSSAQAREFGNLHNTVALLVLHSDVSSQRNVAPGIFKQRPPISIAPSSPLLPLHEEVEALLFMSEGKPYLLEVMFALRELTGSLLALIEMVVYCCFCNEHFSFTMLHFIKNQLETAPPHELKNTFQLLHEILVIEDPIQVERVKFVFETENGLLALMHHSNHVDSSRCYQCVKFLVTLAQKCPAAKEYFKENSHHWSWAVQWLQKKMSEHYWTPQSNVSNETSTGKTFQRTISAQDTLAYATALLNEKEQSGSSNGSESSPANENGDRHLQQGSESPMMIGELRSDLDDVDP

SEQ ID NO: 7371 - protein, 632 aa, Homo sapiens
MSSKNSESGTATTGTSLSAPDITVRNVVNIARPSSQQSSWTSANNDVIVTGIYSPASSSSRQGTNKHTDTQITEAHKIPIQKTATKNDTEFQLHIPVQRQVAHCKNASLLLGEKTIILSRQTSVLNAGNSVFNHAKKNYGNSSVQASEMTVPQKPSVCHRPCKIEPVGIQRSYKPEHTGPALHNLCGQKPTIRDPYCRTQNLEIREVFSLAVSDYPQRILGGNAPQKPSSAEGNCLSIAMETGDAEDEYAREEELASMRAQIPSYSRFYESGSSLRAENQSTTLPGPGRNMPNSQMVNIRDMSDNVLYQNRNYHLTPRTSLHTASSTMYSNTNPLRSNFSPHFASSNQLRLSQNQNNYQISGNLTVPWITGCSRKRALQDRTQFSDRDLATLKKYWDNGMTSLGSVCREKIEAVATELNVDCEIVRTWIGNRRRKYRLMGIEVPPPRGGPADFSEQPESGSLSALTPGEEAGPEVGEDNDRNDEVSICLSEGSSQEEPNEVVPNDARAHKEEDHHAVTTDNVKIEIIDDEESDMISNSEVEQVNSFLDYKNEEVKFIENELEIQKQKYFKLQTFVRSLILAMKADDKEQQQALLSDLPPELEEMDFNHASLEPDDTSFSVSSLSEKNVSESL

SEQ ID NO: 7372 - protein, 1257 aa, Homo sapiens [sequence omitted]

SEQ ID NO: 7373 - protein, 1523 aa, Homo sapiens
MTSVWKRLQRVGKRAAKFQFVACYHELVLECTKKWQPDKLVVVWTRRNRRICSKAHSWQPGIQNPYRGTVVWMVPENVDISVTLYRDPHVDQYEAKEWTFIIENESKGQRKVLATAEVDLARHAGPVPVQVPVRLRLKPKSVKVVQAELSLTLSGVLLREGRATDDDMQSLASLMSVKPSDVGNLDDFAESDEDEAHGPGAPEARARVPQPDPSRELKTLCEEEEEGQGRPQQAVASPSNAEDTSPAPVSAPAPPARTSRGQGSERANEAGGQVGPEAPRPPETSPEMRSSRQPAQDTAPTPAPRLRKGSDALRPPVPQGEDEVPKASGAPPAGLGSARETQAQACPQEGTEAHGARLGPSIEDKGSGDPFGRQRLKAEEMDTEDRPEASGVDTEPRSGGREANTKRSGVRAGEAEESSAVCQVDAEQRSKVRHVDTKGPEATGVMPEARCRGTPEAPPRGSQGRLGVRTRDEAPSGLSLPPAEPAGHSGQLGDLEGARAAAGQEREGAEVRGGAPGIEGTGLEQGPSVGAISTRPQVSSWQGALLSTAQGAISRGLGGWEAEAGGSGDLETETEVVGLEVLGTQEKEVEGSGFPETRTLEIEILGALEKEAARSRVLESEVAGTAQCEGLETQETEVGVIETPGTETEVLGTQKTEAGGSGVLQTRTTIAETEVLVTQEISGDLGPLKIEDTIQSEMLGTQETEVEASRVPESEAEGTEAKILGTQEITARDSGVREIEAEIAESDILVAQEIEVGLLGVLGIETGAAEGAILGTQEIASRDSGVPGLEADTTGIQVKEVGGSEVPEIATGTAETEILGTQEIASRSSGVPGLESEVAGAQETEVGGSGISGPEAGMAEARVLMTRKTEIIVPEAEKEEAQTSGVQEAETRVGSALKYEALRAPVTQPRVLGSQEAKAEISGVQGSETQVLRVQEAEAGVWGMSEGKSGAWGAQEAEMKVLESPENKSGTFKAQEAEAGVLGNEKGKEAEGSLTEASLPEAQVASGAGAGAPRASSPEKAEEDRRLPGSQAPPALVSSSQSLLEWCQEVTTGYRGVRITNFTTSWRNGLAFCAILHRFYPDKIDYASLDPLNIKQNNKQAFDGFAALGVSRLLEPADMVLLSVPDKLIVMTYLCQIRAFCTGQELQLVQLEGGGGAGTYRVGSAQPSPPDDLDAGGLAQRLRGHGAEGPQEPKEAADRADGAAPGVASRNAVAGRASKDGGAEAPRESRPAEVPAEGLVNGAGAPGGGGVRLRRPSVNGEPGSVPPPRAHGSFSHVRDADLLKKRRSRLRNSSSFSMDDPDAGAMGAAAAEGQAPDPSPAPGPPTAADSQQPPGGSSPSEEPPPSPGEEAGLQRFQDTSQYVCAELQALEQEQRQIDGRAAEVEMQLRSLMESGANKLQEEVLIQEWFTLVNKKNALIRRQDQLQLLMEEQDLERRFELLSRELRAMLAIEDWQKTSAQQHREQLLLEELVSLVNQRDELVRDLDHKERIALEEDERLERGLEQRRRKLSRQLSRRERCVLS

SEQ ID NO: 7374 - protein, 611 aa, Homo sapiens
MAEETGQSKLAAAKKKFKEYWQRNRPGVPAAAKRNTKANGSSPETAASGGCHSSEASSSASSSLHARQSPCQEQAAVLNSRSIKISRLNDTIKSLKQQKKQVEHQLEEEKKANNEKQKAERELEGQIQRLNTEKKKLNTDLYHMKHSLRYFEEESKDLAGRLQRSSQRIGELEWSLCAVAATQKKKPDGFSSRSKALLKRQLEQSIREQILLKGHVTQLKESLKEVQLERDQYAEQIKGERAQWQQRMRKMSQEVCTLKEEKKHDTHRVEELERSLSRLKNQMAEPLPPDAPAVSSEVELQDLRKELERVAGELQAQVENNQCISLLNRGQKERLREQEERLQEQQERLREREKRLQQLAEPQSDLEELKHENKSALQLEQQVKELQEKLGQVMETLTSAEKEPEAAVPASGTGGESSGLMDLLEEKADLREHVEKLELGFIQYRRERCHQKVHRLLTEPGDSAKDASPGGGHHQAGPGQGGEEGEAAGAAGDGVAACGSYSEGHGKFLAAARNPAAEPSPGAPAPQELGAADKHGDPRLPLSKDLCEASLTNSVEPAQGEAREGSSQDNPTAQPVVQLLGEMQDHQEHPGLGSNCCVPCFCWAWLPRRRR

SEQ ID NO: 7375 - protein, 468 aa, Homo sapiens
MKHSLRYFEEESKDLAGRLQRSSQRIGELEWSLCAVAATQKKKPDGFSSRSKALLKRQLEQSIREQILLKGHVTQLKESLKEVQLERDQYAEQIKGERAQWQQRMRKMSQEVCTLKEEKKHDTHRVEELERSLSRLKNQMAEPLPPDAPAVSSEVELQDLRKELERVAGELQAQVENNQCISLLNRGQKERLREQEERLQEQQERLREREKRLQQLAEPQSDLEELKHENKSALQLEQQVKELQEKLGQVMETLTSAEKEPEAAVPASGTGGESSGLMDLLEEKADLREHVEKLELGFIQYRRERCHQKVHRLLTEPGDSAKDASPGGGHHQAGPGQGGEEGEAAGAAGDGVAACGSYSEGHGKFLAAARNPAAEPSPGAPAPQELGAADKHGDPRLPLSKDLCEASLTNSVEPAQGEAREGSSQDNPTAQPVVQLLGEMQDHQEHPGLGSNCCVPCFCWAWLPRRRR

SEQ ID NO: 7376 - protein, 468 aa, Homo sapiens
MKHSLRYFEEESKDLAGRLQRSSQRIGELEWSLCAVAATQKKKPDGFSSRSKALLKRQLEQSIREQILLKGHVTQLKESLKEVQLERDQYAEQIKGERAQWQQRMRKMSQEVCTLKEEKKHDTHRVEELERSLSRLKNQMAEPLPPDAPAVSSEVELQDLRKELERVAGELQAQVENNQCISLLNRGQKERLREQEERLQEQQERLREREKRLQQLAEPQSDLEELKHENKSALQLEQQVKELQEKLGQVMETLTSAEKEPEAAVPASGTGGESSGLMDLLEEKADLREHVEKLELGFIQYRRERCHQKVHRLLTEPGDSAKDASPGGGHHQAGPGQGGEEGEAAGAAGDGVAACGSYSEGHGKFLAAARNPAAEPSPGAPAPQELGAADKHGDPRLSLSKDLCEASLTNSVEPAQGEAREGSSQDNPTAQPVLQLLGEMQDHQEHPGLGSNCCVPCFCWAWLPRRRR

SEQ ID NO: 7377 - protein, 603 aa, Homo sapiens
MAEETGQSKLAAAKKKFKEYWQRNRPGVPAAAKRNTKANGSSPETAASGGCHSSEASSSASSSLHARQSPCQEQAAVLNSRSIKISRLNDTIKSLKQQKKQVEHQLEEEKKANNEKQKAERELEGQIQRLNTEKKKLNTDLYHMKHSLRYFEEESKDLAGRLQRSSQRIGELEWSLCAVAATQKKKPDGFSSRSKALLKRQLEQSIREQILLKGHVTQLKESLKEVQLERDQYAEQIKGERAQWQQRMRKMSQEVCTLKEEKKHDTHRVEELERSLSRLKNQMAEPLPPDAPAVSSEVELQDLRKELERVAGELQAQVENNQCISLLNRGQKERLREQEERLQEQQERLREREKRLQQLAEPQSDLEELKHENKSALQLEQQVKELQEKLGQVMETLTSAEKEPEAAVPASGTGGESSGLMDLLEEKADLREHVEKLELGFIQYRRERCHQKVHRLLTEPGDSAKDASPGGGHHQAGPGQGGEEGEAAGAAGDGVAACGSYSEGHGKFLAAARNPAAEPSPGAPAPQELGAADKHGDLCEASLTNSVEPAQGEAREGSSQDNPTAQPVLQLLGEMQDHQEHPGLGSNCCVPCFCWAWLPRRRR

SEQ ID NO: 7378 - protein, 631 aa, Homo sapiens
MLPVDGEERKSEGSDTEGDRTSPCAVSSATLKDLEVGGSGRRCSDPAGQPSNLLPQRGLGAPLPAETAHTQPSPNDRSLYLSPKSSSASSSLHARQSPCQEQAAVLNSRSIKISRLNDTIKSLKQQKKQVEHQLEEEKKANNEKQKAERELEGQIQRLNTEKKKLNTDLYHMKHSLRYFEEESKDLAGRLQRSSQRIGELEWSLCAVAATQKKKPDGFSSRSKALLKRQLEQSIREQILLKGHVTQLKESLKEVQLERDQYAEQIKGERAQWQQRMRKMSQEVCTLKEEKKHDTHRVEELERSLSRLKNQMAEPLPPDAPAVSSEVELQDLRKELERVAGELQAQVENNQCISLLNRGQKERLREQEERLQEQQERLREREKRLQQLAEPQSDLEELKHENKSALQLEQQVKELQEKLGQVMETLTSAEKEPEAAVPASGTGGESSGLMDLLEEKADLREHVEKLELGFIQYRRERCHQKVHRLLTEPGDSAKDASPGGGHHQAGPGQGGEEGEAAGAAGDGVAACGSYSEGHGKFLAAARNPAAEPSPGAPAPQELGAADKHGDLCEASLTNSVEPAQGEAREGSSQDNPTAQPVVQLLGEMQDHQEHPGLGSNCCVPCFCWAWLPRRRR

SEQ ID NO: 7379 - protein, 603 aa, Homo sapiens
MAEETGQSKLAAAKKKFKEYWQRNRPGVPAAAKRNTKANGSSPETAASGGCHSSEASSSASSSLHARQSPCQEQAAVLNSRSIKISRLNDTIKSLKQQKKQVEHQLEEEKKANNEKQKAERELEGQIQRLNTEKKKLNTDLYHMKHSLRYFEEESKDLAGRLQRSSQRIGELEWSLCAVAATQKKKPDGFSSRSKALLKRQLEQSIREQILLKGHVTQLKESLKEVQLERDQYAEQIKGERAQWQQRMRKMSQEVCTLKEEKKHDTHRVEELERSLSRLKNQMAEPLPPDAPAVSSEVELQDLRKELERVAGELQAQVENNQCISLLNRGQKERLREQEERLQEQQERLREREKRLQQLAEPQSDLEELKHENKSALQLEQQVKELQEKLGQVMETLTSAEKEPEAAVPASGTGGESSGLMDLLEEKADLREHVEKLELGFIQYRRERCHQKVHRLLTEPGDSAKDASPGGGHHQAGPGQGGEEGEAAGAAGDGVAACGSYSEGHGKFLAAARNPAAEPSPGAPAPQELGAADKHGDLCEASLTNSVEPAQGEAREGSSQDNPTAQPVVQLLGEMQDHQEHPGLGSNCCVPCFCWAWLPRRRR

SEQ ID NO: 7380 - protein, 1300 aa, Homo sapiens
KNLEGNHDQHGRNSLLASYIHYVFRLPNTYPNSSSPGPGGLGGSVHYATMARSAVRPASLNLNRSRSLSNSNPDISGTPTSPDDEVRSIIGSKGLDRSNSWVNTGGPKAAPWGSNPSPSAESTQAMDRSCNRMSSHTETSSFLQTLTGRLPTKKLFHEELALQWVVCSGSVRESALQQAWFFFELMVKSMVHHLYFNDKLEAPRKSRFPERFMDDIAALVSTIASDIVSRFQKDTEMVERLNTSLAFFLNDLLSVMDRGFVFSLIKSCYKQVSSKLYSLPNPSVLVSLRLDFLRIICSHEHYVTLNLPCSLLTPPASPSPSVSSATSQSSGFSTNVQDQKIANMFELSVPFRQQHYLAGLVLTELAVILDPDAEGLFGLHKKVINMVHNLLSSHDSDPRYSDPQIKARVAMLYLPLIGIIMETVPQLYDFTETHNQRGRPICIATDDYESESGSMISQTVAMAIAGTSVPQLTRPGSFLLTSTSGRQHTTFSAESSRSLLICLLWVLKNADETVLQKWFTDLSVLQLNRLLDLLYLCVSCFEYKGKKVFERMNSLTFKKSKDMRAKLEEAILGSIGARQEMVRRSRGQLERSPSGSAFGSQENLRWRKDMTHWRQNTEKLDKSRAEIEHEALIDGNLATEANLIILDTLEIVVQTVSVTESKESILGGVLKVLLHSMACNQSAVYLQHCFATQRALVSKFPELLFEEETEQCADLCLRLLRHCSSSIGTIRSHASASLYLLMRQNFEIGNNFARVKMQVTMSLSSLVGTSQNFNEEFLRRSLKTILTYAEEDLELRETTFPDQVQDLVFNLHMILSDTVKMKEHQEDPEMLIDLMYRIAKGYQTSPDLRLTWLQNMAGKHSERSNHAEAAQCLVHSAALVAEYLSMLEDRKYLPVGCVTFQNISSNVLEESAVSDDVVSPDEEGICSGKYFTESGLVGLLEQAAASFSMAGMYEAVNEVYKVLIPIHEANRDAKKLSTIHGKLQEAFSKIVHQDGKRMFGTYFRVGFYGTKFGDLDEQEFVYKEPAITKLAEISHRLEGFYGERFGEDVVEVIKDSNPVDKCKLDPNKAYIQITYVEPYFDTYEMKDRITYFDKNYNLRRFMYCTPFTLDGRAHGELHEQFKRKTILTTSHAFPYIKTRVNVTHKEEIILTPIEVAIEDMQKKTQELAFATHQDPADPKMLQMVLQGSVGTTVNQGPLEVAQVFLSEIPSDPKLFRHHNKLRLCFKDFTKRCEDALRKNKSLIGPDQKEYQRELERNYHRLKEALQPLINRKIPQLYKAVLPVTCHRDSFSRMSLRKMDL

SEQ ID NO: 7381 - protein, 1302 aa, Homo sapiens
KNLEGNHDQHGRNSLLASYIHYVFRLPNTYPNSSSPGPGGLGGSVHYATMARSAVRPASLNLNRSRSLSNSNPDISGTPTSPDDEVRSIIGSKGLDRSNSWVNTGGPKAAPWGSNPSPSAESTQAMDRSCNRMSSHTETSSFLQTLTGRLPTKKLFHEELALQWVVCSGSVRESALQQAWFFFELMVKSMVHHLYFNDKLEAPRKSRFPERFMDDIAALVSTIASDIVSRFQKDTEMVERLNTSLAFFLNDLLSVMDRGFVFSLIKSCYKQVSSKLYSLPNPSVLVSLRLDFLRIICSHEHYVTLNLPCSLLTPPASPSPSVSSATSQSSGFSTNVQDQKIANMFELSVPFRQQHYLAGLVLTELAVILDPDAEGLFGLHKKVINMVHNLLSSHDSDPRYSDPQIKARVAMLYLPLIGIIMETVPQLYDFTETHNQRGRPICIATDDYESESGSMISQTVAMAIAGTSVPQLTRPGSFLLTSTSGRQHTTFSAESSRSLLICLLWVLKNADETVLQKWFTDLSVLQLNRLLDLLYLCVSCFEYKGKKVFERMNSLTFKKSKDMRAKLEEAILGSIGARQEMVRRSRGQLERSPSGSAFGSQENLRWRKDMTHWRQNTEKLDKSRAEIEHEALIDGNLATEANLIILDTLEIVVQTVSVTESKESILGGVLKVLLHSMACNQSAVYLQHCFATQRALVSKFPELLFEEETEQCADLCLRLLRHCSSSIGTIRSHASASLYLLMRQNFEIGNNFARVKMQVTMSLSSLVGTSQNFNEEFLRRSLKTILTYAEEDLELRETTFPDQVQDLVFNLHMILSDTVKMKEHQEDPEMLIDLMYRIAKGYQTSPDLRLTWLQNMAGKHSERSNHAEAAQCLVHSAALVAEYLSMLEDRKYLPVGCVTFQNISSNVLEESAVSDDVVSPDEEGICSGKYFTESGLVGLLEQAAASFSMAGMYEAVNEVYKVLIPIHEANRDAKKLSTIHGKLQEAFSKIVHQSTGWERMFGTYFRVGFYGTKFGDLDEQEFVYKEPAITKLAEISHRLEGFYGERFGEDVVEVIKDSNPVDKCKLDPNKAYIQITYVEPYFDTYEMKDRITYFDKNYNLRRFMYCTPFTLDGRAHGELHEQFKRKTILTTSHAFPYIKTRVNVTHKEEIILTPIEVAIEDMQKKTQELAFATHQDPADPKMLQMVLQGSVGTTVNQGPLEVAQVFLSEIPSDPKLFRHHNKLRLCFKDFTKRCEDALRKNKSLIGPDQKEYQRELERNYHRLKEALQPLINRKIPQLYKAVLPVTCHRDSFSRMSLRKMDL

SEQ ID NO: 7382 - protein, 1462 aa, Homo sapiens
MALYYDHQIEAPDAAGSPSFISWHPVHPFLAVAYISTTSTGSVDIYLEQGECVPDTHVERPFRVASLCWHPTRLVLAVGWETGEVTVFNKQDKEQHTMPLTHTADITVLRWSPSGNCLLSGDRLGVLLLWRLDQRGRVQGTPLLKHEYGKHLTHCIFRLPPPGEDLVQLAKAAVSGDEKALDMFNWKKSSSGSLLKMGSHEGLLFFVSLMDGTVHYVDEKGKTTQVVSADSTIQMLFYMEKREALVVVTENLRLSLYTVPPEGKAEEVMKVKLSGKTGRRADIALIEGSLLVMAVGEAALRFWDIERGENYILSPDEKFGFEKGENMNCVCYCKVKGLLAAGTDRGRVAMWRKVPDFLGSPGAEGKDRWALQTPTELQGNITQIQWGSRKNLLAVNSVISVAILSERAMSSHFHQQVAAMQVSPSLLNVCFLSTGVAHSLRTDMHISGVFATKDAVAVWNGRQVAIFELSGAAIRSAGTFLCETPVLAMHEENVYTVESNRVQVRTWQGTVKQLLLFSETEGNPCFLDICGNFLVVGTDLALFKSFDLSRREAKAHCSCRSLAELVPGVGGIASLRCSSSGSTISILPSKADNSPDSKICFYDVEMDTVTVFDFKTGQIDRRETLSFNEQETNKSHLFVDEGLKNYVPVNHFWDQSEPRLFVCEAVQETPRSQPQSANGQPQDGRAGPAADVLILSFFISEEHGFLLHESFPRPATSHSLLGMEVPYYYFTRKPEEADREDEVEPGCHHIPQMVSRRPLRDFVGLEDCDKATRDAMLHFSFFVTIGDMDEAFKSIKLIKSEAVWENMARMCVKTQRLDVAKVCLGNMGHARGARALREAEQEPELEARVAVLATQLGMLEDAEQLYRKCKRHDLLNKFYQAAGRWQEALQVAEHHDRVHLRSTYHRYAGHLEASADCSRALSYYEKSDTHRFEVPRMLSEDLPSLELYVNKMKDKTLWRWWAQYLESQGEMDAALHYYELARDHFSLVRIHCFQGNVQKAAQIANETGNLAASYHLARQYESQEEVGQAVHFYTRAQAFKNAIRLCKENGLDDQLMNLALLSSPEDMIEVARYYEEKGVQMDRAVMLYHKAGHFSKALELAFATQQFVALQLIAEDLDETSDPALLARCSDFFIEHSQYERAVELLLAARKYQEALQLCLGQNMSITEEMAEKMTVAKDSSDLPEESRRELLEQIADCCMRQGSYHLATKKYTQAGNKLKAMRALLKSGDTEKITFFASVSRQKEIYIMAANYLQSLDWRKEPEIMKNIIGFYTKGRALDLLAGFYDACAQVEIDEYQNYDKAHGALTEAYKCLAKAKAKSPLDQETRLAQLQSRMALVKRFIQARRTYTEDPKESIKQCELLLEEPDLDSTIRIGDVYGFLVEHYVRKEEYQTAYRFLEEMRRRLPLANMSYYVSPQAVDAVHRGLGLPLPRTVPEQVRHNSMEDARELDEEVVEEADDDP

SEQ ID NO: 7383 - protein, 737 aa, Homo sapiens
MPLNRTLSMSSLPGLEDWEDEFDLENAVLFEVAWEVANKVGGIYTVLQTKAKVTGDEWGDNYFLVGPYTEQGVRTQVELLEAPTPALKRTLDSMNSKGCKVYFGRWLIEGGPLVVLLDVGASAWALERWKGELWDTCNIGVPWYDREANDAVLFGFLTTWFLGEFLAQSEEKPHVVAHFHEWLAGVGLCLCRARRLPVATIFTTHATLLGRYLCAGAVDFYNNLENFNVDKEAGERQIYHRYCMERAAAHCAHVFTTVSQITAIEAQHLLKRKPDIVTPNGLNVKKFSAMHEFQNLHAQSKARIQEFVRGHFYGHLDFNLDKTLYFFIAGRYEFSNKGADVFLEALARLNYLLRVNGSEQTVVAFFIMPARTNNFNVETLKGQAVRKQLWDTANTVKEKFGRKLYESLLVGSLPDMNKMLDKEDFTMMKRAIFATQRQSFPPVCTHNMLDDSSDPILTTIRRIGLFNSSADRVKVIFHPEFLSSTSPLLPVDYEEFVRGCHLGVFPSYYEPWGYTPAECTVMGIPSISTNLSGFGCFMEEHIADPSAYGIYILDRRFRSLDDSCSQLTSFLYSFCQQSRRQRIIQRNRTERLSDLLDWKYLGRYYMSARHMALSKAFPEHFTYEPNEADAAQGYRYPRPASVPPSPSLSRHSSPHQSEDEEDPRNGPLEEDGERYDEDEEAAKDRRNIRAPEWPRRASCTSSTSGSKRNSVDTATSSSLSTPSEPLSPTSSLGEERN

SEQ ID NO: 7384 - protein, 673 aa, Homo sapiens
MPLNRTLSMSSLPGLEDWEDEFDLENAVLFEVAWEVANKVGGIYTVLQTKAKVTGDEWGDNYFLVGPYTEQGVRTQVELLEAPTPALKRTLDSMNSKGCKFLAQSEEKPHVVAHFHEWLAGVGLCLCRARRLPVATIFTTHATLLGRYLCAGAVDFYNNLENFNVDKEAGERQIYHRYCMERAAAHCAHVFTTVSQITAIEAQHLLKRKPDIVTPNGLNVKKFSAMHEFQNLHAQSKARIQEFVRGHFYGHLDFNLDKTLYFFIAGRYEFSNKGADVFLEALARLNYLLRVNGSEQTVVAFFIMPARTNNFNVETLKGQAVRKQLWDTANTVKEKFGRKLYESLLVGSLPDMNKMLDKEDFTMMKRAIFATQRQSFPPVCTHNMLDDSSDPILTTIRRIGLFNSSADRVKVIFHPEFLSSTSPLLPVDYEEFVRGCHLGVFPSYYEPWGYTPAECTVMGIPSISTNLSGFGCFMEEHIADPSAYGIYILDRRFRSLDDSCSQLTSFLYSFCQQSRRQRIIQRNRTERLSDLLDWKYLGRYYMSARHMALSKAFPEHFTYEPNEADAAQGYRYPRPASVPPSPSLSRHSSPHQSEDEEDPRNGPLEEDGERYDEDEEAAKDRRNIRAPEWPRRASCTSSTSGSKRNSVDTATSSSLSTPSEPLSPTSSLGEERN

SEQ ID NO: 7385 - protein, 1783 aa, Homo sapiens
MAPAQDPESEPQPEPCPGRAGAAARARWCPQPRPLVLLSLGALEFVSLSQQAFQICPVFVVCGLYQDGNSNKSFLLRSWCLHPEGTVCASSPERKGESHGDLTLLPSLSGAEKEHTGTCGMGLDWIIRFVAVFLHHASFFVGRGSYRKVEGVESCLVLDNRFVPFFGASAKIHIALGGCDEVEGLPNLSLIRILLEELHQVQVIGLLPAIQLQQAVDTCFQKDSIIDGIQTHAQLLIPGDLSLAGFDSPRSLERLSNKASPVGGHLPCEKVISSSRSRTVCQLVGCGVSGPGLLESARKRNGLENKDFNGEPLGYWAPEELQPQLCPQGVSVLVGRRPLKPGSAVVFAFIEQQFVQQKGQRFGLGSLAHSIPLGQADPSLARYIIDLPSWTQFRQDTGTMRTVRRHLFPQHSAPGRGVVWEWLSDDGSWTAYEAGVCDDLEQQVARGNQLVDLAPLGYNYTVNYTTHTQTNKTSSFCCSVRRQAGPPYPVTTIIAPPGHTGVACSCHQCLSGSRTGPVSGRYRHSMTNLPAYPAPQHPPHRTASVFGTHQAFAPYNKPSLSGARSAPRLNTTNAWDAAPPSLGSQPLYRSSLSHLGPQHLPPGSSTSGAVRKLGVLMSHVSHSVWDLLEMVTDRKAREGLIGGPGVGERRRVPEAMTIGTSQRRTLQEAVGAPIWERSAGPSPLRTSLEARTSCSFFRNGSKRSRSDMCLSLVKEDLTSWDFSVGWSSQGPHLCASLPSGPSSSPGSVPATVPMQMPKPSRVQQALAETVGGTEEKMKERPEREDRGAGTMESGVGRGCGRNGFVQQDTLCPRKRWVIREHEGSSVRGESPRASVGFPAGIRQCRAPQPTSPPASRLASKSHGSVKRLRKMSVKAPEFSSSPPVTAGMRGLVLEDFVIFVSSKLWVRGGARLRMRGQPSLPPGPARVSGKAPRQRPRSAAQVLSEPPLSRGAWRGLGNTRSAWHAARVASDRVRPPAHRRGESLDLGASLHVTDLPSQWQAFPGTVSVWRSACVQLPVHAGPQTPLSLRCSCQGATPKPEPEPEQVIKNYTEELKVPPDESESMRKIWLLLSKLPSAQPARSLDHGSTPCLEPPAGPPTHTQPQAPECGSQTPEGAPLPDPVSSPAPSPPPASFSAHALAPRSERPPPSSGILPCPSFPFGGFCCHVGPVLLDCIICMEKLSAASGYSDVTDSKAIGPLAVGCLTKCSHAFHLLCLLAMYCNGNKHPCAVSTVLMRERLRAGAVPTVTPLGEKTGTQPQGKMEVLRFQMSLPGHEDCGTILIVYSIPHGIQMRGLLESPTPGHSSSHPAHVPAVCPWIKAEDAHVAKLRPPGPLRPGPWRAGNGEAVPGLRGPEHPNPGKPFTARGFPRQCYLPDNAQGRKITAWDLEGKVTATTFSLEQPRCVFDGLASASDTVWLVVAFSNASRGFQNPETLADIPASPQLLTDGHYMTLPVSPDQLPCDDPMAGSGGAPVLRVGHDHGCHQQPFCNAPLPGPGPYRPCRAPSPAKRQTEPLCGAPGALGPQAAAHDGFEQNMSRERHCVELFIKWHLKYSPGLCSWGNTTKSIGPEHNGSMVRNKCIVKKEKQQLLRGNDLQMTQQAKHQRNSDGSSTEPAKAIKPIDRKSVHQICSGPVVLSLSTAVKELVENSLDAGATNIDLKLKDYGMDLIEVSGNGCGVEEENFEGLTLKHHTSKIQEFADLTRVETFGFRGKALSSLCALSDVTISTCHVSAKVGTRLVFDHDGKIIQKTPYPHPRGTTVSVKQLFSTLPVRHKEFQRNIKKVQ

SEQ ID NO: 7386 - protein, 1270 aa, Homo sapiens
MSYAPFRDVRGPSMHRTQYVHSPYDRPGWNPRFCIISGNQLLMLDEDEIHPLLIRDRRSESSRNKLLRRTVSVPVEGRPHGEHEYHLGRSRRKSVPGGKQYSMEGAPAAPFRPSQGFLSRRLKSSIKRTKSQPKLDRTSSFRQILPRFRSADHDRARLMQSFKESHSHESLLSPSSAAEALELNLDEDSIIKPVHSSILGQEFCFEVTTSSGTKCFACRSAAERDKWIENLQRAVKPNKDNSRRVDNVLKLWIIEARELPPKKRYYCELCLDDMLYARTTSKPRSASGDTVFWGEHFEFNNLPAVRALRLHLYRDSDKKRKKDKAGYVGLVTVPVATLAGRHFTEQWYPVTLPTGSGGSGGMGSGGGGGSGGGSGGKGKGGCPAVRLKARYQTMSILPMELYKEFAEYVTNHYRMLCAVLEPALNVKGKEEVASALVHILQSTGKAKDFLSDMAMSEVDRFMEREHLIFRENTLATKAIEEYMRLIGQKYLKDAIGEFIRALYESEENCEVDPIKCTASSLAEHQANLRMCCELALCKVVNSHCVFPRELKEVFASWRLRCAERGREDIADRLISASLFLRFLCPAIMSPSLFGLMQEYPDEQTSRTLTLIAKVIQNLANFSKFTSKEDFLGFMNEFLELEWGSMQQFLYEISNLDTLTNSSSFEGYIDLGRELSTLHALLWEVLPQLSKEALLKLGPLPRLLNDISTALRNPNIQRQPSRQSERPRPQPVVLRGPSAEMQGYMMRDLNSSIDLQSFMARGLNSSMDMARLPSPTKEKPPPPPPGGGKDLFYVSRPPLARSSPAYCTSSSDITEPEQKMLSVNKSVSMLDLQGDGPGGRLNSSSVSNLAAVGDLLHSSQASLTAALGLRPAPAGRLSQGSGSSITAAGMRLSQMGVTTDGVPAQQLRIPLSFQNPLFHMAADGPGPPGGHGGGGGHGPPSSHHHHHHHHHHRGGEPPGDTFAPFHGYSKSEDLSSGVPKPPAASILHSHSYSDEFGPSGTDFTRRQLSLQDNLQHMLSPPQITIGPQRPAPSGPGGGSGGGSGGGGGGQPPPLQRGKSQQLTVSAAQKPRPSSGNLLQSPEPSYGPARPRQQSLSKEGSIGGSGGSGGGGGGGLKPSITKQHSQTPSTLNPTMPASERTVAWVSNMPHLSADIESAHIEREEYKLKEYSKSMDESRLDRVKEYEEEIHSLKERLHMSNRKLEEYERRLLSQEEQTSKILMQYQARLEQSEKRLRQQQAEKDSQIKSIIGSPSLQADAGGGGAAPGPPRHG

SEQ ID NO: 7387 - protein, 1376 aa, Homo sapiens
SSSSSTSSSFSPSFSPSFSLLSPPSPRPLPPGLMSRSRASIHRGSIPAMSYAPFRDVRGPSMHRTQYVHSPYDRPGWNPRFCIISGNQLLMLDEDEIHPLLIRDRRSESSRNKLLRRTVSVPVEGRPHGEHEYHLGRSRRKSVPGGKQYSMEGAPAAPFRPSQGFLSRRLKSSIKRTKSQPKLDRTSSFRQILPRFRSADHDRARLMQSFKESHSHESLLSPSSAAEALELNLDEDSIIKPVHSSILGQEFCFEVTTSSGTKCFACRSAAERDKWIENLQRAVKPNKDNSRRVDNVLKLWIIEARELPPKKRYYCELCLDDMLYARTTSKPRSASGDTVFWGEHFEFNNLPAVRALRLHLYRDSDKKRKKDKAGYVGLVTVPVATLAGRHFTEQWYPVTLPTGSGGSGGMGSGGGGGSGGGSGGKGKGGCPAVRLKARYQTMSILPMELYKEFAEYVTNHYRMLCAVLEPALNVKGKEEVASALVHILQSTGKAKDFLSDMAMSEVDRFMEREHLIFRENTLATKAIEEYMRLIGQKYLKDAIGEFIRALYESEENCEVDPIKCTASSLAEHQANLRMCCELALCKVVNSHCVFPRELKEVFASWRLRCAERGREDIADRLISASLFLRFLCPAIMSPSLFGLMQEYPDEQTSRTLTLIAKVIQNLANFSKFTSKEDFLGFMNEFLELEWGSMQQFLYEISNLDTLTNSSSFEGYIDLGRELSTLHALLWEVLPQLSKEALLKLGPLPRLLNDISTALRNPNIQRQPSRQSERPRPQPVVLRGPSAEMQGYMMRDLNSSIDLQSFMARGLNSSMDMARLPSPTKEKPPPPPPGGGKDLFYVSRPPLARSSPAYCTSSSDITEPEQKMLSVNKSVSMLDLQGDGPGGRLNSSSVSNLAAVGDLLHSSQASLTAALGLRPAPAGRLSQGSGSSITAAGMRLSQMGVTTDGVPAQQLRIPLSFQNPLFHMAADGPGPPGGHGGGGGHGPPSSHHHHHHHHHHRGGEPPGDTFAPFHGYSKSEDLSSGVPKPPAASILHSHSYSDEFGPSGTDFTRRQLSLQDNLQHMLSPPQITIGPQRPAPSGPGGGSGGGSGGGGGGQPPPLQRGKSQQLTVSAAQKPRPSSGNLLQSPEPSYGPARPRQQSLSKEGSIGGSGGSGGGGGGGLKPSITKQHSQTPSTLNPTMPASERTVAWVSNMPHLSADIESAHIEREEYKLKEYSKSMDESRLDRVKEYEEEIHSLKERLHMSNRKLEEYERRLLSQEEQTSKILMQYQARLEQSEKRLRQQQAEKDSQIKSIIGRLMLVEEELRRDHPAMAEPLPEPKKRLLDAQERQLPPLGPTNPRVTLAPPWNGLAPPAPPPPPRLQITENGEFRNTADH

SEQ ID NO: 7388 - protein, 588 aa, Homo sapiens [sequence omitted]

SEQ ID NO: 7389 - protein, 391 aa, Homo sapiens
MAEESSCTRDCMSFSVLNWDQVSRLHEVLTEVVPIHGRGNFPTLEITLKDIVQTVRSRLEEAGIKVHDVRLNGSAAGHVLVKDNGLGCKDLDLIFHVALPTEAEFQLVRDVVLCSLLNFLPEGVNKLKISPVTLKEAYVQKLVKVCTDTDRWSLISLSNKNGKNVELKFVDSIRRQFEFSVDSFQIILDSLLFFYDCSNNPISEHFHPTVIGESMYGDFEEAFDHLQNRLIATKNPEEIRGGGLLKYSNLLVRDFRPTDQEEIKTLERYMCSRFFIDFPDILEQQRKLETYLQNHFAEEERSKYDYLMILRRVVNESTVCLMGHERRQTLNLISLLALRVLAEQNIIPSATNVTCYYQPAPYVSDGNFSNYYVAHPPVTYSQPYPTWLPCN

SEQ ID NO: 7390 - protein, 582 aa, Homo sapiens
DQGGLGIAISEEDTLSGVIIKSLTEHGVAATDGRLKVGDQILAVDDEIVVGYPIEKFISLLKTAKMTVKLTIHAENPDSQAVPSAAGAASGEKKNSSQSLMVPQSGSPEPESIRNTSRSSTPAIFASDPATCPIIPGCETTIEISKGRTGLGLSIVGGSDTLLGAIIIHEVYEEGAACKDGRLWAGDQILEVNGIDLRKATHDEAINVLRQTPQRVRLTLYRDEAPYKEEEVCDTLTIELQKKPGKGLGLSIVGKRNDTGVFVSDIVKGGIADADGRLMQGDQILMVNGEDVRNATQEAVAALLKCSLGTVTLEVGRIKAGPFHSERRPSQSSQVSEGSLSSFTFPLSGSSTSESLESSSKKNALASEIQGLRTVEMKKGPTDSLGISIAGGVGSPLGDVPIFIAMMHPTGVAAQTQKLRVGDRIVTICGTSTEGMTHTQAVNLLKNASGSIEMQVVAGGDVSVVTGHQQEPASSSLSFTGLTSSSIFQDDLGPPQCKSITLERGPDGLGFSIVGGYGSPHGDLPIYVKTVFAKGAASEDGRLKRGDQIIAVNGQSLEGVTHEEAVAILKRTKGTVTLMVLS

SEQ ID NO: 7391 - protein, 2042 aa, Homo sapiens
MLEAIDKNRALHAAERLQTKLRERGDVANEDKLSLLKSVLQSPLFSQILSLQTSVQQLKDQVNIATSATSNIEYAHVPHLSPAVIPTLQNESFLLSPNNGNLEALTGPGIPHINGKPACDEFDQLIKNMAQGRHVEVFELLKPPSGGLGFSVVGLRSENRGELGIFVQEIQEGSVAHRDGRLKETDQILAINGQALDQTITHQQAISILQKAKDTVQLVIARGSLPQLVSPIVSRSPSAASTISAHSNPVHWQHMETIELVNDGSGLGFGIIGGKATGVIVKTILPGGVADQHGRLCSGDHILKIGDTDLAGMSSEQVAQVLRQCGNRVKLMIARGAIEERTAPTALGITLSSSPTSTPELRVDASTQKGEESETFDVELTKNVQGLGITIAGYIGDKKLEPSGIFVKSITKSSAVEHDGRIQIGDQIIAVDGTNLQGFTNQQAVEVLRHTGQTVLLTLMRRGMKQEAELMSREDVTKDADLSPVNASIIKENYEKDEDFLSSTRNTNILPTEEEGYPLLSAEIEEIEDAQKQEAALLTKWQRIMGINYEIVVAHVSKFSENSGLGISLEATVGHHFIRSVLPEGPVGHSGKLFSGDELLEVNGITLLGENHQDVVNILKELPIEVTMVCCRRTVPPTTQSELDSLDLCDIELTEKPHVDLGEFIGSSETEDPVLAMTDAGQSTEEVQAPLAMWEAGIQHIELEKGSKGLGFSILDYQDPIDPASTVIIIRSLVPGGIAEKDGRLLPGDRLMFVNDVNLENSSLEEAVEALKGAPSGTVRIGVAKPLPLSPEEGYVSAKEDSFLYPPHSCEEAGLADKPLFRADLALVGTNDADLVDESTFESPYSPENDSIYSTQASILSLHGSSCGDGLNYGSSLPSSPPKDVIENSCDPVLDLHMSLEELYTQNLLQRQDENTPSVDISMGPASGFTINDYTPANAIEQQYECENTIVWTESHLPSEVISSAELPSVLPDSAGKGSEYLLEQSSLACNAECVMLQNVSKESFERTINIAKGNSSLGMTVSANKDGLGMIVRSIIHGGAISRDGRIAIGDCILSINEESTISVTNAQARAMLRRHSLIGPDIKITYVPAEHLEEFKISLGQQSGRVMALDIFSSYTGRDIPELPEREEGEGEESELQNTAYSNWNQPRRVELWREPSKSLGISIVGGRGMGSRLSNGEVMRGIFIKHVLEDSPAGKNGTLKPGDRIVEVDGMDLRDASHEQAVEAIRKAGNPVVFMVQSIINRPRKSPLPSLLHNLYPKYNFSSTNPFADSLQINADKAPSQSESEPEKAPLCSVPPPPPSAFAEMGSDHTQSSASKISQDVDKEDEFGYSWKNIRERYGTLTGELHMIELEKGHSGLGLSLAGNKDRSRMSVFIVGIDPNGAAGKDGRLQIADELLEINGQILYGRSHQNASSIIKCAPSKVKIIFIRNKDAVNQMAVCPGNAVEPLPSNSENLQNKETEPTVTTSDAAVDLSSFKNVQHLELPKDQGGLGIAISEEDTLSGVIIKSLTEHGVAATDGRLKVGDQILAVDDEIVVGYPIEKFISLLKTAKMTVKLTIHAENPDSQAVPSAAGAASGEKKNSSQSLMVPQSGSPEPESIRNTSRSSTPAIFASDPATCPIIPGCETTIEISKGRTGLGLSIVGGSDTLLGAIIIHEVYEEGAACKDGRLWAGDQILEVNGIDLRKATHDEAINVLRQTPQRVRLTLYRDEAPYKEEEVCDTLTIELQKKPGKGLGLSIVGKRNDTGVFVSDIVKGGIADADGRLMQGDQILMVNGEDVRNATQEAVAALLKCSLGTVTLEVGRIKAGSSTSESLESSSKKNALASEIQGLRTVEMKKGPTDSLGISIAGGVGSPLGDVPIFIAMMHPTGVAAQTQKLRVGDRIVTICGTSTEGMTHTQAVNLLKNASGSIEMQVVAGGDVSVVTGHQQEPASSSLSFTGLTSSSIFQDDLGPPQCKSITLERGPDGLGFSIVGGYGSPHGDLPIYVKTVFAKGAASEDGRLKRGDQIIAVNGQSLEGVTHEEAVAILKRTKGTVTLMVLS

SEQ ID NO: 7392 - protein, 431 aa, Homo sapiens
MLSDELESKPELLVQFVQNTSIPLGQGLVESEAKDITCLSLLPVTEASECSRLMLPDDTTNHSNSSKEVPSSAVLRSLRVNVGPDGEETRAQTVQKSPEFLSTSESSSLLQDLQPSDSTSFILLNLTRAGLGSSAEHLVFVQDEAEDSGNDFLSSESTDSSIPWFLRVQELAHDSLIAATRAQLAKNAKTSSNGENVHLGSGDGQSKDSGPLPQVEKKLKCTVEGCDRTFVWPAHFKYHLKTHRNDRSFICPAEGCGKSFYVLQRLKVHMRTHNGEKPFMCHESGCGKQFTTAGNLKNHRRIHTGEKPFLCEAQGCGRSFAEYSSLRKHLVVHSGEKPHQCQVCGKTFSQSGSRNVHMRKHHLQLGAAGSQEQEQTEVLAEGSPRSLSSVPDVTHHLVTMQSGRQSYEVSVLTAVNPQELLNQGDLTERRT

SEQ ID NO: 7393 - protein, 272 aa, Homo sapiens
MLSDELESKPELLVQFVQNTSIPLGQGLVESEAKDITCLSLLPVTEASECSRLMLPDDTTNHSNSSKEVPSSAVLRSLRVNVGPDGEETRAQTVQKSPEFLSTSESSSLLQDLQPSDSTSFILLNLTRAGLGSSAEHLVFVQDEAEDSGNDFLSSESTDSSIPWFLRVQELAHDSLIAATRAQLAKNAKTSSNGENVHLGSGDGQSKDSGPLPQVEKKLKCTVEGCDRTFVWPAHFKYHLKTHRRLWEKLLCAAEAEGAHEDPQWREALYVP

SEQ ID NO: 7394 - protein, 478 aa, Homo sapiens
MLSDELESKPELLVQFVQNTSIPLGQGLVESEAKDITCLSLLPVTEASECSRLMLPDDTTNHSNSSKEVPSSAVLRSLRVNVGPDGEETRAQTVQKSPEFLSTSESSSLLQDLQPSDSTSFILLNLTRAGLGSSAEHLVFVQDEAEDSGNDFLSSESTDSSIPWFLRVQELAHDSLIAATRAQLAKNAKTSSNGENVHLGSGDGQSKDSGPLPQVEKKLKCTVEGCDRTFVWPAHFKYHLKTHRNDRSFICPAEGCGKSFYVLQRLKVHMRTHNGEKPFMCHESGCGKQFTTAGNLKNHRRIHTGEKPFLCEAQGCGRSFAEYSSLRKHLVVHSGEKPHQCQVCGKTFSQSGSRNVHMRKHHLQLGAAGSQEQEQTAEPLMGSSLLEEASVPSKNLVSMNSQPSLGGESLNLPNTNSILGVDDEVLAEGSPRSLSSVPDVTHHLVTMQSGRQSYEVSVLTAVNPQELLNQGDLTERRT

SEQ ID NO: 7395 - protein, 1086 aa, Homo sapiens
MIAVSTANGYILFFHITSTRGDKYLYEPVYPKGSPQMKGTPHFKEEQCAPALNLEMRKILDLQAPIMSLQSVLEDLLVATSDGLLHLIHWEGMTNGRKAINLCTVPFSVDLQSSRVGSFLGFTDVHIRDMEYCATLDGFAVVFNDGKVGFITPVSSRFTAEQLHGVWPQDVVDGTCVAVNNKYRLMAFGCVSGSVQVYTIDNSTGAMLLSHKLELTAKQYPDIWNKTGAVKLMRWSPDNSVVIVTWEYGGLSLWSVFGAQLICTLGGDFAYRSDGTKKDPLKINSMSWGAEGYHLWVISGFGSQNTEIESDLRSVVKQPSILLFQFIKSVLTVNPCMSNQEQVLLQGEDRLYLNCGEASQTQNPRSSSTHSEHKPSREKSPFADGGLESQGLSTLLGHRHWHVVQISSTYLESNWPIRFSAIDKLGQNIAVVGKFGFAHYSLLTKKWKLFGNITQEQNMIVTGGLAWWNDFMVLACYNINDRQEELRVYLRTSNLDNAFAHVTKAQAETLLLSVFQDMVIVFRADCSICLYSIERKSDGPNTTAGIQVLQEVSMSRYIPHPFLVVSVTLTSVSTENGITLKMPQQARGAESIMLNLAGQLIMMQRDRSGPQIREKDSNPNNQRKLLPFCPPVVLAQSVENVWTTCRANKQKRHLLEALWLSCGGAGMKVWLPLFPRDHRKPHSFLSQRIMLPFHINIYPLAVLFEDALVLGAVNDTLLYDSLYTRNNAREQLEVLFPFCVVERTSQIYLHHILRQLLVRNLGEQALLLAQSCATLPYFPHVLELMLHEVLEEEATSREPIPDPLLPTVAKFITEFPLFLQTVVHCARKTEYALWNYLFAAVGNPKDLFEECLMAQDLDTAASYLIILQNMEVPAVSRQHATLLFNTALEQGKWDLCRHMIRFLKAIGSGESETPPSTPTAQEPSSSGGFEFFRNRSISLSQSAENVPASKFSLQKTLSMPSGPSGKRWSKDSDCAENMYIDMMLWRHARRLLEDVRLKDLGCFAAQLGFELISWLCKERTRAARVDNFVIALKRLHKDFLWPLPIIPASSISSPFKNGKYRTGNVDFMSLVQGELYFTPCIYTFCY

SEQ ID NO: 7396 - protein, 794 aa, Homo sapiens
MGSTDSKLNFRKAVIQLTTKTQPVEATDDAFWDQFWADTATSVQDVFALVPAAEIRAVREESPSNLATLCYKAVEKLVQGAESGCHSEKEKQIVLNCSRLLTRVLPYIFEDPDWRGFFWSTVPGAGRGGQGEEDDEHARPLAESLLLAIADLLFCPDFTVQSHRRSTVDSAEDVHSLDSCEYIWEAGVGFAHSPQPNYIHDMNRMELLKLLLTCFSEAMYLPPAPESGSTNPWVQFFCSTENRHALPLFTSLLNTVCAYDPVGYGIPYNHLLFSDYREPLVEEAAQVLIVTLDHDSASSASPTVDGTTTGTAMDDADPPGPENLFVNYLSRIHRPLLCPRPQDFQFILKGIARLLSNPLLQTYLPNSTKKIQFHQELLVLFWKLCDFNKKFLFFVLKSSDVLDILVPILFFLNDARADQSRVGLMHIGVFILLLLSGERNFGVRLNKPYSIRVPMDIPVFTGTHADLLIVVFHKIITSGHQRLQPLFDCLLTIVVNVSPYLKSLSMVTANKLLHLLEAFSTTWFLFSAAQNHHLVFFLLEVFNNIIQYQFDGNSNLVYAIIRKRSIFHQLANLPTDPPTIHKALQRRRRTPEPLSRTGSQEGTSMEGSRPAAPAEPGTLKTSLVATPGIDKLTEKSQVSEDGTLRSLEPEPQQSLEDGSPAKGEPSQAWREQRRPSTSSASGQWSPTPEWVLSWKSKLPLQTIMRLLQVLVPQVEKICIDKGLTDESEILRFLQHGTLVGLLPVPHPILIRKYQANSGTAMWFRTYMWGVIYLRNVDPPVWYDTDVKLFEIQRV

SEQ ID NO: 7397 - protein, 626 aa, Homo sapiens
MGSTDSKLNFRKAVIQLTTKTQPVEATDDAFWDQFWADTATSVQDVFALVPAAEIRAVREESPSNLATLCYKAVEKLVQGAESGCHSEKEKQIVLNCSRLLTRVLPYIFEDPDWRGFFWSTVPGAGRGGQGEEDDEHARPLAESLLLAIADLLFCPDFTVQSHRRSTVDSAEDVHSLDSCEYIWEAGVGFAHSPQPNYIHDMNRMELLKLLLTCFSEAMYLPPAPESGSTNPWVQFFCSTENRHALPLFTSLLNTVCAYDPVGYGIPYNHLLFSDYREPLVEEAAQVLIVTLDHDSASSASPTVDGTTTGTAMDDADPPGPENLFVNYLSRIHRPLLCPRPQDFQFILKGIARLLSNPLLQTYLPNSTKKIQFHQELLVLFWKLCDFNKKFLFFVLKSSDVLDILVPILFFLNDARADQSRVGLMHIGVFILLLLSGERNFGVRLNKPYSIRVPMDIPVFTGTHADLLIVVFHKIITSGHQRLQPLFDCLLTIVVNVSPYLKSLSMVTANKLLHLLEAFSTTWFLFSAAQNHHLVFFLLEVFNNIIQYQFDGNSNLVYAIIRKRSIFHQLANLPTDPPTIHKALQRRRRTPEPLSRTGRRAPPWRAPAPLPLQSQAPSRPVWWLLQ

SEQ ID NO: 7398 - protein, 572 aa, Homo sapiens
MGSTDSKLNFRKAVIQLTTKTHALPLFTSLLNTVCAYDPVGYGIPYNHLLFSDYREPLVEEAAQVLIVTLDHDSASSASPTVDGTTTGTAMDDADPPGPENLFVNYLSRIHRPLLCPRPQDFQFILKGIARLLSNPLLQTYLPNSTKKIQFHQELLVLFWKLCDFNKKFLFFVLKSSDVLDILVPILFFLNDARADQSRVGLMHIGVFILLLLSGERNFGVRLNKPYSIRVPMDIPVFTGTHADLLIVVFHKIITSGHQRLQPLFDCLLTIVVNVSPYLKSLSMVTANKLLHLLEAFSTTWFLFSAAQNHHLVFFLLEVFNNIIQYQFDGNSNLVYAIIRKRSIFHQLANLPTDPPTIHKALQRRRRTPEPLSRTGSQEGTSMEGSRPAAPAEPGTLKTSLVATPGIDKLTEKSQVSEDGTLRSLEPEPQQSLEDGSPAKGEPSQAWREQRRPSTSSASGQWSPTPEWVLSWKSKLPLQTIMRLLQVLVPQVEKICIDKGLTDESEILRFLQHGTLVGLLPVPHPILIRKYQANSGTAMWFRTYMWGVIYLRNVDPPVWYDTDVKLFEIQRV

SEQ ID NO: 7399 - protein, 234 aa, Homo sapiens
MSVKEGAQRKWAALKEKLGPQDSDPTEANLESADPELCIRLLQMPSVVNYSGLRKRLEGSDGGWMVQFLEQSGLDLLLEALARLSGRGVARISDALLQLTCVSCVRAVMNSRQGIEYILSNQGYVRQLSQALDTSNVMVKKQVFELLAALCIYSPEGHVLTLDALDHYKTVCSQQYRFSIVMNELSGSDNVPYVVTLLSVINAVILGPEDLRARTQLRNEFIGLQLLDVLARLR

SEQ ID NO: 7400 - protein, 418 aa, Homo sapiens
METHISCLFPELLAMIFGYLDVRDKGRAAQVCTAWRDAAYHKSVWRGVEAKLHLRRANPSLFPSLQARGIRRVQILSLRRSLSYVIQGMANIESLNLSGCYNLTDNGLGHAFVQEIGSLRALNLSLCKQITDSSLGRIAQYLKGLEVLELGGCSNITNTGLLLIAWGLQRLKSLNLRSCRHLSDVGIGHLAGMTRSAAEGCLGLEQLTLQDCQKLTDLSLKHISRGLTGLRLLNLSFCGGISDAGLLHLSHMGSLRSLNLRSCDNISDTGIMHLAMGSLRLSGLDVSFCDKVGDQSLAYIAQGLDGLKSLSLCSCHISDDGINRMVRQMHGLRTLNIGQCVRITDKGLELIAEHLSQLTGIDLYGCTRITKRGLERITQLPCLKVLNLGLWQMTDSEKEARGDFSPLFTVRTRGSSRR

SEQ ID NO: 7401 - protein, 566 aa, Homo sapiens
MEVPQPEPAPGSALSPAGVCGGAQRPGHLPGLLLGSHGLLGSPVRAAASSPVTTLTQTMHDLAGLGSRSRLTHLSLSRRASESSLSSESSESSDAGLCMDSPSPMDPHMAEQTFEQAIQAASRIIRNEQFAIRRFQSMPVRLLGHSPVLRNITNSQAPDGRRKSEAGSGAASSSGEDKENDGFVFKMPWKPTHPSSTHALAEWASRREAFAQRPSSAPDLMCLSPDRKMEVEELSPLALGRFSLTPAEGDTEEDDGFVDILESDLKDDDAVPPGMESLISAPLVKTLEKEEEKDLVMYSKCQRLFRSPSMPCSVIRPILKRLERPQDRDTPVQNKRRRSVTPPEEQQEAEEPKARVLRSKSLCHDEIENLLDSDHRELIGDYSKAFLLQTVDGKHQDLKYISPETMVALLTGKFSNIVDKFVIVDCRYPYEYEGGHIKTAVNLPLERDAESFLLKSPIAPCSLDKRVILIFHCEFSSERGPRMCRFIRERDRAVNDYPSLYYPEMYILKGGYKEFFPQHPNFCEPQDYRPMNHEAFKDELKTFRLKTRSWAGERSRRELCSRLQDQ

SEQ ID NO: 7402 - protein, 601 aa, Homo sapiens
MEVPQPEPAPGSALSPAGVCGGAQRPGHLPGLLLGSHGLLGSPVRAAASSPVTTLTQTMHDLAGLGSRSRLTHLSLSRRASESSLSSESSESSDAGLCMDSPSPMDPHMAEQTFEQAIQAASRIIRNEQFAIRRFQSMPVRLLGHSPVLRNITNSQAPDGRRKSEAGSGAASSSGEDKENVRFWKAGVGALREEEGACWGGSLACEDPPLPSWLQDGFVFKMPWKPTHPSSTHALAEWASRREAFAQRPSSAPDLMCLSPDRKMEVEELSPLALGRFSLTPAEGDTEEDDGFVDILESDLKDDDAVPPGMESLISAPLVKTLEKEEEKDLVMYSKCQRLFRSPSMPCSVIRPILKRLERPQDRDTPVQNKRRRSVTPPEEQQEAEEPKARVLRSKSLCHDEIENLLDSDHRELIGDYSKAFLLQTVDGKHQDLKYISPETMVALLTGKFSNIVDKFVIVDCRYPYEYEGGHIKTAVNLPLERDAESFLLKSPIAPCSLDKRVILIFHCEFSSERGPRMCRFIRERDRAVNDYPSLYYPEMYILKGGYKEFFPQHPNFCEPQDYRPMNHEAFKDELKTFRLKTRSWAGERSRRELCSRLQDQ

SEQ ID NO: 7403 - protein, 305 aa, Homo sapiens
TQTMHDLAGLGSETPKSQVGTLLFRSRSRLTHLSLSRRASESSLSSESSESSDAGLCMDSPSPMDPHMAEQTFEQAIQAASRIIRNEQFAIRRFQSMPVRLLGHSPVLRNITNSQAPDGRRKSEAGSGAASSSGEDKENVRFWKAGVGALREEEGACWGGSLACEDPPLPSWLQDGFVFKMPWKPTHPSSTHALAEWASRREAFAQRPSSAPDLMCLSPDRKMEVEELSPLALGRFSLTPAEGDTEEDDGFVDILESDLKDLVMYSKCQRLFRSPSMPCSVIRPILKRLERPQDRDTPVQNKRRR

SEQ ID NO: 7404 - protein, 580 aa, Homo sapiens
MEVPQPEPAPGSALSPAGVCGGAQRPGHLPGLLLGSHGLLGSPVRAAASSPVTTLTQTMHDLAGLGSETPKSQVGTLLFRSRSRLTHLSLSRRASESSLSSESSESSDAGLCMDSPSPMDPHMAEQTFEQAIQAASRIIRNEQFAIRRFQSMPVRLLGHSPVLRNITNSQAPDGRRKSEAGSGAASSSGEDKENDGFVFKMPWKPTHPSSTHALAEWASRREAFAQRPSSAPDLMCLSPDRKMEVEELSPLALGRFSLTPAEGDTEEDDGFVDILESDLKDDDAVPPGMESLISAPLVKTLEKEEEKDLVMYSKCQRLFRSPSMPCSVIRPILKRLERPQDRDTPVQNKRRRSVTPPEEQQEAEEPKARVLRSKSLCHDEIENLLDSDHRELIGDYSKAFLLQTVDGKHQDLKYISPETMVALLTGKFSNIVDKFVIVDCRYPYEYEGGHIKTAVNLPLERDAESFLLKSPIAPCSLDKRVILIFHCEFSSERGPRMCRFIRERDRAVNDYPSLYYPEMYILKGGYKEFFPQHPNFCEPQDYRPMNHEAFKDELKTFRLKTRSWAGERSRRELCSRLQDQ

SEQ ID NO: 7405 - protein, 394 aa, Homo sapiens
VPGNIVSLGHGGLNQLGGAFVNGRPLPEVVRQRIVDLAHQGVRPCDISRQLRVSHGCVSKILGRYYETGSIRPGVIGGSKPKVATPKVVEKIGDYKRQNPTMFAWEIRDRLLAEGVCDNDTVPSVSSINRIIRTKVQQPFNLPMDSCVATKSLSPGHTLIPSSAVTPPESPQSDSLGSTYSINGLLGIAQPGSDKRKMDDSDQDSCRLSIDSQSSSSGPRKHLRTDAFSQHHLEPLECPFERQHYPEAYASPSHTKGEQVRSWALGGLYPLPLLNSTLDDGKATLTPSNTPLGRNLSTHQTYPVVAGREMVGPTLPGYPPHIPTSGQGSYASSAIAGMVAGSEYSGNAYGHTPYSSYSEAWRFPNSSLLSSPYYYSSTSRPSAPPTTATAFDHL

SEQ ID NO: 7406 - protein, 457 aa, Homo sapiens
VPGNIVSLGHGGLNQLGGAFVNGRPLPEVVRQRIVDLAHQGVRPCDISRQLRVSHGCVSKILGRYYETGSIRPGVIGGSKPKVATPKVVEKIGDYKRQNPTMFAWEIRDRLLAEGVCDNDTVPSVSSINRIIRTKVQQPFNLPMDSCVATKSLSPGHTLIPSSAVTPPESPQSDSLGSTYSINGLLGIAQPGSDKRKMDDSDQDSCRLSIDSQSSSSGPRKHLRTDAFSQHHLEPLECPFERQHYPEAYASPSHTKGEQVRSWALGGLYPLPLLNSTLDDGKATLTPSNTPLGRNLSTHQTYPVVADPHSPFAIKQETPEVSSSSSTPSSLSSSAFLDLQQVGSGVPPFNAFPHAASVYGQFTGQALLSGREMVGPTLPGYPPHIPTSGQGSYASSAIAGMVAGSEYSGNAYGHTPYSSYSEAWRFPNSSLLSSPYYYSSTSRPSAPPTTATAFDHL

SEQ ID NO: 7407 - protein, 321 aa, Homo sapiens
MPHNSIRSGHGGLNQLGGAFVNGRPLPEVVRQRIVDLAHQGVRPCDISRQLRVSHGCVSKILGRYYETGSIRPGVIGGSKPKVATPKVVEKIGDYKRQNPTMFAWEIRDRLLAEGVCDNDTVPSVSSINRIIRTKVQQPFNLPMDSCVATKSLSPGHTLIPSSAVTPPESPQSDSLGSTYSINGLLGIAQPGSDKRKMDDSDQDSCRLSIDSQSSSSGPRKHLRTDAFSQHHLEPLECPFERQHYPEAYASPSHTKGEQGERWWGPRCPDTHPTSPPADRAAMPPLPSQAWWQEVNTLAMPMATPPTPPTARPGASPTPAC

SEQ ID NO: 7408 - protein, 399 aa, Homo sapiens
MPHNSIRSGHGGLNQLGGAFVNGRPLPEVVRQRIVDLAHQGVRPCDISRQLRVSHGCVSKILGRYYETGSIRPGVIGGSKPKVATPKVVEKIGDYKRQNPTMFAWEIRDRLLAEGVCDNDTVPSVSSINRIIRTKVQQPFNLPMDSCVATKSLSPGHTLIPSSAVTPPESPQSDSLGSTYSINGLLGIAQPGSDKRKMDDSDQDSCRLSIDSQSSSSGPRKHLRTDAFSQHHLEPLECPFERQHYPEAYASPSHTKGEQGLYPLPLLNSTLDDGKATLTPSNTPLGRNLSTHQTYPVVADAPPFWICSKSAPGSRPSMPFPMLPPCTGSSRARPSSQGERWWGPRCPDTHPTSPPADRAAMPPLPSQAWWQEVNTLAMPMATPPTPPTARPGASPTPAC

SEQ ID NO: 7409 - protein, 287 aa, Homo sapiens
MPHNSIRSGHGGLNQLGGAFVNGRPLPEVVRQRIVDLAHQGVRPCDISRQLRVSHGCVSKILGRYYETGSIRPGVIGGSKPKVATPKVVEKIGDYKRQNPTMFAWEIRDRLLAEGVCDNDTVPSVSSINRIIRTKVQQPFNLPMDSCVATKSLSPGHTLIPSSAVTPPESPQSDSLGSTYSINGLLGIAQPGSDKRKMDDSDQDSCRLSIDSQSSSSGPRKHLRTDAFSQHHLEPLECPFERQHYPEAYASPSHTKGEQEVNTLAMPMATPPTPPTARPGASPTPAC

SEQ ID NO: 7410 - protein, 144 aa, Homo sapiens
MGLTIKGLISLGPSASWLGELNRLKYQAQNITSGDTTTILPAACCTMKSAKLGFLLRFFIFCSLNTLLLGGVNKIAEKICGDLKDPCKLDMNFGSCYEVHFRYFYNRTSKRCETFVFSGCNGNLNNFKLKIEREVACVAKYKPP

SEQ ID NO: 7411 - protein, 1971 aa, Homo sapiens
KLRENKKTAELIKTANLLFNSFEPYYMWDYVARWFEECCRRTLHVRLQIGPGDSNDSSELQLTNFCLLVDFLLDIVSLETYIEIQTEHLPQLLLRMISALTSHLQTLHLSELTDSLRLCSKILSKVQPPLLSASTGGVLQFPSGQNNSVKEWEDKKVSSVSHENPTEVFEDGENPPSSRSSESGFTEFIQYQADRTDDIDRELSEGQGAAAIPIGSTSSETETASTVGSEETIIQTPSVVTQGTATRSRKTAQKTAMQCCLEYVQQFLTRLINLYIIQNNSFSQSLATEHQGDLGREQGETSKWDRNSQGDVKEKNISKQKTSKEYLSAFLAACQLFLECSSFPVYIAEGNHTSELRSEKLETDCEHVQPPQWLQTLMNACSQASDFSVQSVAISLVMDLVGLTQSVAMVTGENINSVEPAQPLSPNQGRVAVVIRPPLTQGNLRYIAEKTEFFKHVALTLWDQLGDGTPQHHQKSVELFYQLHNLVPSSSICEDVISQQLTHKDKKIRMEAHAKFAVLWHLTRDLHINKSSSFVRSFDRSLFIMLDSLNSLDGSTSSVGQAWLNQVLQRHDIARVLEPLLLLLLHPKTQRVSVQRVQAERYWNKSPCYPGEESDKHFMQNFACSNVSQVQLITSKGNGEKPLTMDEIENFSLTVNPLSDRLSLLSTSSETIPMVVSDFDLPDQQIEILQSSDSGCSQSSAGDNLSYEVDPETVNAQEDSQMPKESSPDDDVQQVVFDLICKVVSGLEVESASVTSQLEIEAMPPKCSDIDPDEETIKIEDDSIQQSQNALLSNESSQFLSVSAEGGHECVANGISRNSSSPCISGTTHTLHDSSVASIETKSRQRSHSSIQFSFKEKLSEKVSEKETIVKESGKQPGAKPKVKLARKKDDDKKKSSNEKLKQTSVFFSDGLDLENWYSCGEGDISEIESDMGSPGSRKSPNFNIHPLYQHVLLYLQLYDSSRTLYAFSAIKAILKTNPIAFVNAISTTSVNNAYTPQLSLLQNLLARHRISVMGKDFYSHIPVDSNHNFRSSMYIEILISLCLYYMRSHYPTHVKVTAQDLIGNRNMQMMSIEILTLLFTELAKVIESSAKGFPSFISDMLSKCKVQKVILHCLLSSIFSAQKWHSEKMAGKNLVAVEEGFSEDSLINFSEDEFDNGSTLQSQLLKVLQRLIVLEHRVMTIPEENETGFDFVVSDLEHISPHQPMTSLQYLHAQPITCQGMFLCAVIRALHQHCACKMHPQWIGLITSTLPYMGKVLQRVVVSVTLQLCRNLDNLIQQYKYETGLSDSRPLWMASIIPPDMILTLLEGITAIIHYCLLDPTTQYHQLLVSVDQKHLFEARSGILSILHMIMSSVTLLWSILHQADSSEKMTIAASASLTTINLGATKNLRQQILELLGPISMNHGVHFMAAIAFVWNERRQNKTTTRTKVIPAASEEQLLLVELVRSISVMRAETVIQTVKEVLKQPPAIAKDKKHLSLEVCMLQFFYAYIQRVLNEFIMKNPSLENKKDQRDLQDVTHKIVDAIGAIAGSSLEQTTWLRRNLEVKPSPKIMVDGTNLESDVEGILVKHLGLLSVLAHLLDMVFYSDEKERVIPLLVNIMHYVVPYLRNHSAHNAPSYRACVQLLSSLSGYQYTRRAWKKEAFDLFMDPSFFQMDASCVNHWRAIMDNLMTHDKTTFRDLMTRVAVAQSSSLNLFANRDVELEQRAMLLKRLAFAIFSSEIDQYQKYLPDIQGIPVSKWVQLLTALSPAYRTSGPSVAGLETTYTGGNGFSTSYNSQRWLNLYLSACKFLDLALALPSENLPQFQMYRWAFIPEASDDSGLEVRRQGIHQREFKPYVVRLAKLLRKRAKDKEEDFKTVILEGLEMAKHQKNPEEDNSGRTLGWEPGHLLLTICTVRSMEQLLPFFNVLSQVFNSKVTSRCGGHSGSPILYSNAFPNKDMKLENHKPCSSKARQKIEEMVEKDFLEGMIKT

SEQ ID NO: 7412 - protein, 179 aa, Homo sapiens
MTIMTDQTMATGILTPVMTGSENPPGKNGNCLEARAEGRPGAEPVRDLAVSREGRLGTFTTQNASAPRNPETPGSPVPPSGRPCPSSPRGSFAVRGKGRVASSGPFSAATAAHPSTSSRSPATSCHPDFPHSAASPRPLRAGTAVPADSAKGKSLLPSHANCRALTAAGRGKERRNTSL

SEQ ID NO: 7413 - protein, 906 aa, Homo sapiens
MAGNVKKSSGAGGGTGSGGSGSGGLIGLMKDAFQPHHHHHHHLSPHPPGTVDKKMVEKCWKLMDKVVRLCQNPKLALKNSPPYILDLLPDTYQHLRTILSRYEGKMETLGENEYFRVFMENLMKKTKQTISLFKEGKERMYEENSQPRRNLTKLSLIFSHMLAELKGIFPSGLFQGDTFRITKADAAEFWRKAFGEKTIVPWKSFRQALHEVHPISSGLEAMALKSTIDLTCNDYISVFEFDIFTRLFQPWSSLLRNWNSLAVTHPGYMAFLTYDEVKARLQKFIHKPGSYIFRLSCTRLGQWAIGYVTADGNILQTIPHNKPLFQALIDGFREGFYLFPDGRNQNPDLTGLCEPTPQDHIKVTQEQYELYCEMGSTFQLCKICAENDKDVKIEPCGHLMCTSCLTSWQESEGQGCPFCRCEIKGTEPIVVDPFDPRGSGSLLRQGAEGAPSPNYDDDDDERADDTLFMMKELAGAKVERPPSPFSMAPQASLPPVPPRLDLLPQRVCVPSSASALGTASKAASGSLHKDKPLPVPPTLRDLPPPPPPDRPYSVGAESRPQRRPLPCTPGDCPSRDKLPPVPSSRLGDSWLPRPIPKVPVSAPSSSDPWTGRELTNRHSLPFSLPSQMEPRPDVPRLGSTFSLDTSMSMNSSPLVGPECDHPKIKPSSSANAIYSLAARPLPVPKLPPGEQCEGEEDTEYMTPSSRPLRPLDTSQSSRACDCDQQIDSCTYEAMYNIQSQAPSITESSTFGEGNLAAAHANTGPEESENEDDGYDVPKPPVPAVLARRTLSDISNASSSFGWLSLDGDPTTNVTEGSQVPERPPKPFPRRINSERKAGSCQQGSGPAASAATASPQLSSEIENLMSQGYSYQDIQKALVIAQNNIEMAKNILREFVSISSPAHVAT

SEQ ID NO: 7414 - protein, 478 aa, Homo sapiens
MVQKTSMSRGPYPPSQEIPMEVFDPSPQGKYSKRKGRFKRSDGSTSSDTTSNSFVRQGSAESYTSRPSDSDVSLEEDREALRKEAERQALAQLEKAKTKPVAFAVRTNVGYNPSPGDEVPVQGVAITFEPKDFLHIKEKYNNDWWIGRLVKEGCEVGFIPSPVKLDSLRLLQEQKLRQNRLGSSKSGDNSSSSLGDVVTGTRRPTPPASAKQKQKSTEHVPPYDVVPSMRPIILVGPSLKGYEVTDMMQKALFDFLKHRFDGRISITRVTADISLAKRSVLNNPSKHIIIERSNTRSSLAEVQSEIERIFELARTLQLVALDADTINHPAQLSKTSLAPIIVYIKITSPKVLQRLIKSRGKSQSKHLNVQIAASEKLAQCPPEMFDIILDENQLEDACEHLAEYLEAYWKATHPPSSTPPNPLLNRTMATAALAASPAPVSNLQVQVLTSLRRNLGFWGGLESSQRGSVVPQEQEHAM

SEQ ID NO: 7415 - protein, 523 aa, Homo sapiens
MVQKTSMSRGPYPPSQEIPMEVFDPSPQGKYSKRKGRFKRSDGSTSSDTTSNSFVRQGSAESYTSRPSDSDVSLEEDREALRKEAERQALAQLEKAKTKPVAFAVRTNVGYNPSPGDEVPVQGVAITFEPKDFLHIKEKYNNDWWIGRLVKEGCEVGFIPSPVKLDSLRLLQEQKLRQNRLGSSKSGDNSSSSLGDVVTGTRRPTPPASGNEMTNLAFELDPLELEEEEAELGEQSGSAKTSVSSVTTPPPHGKRIPFFKKTEHVPPYDVVPSMRPIILVGPSLKGYEVTDMMQKALFDFLKHRFDGRISITRVTADISLAKRSVLNNPSKHIIIERSNTRSSLAEVQSEIERIFELARTLQLVALDADTINHPAQLSKTSLAPIIVYIKITSPKVLQRLIKSRGKSQSKHLNVQIAASEKLAQCPPEMFDIILDENQLEDACEHLAEYLEAYWKATHPPSSTPPNPLLNRTMATAALAASPAPVSNLQVQVLTSLRRNLGFWGGLESSQRGSVVPQEQEHAM

SEQ ID NO: 7416 - protein, 599 aa, Homo sapiens
MVQKTSMSRGPYPPSQEIPMEVFDPSPQGKYSKRKGRFKRSDGSTSSDTTSNSFVRQGSAESYTSRPSDSDVSLEEDREALRKEAERQALAQLEKAKTKPVAFAVRTNVGYNPSPGDEVPVQGVAITFEPKDFLHIKEKYNNDWWIGRLVKEGCEVGFIPSPVKLDSLRLLQEQKLRQNRLGSSKSGDNSSSSLGDVVTGTRRPTPPASGKSHRHAGTEHVPPYDVVPSMRPIILVGPSLKGYEVTDMMQKALFDFLKHRFDGRISITRVTADISLAKRSVLNNPSKHIIIERSNTRSSLAEVQSEIERIFELARTLQLVALDADTINHPAQLSKTSLAPIIVYIKITSPKVLQRLIKSRGKSQSKHLNVQIAASEKLAQCPPEMFDIILDENQLEDACEHLAEYLEAYWKATHPPSSTPPNPLLNRTMATAALAASPAPVSNLQGPYLASGDQPLERATGEHASMHEYPGELGQPPGLYPSSHPPGRAGTLRALSRQDTFDADTPGSRNSAYTELGDSCVDMETDPSEGPGLGDPAGGGTPPARQGSWEDEEEDYEEELTDNRNRGRNKARYCAEGGGPVLGRNKNELEGWGRGVYIR

SEQ ID NO: 7417 - protein, 114 aa, Homo sapiens
FLASRLGPVSTANMSRPVRNRKVVDYSQFQESDDADEDSEDSEDKDVKTKKDDSHSAEDSEDEKEDHKNVRQQRQAASKAASKQREMLMEDVGSEEEQEEEDEAPFQEKDSGSR

SEQ ID NO: 7418 - protein, 289 aa, Homo sapiens
DGGAGGSSVPGALNQRAAEFEKPAARGSAAAVPSAEVRGGWGAERAGWGGSWSLASRLGPVSTANMSRPVRNRKVVDYSQFQESDDADFELRLLCICFFASLYSEDSEDKDVKTKKDDSHSAEDSEDEKEDHKNVRQQRQAASKAASKQREMLMEDVGSEEEQEEEDEAPFQEKDSGSDEDFLMEDDDDSDYGSSKKKNKKMVKKSKPERKEKKMPKPRLKATVTPSPVKGKGKVGRPTASKASKEKTPSPKEEDEEPESPPEKKTSTSPPPEKSGDEGSEDEAPSGED

SEQ ID NO: 7419 - protein, 1443 aa, Homo sapiens
MAGGAWGRLACYLEFLKKEELKEFQLLLANKAHSRSSSGETPAQPEKTSGMEVASYLVAQYGEQRAWDLALHTWEQMGLRSLCAQAQEGAGHSPSFPYSPSEPHLGSPSQPTSTAVLMPWIHELPAGCTQGSERRVLRQLPDTSGRRWREISASLLYQALPSSPDHESPSQESPNAPTSTAVLGSWGSPPQPSLAPREQEAPGTQWPLDETSGIYYTEIREREREKSEKGRPPWAAVVGTPPQAHTSLQPHHHPWEPSVRESLCSTWPWKNEDFNQKFTQLLLLQRPHPRSQDPLVKRSWPDYVEENRGHLIEIRDLFGPGLDTQEPRIVILQGAAGIGKSTLARQVKEAWGRGQLYGDRFQHVFYFSCRELAQSKVVSLAELIGKDGTATPAPIRQILSRPERLLFILDGVDEPGWVLQEPSSELCLHWSQPQPADALLGSLLGKTILPEASFLITARTTALQNLIPSLEQARWVEVLGFSESSRKEYFYRYFTDERQAIRAFRLVKSNKELWALCLVPWVSWLACTCLMQQMKRKEKLTLTSKTTTTLCLHYLAQALQAQPLGPQLRDLCSLAAEGIWQKKTLFSPDDLRKHGLDGAIISTFLKMGILQEHPIPLSYSFIHLCFQEFFAAMSYVLEDEKGRGKHSNCIIDLEKTLEAYGIHGLFGASTTRFLLGLLSDEGEREMENIFHCRLSQGRNLMQWVPSLQLLLQPHSLESLHCLYETRNKTFLTQVMAHFEEMGMCVETDMELLVCTFCIKFSRHVKKLQLIEGRQHRSTWSPTMVVLFRWVPVTDAYWQILFSVLKVTRNLKELDLSGNSLSHSAVKSLCKTLRRPRCLLETLRLAGCGLTAEDCKDLAFGLRANQTLTELDLSFNVLTDAGAKHLCQRLRQPSCKLQRLQLVSCGLTSDCCQDLASVLSASPSLKELDLQQNNLDDVGVRLLCEGLRHPACKLIRLGKPSVMTPTEGLDTGEMSNSTSSLKRQRLGSERAASHVAQANLKLLDVSKIFPIAEIAEESSPEVVPVELLCVPSPASQGDLHTKPLGTDDDFWGPTGPVATEVVDKEKNLYRVHFPVAGSYRWPNTGLCFVMREAVTVEIEFCVWDQFLGEINPQHSWMVAGPLLDIKAEPGAVEAVHLPHFVALQGGHVDTSLFQMAHFKEEGMLLEKPARVELHHIVLENPSFSPLGVLLKMIHNALRFIPVTSVVLLYHRVHPEEVTFHLYLIPSDCSIRKAIDDLEMKFQFVRIHKPPPLTPLYMGCRYTVSGSGSGMLEILPKELELCYRSPGEDQLFSEFYVGHLGSGIRLQVKDKKDETLVWEALVKPGDLMPATTLIPPARIAVPSPLDAPQLLHFVDQYREQLIARVTSVEVVLDKLHGQVLSQEQYERVLAENTRPSQMRKLFSLSQSWDRKCKDGLYQALKETHPHLIMELWEKGSKKGLLPLSS

SEQ ID NO: 7420 - protein, 1399 aa, Homo sapiens
MAGGAWGRLACYLEFLKKEELKEFQLLLANKAHSRSSSGETPAQPEKTSGMEVASYLVAQYGEQRAWDLALHTWEQMGLRSLCAQAQEGAGHSPSFPYSPSEPHLGSPSQPTSTAVLMPWIHELPAGCTQGSERRVLRQLPDTSGRRWREISASLLYQALPSSPDHESPSQESPNAPTSTAVLGSWGSPPQPSLAPREQEAPGTQWPLDETSGIYYTEIREREREKSEKGRPPWAAVVGTPPQAHTSLQPHHHPWEPSVRESLCSTWPWKNEDFNQKFTQLLLLQRPHPRSQDPLVKRSWPDYVEENRGHLIEIRDLFGPGLDTQEPRIVILQGAAGIGKSTLARQVKEAWGRGQLYGDRFQHVFYFSCRELAQSKVVSLAELIGKDGTATPAPIRQILSRPERLLFILDGVDEPGWVLQEPSSELCLHWSQPQPADALLGSLLGKTILPEASFLITARTTALQNLIPSLEQARWVEVLGFSESSRKEYFYRYFTDERQAIRAFRLVKSNKELWALCLVPWVSWLACTCLMQQMKRKEKLTLTSKTTTTLCLHYLAQALQAQPLGPQLRDLCSLAAEGIWQKKTLFSPDDLRKHGLDGAIISTFLKMGILQEHPIPLSYSFIHLCFQEFFAAMSYVLEDEKGRGKHSNCIIDLEKTLEAYGIHGLFGASTTRFLLGLLSDEGEREMENIFHCRLSQGRNLMQWVPSLQLLLQPHSLESLHCLYETRNKTFLTQVMAHFEEMGMCVETDMELLVCTFCIKFSRHVKKLQLIEGRQHRSTWSPTMVVLFRWVPVTDAYWQILFSVLKVTRNLKELDLSGNSLSHSAVKSLCKTLRRPRCLLETLRLAGCGLTAEDCKDLAFGLRANQTLTELDLSFNVLTDAGAKHLCQRLRQPSCKLQRLQLVSCGLTSDCCQDLASVLSASPSLKELDLQQNNLDDVGVRLLCEGLRHPACKLIRLGKPSVMTPTEGLDTGEMSNSTSSLKRQRLGSERAASHVAQANLKLLDVSKIFPIAEIAEESSPEVVPVELLCVPSPASQGDLHTKPLGTDDDFWGPTGPVATEVVDKEKNLYRVHFPVAGSYRWPNTGLCFVMREAVTVEIEFCVWDQFLGEINPQHSWMVAGPLLDIKAEPGAVEAVHLPHFVALQGGHVDTSLFQMAHFKEEGMLLEKPARVELHHIVLENPSFSPLGVLLKMIHNALRFIPVTSVVLLYHRVHPEEVTFHLYLIPSDCSIRKELELCYRSPGEDQLFSEFYVGHLGSGIRLQVKDKKDETLVWEALVKPGDLMPATTLIPPARIAVPSPLDAPQLLHFVDQYREQLIARVTSVEVVLDKLHGQVLSQEQYERVLAENTRPSQMRKLFSLSQSWDRKCKDGLYQALKETHPHLIMELWEKGSKKGLLPLSS

SEQ ID NO: 7421 - protein, 542 aa, Homo sapiens
MDRSKRNSIAGFPPRVERLEEFEGGGGGEGNVSQVGRVWPSSYRALISAFSRLTRLDDFTCEKIGSGFFSEVFKVRHRASGQVMALKMNTLSSNRANMLKEVQLMNRLSHPNILRFMGVCVHQGQLHALTEYINSGNLEQLLDSNLHLPWTVRVKLAYDIAVGLSYLHFKGIFHRDLTSKNCLIKRDENGYSAVVADFGLAEKIPDVSMGSEKLAVVGSPFWMAPEVLRDEPYNEKADVFSYGIILCEIIARIQADPDYLPRTEMDPKLRPSFVEIGKTLEEILSRLQEEEQERDRKLQPTARGLLEKAPGVKRLSSLDDKIPHKSPCPRRTIWLSRSQSDIFSRKPPRTVSVLDPYYRPRDGAARTPKVNPFSARQDLMGGKIKFFDLPSKSVISLVFDLDAPGPGTMPLADWQEPLAPPIRRWRSLPGSPEFLHQEACPFVGREESLSDGPPPRLSSLKYRVKEIPPFRASALPAAQAHEAMDCSILQEENGFGSRPQGTSPCPAGASEEMEVEERPAGSTPATFSTSGIGLQTQGKQDG

SEQ ID NO: 7422 - protein, 571 aa, Homo sapiens
MDRSKRNSIAGFPPRVERLEEFEGGGGGEGNVSQVGRVWPSSYRALISAFSRLTRLDDFTCEKIGSGFFSEVFKVRHRASGQVMALKMNTLSSNRANMLKEVQLMNRLSHPNILRFMGVCVHQGQLHALTEYINSGNLEQLLDSNLHLPWTVRVKLAYDIAVGLSYLHFKGIFHRDLTSKNCLIKRDENGYSAVVADFGLAEKIPDVSMGSEKLAVVGSPFWMAPEVLRDEPYNEKADVFSYGIILCEIIARIQADPDYLPRTENFGLDYDAFQHMVGDCPPDFLQLTFNCCNMDPKLRPSFVEIGKTLEEILSRLQEEEQERDRKLQPTARGLLEKAPGVKRLSSLDDKIPHKSPCPRRTIWLSRSQSDIFSRKPPRTVSVLDPYYRPRDGAARTPKVNPFSARQDLMGGKIKFFDLPSKSVISLVFDLDAPGPGTMPLADWQEPLAPPIRRWRSLPGSPEFLHQEACPFVGREESLSDGPPPRLSSLKYRVKEIPPFRASALPAAQAHEAMDCSILQEENGFGSRPQGTSPCPAGASEEMEVEERPAGSTPATFSTSGIGLQTQGKQDG

SEQ ID NO: 7423 - protein, 555 aa, Homo sapiens
MDRSKRNSIAGFPPRVERLEEFEGGGGGEGNVSQVGRVWPSSYRALISAFSRLTRLDDFTCEKIGSGFFSEVFKVRHRASGQVMALKMNTLSSNRANMLKEVQLMNRLSHPNILRYINSGNLEQLLDSNLHLPWTVRVKLAYDIAVGLSYLHFKGIFHRDLTSKNCLIKRDENGYSAVVADFGLAEKIPDVSMGSEKLAVVGSPFWMAPEVLRDEPYNEKADVFSYGIILCEIIARIQADPDYLPRTENFGLDYDAFQHMVGDCPPDFLQLTFNCCNMDPKLRPSFVEIGKTLEEILSRLQEEEQERDRKLQPTARGLLEKAPGVKRLSSLDDKIPHKSPCPRRTIWLSRSQSDIFSRKPPRTVSVLDPYYRPRDGAARTPKVNPFSARQDLMGGKIKFFDLPSKSVISLVFDLDAPGPGTMPLADWQEPLAPPIRRWRSLPGSPEFLHQEACPFVGREESLSDGPPPRLSSLKYRVKEIPPFRASALPAAQAHEAMDCSILQEENGFGSRPQGTSPCPAGASEEMEVEERPAGSTPATFSTSGIGLQTQGKQDG

SEQ ID NO: 7424 - protein, 341 aa, Homo sapiens
MAALYACTKCHQRFPFEALSQGQQLCKECRIAHPVVKCTYCRTEYQQERLECNGTISAHCNLHLPGSSDSPASSSRVAGITGIKTNTICKKCAQNVQLYGTPKPCQYCNIIAAFIGNKCQRCTNSEKKYGPPYSCEQCKQQCAFDRKDDRKKVDGKLLCWLCTLSYKRVLQKTKEQRKHLSSSSRAGHQEKEQYSRLSGGGHYNSQKTLSTSSIQNEIPKKKSKFESITTNGDSFSPDLALDSPGTDHFVIIAQLKEEVATLKKMLHQKDQMILEKEKKITELKADFQYQESQMRAKMNQMEKTHKEVTEQLQAKNRELLKQAAALSKSKKSEKSGAITSP

SEQ ID NO: 7425 - protein, 312 aa, Homo sapiens
MAALYACTKCHQRFPFEALSQGQQLCKECRIAHPVVKCTYCRTEYQQERLECNGTISAHCNLHLPGSSDSPASSSRVAGITGIKTNTICKKCAQNVQLYGTPKPCQYCNIIAAFIGNKCQRCTNSEKKYGPPYSCEQCKQQCAFDRKDDRKKVDGKLLCWLCTLSYKRVLQKTKEQRKHLSSSSRAGHQEKEQYSRLSGGGHYNSFSPDLALDSPGTDHFVIIAQLKEEVATLKKMLHQKDQMILEKEKKITELKADFQYQESQMRAKMNQMEKTHKEVTEQLQAKNRELLKQAAALSKSKKSEKSGAITSP

SEQ ID NO: 7426 - protein, 321 aa, Homo sapiens
MNRGGGSPSAAANYLLCTNCRKVLRKDKRIRVSQPLTRGPSAFIPEKEVVQANTVDERTNFLVEEYSTSGRLDNITQVMSLHTQYLESFLRSQFYMLRMDGPLPLPYRHYIAIMAAARHQCSYLINMHVDEFLKTGGIAEWLNGLEYVPQRLKNLNEINKLLAHRPWLITKEHIQKLVKTGENNWSLPELVHAVVLLAHYHALASFVFGSGINPERDPEISNGFRLISVNNFCVCDLANDNNIENASLSGSNFGIVDSLSELEALMERMKRLQEEREDEEASQEEMSTRFEKEKKESLFVVSGDTFHSFPHSGAFLHFFAF

SEQ ID NO: 7427 - protein, 317 aa, Homo sapiens
MNRGGGSPSAAANYLLCTNCRKVLRKDKRIRVSQPLTRGPSAFIPEKEVVQANTVDERTNFLVEEYSTSGRLDNITQVMSLHTQYLESFLRSQFYMLRMDGPLPLPYRHYIAIMAAARHQCSYLINMHVDEFLKTGGIAEWLNGLEYVPQRLKNLNEINKLLAHRPWLITKEHIQKLVKTGENNWSLPELVHAVVLLAHYHALASFVFGSGINPERDPEISNGFRLISVNNFCVCDLANDNNIENASLSGSNFGIVDSLSELEALMERMKRLQEEREDEEASQEEMSTRFEKEKKESLFVVSGDTFHSFPHSGLLKY

SEQ ID NO: 7428 - protein, 492 aa, Homo sapiens
MNRGGGSPSAAANYLLCTNCRKVLRKDKRIRVSQPLTRGPSAFIPEKEVVQANTVDERTNFLVEEYSTSGRLDNITQVMSLHTQYLESFLRSQFYMLRMDGPLPLPYRHYIAIMAAARHQCSYLINMHVDEFLKTGGIAEWLNGLEYVPQRLKNLNEINKLLAHRPWLITKEHIQKLVKTGENNWSLPELVHAVVLLAHYHALASFVFGSGINPERDPEISNGFRLISVNNFCVCDLANDNNIENASLSGSNFGIVDSLSELEALMERMKRLQEEREDEEASQEEMSTRFEKEKKESLFVVSGDTFHSFPHSDFEDDMIITSDVSRYIEDPGFGYEDFARRGEEHLPTFRAQDYTWENHGFSLVNRLYSDIGHLLDEKFRMVYNLTYNTMATHEDVDTTMLRRALFNYVHCMFGIRYDDYDYGEVNQLLERSLKVYIKTVTCYPERTTKRMYDSYWRQFKHSEKVHVNLLLMEARMQAELLYALRAITRHLT

SEQ ID NO: 7429 - protein, 1211 aa, Homo sapiens
MLSLAAKLVAFFWRTADTPREEAGQLEPELAEGDTKLKTVRGVVTRYCSDYGMIDDMIYFSSDAVTSRVLLNVGQEVIAVVEENKVSNGLKAIRVEAVSDKWEDDSRNHGSPSDCGPRVLIGCVTSLVEGAGCISQTTYFSLESVCEGFEPCKGDWVEAEYRIRPGTWSSEATSVKPLRYKRVDKVCISSLCGRNGVLEESIFFTLDSLKLPDGYTPRRGDVVNAVVVESSQSCYVWRALCMTLVKRRDAAPVHEATHFYGTILLKNKGDIEVTQVTHFGTLKEGRSKTMVIWIENKGDIPQNLVSCKLAGWDKSKQFRFQMLDKDQMCPVVSFVSVPEKENSSDENINSLNSHTKNKTSQMSESSLVNNRGISPGDCTCKGENGEKDNILSRKQMTEPEPGGLVPPGGKTFIVVICDGKNPGRCKELLLLCFSDFLIGRYLEVNVISGEESLIAAREPFSWKKLKSSQALTSAKTTVVVTAQKRNSRRQLPSFLPQYPIPDRLRKCVEQKIDILTFQPLLAELLNMSNYKEKFSTLLWLEEIYAEMELKEYNMSGIILRRNGDLLVLEVPGLAEGRPSLYAGDKLILKTQEYNGHAIEYISYVTEIHEEDVTLKINPEFEQAYNFEPMDVEFTYNRTTSRRCHFALEHVIHLGVKVLFPEEIILQSPQVTGNWNHAQDTKSSGQSTSKKNRKTMTDQAEHGTEERRVGDKDLPVLAPFTAEMSDWVDEIQTPKARKMEFFNPVLNENQKLAVKRILSGDCRPLPYILFGPPGTGKTVTIIEAVLQVHFALPDSRILVCAPSNSAADLVCLRLHESKVLQPATMVRVNATCRFEEIVIDAVKPYCRDGEDIWKASRFRIIITTCSSSGLFYQIGVRVGHFTHVFVDEAGQASEPECLIPLGLMSDISGQIVLAGDPMQLGPVIKSRLAMAYGLNVSFLERLMSRPAYQRDENAFGACGAHNPLLVTKLVKNYRSHEALLMLPSRLFYHRELEVCADPTVVTSLLGWEKLPKKGFPLIFHGVRGSEAREGKSPSWFNPAEAVQVLRYCCLLAHSISSQVSASDIGVITPYRKQVEKIRILLRNVDLMDIKVGSVEEFQGQEYLVIIISTVRSNEDRFEDDRYFLGFLSNSKRFNVAITRPKALLIVLGNPHVLVRDPCFGALLEYSITNGVYMGCDLPPALQSLQNCGEGVADPSYPVVPESTGPEKHQEPS

SEQ ID NO: 7430 - protein, 338 aa, Homo sapiens
MFRVGHFTHVFVDEAGQASEPECLIPLGLMSDISGQIVLAGDPMQLGPVIKSRLAMAYGLNVSFLERLMSRPAYQRDENAFGACGAHNPLLVTKLVKNYRSHEALLMLPSRLFYHRELEVCADPTVVTSLLGWEKLPKKGFPLIFHGVRGSEAREGKSPSWFNPAEAVQVLRYCCLLAHSISSQVSASDIGVITPYRKQVEKIRILLRNVDLMDIKVGSVEEFQGQEYLVIIISTVRSNEDRFEDDRYFLGFLSNSKRFNVAITRPKALLIVLGNPHVLVRDPCFGALLEYSITNGVYMGCDLPPALQSLQNCGEGVADPSYPVVPESTGPEKHQEPS

SEQ ID NO: 7431 - protein, 1254 aa, Homo sapiens
  VARIANT 956: Xaa = Any Amino Acid
MLLPDASPKQSQRRVLWAEPPCSYNLTEAEVAVKKKKNPHTPLLWSLPSRISEPARAMTCNTSVTRRCPKIPPWHLDRKYGSCSTILLDNSTASQPDLRHTLERYANRSLAIFEEPVHPLPQEKLPGKSFKHDPKRNCIFRHFCTLFQVIKLTAPCAIVALVYIKRLLTSANIDLCPTNWKKIVLGTMLLASKVWRNHGLWSVDDSQNSKDTAVENICTNMTLKRSFTRAPFQSDLMTAVKGRDLQLAGRESREAFPAEPSWVPARQSKMEKCFLELLEFNIHVSASVYAKYYFDLCALANDHDLYFLFSFLHKDKAQKLELLNQPTRAPGAVRGPAAPAPEVDNFAPERAATVTLRKEVTVRAPAGGSRNQRPQLASRPRRQRRCSVPVIGRLGQPLRAWAQLYISCCQSSSAQPSGVEAEQRTPIQGAYAVSQSPRPSIFRGASTPNAGFSCHPVALPGVAPFWGYREIGPSADSCVFWYPGATGASWPIAVLLANLQPDARQGECTLPGAALGHTSQHSLSLGPCRVLGALSLAEVLPQEIKQEIHQVLMDHGVPCHYTCFLLHPEDSTLERFLVLHSIQGLQEDSVLCKVEIHGLSPQPQTYQSHFRSPSLAELLNRISGTCRNHFAGMQKKSSASMGEGSLGRGAHLLLSDFRAVSQGVKNPQQGGLGAEGVHGRALSFVGCPISPSPTCHSVQRNGHLVLDVQLDDPKGEHNMDCVCTQETSTSRLGCKEHISGLGPGASPCAHQAPPSLLGARRFCSLSCSLHAGLFIRASGPVHGEVEERTSQRRSQPWPTTQQSPQDEQEKLLDEAIQAVKVQSFQMKRFLVYLTDEFAKGRKVADLYELVQYAGNIIPRLYLLITVGVVYAKSFPQSRKDILKDLVEMCRGVQHPLRGLFLRNYLLQCTRNILLDEGEPTDEETTSNISDSMDFVLLNFAEMNKFWVRMQHQGHSXDREKRERERQELRILVGTHLVHLSQLEGVNVEHYKQIVLSGILEQVVNCRDTLAQEYLMRCVIQVFPDEFHLQTLNPFLRTCAELHQNVNVKNIIIALIDSFICHCEDGPGIPADIKLFDIFSQQVATVIQSRQDMPSEDVLSLQVSLVNLDMKCYPDRVDYIDKVLETAAEIFNKLNLEHLEIKTFHPLFEYFDYESRKSMSCYVLSSVLDYNTEIVSQDQVDSIMNLVSTLIQDQPDQPVEDPDPEDFADEQSVVGPSFICCALRTLTSSTWYEFTLTITLCQLLVKSHVEVLKMV

SEQ ID NO: 7432 - protein, 209 aa, Homo sapiens
PPWHLDRKYGSCSTILLDNSTASQPDLRHTLESVALAIYYNIKHSFLEWIFILPFFFFQQEKLPGKSFKHDPKRNCIFRHFCTLFQVIKLTAPCAIVALVYIKRLLTSANIDLCPTNWKKIVLGTMLLASKVWRNHGLWSVDDSQNSKDTAVENMSKMEKCFLELLEFNIHVSASVYAKYYFDLCALANDHDLYFLFSFLHKDKAQKLE

SEQ ID NO: 7433 - protein, 1004 aa, Homo sapiens
MAVALDSQIDAPLEVEGCLIMKVEKDPEWASEPILEGSDSSETFRKCFRQFCYEDVTGPHEAFSKLWELCCRWLKPEMRSKEQILELLVIEQFLTILPEKIQAWAQKQCPQSGEEAVALVVHLEKETGRLRQQHLQDLRFHLASDLHCVEIYQQVAVLVRDRQIDVDINFVSSPVHREKHSPLGAAWEVADFQPEQVETQPRAVSREEPGSLHSGHQEQLNRKRERRPLPKNARPSPWVPALADEWNTLDQEVTTTRLPAGSQEPVKDVHVARGFSYRKSVHQIPAQRDLYRDFRKENVGNVVSLGSAVSTSNKITRLEQRKEPWTLGLHSSNKRSILRSNYVKEKSVHAIQVPARSAGKTWREQQQWGLEDEKIAGVHWSYEETKTFLAILKESRFYETLQACPRNSQVYGAVAEWLRECGFLRTPEQCRTKFKSLQKSYRKVRNGHMLEPCAFFEDMDALLNPAARAPSTDKPKEMIPVPRLKRIAISAKEHISLVEEEEAAEDSDDDEIGIEFIRKSEIHGAPVLFQNLSGVHWGYEETKTFLDILRETRFYEALQACHRKSKLYGAVAEQLRECGFLRTPEQCRTKFKSLQKSYRKVKNGHVLESCAFYKEMDALINSRASAPSPSTPEEVPSPSRQERGGIEVEPQEPTGWEPEETSQEAVIEDSCSERMSEEEIVQEPEFQGPPGLLQSPNDFEIGSSIKEDPTQIVYKDMEQHRALIEKSKRVVSQSTDPSKYRKRECISGRQWENLQGIRQGKPMSQPRDLGKAVVHQRPFVGKRPYRLLKYGESFGRSTRLMCRMTHHKENPYKCGVCGKCFGRSRSLIRHQRIHTGEKPFKCLDCGKSFNDSSNFGAHQRIHTGEKPYRCGECGKCFSQSSSLIIHQRTHTGEKPYQCGECGKSFTNSSHFSAHRRVHTGENPYKCVDCEKSFNNCTRFREHRRIHTGEKPYGCAQCGKRFSKSSVLTKHREVHVREKPLPHPPSLYCPENPHKGKTDEFRKTF

SEQ ID NO: 7434 - protein, 915 aa, Homo sapiens [sequence omitted]

SEQ ID NO: 7435 - protein, 1249 aa, Homo sapiens
MATAATEEPFPFHGLLPKKETGAASFLCRYPEYDGRGVLIAVLDTGVDPGAPGMQVTTDGKPKIVDIIDTTGSGDVNTATEVEPKDGEIVGLSGRVLKIPASWTNPSGKYHIGIKNGYDFYPKALKERIQKERKEKIWDPVHRVALAEACRKQEEFDVANNGSSQANKLIKEELQSQVELLNSFEKKYSDPGPVYDCLVWHDGEVWRACIDSNEDGDLSKSTVLRNYKEAQEYGSFGTAEMLNYSVNIYDDGNLLSIVTSGGAHGTHVASIAAGHFPEEPERNGVAPGAQILSIKIGDTRLSTMETGTGLIRAMIEVINHKCDLVNYSYGEATHWPNSGRICEVINEAVWKHNIIYVSSAGNNGPCLSTVGCPGGTTSSVIGVGAYVSPDMMVAEYSLREKLPANQYTWSSRGPSADGALGVSISAPGGAIASVPNWTLRGTQLMNGTSMSSPNACGGIALILSGLKANNIDYTVHSVRRALENTAVKADNIEVFAQGHGIIQVDKAYDYLVQNTSFANKLGFTVTVGNNRGIYLRDPVQVAAPSDHGVGIEPVFPENTENSEKISLQLHLALTSNSSWVQCPSHLELMNQCRHINIRVDPRGLREGLHYTEVCGYDIASPNAGPLFRVPITAVIAAKVNESSHYDLAFTDVHFKPGQIRRHFIEVPEGATWAEVTVCSCSSEVSAKFVLHAVQLVKQRAYRSHEFYKFCSLPEKGTLTEAFPVLGGKAIEFCIARWWASLSDVNIDYTISFHGIVCTAPQLNIHASEGINRFDVQSSLKYEDLAPCITLKNWVQTLRPVSAKTKPLGSRDVLPNNRQLYEMVLTYNFHQPKSGEVTPSCPLLCELLYESEFDSQLWIIFDQNKRQMGSGDAYPHQYSLKLEKGDYTIRLQIRHEQISDLERLKDLPFIVSHRLSNTLSLDIHENHSFALLGKKKSSNLTLPPKYNQPFFVTSLPDDKIPKGAGPGCYLAGSLTLSKTELGKKADVIPVHYYLIPPPTKTKNGSKDKEKDSEKEKDLKEEFTEALRDLKIQWMTKLDSSDIYNELKETYPNYLPLYVARLHQLDAEKERMKRLNEIVDAANAVISHIDQTALAVYIAMKTDPRPDAATIKNDMDKQKSTLVDALCRKGCALADHLLHTQAQDGAISTDAEGKEEEGESPLDSLAETFWETTKWTDLFDNKVLTFAYKHALVNKMYGRGLKFATKLVEEKPTKENWKNCIQLMKLLGWTHCASFTENWLPIMYPPDYCVF

SEQ ID NO: 7436 - protein, 898 aa, Homo sapiens
MRKGVLKDPEIADLFYKDDPEELFIGLHEIGHGSFGAVYFATNAHTSEVVAIKKMSYSGKQTHEKWQDILKEVKFLRQLKHPNTIEYKGCYLKEHTAWLVMEYCLGSASDLLEVHKKPLQEVEIAAITHGALHGLAYLHSHALIHRDIKAGNILLTEPGQVKLADFGSASMASPANSFVGTPYWMAPEVILAMDEGQYDGKVDIWSLGITCIELAERKPPLFNMNAMSALYHIAQNDSPTLQSNEWTDSFRRFVDYCLQKIPQERPTSAELLRHDFVRRDRPLRVLIDLIQRTKDAVRELDNLQYRKMKKILFQETRNGPLNESQEDEEDSEHGTSLNREMDSLGSNHSIPSMSVSTGSQSSSVNSMQEVMDESSSELVMMHDDESTINSSSSVVHKKDHVFIRDEAGHGDPRPEPRPTQSVQSQALHYRNRERFATIKSASLVTRQIHEHEQENELREQMSGYKRMRRQHQKQLIALENKLKAEMDEHRLKLQKEVETHANNSSIELEKLAKKQVAIIEKEAKVAAADEKKFQQQILAQQKKDLTTFLESQKKQYKICKEKIKEEMNEDHSTPKKEKQERISKHKENLQHTQAEEEAHLLTQQRLYYDKNCRFFKRKIMIKRHEVEQQNIREELNKKRTQKEMEHAMLIRHDESTRELEYRQLHTLQKLRMDLIRLQHQTELENQLEYNKRRERELHRKHVMELRQQPKNLKAMEMQIKKQFQDTCKVQTKQYKALKNHQLEVTPKNEHKTILKTLKDEQTRKLAILAEQYEQSINEMMASQALRLDEAQEAECQALRLQLQQEMELLNAYQSKIKMQTEAQHERELQKLEQRVSLRRAHLEQKIEEELAALQKERSERIKNLLERQEREIETFDMESLRMGFGNLVTLDFPKEDYR

SEQ ID NO: 7437 - protein, 1411 aa, Homo sapiens
MSLSSGASGGKGVDANPVETYDSGDEWDIGVGNLIIDLDADLEKDQQKLEMSGSKEVGIPAPNAVATLPDNIKFVTPVPGPQGKEGKSKSKRSKSGKDTSKPTPGTSLFTPSEGAASKKEVQGRSGDGANAGGLVAAIAPKGSEKAAKASRSVAGSKKEKENSSSKSKKERSEGVGTCSEKDPGVLQPVPLGGRGGQYDGSAGVDTGAVEPLGSIAIEPGAALNPLGTKPEPEEGENECRLLKKVKSEKMESPVSTPAVLPIHLLVPVVNNDISSPCEQIMVRTRSVGVNTCDVALATEPECLGPCEPGTSVNLEGIVWQETEDGMLVVNVTWRNKTYVGTLLDCTRHDWAPPRFCDSPTSDLEMRNGRGRGKRMRPNSNTPVNETATASDSKGTSNSSKTRAGANSKGRRGSQNSSEHRPPASSTSEDVKASPSSANKRKNKPLSDMELNSSSEDSKGSKRVRTNSMGSATGPLPGTKVEPTVLDRNCPSPVLIDCPHPNCNKKYKHINGLKYHQAHAHTDDDSKPEADGDSEYGEEPILHADLGSCNGASVSQKGSLSPARSATPKVRLVEPHSPSPSSKFSTKGLCKKKLSGEGDTDLGALSNDGSDDGPSVMDETSNDAFDSLERKCMEKEKCKKPSSLKPEKIPSKSLKSARPIAPAIPPQQIYTFQTATFTAASPGSSSGLTATVAQAMPNSPQLKPIQPKPTVMGEPFTVNPALTPAKDKKKKDKKKKESSKELESPLTPGKVCRAEEGKSPFRESSGDGMKMEGLLNGSSDPHQSRLASIKAEADKIYSFTDNAPSPSIGGSSRLENTTPTQPLTPLHVVTQNGAEASSVKTNSPAYSDISDAGEDGEGKVDSVKSKDAEQLVKEGAKKTLFPPQPQSKDSPYYQGFESYYSPSYAQSSPGALNPSSQAGVESQALKTKRDEEPESIEGKVKNDICEEKKPELSSSSQQPSVIQQRPNMYMQSLYYNQYAYVPPYGYSDQSYHTHLLSTNTAYRQQYEEQQKRQSLEQQQRGVDKKAEMGLKEREAALKEEWKQKPSIPPTLTKAPSLTDLVKSGPGKAKEPGADPAKSVIIPKLDDSSKLPGQAPEGLKVKLSDASHLSKEASEAKTGAECGRQAEMDPILWYRQEAEPRMWTYVYPAKYSDIKSEDERWKEERDRKLKEERSRSKDSVPKEDGKESTSSDCKLPTSEESRLGSKEPRPSVHVPVSSPLTQHQSYIPYMHGYSYSQSYDPNHPSYRSMPAVMMQNYPGSYLPSSYSFSPYGSKVSGGEDADKARASPSVTCKSSSESKALDILQQHASHYKSKSPTISDKTSQERDRGGCGVVGGGGSCSSVGGASGGERSVDRPRTSPSQRLMSTHHHHHHLGYSLLPAQYNLPYAAGLSSTAIVASQQGSTPSLYPPPRR

SEQ ID NO: 7438 - protein, 1149 aa, Homo sapiens
MITQIGILNPLVWVGFKTVVIPMKGKIAQIAIEKALSDAFQKLLIVVLEMPAPPQESTENLVPFLDTWDSAGEQPLEPEQFLASQQDLKDKLSPQERLPVSPKKLKKDPAQRWSLAEIIGIARQLSTPQSQKQTLQNEYSSTDTPYPSSLPPELRVKSDEPPGPSEQVGPSQFHLEPETQNPETLEDIQSSSLQQEAPAQLPQLLEEEPSSMQQEAPALPPESSMESLTLPNHEVSVQPPGEDQAYYHLPNITVKPADVEVTITSEPTNETESSQAQQETPIQFPEEVEPSATQQEAPIEPPVSPMEHELSISEQQQPVQPSESSREVESSLTQQETPGQPPEHHEVTVSPPGHHQTHHLDSPSVSVKPPDVQLTIAAEPSAEVGTSLVHQEATARLSGSGNDVEPPAIQHGGPPLLPESSEEAGPLAVQQETSFQSPEPINNENPSPTQQEAAAEHPQTAEEGESSLTHQEAPAQTPEFPNVVVAQPPEHSHLTQATVQPLDLGFTITPESMTEVELSPTMKETPTQPPKKVVPQLRVYQGVTNPTPGQDQAQHPVSPSVTVQLLDLGLTITPEPTTEVGHSTAPKRTIVSPKHPEVTLPHPDQVQTQHSHLTRATVQPLDLGFTITPKSMTEVEPSTALMTTAPPPGHPEVTLPPSDKGQAQHSHLTQATVQPLDLELTITTKPTTEVKPSPTTEETSTQPPDLGLAIIPEPTTETGHSTALEKTTAPHPDRVQSLHRSLTEVTGPPTELEPAQDSLVQSESYTQNKALTAPEEQKASTSTNICELCTCGDEMLSCIDLNPEQRLRQVPVPEPNTHNGTFTILNFQGNYISYIDGNVWKAYSWTEKLILRENNLTELHKDSFEGLLSLQYLDLSCNKIQSIERHTFEPLPFLKFINLSCNVITELSFGTFQAWHGMQFLHKLILPSHMACCLCQLKNSIEAVCKTVKLHCNSACLTNTIHCPEEESVGNPEGAFMKMLQARKNYTSTELTVEPEEPSDSSGINLSGFGRNSLAKIQTVGQNRQKVNRVLMGPMSIQKRHFKEVGRQSIRREQGAQASVENAAEEKRLGSPAPRELEQPHTQQGPEKLAGNAIYTKPSFSQEHKAAVSVLTPFSKGAPSTSSPAKALPQMRDRLKDNTHYFHFRKCKG

SEQ ID NO: 7439 - protein, 283 aa, Homo sapiens
RSGAPSRQRLGCETAAVADTAEAKSSEAPAFGWSTMDEAGSSASGGGFRPGVDSLDEPPNSRIFLVISKYTPESVLRERFSPFGDIQDIWVVRDKHTKESKGIAFVKFARSSQACRAMEEMHGQCLGPNDTKPIKVRVPGSGCPRGKEWACWTSLHLLLCRGEGGVEHPFPAADQTAPGLGTGAALRRGSPPTKLRRVAGKGTGCGVFAPRERTRQPRPPGDRTAVAGLPLSLALTNPPALEFTAKLVLAYFEYFSDLPLSDAQISIYKKRKNSTFPQVQMRR

SEQ ID NO: 7440 - protein, 2109 aa, Homo sapiens
MDALESLLDEVALEGLDGLCLPALWSRLETRVPPFPLPLEPCTQEFLWRALATHPGISFYEEPRERPDLQLQDRYEEIDLETGILESRRDPVALEDVYPIHMILENKDGIQGSCRYFKERKNITNDIRTKSLQPRCTMVEPFDRWGKKLIIGSLPAHAVQALDSPGGGSRPEAARLLLLHPGTARPVQVQGELQRDLHTTAFKVDAGKLHYHRKILNKNGLITMQSHVIRLPTGAQQHSILLLLNRFHVDRRSKYDILMEKLSVMLSTRTNHIETLGKLREELGLCERTFKRLYQYMLNAGLAKVVSLRLQEIHPECGPCKTKKGTDVMVRCLKLLKEFKRNDHDDDEDEEVISKTVPPVDIVFERDMLTQTYDLIERRGTKGISQAEIRVAMNVGKLEARMLCRLLQRFKVVKGFMEDEGRQRTTKYISCVFAEESDLSRQYQREKARSELLTTVSLASMQEESLLPEGEDTFLSESDSEEERSSSKRRGRGSQKDTRASANLRPKTQPHHSTPTKGGWKVVNLHPLKKQPPSFPGAAEERACQSLASRDSLLDTSSVSEPNVSFVSHCADSNSGDIAVIEEVRMENPKESSSSLKTGRHSSGQDKPHETYRLLKRRNLIIEAVTNLRLIESLFTIQKMIMDQEKQEGVSTKCCKKSIVRLVRNLSEEGLLRLYRTTVIQDGIKKKVDLVVHPSMDQNDPLVRSAIEQVRFRISNSSTANRVKTSQPPVPQGEAEEDSQGKEGPSGSGDSQLSASSRSESGRMKKSDNKMGITPLRNYHPIVVPGLGRSLGFLPKMPRLRVVHMFLWYLIYGHPASNTVEKPSFISERRTIKQESGRAGVRPSSSGSAWEACSEAPSKGSQDGVTWEAEVELATETVYVDDASWMRYIPPIPVHRDFGFGWALVSDILLCLPLSIFIQIVQVSYKVDNLEEFLNDPLKKHTLIRFLPRPIRQQLLYKRRYIFSVVENLQRLCYMGVLQFGPTEKFQDKDQVFIFLKKNAVIVDTTICDPHYNLGRRRRPFERRLYVLNSMQDVENYWFDLQCVCLNTPLGVVRCPRVRKNSSTDQGSDEEGSLQKEQESAMDKHNLERKCAMLEYTTGSREVVDEGLIPGDGLGAAGLDSSFYGHLKRNWIWTSYIINQAKKENTAAENGLTVRLQTFLSKRPMPLSARGNSRLNIWGEARVGSELCAGWEEQFEVDREPSLDRNRRVRGGKSQKRKRLKKDPGKKIKRKKKGEFPGEKSKRLRYHDEADQSALHRMTRLRVTWSMQEDGLLVLCRIASNVLNTKVKGPFVTWQVVRDILHATFEESLDKTSHSLGRRARYIVKNPQAYLNYKVCLAEVYQDKALVGDFMNRRGDYDDPKVCANEFKEFVEKLKEKFSSALRNSNLEIPDTLQELFARYRVLAIGDEKDQTRKEDELNSVDDIHFLVLQNLIQSTLALSDSQMKSYQSFQTFRLYREYKDHVLVKAFMECQKRSLVNRRRVNHTLGPKKNRALPFVPMSYQLSQTYYRIFTWRFPSTICTESFQFLDRMRAAGKLDQPDRFSFKDQDNNEPTNDMVAFSLDGPGGNCVAVLTLFSLGLISVDVRIPEQIIVVDSSMVENEVIKSLGKDGSLEDDEDEEDDLDEGVGGKRRSMEVKPAQASHTNYLLMRGYYSPGIVSTRNLNPNDSIVVNSCQMKFQLRCTPVPARLRPAAAPLEELTMGTSCLPDTFTKLINPQENTCSLEEFVLQLELSGYSPEDLTAALEILEAIIATGCFGIDKEELRRRFSALEKAGGGRTRTFADCIQALLEQHQVLEVGGNTARLVAMGSAWPWLLHSVRLKDREDADIQREDPQARPLEGSSSEDSPPEGQAPPSHSPRGTKRRASWASENGETDAEGTQMTPAKRPALQDSNLAPSLGPGAEDGAEAQAPSPPPALEDTAAAGAAQEDQEGVGEFSSPGQEQLSGQAQPPEGSEDPRGFTESFGAANISQAARERDCESVCFIGRPWRVVDGHLNLPVCKGMMEAMLYHIMTRPGIPESSLLRHYQGVLQPVAVLELLQGLESLGCIRKRWLRKPRPVSLFSTPVVEEVEVPSSLDESPMAFYEPTLDCTLRLGRVFPHEVNWNKWIHL

SEQ ID NO: 7441 - protein, 280 aa, Homo sapiens
KRKRECLDESDDEPEKELAPEPEETWVAETLCGLKMKAKRRRVSLVLPEYYEAFNRLLAPGVDPSPPRRSLGCKRKRECLDESDDEPEKELAPEPEETWVAETLCGLKMKAKRRRVSLVLPEYYEAFNRLLEDPVIKRFLAWDKDLRVSDKYLLAMVIAYFSRAGLPSWQYQRIHFFLALYLANDMEEDDEAPKQKIFYFLYGKTHSHIPLRPKHWFQLCRPMNPRARKNCSQIALFQKRRFQFFCSMRCRAWVSPEELEEIQAYDPEHWVWARDRAHLS

SEQ ID NO: 7442 - protein, 1241 aa, Homo sapiens
  VARIANT 1009, 1036, 1059, 1085: Xaa = Any Amino Acid
MKKTSGFRRGKGELPWGSVSSPGKVGAGAGSESEDHASSQPRRHDPDKGFDRLRRAAGRHRTETMRRILSLPKSGVDDRDEKNRLSCGQSSGDSWLSVDDEPFDSDTKTTFENVPQKYDSRLTGADGQRGKSTIKEQEALDFNSLTFSNELHERSENLKVGDLCPFVSPPMTNTVLGSTDLGQKNLIDQEKMTTVGALLFWNHTLRDLCESQLPENKDSKEEQDLEVTSEQEPERLEGSENNKPQAEGERKTHARNETEASRNLHDVSTDDRIDNGLIQQGENGKTDGQQIPRTEQEECDSVPALHMKKVKKNEHEEWTTTESVTSLVFKKADLITLDLLQVTDESSLTEIDEEERRLTKKTSNEKDKVRNQIHSVDGFDDLTWSSEIASECCELPYSNYKKFILLIEELGVDCKGQYVDVTAKTIGKGFQGVMKRWGFKGQPATHGQTKTHRRPGDISTGDIGRVWPGTKMPGKMGNIYRTVYGLKVWRINTKHNIIYVNGSVPGHKNCLVRVRDSKLPAYKDLGKNLPFPTYFPDGDEEELPEDLYDENVCQPNPVNLLKIQDAVHSWERSIEVEKNHCELLTVKMKKMENEVHVLQKELSETTEIKLQSTLRQEEEKRKNASALYEKIRGHLRRKEEQYRKEVEANKQLQLTLRTRDTELRTVRNHLNQVVQELNDTQRQLSREQNARILQDEILTNHLCKQKEIALARRKRNSQIPHSHDKVQDLLHENRMLQDEIATLRLEIDTIEKQNEENKKNYFEDIGDLQKTIKRNGEILTTMISEYTAQLGVLTAENTMLHSQLEREKQKKESLETEVESHRCRLAAVRRDCEQSETSKRDVELAFQGAKDEWFHLPEKMNFDDLKANSVLRSQQLSRTQSNLESLSLKFQHTRDALTEKQKREARLSQLQSENMLLPQQLDDAYNKADNQEKTIITIQDQSRATVKNLQAEKEKLEEKNQTLINECNHFFKRLQQQGNEKAEREASLEVTSHCHIHLEEGTQESKKKXGQIRSHVQTKLNTTHERVVEATKPLMXREKTRSLSTAHSTRPVLESPCMXNVNNGLDLNRNHIPRENLRIPTSCSXTSNNSVDDYLFKNIEEQTEAFLDSIAARSLKASEKSQEVCVSFFLWLYTFFTSTVPMDLPASTLKLFSENKGIIDFPGEGEAIAKCHEEVAQQFEKSRIFSYILSVPAANHNYMMDPVCKDIKESIGNLGKMEPEMELISITTGKTACEDLTTGKY

SEQ ID NO: 7443 - protein, 377 aa, Homo sapiens
MKFPGPLENQRLSFLLEKAITREAQMWKVNVRKMPSNQNVSPSQRDEVIQWLAKLKYQFNLYPETFALASSLLDRFLATVKAHPKYLSCIAISCFFLAAKTVEEDERIPVLKVLARDSFCGCSSSEILRMERIILDKLNWDLHTATPLDFLHIFHAIAVSTRPQLLFSLPKLSPSQHLAVLTKQLLHCMACNQLLQFRGSMLALAMVSLEMEKLIPDWLSLTIELLQKAQMDSSQLIHCRELVAHHLSTLQSSLPLNSVYVYRPLKHTLVTCDKGVFRLHPSSVPGPDFSKDNSKPEVPVRGTAAFYHHLPAASGCKQTSTKRKVEEMEVDDFYDGIKRLYNEDNVSENVGSVCGTDLSRQEGHASPCPPLQPVSVM

SEQ ID NO: 7444 - protein, 724 aa, Homo sapiens
MPRNSGAGYGCPHGDPSMLDSRETPQESRQDMIVRTTQEKLKTSSLTDRQPLSKESLNHALELSVPEKVNNAQWDAPEEALWTTRADGRVRLRIDPSCPQLPYTVHRMFYEALDKYGDLIALGFKRQDKWEHISYSQYYLLARRAAKGFLKLGLKQAHSVAILGFNSPEWFFSAVGTVFAGGIVTGIYTTSSPEACQYIAYDCCANVIMVDTQKQLEKILKIWKQLPHLKAVVIYKEPPPNKMANVYTMEEFMELGNEVPEEALDAIIDTQQPNQCCVLVYTSGTTGNPKGVMLSQDNITWTARYGSQAGDIRPAEVQQEVVVSYLPLSHIAAQIYDLWTGIQWGAQVCFAEPDALKGSLVNTLREVEPTSHMGVPRVWEKIMERIQEVAAQSGFIRRKMLLWAMSVTLEQNLTCPGSDLKPFTTRLADYLVLAKVRQALGFAKCQKNFYGAAPMMAETQHFFLGLNIRLYAGYGLSETSGPHFMSSPYNYRLYSSGKLVPGCRVKLVNQDAEGIGEICLWGRTIFMGYLNMEDKTCEAIDEEGWLHTGDAGRLDADGFLYITGRLKELIITAGGENVPPVPIEEAVKMELPIISNAMLIGDQRKFLSMLLTLKCTLDPDTSDQTDNLTEQAVEFCQRVGSRATTVSEIIEKKDEAVYQAIEEGIRRVNMNAAARPYHIQKWAILERDFSISGGELGPTMKLKRLTVLEKYKGIIDSFYQEQKM

SEQ ID NO: 7445 - protein, 724 aa, Homo sapiens
MPRNSGAGYGCPHGDPSMLDSRETPQESRQDMIVRTTQEKLKTSSLTDRQPLSKESLNHALELSVPEKVNNAQWDAPEEALWTTRADGRVRLRIDPSCPQLPYTVHRMFYEALDKYGDLIALGFKRQDKWEHISYSQYYLLARRAAKGFLKLGLKQAHSVAILGFNSPEWFFSAVGTVFAGGIVTGIYTTSSPEACQYIAYDCCANVIMVDTQKQLEKILKIWKQLPHLKAVVIYKEPPPNKMANVYTMEEFMELGNEVPEEALDAIIDTQQPNQCCVLVYTSGTTGNPKGVMLSQDNITWTARYGSQAGDIRPAEVQQEVVVSYLPLSHIAAQIYDLWTGIQWGAQVCFAEPDALKGSLVNTLREVEPTSHMGVPRVWEKIMERIQEVAAQSGFIRRKMLLWAMSVTLEQNLTCPGSDLKPFTTRLADYLVLAKVRQALGFAKCQKNFYGAAPMMAETQHFFLGLNIRLYAGYGLSETSGPHFMSSPYNYRLYSSGKLVPGCRVKLVNQDAEGIGEICLWGRTIFMGYLNMEDKTCEAIDEEGWLHTGDAGRLDADGFLYITGRLKELIITAGGENVPPVPIEEAVKMELPIISNAMLIGDQRKFLSMLLTLKCTLDPDTSDQTDNLTEQAMEFCQRVGSRATTVSEIIEKKDEAVYQAIEEGIRRVNMNAAARPYHIQKWAILERDFSISGGELGPTMKLKRLTVLEKYKGIIDSFYQEQKM

SEQ ID NO: 7446 - protein, 1117 aa, Homo sapiens
GGGEGGIAPGGASGPVFLSGVSNTKITVQKEIALVSSAPPVPNTMHQPPESTAAAAAAADISARKMAHPAMFPRRGSGSGSASALNAAGTGVGSNATSSEDFPPPSLLQPPPPAASSTSGPQPPPPQSLNLLSQAQLQAQPLAPGGTQMKKKSGFQITSVTPAQISASISSNNSIAEDTESYDDLDESHTEDLSSSEILDVSLSRATDLGEPERSSSEETLNNFQEAETPGAVSPNQPHLPQPHLPHLPQQNVVINGNAHPHHLHHHHQIHHGHHLQHGHHHPSHVAVASASITGGPPSSPVSRKLSTTGSSDSITPVAPTSAVSSSGSPASVMTNMRAPSTTGGIGINSVTGTSTVNNVNITAVGSFNPNVTSSILGNVNISTSNIPSAAGVSVGPGVTSGVNVNILSGMGNGTISSSAAVSSVPNAAAGMTGGSVSSQQQQPTVNTSRFRVVKLDSSSEPFKKGRWTCTEFYEKENAVPATEGVLINKVVETVKQNPIEVTSERESTSGSSVSSSVSTLSHYTESVGSGEMGAPTVVVQQQQQQQQQQQQQPALQGVTLQQMDFGSTGPQSIPAVSIPQSISQSQISQVQLQSQELSYQQKQGLQPVPLQATMSAATGIQPSPVNVVGVTSALGQQPSISSLAQPQLPYSQAAPPVQTPLPGAPPPQQLQYGQQQPMVSTQMAPGHVKSVTQNPASEYVQQQPILQTAMSSGQPSSAGVGAGTTVIPVAQPQGIQLPVQPTAVPAQPAGASVQPVGQAPAAVSAVPTGSQIANIGQQANIPTAVQQPSTQVPPSVIQQGAPPSSQVVPPAQTGIIHQGVQTSAPSLPQQLVIASQSSLLTVPPQPQGVEPVAQGIVSQQLPAVSSLPSASSISVTSQVSSTGPSGMPSAPTNLVPPQNIAQTPATQNGNLVQSVSQPPLIATNTNLPLAQQIPLSSTQFSAQSLAQAIGSQIEDARRAAEPSLVGLPQTISGDSGGMSAVSDGSSSSLAASASLFPLKVLPLTTPLVDGEDESSSGASVVAIDNKIEQAMDLVKSHLMYAVREEVEVLKEQIKELIEKNSQLEQENNLLKTLASPEQLAQFQAQLQTGSPPATTQPQGTTQPPAQPASQGSGPTA

SEQ ID NO: 7447 - protein, 300 aa, Homo sapiens [sequence omitted]

SEQ ID NO: 7448 - protein, 640 aa, Homo sapiens
MAAGGTGGLREEQRYGLSCGRLGQDNITVLHVKLTETAIRALETYQSHKNLIPFRPSIQFQGLHGLVKIPKNDPLNEVHNFNFYLSNVGKDNPQGSFDCIQQTFSSSGASQLNCLGFIQDKITVCATNDSYQMTRERMTQAEEESRNRSTKVIKPGGPYVGKRVQIRKAPQAVSDTVPERKRSTPMNPANTIRKTHSSSTISQRPYRDRVIHLLALKAYKKPELLARLQKDGVNQKDKNSLGAILQQVANLNSKDLSYTLKDYVFKELQRDWPGYSEIDRRSLESVLSRKLNPSQNATGTSRSESPVCSSRDAVSSPQKRLLDSEFIDPLMNKKARISHLTNRVPPTLNGHLNPTSEKSAAGLPLPPAAAAIPTPPPLPSTYLPISHPPQIVNSNSNSPSTPEGRGTQDLPVDSFSQNDSIYEDQQDKYTSRTSLETLPPGSVLLKCPKPMEENHSMSHKKSKKKSKKHKEKDQIKKHDIETIEEKEEDLKREEEIAKLNNSSPNSSGGVKEDCTASMEPSAIELPDYLIKYIAIVSYEQRQNYKDDFNAEYDEYRALHARMETVARRFIKLDAQRKRLSPGSKEYQNVHEEVLQEYQKIKQSSPNYHEEKYRCEYLHNKLAHIKRLIGEFDQQQAESWS

SEQ ID NO: 7449 - protein, 730 aa, Homo sapiens [sequence omitted]

SEQ ID NO: 7450 - protein, 730 aa, Homo sapiens
MLFNSVLRQPQLGVLRNGWSSQYPLQSLLTGYQCSGNDEHTSYGETGVPVPPFGCTFSSAPNMEHVLAVANEEGFVRLYNTESQSFRKKCFKEWMAHWNAVFDLAWVPGELKLVTAAGDQTAKFWDVKAGELIGTCKGHQCSLKSVAFSKFEKAVFCTGGRDGNIMVWDTRCNKKDGFYRQVNQISGAHNTSDKQTPSKPKKKQNSKGLAPSVDFQQSVTVVLFQDENTLVSAGAVDGIIKVWDLRKNYTAYRQEPIASKSFLYPGSSTRKLGYSSLILDSTGSTLFANCTDDNIYMFNMTGLKTSPVAIFNGHQNSTFYVKSSLSPDDQFLVSGSSDEAAYIWKVSTPWQPPTVLLGHSQEVTSVCWCPSDFTKIATCSDDNTLKIWRLNRGLEEKPGGDKLSTVGWASQKKKESRPGLVTVTSSQSTPAKAPRVKCNPSNSSPSSAACAPSCAGDLPLPSNTPTFSIKTSPAKARSPINRRGSVSSVSPKPPSSFKMSIRNWVTRTPSSSPPITPPASETKIMSPRKALIPVSQKSSQAEACSESRNRVKRRLDSSCLESVKQKCVKSCNCVTELDGQVENLHLDLCCLAGNQEDLSKDSLGPTKSSKIEGAGTSISEPPSPISPYASESCGTLPLPLRPCGEGSEMVGKENSSPENKNWLLAMAAKRKAENPSPRSPSSQTPNSRRQSGKTLPSPVTITPSSMRKICTYFHRKSQEDFCGPEHSTEL

SEQ ID NO: 7451 - protein, 387 aa, Homo sapiens
MVCGIQEAAENYRKLFQEILNTSREKLEAAKSILTDEQERMAMIQEEEQNFKKMIESEYSMRLRLLNEECEQNLQRQQECISDLNLRETLLNQAIKLATELEEMFQEMLQRLGRVGRENMEKLKESEARASEQVRSLLKLIVELEKKCGEGTLALLKNAKYSLERSKSLLLEHLEPAHITDLSLCHIRGLSSMFRVLQRHLTLDPETAHPCLALSEDLRTMRLRHGQQDGAGNPERLDFSAMVLAAESFTSGRHYWEVDVEKATRWQVGIYHGSADAKGSTARASGEKVLLTGSVMGTEWTLWVFPPLKRLFLEKKLDTVGVFLDCEHGQISFYNVTEMSLIYNFSHCAFQGALRPVFSLCIPNGDTSPDSLTILQHGPSCDATVSP

SEQ ID NO: 7452 - protein, 1561 aa, Homo sapiens
MNPREEKVKIITEEFIENDEDADMGRQNKNSKVRRQPRKKQPPTAVPKEMVSEKSHLGNPQEPVQEEPKTRLLSMTVRRGPRSLPPIPSTSRTGFAEFSMRGRMREKLQAARSKAESALLQEIPTPRPRRLRSPSKKELETEFGTEPGKEVERTQQEVDSQSYSRVKFHDSARKIKPKPQVPPGFPSAEEAYNFFTFNFDPEPEGSEEKPKARHRAGTNQEEEEGEEEEPPAQGGGKEMDEEELLNGDDAEDFLLGLDHVADDFVAVRPADYESIHDRLQMEREMLFIPSRQTVPTYKKLPENVQPRFLEDEGLYTGVRPEVARTNQNIMENRLLMQDPERRWFGDDGRILALPNPIKPFPSRPPVLTQEQSIKAELETLYKKAVKYVHSSQHVIRSGDPPGNFQLDIDISGLIFTHHPCFSREHVLAAKLAQLYDQYLARHQRNKAKFLTDKLQALRNAVQTGLDPEKPHQSLDTIQKTINEYKSEIRQTRKFRDAEQEKDRTLLKTIIKVWKEMKSLREFQRFTNTPLKLVLRKEKADQKADEEAYEAEIQAEISELLEEHTEEYAQKMEEYRTSLQQWKAWRKVQRAKKKKRKQAAEEHPGDEIAEPYPEEDLVKPSPPEPTDRAVIEQEVRERAAQSRRRPWEPTLVPELSLAGSVTPNDQCPRAEVSRREDVKKRSVYLKVLFNNKEVSRTVSRPLGADFRVHFGQIFNLQIVNWPESLTLQVYETVGHSSPTLLAEVFLPIPETTVVTGRAPTEEVEFSSNQHVTLDHEGVGSGVPFSFEADGSNQLTLMTSGKVSHSVAWAIGENGIPLIPPLSQQNIGFRSALKKADAISSIGTSGLTDMKKLAKWAAESKLDPNDPNNAPLMQLISVATSGESYVPDFFRLEQLQQEFNFVSDQELNRSKRFRLLHLRSQEVPEFRNYKQVPVYDREIMEKVFQDYEKRLRDRNVIETKEHIDTHRAIVAKYLQQVRESVINRFLIAKQYFLLADMIVEEEVPNISILGLSLFKLAEQKRPLRPRRKGRKKVTAQNLSDGDIKLLVNIVRAYDIPVRKPAVSKFQQPSRSSRMFSEKHAASPSTYSPTHNADYPLGQVLVRPFVEVSFQRTVCHTTTAEGPNPSWNEELELPFRAPNGDYSTASLQSVKDVVFINIFDEVLHDVLEDDRERGSGIHTRIERHWLGCVKMPFSTIYFQARFESQEDEKLLQATEKFQAECALKFPNRQCLTTVIDISGKTVFITRYLKPLNPPQELLNVYPNNLQATAELVARYVSLIPFLPDTVSFGGICDLWSTSDQFLDLLAGDEEEHAVLLCNYFLSLGKKAWLLMGNAIPEGPTAYVLTWEQGRYLIWNPCSGHFYGQFDTFCPLKNVGCLIGPDNIWFNIQRYESPLRINFDVTRPKLWKSFFSRSLPYPGLSSVQPEELIYQRSDKAAAAELQDRIEKILKEKIMDWRPRHLTRWNRYCTSTLRHFLPLLEKSQGEDVEDDHRAELLKQLGDYRFSGFPLHMPYSEVKPLIDAVYSTGVHNIDVPNVEFALAVYIHPYPKNVLSVWIYVASLIRNR

SEQ ID NO: 7453 - protein, 416 aa, Homo sapiens [sequence omitted]

SEQ ID NO: 7454 - protein, 416 aa, Homo sapiens
MAEEQGRERDSVPKPSVLFLHPDLGVGGAERLVLDAALALQARGCSVKIWTAHYDPGHCFAESRELPVRCAGDWLPRGLGWGGRGAAVCAYVRMVFLALYVLFLADEEFDVVVCDQVSACIPVFRLARRRKKILFYCHFPDLLLTKRDSFLKRLYRAPIDWIEEYTTGMADCILVNSQFTAAVFKETFKSLSHIDPDVLYPSLNVTSFDSVVPEKLDDLVPKGKKFLLLSINRYERKKNLTLALEALVQLRGRLTSQDWERVHLIVAGGYDERVLENVEHYQELKKMVQQSDLGQYVTFLRSFSDKQKISLLHSCTCVLYTPSNEHFGIVPLEAMYMQCPVIAVNSGGPLESIDHSVTGFLCEPDPVHFSEAIEKFIREPSLKATMGLAGRARVKEKFSPEAFTEQLYRYVTKLLV

SEQ ID NO: 7455 - protein, 323 aa, Homo sapiens
MPLLKLVHGSPLVFGEKFKLFTLVSACIPVFRLARRRKKILFYCHFPDLLLTKRDSFLKRLYRAPIDWIEEYTTGMADCILVNSQFTAAVFKETFKSLSHIDPDVLYPSLNVTSFDSVVPEKLDDLVPKGKKFLLLSINRYERKKNLTLALEALVQLRGRLTSQDWERVHLIVAGGYDERVLENVEHYQELKKMVQQSDLGQYVTFLRSFSDKQKISLLHSCTCVLYTPSNEHFGIVPLEAMYMQCPVIAVNSGGPLESIDHSVTGFLCEPDPVHFSEAIEKFIREPSLKATMGLAGRARVKEKFSPEAFTEQLYRYVTKLLV

SEQ ID NO: 7456 - protein, 560 aa, Homo sapiens
MGQPAPYAEGPIQGGDAGELCKCDFLVSISIPQTRSDIPAGARRSSMGPRSLDTCWGRGPERHVHRLECNGVIFTHRNLCLPGGKTKTENEEKTAQLNISKESESHRLIVEGLLMDVPQHPDFKDRLEKSQLHDTGNKTKIGDCTDLTVQDHESSTTEREEIARKLEESSVSTHLITKQGFAKEQVFYKCGECGSYYNPHSDFHLHQRVHTNEKPYTCKECGKTFRYNSKLSRHQKIHTGEKPYSCEECGQAFSQNSHLLQHQKLHGGQRPYECTDCGKTFSYNSKLIRHQRIHTGEKPFKCKECGKAFSCSYDCIIHERIHNGEKPYECKECGKSLSSNSVLIQHQRIHTGEKPYECKECGKAFHRSSVFLQHQRFHTGEQLYKCNECWKTFSCSSRFIVHQRIHNGEKPYECQECGKTFSQKITLVQHQRVHTGEKPYECKECGKAFRWNASFIQHQKWHTRKKLINGTGLSAVKPYCPCAILSPLPPQHTCSALAPPGPPLSSSHAVVLPPSVPFFLLLPSSEKANPSPVQIAHFFQDLAFPGKSSLQSPNPLSHSL

SEQ ID NO: 7457 - protein, 1722 aa, Homo sapiens
MSDPRQSQEEKHKLGRASSKFKDPPRIMQSDDYFARKFKAINGNMGPTTSLNASNSNETGGGGPANGTPAVPKMGVRARVSEWPPKKDCSKELTCKALWESRSQTSYESITSVLQNGQSDQSEGQQDEQLDLDFVEAKYTIGDIFVHSPQRGLHPIRQRSNSDVTISDIDAEDVLDQNAVNPNTGAALHREYGSTSSIDRQGLSGENFFAMLRGYRVENYDHKAMVPFGFPEFFRCDPAISPSLHAAAQISRGEFVRISGLDYVDSALLMGRDRDKPFKRRLKSESVETSLFRKLRTVKSEHETFKFTSELEESRLERGIRPWNCQRCFAHYDVQSILFNINEAMATRANVGKRKNITTGASAASQTQMPTGQTGNCESPLGSKEDLNSKENLDADEGDGKSNDLVLSCPYFRNETGGEGDRRIALSRANSSSFSSGESCSFESSLSSHCTNAGVSVLEVPRENQPIHREKVKRYIIEHIDLGAYYYRKFFYGKEHQNYFGIDENLGPVAVSIRREKVEDAKEKEGSQFNYRVAFRTSELTTLRGAILEDAIPSTARHGTARGLPLKEVLEYVIPELSIQCLRQASNSPKVSEQLLKLDEQGLSFQHKIGILYCKAGQSTEEEMYNNETAGPAFEEFLDLLGQRVRLKGFSKYRAQLDNKTDSTGTHSLYTTYKDYELMFHVSTLLPYMPNNRQQLLRKRHIGNDIVTIVFQEPGALPFTPKSIRSHFQHVFVIVKVHNPCTENVCYSVGVSRSKDVPPFGPPIPKGVTFPKSAVFRDFLLAKVINAENAAHKSEKFRAMATRTRQEYLKDLAENFVTTATVDTSVKFSFITLGAKKKEKVKPRKDAHLFSIGAIMWHVIARDFGQSADIECLLGISNEFIMLIEKDSKNVVFNCSCRDVIGWTSGLVSIKVFYERGECVLLSSVDNCAEDIREIVQRLVIVTRGCETVEMTLRRNGLGQLGFHVNFEGIVADVEPFGFAWKAGLRQGSRLVEICKVAVATLTHEQMIDLLRTSVTVKVVIIQPHDDGSPRRGCSELCRIPMVEYKLDSEGTPCEYKTPFRRNTTWHRVPTPALQPLSRASPIPGTPDRLPCQQLLQQAQAAIPRSTSFDRKLPDGTRSSPSNQSSSSDPGPGGSGPWRPQVGYDGCQSPLLLEHQGSGPLECDGAREREDTMEASRHPETKWHGPPSKVLGSYKERALQKDGSCKDSPNKLSHIGDKSCSSHSSSNTLSSNTSSNSDDKHFGSGDLMDPELLGLTYIKGASTDSGIDTAPCMPATILGPVHLAGSRSLIHSRAEQWADAADVSGPDDEPAKLYSVHGYASTISAGSAAEGSMGDLSEISSHSSGSHHSGSPSAHCSKSSGSLDSSKVYIVSHSSGQQVPGSMSKPYHRQGAVNKYVIGWKKSEGSPPPEEPEVTECPGMYSEMDVMSTATQHQTVVGDAVAETQHVLSKEDFLKLMLPDSPLVEEGRRKFSFYGNLSPRRSLYRTLSDESICSNRRGSSFGSSRSSVLDQALPNDILFSTTPPYHSTLPPRAHPAPSMGSLRNEFWFSDGSLSDKSKCADPGLMPLPDTATGLDWTHLVDAARAFEGLDSDEELGLLCHHTSYLDQRVASFCTLTDMQHGQDLEGAQELPLCVDPGSGKEFMDTTGERSPSPLTGKVNQLELILRQLQTDLRKEKQDKAVLQAEVQHLRQDNMRLQEESQTATAQLRKFTEWFFTTIDKKS

SEQ ID NO: 7458 - protein, 778 aa, Homo sapiens [sequence omitted]

SEQ ID NO: 7459 - protein, 372 aa, Homo sapiens
SPRRMCSLPRGFEPQAPEDLAQRSLVELREMLKRQERLLRNEKFICKLPDKGKKIFDSFAKLKAAIAECEEVRRKSELFNPVSLDCKLRQKAIAEVDVGTDKAQNSDPILDTSSLVPGCSSVDNIKSSQTSQNQGLGRPTLEGDEETSEVEYTVNKGPASSNRDRVPPSSEASEHHPRHRVSSQAEDTSSSFDNLFIDRLQRITIADQGEQQSEENASTKNLTGLSSGTEKKPHYMEVLEMRAKNPVPQLRKFKTNVLPFRQNDSSSHCQKSGSPISSEERRRRDKQHLDDITAARLLPLHHMPTQLLSIEESLALQKQQKQNYEEMQAKLAAQKLAERLNIKMRSYNPEGESSGRYREVRDEDDDWSSDEF

SEQ ID NO: 7460 - protein, 1982 aa, Homo sapiens
MILLDDYIHLILGEETEGHTVSGSLDRTGRGAAQMACPALGLEALQPLQPEPPPEPAFSEAQKWIEVGAGGWRAALHWRPEPRTRARSDRRSSLASPQPPPLSFASCSRRCQGKRSASKALQRRRKREPPETSPVLAFRGILLLVPHFAPCPPTPHPSGAELAVSSRRRIPTGASCCIPGTGSGCQTLSEETDVLRLGFGYDLEQQVTGRSFGDKDFRTGLENGILLCDQWCFPLVGATPYSPSDSQMLPGNGSMQILFMAICSLRIEKCKAKFQLLNAIKPGLVKKINRLPTPIAGLDNIILFLRGCKELGLKESQLFDPSDLQDTSNRVTVKSLDYSRKLKNVLVTIYWLGKAANSCTSYSGTTLNLKEFEGLLAQMRKDTDDIESPKRSIRDSGYIDCWDSERSDSLSPPRHGRDDSFDSLDSFGSRSRQTPSPDVVLRGSSDGRGSDSESDLPHRKLPDVKKDDMSARRTSHGEPKSAVPFNQYLPNKSNQTAYVPAPLRKKKAEREEYRKSWSTATSPLGGERPFSFPETIEEEGSEVGSAGEDNPAGQMNPGWKPSDGGCELPDGSGKEHPSSDGAVVAPAPKSEEKDAAEIQKRKRLEQAGIKVMPAAQRFASQKQLSEEKEAIRDIVLRKENSFLTHQHGNDSEAEGEVVCRLPDLEKDDFAARRARMNQTKPMVPLNQLLYGPYPKKGAEKSDGSKQLSKGISKKRSLEYKRNQGHTEEVKLIVTCNMRAQESEPVEGGLRKVPDLHKDDLAQQRIQGSLAPHREPPSFITLSNITEADLETWERLKVSEKARDGDVQHICASEPSPEIKAETAIRDDFANRKARASKKASSPRQKFVHFGPVTELDQQKWKRLSIGKAGPREDEEEVICHGSKIQMDSVSPVSAATSSLKGHQIFNRQNDCRTMNCGRGDYCRRASWLAPVPESQEEWVCSLGECPRGTEEGVKLSSLALVTSKQLPQDGKEETESAPRDSERLSKAERSEDSSQPLVCPLASECEASGTEEKLEKMTAPAWSGSGLKGQRKLDDSRKDDMMARRTGMSLRHTGSNPNQFLPVPFAKQQDVEESSKGLPMKDQRYGPRTPVSDDAEQLPAREPFAFGDAAAVHCLAMGVTILDIIDDVWNSLVSKSTSMFDMRCEEEAAVQPHSRARQEQLQLINNQLREEDDKWQDVSCGQGARAAGRLLAAENPAGWVDVDLKAMRGKGAPRGFQKDLARWKSRRRSVSQDLIKKEEERKKMEKLLAGEDGTSERRKSIKTYREIVQEKERRERELHEAYKNARSQEEAEGILQQYIERFTISEAVLERLEMPKILERSHSTEPNLSSFLNDPNPMKYLRQQSLPPPKFTATVETTIARASVLDTSMSAGSGSPSKTVTPKAVPMLTPKPYSQPKNSQDVLKTFKVDGKVSVNGETVHREEEKERECPTVAPAHSLTKSQMFEGVARVHGSPLELKQDNGSIEINIKKPNSVPQELAATTEKTEPNSQEDKNDGGKSRKGNIELASSEPQHFTTTVTRCSPTVAFVEFPSSPQLKNDVSEEKDQKKPENEMSGKVELVLSQKVVKPKSPEPEATLTFPFLDKMPEANQLHLPNLNSQVDSPSSEKSPVMTPFKFWAWDPEEERRRQEKWQQEQERLLQERYQKEQDKLKEEWEKAQKEVEEEERRYYEEERKIIEDTVVPFTVSSSSADQLSTSSSMTEGSGTMNKIDLGNCQDEKQDRRWKKSFQGDDSDLLLKTRESDRLEEKGSLTEGALAHSGNPVSKGVHEDHQLDTEAGAPHCGTNPQLAQDPSQNQQTSNPTHSSEDVKPKTLPLDKSINHQIESPSERRKSISGKKLCSSCGLPLGKGAAMIIETLNLYFHIQCFRVRTYCFALQTQLHDVFWHRSVLKNASWKFWRALSCGICKGQLGDAVSGTDVRIRNGLLNCNDCYMRSRSMSLDDWHHLGMVKCGERLSTVSQIEHQLINVSTPYIQEFHYVICVPN

SEQ ID NO: 7461 - protein, 3677 aa, Homo sapiens
MEDEREDVQKKTFTKWVNAQFSKFGKQHIENLFSDLQDGRRLLDLLEGLTGQKLPKEKGSTRVHALNNVNKALRVLQNNNVDLVNIGSTDIVDGNHKLTLGLIWNIILHWQVKNVMKNIMAGLQQTNSEKILLSWVRQSTRNYPQVNVINFTTSWSDGLALNALIHSHRPDLFDWNSVVCQQSATQRLEHAFNIARYQLGIEKLLDPEDVDTTYPDKKSILMYITSLFQVLPQQVSIEAIQEVEMLPRPPKVTKEEHFQLHHQMHYSQQITVSLAQGYERTSSPKPRFKSYAYTQAAYVTTSDPTRSPFPSQHLEAPEDKSFGSSLMESEVNLDRYQTALEEVLSWLLSAEDTLQAQGEISNDVEVVKDQFHTHEGYMMDLTAHQGRVGNILQLGSKLIGTGKLSEDEETEVQEQMNLLNSRWECLRVASMEKQSNLHRVLMDLQNQKLKELNDWLTKTEERTRKMEEEPLGPDLEDLKRQVQQHKVLQEDLEQEQVRVNSLTHMVVVVDESSGDHATAALEEQLKVLGDRWANICRWTEDRWVLLQDILLKWQRLTEEQCLFSAWLSEKEDAVNKIHTTGFKDQNEMLSSLQKLAVLKADLEKKKQSMGKLYSLKQDLLSTLKNKSVTQKTEAWLDNFARCWDNLVQKLEKSTAQISQAVTTTQPSLTQTTVMETVTTVTTREQILVKHAQEELPPPPPQKKRQITVDSEIRKRLDVDITELHSWITRSEAVLQSPEFAIFRKEGNFSDLKEKVNAIEREKAEKFRKLQDASRSAQALVEQMVNEGVNADSIKQASEQLNSRWIEFCQLLSERLNWLEYQNNIIAFYNQLQQLEQMTTTAENWLKIQPTTPSEPTAIKSQLKICKDEVNRLSGLQPQIERLKIQSIALKEKGQGPMFLDADFVAFTNHFKQVFSDVQAREKELQTIFDTLPPMRYQETMSAIRTWVQQSETKLSIPQLSVTDYEIMEQRLGELQALQSSLQEQQSGLYYLSTTVKEMSKKAPSEISRKYQSEFEEIEGRWKKLSSQLVEHCQKLEEQMNKLRKIQNHIQTLKKWMAEVDVFLKEEWPALGDSEILKKQLKQCRLLVSDIQTIQPSLNSVNEGGQKIKNEAEPEFASRLETELKELNTQWDHMCQQVYARKEALKGGLEKTVSLQKDLSEMHEWMTQAEEEYLERDFEYKTPDELQKAVEEMKRAKEEAQQKEAKVKLLTESVNSVIAQAPPVAQEALKKELETLTTNYQWLCTRLNGKCKTLEEVWACWHELLSYLEKANKWLNEVEFKLKTTENIPGGAEEISEVLDSLENLMRHSEDNPNQIRILAQTLTDGGVMDELINEELETFNSRWRELHEEAVRRQKLLEQSIQSAQETEKSLHLIQESLTFIDKQLAAYIADKVDAAQMPQEAQKIQSDLTSHEISLEEMKKHNQGKEAAQRVLSQIDVAQKKLQDVSMKFRLFQKPANFELRLQESKMILDEVKMHLPALETKSVEQEVVQSQLNHCVNLYKSLSEVKSEVEMVIKTGRQIVQKKQTENPKELDERVTALKLHYNELGAKVTERKQQLEKCLKLSRKMRKEMNVLTEWLAATDMELTKRSAVEGMPSNLDSEVAWGKATQKEIEKQKVHLKSITEVGEALKTVLGKKETLVEDKLSLLNSNWIAVTSRAEEWLNLLLEYQKHMETFDQNVDHITKWIIQADTLLDESEKKKPQQKEDVLKRLKAELNDIRPKVDSTRDQAANLMANRGDHCRKLVEPQISELNHRFAAISHRIKTGKASIPLKELEQFNSDIQKLLEPLEAEIQQGVNLKEEDFNKDMNEDNEGTVKELLQRGDNLQQRITDERKREEIKIKQQLLQTKHNALKDLRSQRRKKALEISHQWYQYKRQADDLLKCLDDIEKKLASLPEPRDERKIKEIDRELQKKKEELNAVRRQAEGLSEDGAAMAVEPTQIQLSKRWREIESKFAQFRRLNFAQIHTVREETMMVMTEDMPLEISYVPSTYLTEITHVSQALLEVEQLLNAPDLCAKDFEDLFKQEESLKNIKDSLQQSSGRIDIIHSKKTAALQSATPVERVKLQEALSQLDFQWEKVNKMYKDRQGRFDRSVEKWRRFHYDIKIFNQWLTEAEQFLRKTQIPENWEHAKYKWYLKELQDGIGQRQTVVRTLNATGEEIIQQSSKTDASILQEKLGSLNLRWQEVCKQLSDRKKRLEEQKNILSEFQRDLNEFVLWLEEADNIASIPLEPGKEQQLKEKLEQVKLLVEELPLRQGILKQLNETGGPVLVSAPISPEEQDKLENKLKQTNLQWIKVSRALPEKQGEIEAQIKDLGQLEKKLEDLEEQLNHLLLWLSPIRNQLEIYNQPNQEGPFDVQETEIAVQAKQPDVEEILSKGQHLYKEKPATQPVKRKLEDLSSEWKAVNRLLQELRAKQPDLAPGLTTIGASPTQTVTLVTQPVVTKETAISKLEMPSSLMLEVPALADFNRAWTELTDWLSLLDQVIKSQRVMVGDLEDINEMIIKQKATMQDLEQRRPQLEELITAAQNLKNKTSNQEARTIITDRIERIQNQWDEVQEHLQNRRQQLNEMLKDSTQWLEAKEEAEQVLGQARAKLESWKEGPYTVDAIQKKITETKQLAKDLRQWQTNVDVANDLALKLLRDYSADDTRKVHMITENINASWRSIHKRVSEREAALEETHRLLQQFPLDLEKFLAWLTEAETTANVLQDATRKERELEDSKGVKELMKQWQDLQGEIEAHTDVYHNLDENSQKILRSLEGSDDAVLLQRRLDNMNFKWSLLRKKSLNIRSHLEASSDQWKRLHLSLQELLVWLQLKDDELSRQAPIGGDFPAVQKQNDVHRAFKRELKTKEPVIMSTLETVRIFLTEQPLEGLEKLYQEPRELPPEERAQNVTRLLRKQAEEVNTEWEKLNLHSADWQRKIDETLERLQELQEATDELDLKLRQAEVIKGSWQPVGDLLIDSLQDHLEKVKALRGEIAPLKENVSHVNDLARQLTTLGIQLSPYNLSTLEDLNTRWKLLQVAVEDRVRQLHEAHRDFGPASQHFLSTSVQGPWERAISPNKVPYYINHETQTTCWDHPKMTELYQSLADLNNVRFSAYRTAMKLRRLQKALCLDLLSLSAACDALDQHNLKQNDQPMDILQIINCLTTIYDRLEQEHNNLVNVPLCVDMCLNWLLNVYDTGRTGRIRVLSFKTGIISLCKAHLEDKYRYLFKQVASSTGFCDQRRLGLLLHDSIQIPRQLGEVASFGGSNIEPSVRSCFQFANNKPEIEAALFLDWMRLEPQSMVWLPVLHRVAAAETAKHQAKCNICKECPIIGFRYRSLKHFNYDICQSCFFSGRVAKGHKMHYPMVEYCTPTTSGEDVRDFAKVLKNKFRTKRYFAKHPRMGYLPVQTVLEGDNMETPVTLINFWPVDSAPASSPQLSHDDTHSRIEHYASRLAEMENSNGSYLNDSISPNESIDDEHLLIQHYCQSLNQDSPLSQPRSPAQILISLESEERGELERILADLEEENRNLQAEYDRLKQQHEHKGLSPLPSPPEMMPTSPQSPRDAELIAEAKLLRQHKGRLEARMQILEDHNKQLESQLHRLRQLLEQPQAEAKVNGTTVSSPSTSLQRSDSSQPMLLRVVGSQTSDSMGEEDLLSPPQDTSTGLEEVMEQLNNSFPSSRGRNTPGKPMREDTM

SEQ ID NO: 7462 - protein, 3685 aa, Homo sapiens
MLWWEEVEDCYEREDVQKKTFTKWVNAQFSKFGKQHIENLFSDLQDGRRLLDLLEGLTGQKLPKEKGSTRVHALNNVNKALRVLQNNNVDLVNIGSTDIVDGNHKLTLGLIWNIILHWQVKNVMKNIMAGLQQTNSEKILLSWVRQSTRNYPQVNVINFTTSWSDGLALNALIHSHRPDLFDWNSVVCQQSATQRLEHAFNIARYQLGIEKLLDPEDVDTTYPDKKSILMYITSLFQVLPQQVSIEAIQEVEMLPRPPKVTKEEHFQLHHQMHYSQQITVSLAQGYERTSSPKPRFKSYAYTQAAYVTTSDPTRSPFPSQHLEAPEDKSFGSSLMESEVNLDRYQTALEEVLSWLLSAEDTLQAQGEISNDVEVVKDQFHTHEGYMMDLTAHQGRVGNILQLGSKLIGTGKLSEDEETEVQEQMNLLNSRWECLRVASMEKQSNLHRVLMDLQNQKLKELNDWLTKTEERTRKMEEEPLGPDLEDLKRQVQQHKVLQEDLEQEQVRVNSLTHMVVVVDESSGDHATAALEEQLKVLGDRWANICRWTEDRWVLLQDILLKWQRLTEEQCLFSAWLSEKEDAVNKIHTTGFKDQNEMLSSLQKLAVLKADLEKKKQSMGKLYSLKQDLLSTLKNKSVTQKTEAWLDNFARCWDNLVQKLEKSTAQISQAVTTTQPSLTQTTVMETVTTVTTREQILVKHAQEELPPPPPQKKRQITVDSEIRKRLDVDITELHSWITRSEAVLQSPEFAIFRKEGNFSDLKEKVNAIEREKAEKFRKLQDASRSAQALVEQMVNEGVNADSIKQASEQLNSRWIEFCQLLSERLNWLEYQNNIIAFYNQLQQLEQMTTTAENWLKIQPTTPSEPTAIKSQLKICKDEVNRLSGLQPQIERLKIQSIALKEKGQGPMFLDADFVAFTNHFKQVFSDVQAREKELQTIFDTLPPMRYQETMSAIRTWVQQSETKLSIPQLSVTDYEIMEQRLGELQALQSSLQEQQSGLYYLSTTVKEMSKKAPSEISRKYQSEFEEIEGRWKKLSSQLVEHCQKLEEQMNKLRKIQNHIQTLKKWMAEVDVFLKEEWPALGDSEILKKQLKQCRLLVSDIQTIQPSLNSVNEGGQKIKNEAEPEFASRLETELKELNTQWDHMCQQVYARKEALKGGLEKTVSLQKDLSEMHEWMTQAEEEYLERDFEYKTPDELQKAVEEMKRAKEEAQQKEAKVKLLTESVNSVIAQAPPVAQEALKKELETLTTNYQWLCTRLNGKCKTLEEVWACWHELLSYLEKANKWLNEVEFKLKTTENIPGGAEEISEVLDSLENLMRHSEDNPNQIRILAQTLTDGGVMDELINEELETFNSRWRELHEEAVRRQKLLEQSIQSAQETEKSLHLIQESLTFIDKQLAAYIADKVDAAQMPQEAQKIQSDLTSHEISLEEMKKHNQGKEAAQRVLSQIDVAQKKLQDVSMKFRLFQKPANFELRLQESKMILDEVKMHLPALETKSVEQEVVQSQLNHCVNLYKSLSEVKSEVEMVIKTGRQIVQKKQTENPKELDERVTALKLHYNELGAKVTERKQQLEKCLKLSRKMRKEMNVLTEWLAATDMELTKRSAVEGMPSNLDSEVAWGKATQKEIEKQKVHLKSITEVGEALKTVLGKKETLVEDKLSLLNSNWIAVTSRAEEWLNLLLEYQKHMETFDQNVDHITKWIIQADTLLDESEKKKPQQKEDVLKRLKAELNDIRPKVDSTRDQAANLMANRGDHCRKLVEPQISELNHRFAAISHRIKTGKASIPLKELEQFNSDIQKLLEPLEAEIQQGVNLKEEDFNKDMNEDNEGTVKELLQRGDNLQQRITDERKREEIKIKQQLLQTKHNALKDLRSQRRKKALEISHQWYQYKRQADDLLKCLDDIEKKLASLPEPRDERKIKEIDRELQKKKEELNAVRRQAEGLSEDGAAMAVEPTQIQLSKRWREIESKFAQFRRLNFAQIHTVREETMMVMTEDMPLEISYVPSTYLTEITHVSQALLEVEQLLNAPDLCAKDFEDLFKQEESLKNIKDSLQQSSGRIDIIHSKKTAALQSATPVERVKLQEALSQLDFQWEKVNKMYKDRQGRFDRSVEKWRRFHYDIKIFNQWLTEAEQFLRKTQIPENWEHAKYKWYLKELQDGIGQRQTVVRTLNATGEEIIQQSSKTDASILQEKLGSLNLRWQEVCKQLSDRKKRLEEQKNILSEFQRDLNEFVLWLEEADNIASIPLEPGKEQQLKEKLEQVKLLVEELPLRQGILKQLNETGGPVLVSAPISPEEQDKLENKLKQTNLQWIKVSRALPEKQGEIEAQIKDLGQLEKKLEDLEEQLNHLLLWLSPIRNQLEIYNQPNQEGPFDVQETEIAVQAKQPDVEEILSKGQHLYKEKPATQPVKRKLEDLSSEWKAVNRLLQELRAKQPDLAPGLTTIGASPTQTVTLVTQPVVTKETAISKLEMPSSLMLEVPALADFNRAWTELTDWLSLLDQVIKSQRVMVGDLEDINEMIIKQKATMQDLEQRRPQLEELITAAQNLKNKTSNQEARTIITDRIERIQNQWDEVQEHLQNRRQQLNEMLKDSTQWLEAKEEAEQVLGQARAKLESWKEGPYTVDAIQKKITETKQLAKDLRQWQTNVDVANDLALKLLRDYSADDTRKVHMITENINASWRSIHKRVSEREAALEETHRLLQQFPLDLEKFLAWLTEAETTANVLQDATRKERELEDSKGVKELMKQWQDLQGEIEAHTDVYHNLDENSQKILRSLEGSDDAVLLQRRLDNMNFKWSLLRKKSLNIRSHLEASSDQWKRLHLSLQELLVWLQLKDDELSRQAPIGGDFPAVQKQNDVHRAFKRELKTKEPVIMSTLETVRIFLTEQPLEGLEKLYQEPRELPPEERAQNVTRLLRKQAEEVNTEWEKLNLHSADWQRKIDETLERLQELQEATDELDLKLRQAEVIKGSWQPVGDLLIDSLQDHLEKVKALRGEIAPLKENVSHVNDLARQLTTLGIQLSPYNLSTLEDLNTRWKLLQVAVEDRVRQLHEAHRDFGPASQHFLSTSVQGPWERAISPNKVPYYINHETQTTCWDHPKMTELYQSLADLNNVRFSAYRTAMKLRRLQKALCLDLLSLSAACDALDQHNLKQNDQPMDILQIINCLTTIYDRLEQEHNNLVNVPLCVDMCLNWLLNVYDTGRTGRIRVLSFKTGIISLCKAHLEDKYRYLFKQVASSTGFCDQRRLGLLLHDSIQIPRQLGEVASFGGSNIEPSVRSCFQFANNKPEIEAALFLDWMRLEPQSMVWLPVLHRVAAAETAKHQAKCNICKECPIIGFRYRSLKHFNYDICQSCFFSGRVAKGHKMHYPMVEYCTPTTSGEDVRDFAKVLKNKFRTKRYFAKHPRMGYLPVQTVLEGDNMETPVTLINFWPVDSAPASSPQLSHDDTHSRIEHYASRLAEMENSNGSYLNDSISPNESIDDEHLLIQHYCQSLNQDSPLSQPRSPAQILISLESEERGELERILADLEEENRNLQAEYDRLKQQHEHKGLSPLPSPPEMMPTSPQSPRDAELIAEAKLLRQHKGRLEARMQILEDHNKQLESQLHRLRQLLEQPQAEAKVNGTTVSSPSTSLQRSDSSQPMLLRVVGSQTSDSMGEEDLLSPPQDTSTGLEEVMEQLNNSFPSSRGRNTPGKPMREDTM

SEQ ID NO: 7463 - protein, 3685 aa, Homo sapiens
MLWWEEVEDCYEREDVQKKTFTKWVNAQFSKFGKQHIENLFSDLQDGRRLLDLLEGLTGQKLPKEKGSTRVHALNNVNKALRVLQNNNVDLVNIGSTDIVDGNHKLTLGLIWNIILHWQVKNVMKNIMAGLQQTNSEKILLSWVRQSTRNYPQVNVINFTTSWSDGLALNALIHSHRPDLFDWNSVVCQQSATQRLEHAFNIARYQLGIEKLLDPEDVDTTYPDKKSILMYITSLFQVLPQQVSIEAIQEVEMLPRPPKVTKEEHFQLHHQMHYSQQITVSLAQGYERTSSPKPRFKSYAYTQAAYVTTSDPTRSPFPSQHLEAPEDKSFGSSLMESEVNLDRYQTALEEVLSWLLSAEDTLQAQGEISNDVEVVKDQFHTHEGYMMDLTAHQGRVGNILQLGSKLIGTGKLSEDEETEVQEQMNLLNSRWECLRVASMEKQSNLHRVLMDLQNQKLKELNDWLTKTEERTRKMEEEPLGPDLEDLKRQVQQHKVLQEDLEQEQVRVNSLTHMVVVVDESSGDHATAALEEQLKVLGDRWANICRWTEDRWVLLQDILLKWQRLTEEQCLFSAWLSEKEDAVNKIHTTGFKDQNEMLSSLQKLAVLKADLEKKKQSMGKLYSLKQDLLSTLKNKSVTQKTEAWLDNFARCWDNLVQKLEKSTAQISQAVTTTQPSLTQTTVMETVTTVTTREQILVKHAQEELPPPPPQKKRQITVDSEIRKRLDVDITELHSWITRSEAVLQSPEFAIFRKEGNFSDLKEKVNAIEREKAEKFRKLQDASRSAQALVEQMVNEGVNADSIKQASEQLNSRWIEFCQLLSERLNWLEYQNNIIAFYNQLQQLEQMTTTAENWLKIQPTTPSEPTAIKSQLKICKDEVNRLSGLQPQIERLKIQSIALKEKGQGPMFLDADFVAFTNHFKQVFSDVQAREKELQTIFDTLPPMRYQETMSAIRTWVQQSETKLSIPQLSVTDYEIMEQRLGELQALQSSLQEQQSGLYYLSTTVKEMSKKAPSEISRKYQSEFEEIEGRWKKLSSQLVEHCQKLEEQMNKLRKIQNHIQTLKKWMAEVDVFLKEEWPALGDSEILKKQLKQCRLLVSDIQTIQPSLNSVNEGGQKIKNEAEPEFASRLETELKELNTQWDHMCQQVYARKEALKGGLEKTVSLQKDLSEMHEWMTQAEEEYLERDFEYKTPDELQKAVEEMKRAKEEAQQKEAKVKLLTESVNSVIAQAPPVAQEALKKELETLTTNYQWLCTRLNGKCKTLEEVWACWHELLSYLEKANKWLNEVEFKLKTTENIPGGAEEISEVLDSLENLMRHSEDNPNQIRILAQTLTDGGVMDELINEELETFNSRWRELHEEAVRRQKLLEQSIQSAQETEKSLHLIQESLTFIDKQLAAYIADKVDAAQMPQEAQKIQSDLTSHEISLEEMKKHNQGKEAAQRVLSQIDVAQKKLQDVSMKFRLFQKPANFELRLQESKMILDEVKMHLPALETKSVEQEVVQSQLNHCVNLYKSLSEVKSEVEMVIKTGRQIVQKKQTENPKELDERVTALKLHYNELGAKVTERKQQLEKCLKLSRKMRKEMNVLTEWLAATDMELTKRSAVEGMPSNLDSEVAWGKATQKEIEKQKVHLKSITEVGEALKTVLGKKETLVEDKLSLLNSNWIAVTSRAEEWLNLLLEYQKHMETFDQNVDHITKWIIQADTLLDESEKKKPQQKEDVLKRLKAELNDIRPKVDSTRDQAANLMANRGDHCRKLVEPQISELNHRFAAISHRIKTGKASIPLKELEQFNSDIQKLLEPLEAEIQQGVNLKEEDFNKDMNEDNEGTVKELLQRGDNLQQRITDERKREEIKIKQQLLQTKHNALKDLRSQRRKKALEISHQWYQYKRQADDLLKCLDDIEKKLASLPEPRDERKIKEIDRELQKKKEELNAVRRQAEGLSEDGAAMAVEPTQIQLSKRWREIESKFAQFRRLNFAQIHTVREETMMVMTEDMPLEISYVPSTYLTEITHVSQALLEVEQLLNAPDLCAKDFEDLFKQEESLKNIKDSLQQSSGRIDIIHSKKTAALQSATPVERVKLQEALSQLDFQWEKVNKMYKDRQGRFDRSVEKWRRFHYDIKIFNQWLTEAEQFLRKTQIPENWEHAKYKWYLKELQDGIGQRQTVVRTLNATGEEIIQQSSKTDASILQEKLGSLNLRWQEVCKQLSDRKKRLEEQKNILSEFQRDLNEFVLWLEEADNIASIPLEPGKEQQLKEKLEQVKLLVEELPLRQGILKQLNETGGPVLVSAPISPEEQDKLENKLKQTNLQWIKVSRALPEKQGEIEAQIKDLGQLEKKLEDLEEQLNHLLLWLSPIRNQLEIYNQPNQEGPFDVQETEIAVQAKQPDVEEILSKGQHLYKEKPATQPVKRKLEDLSSEWKAVNRLLQELRAKQPDLAPGLTTIGASPTQTVTLVTQPVVTKETAISKLEMPSSLMLEVPALADFNRAWTELTDWLSLLDQVIKSQRVMVGDLEDINEMIIKQKATMQDLEQRRPQLEELITAAQNLKNKTSNQEARTIITDRIERIQNQWDEVQEHLQNRRQQLNEMLKDSTQWLEAKEEAEQVLGQARAKLESWKEGPYTVDAIQKKITETKQLAKDLRQWQTNVDVANDLALKLLRDYSADDTRKVHMITENINASWRSIHKRVSEREAALEETHRLLQQFPLDLEKFLAWLTEAETTANVLQDATRKERLLEDSKGVKELMKQWQDLQGEIEAHTDVYHNLDENSQKILRSLEGSDDAVLLQRRLDNMNFKWSELRKKSLNIRSHLEASSDQWKRLHLSLQELLVWLQLKDDELSRQAPIGGDFPAVQKQNDVHRAFKRELKTKEPVIMSTLETVRIFLTEQPLEGLEKLYQEPRELPPEERAQNVTRLLRKQAEEVNTEWEKLNLHSADWQRKIDETLERLQELQEATDELDLKLRQAEVIKGSWQPVGDLLIDSLQDHLEKVKALRGEIAPLKENVSHVNDLARQLTTLGIQLSPYNLSTLEDLNTRWKLLQVAVEDRVRQLHEAHRDFGPASQHFLSTSVQGPWERAISPNKVPYYINHETQTTCWDHPKMTELYQSLADLNNVRFSAYRTAMKLRRLQKALCLDLLSLSAACDALDQHNLKQNDQPMDILQIINCLTTIYDRLEQEHNNLVNVPLCVDMCLNWLLNVYDTGRTGRIRVLSFKTGIISLCKAHLEDKYRYLFKQVASSTGFCDQRRLGLLLHDSIQIPRQLGEVASFGGSNIEPSVRSCFQFANNKPEIEAALFLDWMRLEPQSMVWLPVLHRVAAAETAKHQAKCNICKECPIIGFRYRSLKHFNYDICQSCFFSGRVAKGHKMHYPMVEYCTPTTSGEDVRDFAKVLKNKFRTKRYFAKHPRMGYLPVQTVLEGDNMETPVTLINFWPVDSAPASSPQLSHDDTHSRIEHYASRLAEMENSNGSYLNDSISPNESIDDEHLLIQHYCQSLNQDSPLSQPRSPAQILISLESEERGELERILADLEEENRNLQAEYDRLKQQHEHKGLSPLPSPPEMMPTSPQSPRDAELIAEAKLLRQHKGRLEARMQILEDHNKQLESQLHRLRQLLEQPQAEAKVNGTTVSSPSTSLQRSDSSQPMLLRVVGSQTSDSMGEEDLLSPPQDTSTGLEEVMEQLNNSFPSSRGRNTPGKPMREDTM

SEQ ID NO: 7464 - protein, 3562 aa, Homo sapiens
MKNIMAGLQQTNSEKILLSWVRQSTRNYPQVNVINFTTSWSDGLALNALIHSHRPDLFDWNSVVCQQSATQRLEHAFNIARYQLGIEKLLDPEDVDTTYPDKKSILMYITSLFQVLPQQVSIEAIQEVEMLPRPPKVTKEEHFQLHHQMHYSQQITVSLAQGYERTSSPKPRFKSYAYTQAAYVTTSDPTRSPFPSQHLEAPEDKSFGSSLMESEVNLDRYQTALEEVLSWLLSAEDTLQAQGEISNDVEVVKDQFHTHEGYMMDLTAHQGRVGNILQLGSKLIGTGKLSEDEETEVQEQMNLLNSRWECLRVASMEKQSNLHRVLMDLQNQKLKELNDWLTKTEERTRKMEEEPLGPDLEDLKRQVQQHKVLQEDLEQEQVRVNSLTHMVVVVDESSGDHATAALEEQLKVLGDRWANICRWTEDRWVLLQDILLKWQRLTEEQCLFSAWLSEKEDAVNKIHTTGFKDQNEMLSSLQKLAVLKADLEKKKQSMGKLYSLKQDLLSTLKNKSVTQKTEAWLDNFARCWDNLVQKLEKSTAQISQAVTTTQPSLTQTTVMETVTTVTTREQILVKHAQEELPPPPPQKKRQITVDSEIRKRLDVDITELHSWITRSEAVLQSPEFAIFRKEGNFSDLKEKVNAIEREKAEKFRKLQDASRSAQALVEQMVNEGVNADSIKQASEQLNSRWIEFCQLLSERLNWLEYQNNIIAFYNQLQQLEQMTTTAENWLKIQPTTPSEPTAIKSQLKICKDEVNRLSGLQPQIERLKIQSIALKEKGQGPMFLDADFVAFTNHFKQVFSDVQAREKELQTIFDTLPPMRYQETMSAIRTWVQQSETKLSIPQLSVTDYEIMEQRLGELQALQSSLQEQQSGLYYLSTTVKEMSKKAPSEISRKYQSEFEEIEGRWKKLSSQLVEHCQKLEEQMNKLRKIQNHIQTLKKWMAEVDVFLKEEWPALGDSEILKKQLKQCRLLVSDIQTIQPSLNSVNEGGQKIKNEAEPEFASRLETELKELNTQWDHMCQQVYARKEALKGGLEKTVSLQKDLSEMHEWMTQAEEEYLERDFEYKTPDELQKAVEEMKRAKEEAQQKEAKVKLLTESVNSVIAQAPPVAQEALKKELETLTTNYQWLCTRLNGKCKTLEEVWACWHELLSYLEKANKWLNEVEFKLKTTENIPGGAEEISEVLDSLENLMRHSEDNPNQIRILAQTLTDGGVMDELINEELETFNSRWRELHEEAVRRQKLLEQSIQSAQETEKSLHLIQESLTFIDKQLAAYIADKVDAAQMPQEAQKIQSDLTSHEISLEEMKKHNQGKEAAQRVLSQIDVAQKKLQDVSMKFRLFQKPANFEQRLQESKMILDEVKMHLPALETKSVEQEVVQSQLNHCVNLYKSLSEVKSEVEMVIKTGRQIVQKKQTENPKELDERVTALKLHYNELGAKVTERKQQLEKCLKLSRKMRKEMNVLTEWLAATDMELTKRSAVEGMPSNLDSEVAWGKATQKEIEKQKVHLKSITEVGEALKTVLGKKETLVEDKLSLLNSNWIAVTSRAEEWLNLLLEYQKHMETFDQNVDHITKWIIQADTLLDESEKKKPQQKEDVLKRLKAELNDIRPKVDSTRDQAANLMANRGDHCRKLVEPQISELNHRFAAISHRIKTGKASIPLKELEQFNSDIQKLLEPLEAEIQQGVNLKEEDFNKDMNEDNEGTVKELLQRGDNLQQRITDERKREEIKIKQQLLQTKHNALKDLRSQRRKKALEISHQWYQYKRQADDLLKCLDDIEKKLASLPEPRDERKIKEIDRELQKKKEELNAVRRQAEGLSEDGAAMAVEPTQIQLSKRWREIESKFAQFRRLNFAQIHTVREETMMVMTEDMPLEISYVPSTYLTEITHVSQALLEVEQLLNAPDLCAKDFEDLFKQEESLKNIKDSLQQSSGRIDIIHSKKTAALQSATPVERVKLQEALSQLDFQWEKVNKMYKDRQGRFDRSVEKWRRFHYDIKIFNQWLTEAEQFLRKTQIPENWEHAKYKWYLKELQDGIGQRQTVVRTLNATGEEIIQQSSKTDASILQEKLGSLNLRWQEVCKQLSDRKKRLEEQKNILSEFQRDLNEFVLWLEEADNIASIPLEPGKEQQLKEKLEQVKLLVEELPLRQGILKQLNETGGPVLVSAPISPEEQDKLENKLKQTNLQWIKVSRALPEKQGEIEAQIKDLGQLEKKLEDLEEQLNHLLLWLSPIRNQLEIYNQPNQEGPFDVQETEIAVQAKQPDVEEILSKGQHLYKEKPATQPVKRKLEDLSSEWKAVNRLLQELRAKQPDLAPGLTTIGASPTQTVTLVTQPVVTKETAISKLEMPSSLMLEVPALADFNRAWTELTDWLSLLDQVIKSQRVMVGDLEDINEMIIKQKATMQDLEQRRPQLEELITAAQNLKNKTSNQEARTIITDRIERIQNQWDEVQEHLQNRRQQLNEMLKDSTQWLEAKEEAEQVLGQARAKLESWKEGPYTVDAIQKKITETKQLAKDLRQWQTNVDVANDLALKLLRDYSADDTRKVHMITENINASWRSIHKRVSEREAALEETHRLLQQFPLDLEKFLAWLTEAETTANVLQDATRKERLLEDSKGVKELMKQWQDLQGEIEAHTDVYHNLDENSQKILRSLEGSDDAVLLQRRLDNMNFKWSELRKKSLNIRSHLEASSDQWKRLHLSLQELLVWLQLKDDELSRQAPIGGDFPAVQKQNDVHRAFKRELKTKEPVIMSTLETVRIFLTEQPLEGLEKLYQEPRELPPEERAQNVTRLLRKQAEEVNTEWEKLNLHSADWQRKIDETLERLQELQEATDELDLKLRQAEVIKGSWQPVGDLLIDSLQDHLEKVKALRGEIAPLKENVSHVNDLARQLTTLGIQLSPYNLSTLEDLNTRWKLLQVAVEDRVRQLHEAHRDFGPASQHFLSTSVQGPWERAISPNKVPYYINHETQTTCWDHPKMTELYQSLADLNNVRFSAYRTAMKLRRLQKALCLDLLSLSAACDALDQHNLKQNDQPMDILQIINCLTTIYDRLEQEHNNLVNVPLCVDMCLNWLLNVYDTGRTGRIRVLSFKTGIISLCKAHLEDKYRYLFKQVASSTGFCDQRRLGLLLHDSIQIPRQLGEVASFGGSNIEPSVRSCFQFANNKPEIEAALFLDWMRLEPQSMVWLPVLHRVAAAETAKHQAKCNICKECPIIGFRYRSLKHFNYDICQSCFFSGRVAKGHKMHYPMVEYCTPTTSGEDVRDFAKVLKNKFRTKRYFAKHPRMGYLPVQTVLEGDNMETPVTLINFWPVDSAPASSPQLSHDDTHSRIEHYASRLAEMENSNGSYLNDSISPNESIDDEHLLIQHYCQSLNQDSPLSQPRSPAQILISLESEERGELERILADLEEENRNLQAEYDRLKQQHEHKGLSPLPSPPEMMPTSPQSPRDAELIAEAKLLRQHKGRLEARMQILEDHNKQLESQLHRLRQLLEQPQAEAKVNGTTVSSPSTSLQRSDSSQPMLLRVVGSQTSDSMGEEDLLSPPQDTSTGLEEVMEQLNNSFPSSRGRNTPGKPMREDTM

SEQ ID NO: 7465 - protein, 500 aa, Homo sapiens
MAGGGGSSDGSGRAAGRRASRSSGRARRGRHEPGLGGPAERGAGEARLEEAVNRWVLKFYFHEALRAFRGSRYGDFRQIRDIMQALLVRPLGKEHTVSRLLRVMQCLSRIEEGENLDCSFDMEAELTPLESAINVLEMIKTEFTLTEAVVESSRKLVKEAAVIICIKNKEFEKASKILKKHMSKDPTTQKLRNDLLNIIREKNLAHPVIQNFSYETFQQKMLRFLESHLDDAEPYLLTMAKKALKSESAASSTGKEDKQPAPGPVEKPPREPARQLRNPPTTIGMMTLKAAFKTLSGAQDSEAAFAKLDQKDLVLPTQALPASPALKNKRPRKDENESSAPADGEGGSELQPKNKRMTISRLVLEEDSQSTEPSAGLNSSQEAASAPPSKPTVLNQPLPGEKNPKVPKGKWNSSNGVEEKETWVEEDELFQVQAAPDEDSTTNITKKQKWTVEESEWVKAGVQKYGEGNWAAISKNYPFVNRTAVMIKDRWRTMKRLGMN

SEQ ID NO: 7466 - protein, 367 aa, Homo sapiens
MADFGISAGQFVAVVWDKSSPVEALKGLVDKLQALTGNEGRVSVENIKQLLQCLVPGSTTLHSAEILAEIARILRPGGCLFLKEPVETAVDNNSKVKTASKLCSALTLSGLVEVKELQREPLTPEEVQSVREHLGHESDNLLFVQITGKKPNFEVGSSRQLKLSITKKSSPSVKPAVDPAAAKLWTLSANDMEDDSMCIFCGCSLTHRWPLEHVVRLNMMINQKEDRVDTFFTLDSKFPLEACSHFSFSLAETTTVSLIALNTLQDLIDSDELLDPEDLKKPDPASLRAASCGEGKKRKACKNCTCGLAEELEKEKSREQMSSQPKSACGNCYLGDAFRCASCPYLGMPAFKPGEKVLLSDSNLHDA

SEQ ID NO: 7467 - protein, 312 aa, Homo sapiens
MADFGISAGQFVAVVWDKSSPVEALKGLVDKLQALTGNEGRVSVENIKQLLQSAHKESSFDIILSGLVPGSTTLHSAEILAEIARILRPGGCLFLKEPVETAVDNNSKVKTASKLCSALTLSGLVEVKELQREPLTPEEVQSVREHLGHESDNLLFVQITGKKPNFEVGSSRQLKLSITKKSSPSVKPAVDPAAAKLWTLSANDMEDDSMDLIDSDELLDPEDLKKPDPASLRAASCGEGKKRKACKNCTCGLAEELEKEKSREQMSSQPKSACGNCYLGDAFRCASCPYLGMPAFKPGEKVLLSDSNLHDA

SEQ ID NO: 7468 - protein, 541 aa, Homo sapiens
MASQEFEVEAIVDKRQDKNGNTQYLVRWKGYDKQDDTWEPEQHLMNCEKCVHDFNRRQTEKQKKLTWTTTSRIFSNNARRRTSRSTKANYSKNSPKTPVTDKHHRSKNCKLFAASKNVRRKAASTLSDTKNMEIINSTIETLAPDSPFDHKKTVSGFQKLEKLDPIAADQQDTVVFKVTEGKLLRDPLSHPGAEQTGIQNKTQMHPLMSQMSGSVTASMATGSATRKGIVVLIDPLAANGTTDMHTSVPRVKGGQRNITDDSRGQPFIKKMHFTIRLTESAITYRDIVVKKEDGFTQIVLSTRSTEKNALNTEVIKEMVNALNSAAADDSKLVLFSAAGSVFCCGLDFGYFVRHLRNDRNTASLEMVDTIKNFVNTFIQFKKPIVVSVNGPAIGLGASILPLCDLVWANEKAWFQTPYTTFGQSPDGCSSITFPKMMGKASANEMLIAGRKLTAREACAKGLVSQVFLTGTFTQEVMIQIKELASYNAIVLEECKALVRCNIKLELEQANERECEVLRKIWSSAQGIESMLKYVENKIDEF

SEQ ID NO: 7469 - protein, 595 aa, Homo sapiens
MASQEFEVEAIVDKRQDKNGNTQYLVRWKGYDKQDDTWEPEQHLMNCEKCVHDFNRRQTEKQKKLTWTTTSRIFSNNARRRTSRSTKANYSKNSPKTPVTDKHHRSKNCKLFAASKNVRRKAASTLSDTKNMEIINSTIETLAPDSPFDHKKTVSGFQKLEKLDPIAADQQDTVVFKVTEGKLLRDPLSHPGAEQTGIQNKTQMHPLMSQMSGSVTASMATGSATRKGIVVLIDPLAANGTTDMHTSVPRVKGGQRNITDDSRGQPFIKKMHFTIRLTESAITYRDIVVKKEDGFTQIVLSTRSTEKNALNTEVIKEMVNALNSAAADDSKLVLFSAAGSVFCCGLDFGYFVRHLRNDRNTASLEMVDTIKNFVNTFIQFKKPIVVSVNGPAIGLGASILPLCDLVWANEKAWFQTPYTTFGQSPDGCSSITFPKMMGKASANEMLIAGRKLTAREACAKGLVSQVFLTGTFTQEVMIQIKELASYNAIVLEECKALVRCNIKLELEQANERECEVLRKIWSSAQGIESMLKIPLLGYKAALASLPERHRTIRDGALDFIVAQTLQRHTIIRDLSFSINTYGTKSTDDHSPKLNT

SEQ ID NO: 7470 - protein, 1144 aa, Homo sapiens
MPPNTTEKAITQLFPGHIYRFLLFAINEWEAKTTLSPIFTVETRPLSAQNFRVTHVTITEVFLHWDPPDPVFFHHYLITILDVENNTSEEVLVEKRNTATIVGDLKSFHHYLVYLFSVAERGTLSCLEKPLSVITEPKPVWIVIPYESHSTSVILFVQMPNVEVFDGLHIVIEGGANVTMALHHGLEAPLNIHEGKVTDSSIDILWNRVDGNFQHYEITCINYAAAFMVQKVVQETAIFSNLDPATVYTFSIRAEKEGFKDITANIKEIQTGYRLCRHLRSFFHVQIFPWSFKGRLISYCMPSRQEKLIKVIVYGNKAKVKKLTLGMDYMFQVKKVKGKGYSVSVMKKVPIKPEQPEKLRAFNISTHSFSLHWSLPSGHVERYQVDLVPDSGFVTIRDLGGGEYQVDVSNVVPGTRYDITISSISTTYTSPVTRIVTTNVTMPEGPPQNCVTGNITGKSFSILWDPPTIVTGKFSYRVELYGPSGRILDNSTKDLKFAFTNLTPFTMYDVYIAAETSAGTGPKSNISVFTPPDVPGAVFDLQLAEVESTQVRITWKKPRQPNGIINQYRVKVLVPETGIILENTLLTGNNELSENLMQQMEMPHRQKLAPPNPFDLLPGESSTLESLAKLHRQSVITVAKAVTTRNQYITDIAAEQLSYVIRRLVPFTEHMISVSAFTIMGEGPPTVLSVRTRQQGLKKYTKYKMRVAASTHVGESSLSEENDIFVRTSEDEPESSPQDVEVIDVTADEIRLKWSPPEKPNGIIIAYEVLYKNIDTLYMKNTSTTDIILRNLRPHTLYNISVRSYTRFGHGNQVSSLLSVRTSETVLKKYTQYIIEVSASTLKGEGVRSAPISILTEEDAPDSPPQDFSVKQLSGVTVKLSWQPPLEPNGIILYYTVYVWNRSSLKTINVTETSLELSDLDYNVEYSAYVTASTRFGDGKTRSNIISFQTPEGVPETSPIINTFKNLSSTSVLLSWDPPVKPNGAIISYDLTLQGPNENYSFITSDNYIILEELSPFTLYSFFAAARTRKGLGPSSILFFYTDESVPLAPPQNLTLINCTSDFVWLKWSPSPLPGGIVKVYSFKIHEHETDTIYYKNISGFKTEAKLVGLEPVSTYSIRVSAFTKVGNGNQFSNVVKFTTQESG

SEQ ID NO: 7471 - protein, 303 aa, Homo sapiens
MVAPRPLRRVVLFYQGKLCSMAGNFWQSSHYLQWILDKQDLLKERQKDLKFLSEEEYWKLQIFFTNVIQALGEHLKLRQQVIATATVYFKRFYARYSLKSIDPVLMAPTCVFLASKVEEFGVVSNTRLIAAATSVLKTRFSYAFPKEFPYRMNHILECEFYLLELMDCCLIVYHPYRPLLQYVQDMGQEDMLLPLAWRIVNDTYRTDLCLLYPPFMIALACLHVACVVQQKDARQWFAELSVDMEKILEIIRVILKLYEQWKNFDERKEMATILSKMPKPKPPPNSEGEQGPNGSQNSSYSQS

SEQ ID NO: 7472 - protein, 637 aa, Homo sapiens
MLGKGVVGGGGGTKAPKPSFVSYVRPEEIHTNEKEVTEKEVTLHLLPGEQLLCEASTVLKYVQEDSCQHGVYGRLVCTDFKIAFLGDDESALDNDETQFKNKVIGENDITLHCVDQIYGVFDEKKKTLFGQLKKYPEKLIIHCKDLRVFQFCLRYTKEEEVKRIVSGIIHHTQAPKLLKRLFLFSYATAAQNNTVTVPKNHTVMFDTLKDWCWELERTKGNMKYKAVSVNEGYKVCERLPAYFVVPTPLPEENVQRFQGHGIPIWCWSCHNGSALLKMSALPKEQDDGILQIQKSFLDGIYKTIHRPPYEIVKTEDLSSNFLSLQEIQTAYSKFKQLFLIDNSTEFWDTDIKWFSLLESSSWLDIIRRCLKKAIEITECMEAQNMNVLLLEENASDLCCLISSLVQLMMDPHCRTRIGFQSLIQKEWVMGGHCFLDRCNHLRQNDKEEHQRQLSLPLTQSKSSPKRGFFREETDHLIKNLLGKRISKLINSSDELQDNFREFYDSWHSKSTDYHGLLLPHIEGPEIKVWAQRYLRWIPEAQILGGGQVATLSKLLEMMEEVQSLQEKIDERHHSQQAPQAEAPCLLRNSARLSSLFPFALLQRHSSKPVLPTSGWKALGDEDDLAKREDEFVDLGDV

SEQ ID NO: 7473 - protein, 775 aa, Homo sapiens
CWWPPLLPQLEPEPPPLRPRVAASQGGGMLGKGVVGGGGGTKAPKPSFVSYVRPEEIHTNEKEVTEKEVTLHLLPGEQLLCEASTVLKYVQEDSCQHGVYGRLVCTDFKIAFLGDDESALDNDETQFKNKVIGENDITLHCVDQIYGVFDEKKKTLFGQLKKYPEKLIIHCKDLRVFQFCLRYTKEEEVKRIVSGIIHHTQAPKLLKRLFLFSYATAAQNNTVTDPKNHTVMFDTLKDWCWELERTKGNMKYKAVSVNEGYKVCERLPAYFVVPTPLPEENVQRFQGHGIPIWCWSCHNGSALLKMSALPKEQDDGILQIQKSFLDGIYKTIHRPPYEIVKTEDLSSNFLSLQEIQTAYSKFKQLFLIDNSTEFWDTDIKWFSLLESSSWLDIIRRCLKKAIEITECMEAQNMNVLLLEENASDLCCLISSLVQLMMDPHCRTRIGFQSLIQKEWVMGGHCFLDRCNHLRQNDKEEVPVFLLFLDCVWQLVHQHPPAFEFTETYLTVLSDSLYIPIFSTFFFNSPHQKDTNMGREGQDTQSKPLNLLTVWDWSVQFEPKAQTLLKNPLYVEKPKLDKGQRKGMRFKHQRQLSLPLTQSKSSPKRGFFREETDHLIKNLLGKRISKLINSSDELQDNFREFYDSWHSKSTDYHGLLLPHIEGPEIKVWAQRYLRWIPEAQILGGGQVATLSKLLEMMEEVQSLQEKIDERHHSQQAPQAEAPCLLRNSARLSSLFPFALLQRHSSKPVLPTSGWKALGDEDDLAKREDEFVDLGDV

SEQ ID NO: 7474 - protein, 705 aa, Homo sapiens
MLREEAAQKRKGKEPGMALPQGRLTFRDVAIEFSLAEWKCLNPSQRALYREVMLENYRNLEAVDISSKCMMKEVLSTGQGNTEVIHTGTLQRHESHHIGDFCFQEIEKEIHDIEFQCQEDERDGLEAPMTKIKKLTGSTDQHDHRHAGNKPIKDQLGSSFYSHLPELHIFQIKGEIGNQLEKSTNDAPSVSTFQRISCRPQTQISNNYGNNPLNSSLLPQKQEVHMREKSFQCNKSGKAFNCSSLLRKHQIIHLGDKQYKCDVCGKLFNHEQYLACHDRCHTVEKPYKCKECGKTFSQESSLTCHRRLHTGVKRYNCNECGKIFGQNSALLIDKAIDTGENPYKCNECDKAFNQQSQLSHHRIHTGEKPYKCEECDKVSSRKSTIETHKRIHTGEKPYRCKVCDTAFTWHSQLARHRRIHTAKKTYKCNECGKTFSHKSSLVCHHRLHGGEKSYKCKVCDKAFVWSSQLAKHTRIDCGEKPYKCNECGKTFGQNSDLLIHKSIHTGEQPYKCDECEKVFSRKSSLETHKIGHTGEKPYKCKVCDKAFACHSYLAKHTRIHSGEKPYKCNECSKTFSHRSYLVCHHRVHSGEKPYKCNECSKTFSRRSSLHCHRRLHSGEKPYKCNECGNTFRHCSSLIYHRRLHTGEKSYKCTICDKAFVRNSLLSRHTRIHTAEKPYKCNECGKAFNQQSHLSRHHRIHTGEKP

SEQ ID NO: 7475 - protein, 445 aa, Homo sapiens
MNRHLCVWLFRHPSLNGYLQCHIQLHSHQFRQIHLDTRLQVFRQNRNCILHLLSKNWSRRYCLQDTKMLWNHKALQKYMENLSKEYQTLEQCLQHIPVNEESRRSLNRRHAELAPLAAIYQETQETEQAIEELGSMCKSLNKRDEKQLLELALEERQTIDQKINMLYNELFQSLVPKEKYDKNDVILEVTAGRTTGGDICQQFTREIFDMYQNYSCYKHWQFEPLNYTPADYGGLHHAAARISGDGVYKHLKYEGGIHRVQRIPEVGLSSRMQRIHTGTMSVIVLPQPDEVDVKLDPKDLRIDTFRAKGAGGQHVNKTDSAVRLVHIPTGLVVECQQERSQIKNKEIAFRVLRARLYQQIIEKDKRQQQSARKLQVGTRAQSERIRTYNFTQDRVSDHRIAYEVRDIKEFLCGGKGLDQLIQRLLQSADEEAIAELLDEHLKSAK

SEQ ID NO: 7476 - protein, 445 aa, Homo sapiens
MNRHLCVWLFRHPSLNGYLQCHIQLHSHQFRQIHLDTRLQVFRQNRNCILHLLSKNWSRRYCHQDTKMLWKHKALQKYMENLSKEYQTLEQCLQHIPVNEENRRSLNRRHAELAPLAAIYQEIQETEQAIEELESMCKSLNKQDEKQLQELALEERQTIDQKINMLYNELFQSLVPKEKYDKNDVILEVTAGRTTGGDICQQFTREIFDMYQNYSCYKHWQFELLNYTPADYGGLHHAAARISGDGVYKHLKYEGGIHRVQRIPEVGLSSRMQRIHTGTMSVIVLPQPDEVDVKLDPKDLRIDTFRAKGAGGQHVNKTDSAVRLVHIPTGLVVECQQERSQIKNKEIAFRVLRARLYQQIIEKDKRQQQSARKLQVGTRAQSERIRTYNFTQDRVSDHRIAYEVRDIKEFLCGGKGLDQLIQRLLQSADEEAIAELLDEHLKSAK

SEQ ID NO: 7477 - protein, 3433 aa, Homo sapiens
MAKYGEHEASPDNGQNEFSDIIKSRSDEHNDVQKKTFTKWINARFSKSGKPPINDMFTDLKDGRKLLDLLEGLTGTSLPKERGSTRVHALNNVNRVLQVLHQNNVELVNIGGTDIVDGNHKLTLGLLWSIILHWQVKDVMKDVMSDLQQTNSEKILLSWVRQTTRPYSQVNVLNFTTSWTDGLAFNAVLHRHKPDLFSWDKVVKMSPIERLEHAFSKAQTYLGIEKLLDPEDVAVRLPDKKSIIMYLTSLFEVLPQQVTIDAIREVETLPRKYKKECEEEAINIQSTAPEEEHESPRAETPSTVTEVDMDLDSYQIALEEVLTWLLSAEDTFQEQDDISDDVEEVKDQFATHEAFMMELTAHQSSVGSVLQAGNQLITQGTLSDEEEFEIQEQMTLLNARWEALRVESMDRQSRLHDVLMELQKKQLQQLSAWLTLTEERIQKMETCPLDDDVKSLQKLLEEHKSLQSDLEAEQVKVNSLTHMVVIVDENSGESATAILEDQLQKLGERWTAVCRWTEERWNRLQEINILWQELLEEQCLLKAWLTEKEEALNKVQTSNFKDQKELSVSVRRLAILKEDMEMKRQTLDQLSEIGQDVGQLLDNSKASKKINSDSEELTQRWDSLVQRLEDSSNQVTQAVAKLGMSQIPQKDLLETVRVREQAITKKSKQELPPPPPPKKRQIHVDIEAKKKFDAISAELLNWILKWKTAIQTTEIKEYMKMQDTSEMKKKLKALEKEQRERIPRADELNQTGQILVEQMGKEGLPTEEIKNVLEKVSSEWKNVSQHLEDLERKIQLQEDINAYFKQLDELEKVIKTKEEWVKHTSISESSRQSLPSLKDSCQRELTNLLGLHPKIEMARASCSALMSQPSAPDFVQRGFDSFLGRYQAVQEAVEDRQQHLENELKGQPGHAYLETLKTLKDVLNDSENKAQVSLNVLNDLAKVEKALQEKKTLDEILENQKPALHKLAEETKALEKNVHPDVEKLYKQEFDDVQGKWNKLKVLVSKDLHLLEEIALTLRAFEADSTVIEKWMDGVKDFLMKQQAAQGDDAGLQRQLDQCSAFVNEIETIESSLKNMKEIETNLRSGPVAGIKTWVQTRLGDYQTQLEKLSKEIATQKSRLSESQEKAANLKKDLAEMQEWMTQAEEEYLERDFEYKSPEELESAVEEMKRAKEDVLQKEVRVKILKDNIKLLAAKVPSGGQELTSELNVVLENYQLLCNRIRGKCHTLEEVWSCWIELLHYLDLETTWLNTLEERMKSTEVLPEKTDAVNEALESLESVLRHPADNRTQIRELGQTLIDGGILDDIISEKLEAFNSRYEDLSHLAESKQISLEKQLQVLRETDQMLQVLQESLGELDKQLTTYLTDRIDAFQVPQEAQKIQAEISAHELTLEELRRNMRSQPLTSPESRTARGGSQMDVLQRKLREVSTKFQLFQKPANFEQRMLDCKRVLDGVKAELHVLDVKDVDPDVIQTHLDKCMKLYKTLSEVKLEVETVIKTGRHIVQKQQTDNPKGMDEQLTSLKVLYNDLGAQVTEGKQDLERASQLARKMKKEAASLSEWLSATETELVQKSTSEGLLGDLDTEISWAKNVLKDLEKRKADLNTITESSAALQNLIEGSEPILEERLCVLNAGWSRVRTWTEDWCNTLMNHQNQLEIFDGNVAHISTWLYQAEALLDEIEKKPTSKQEEIVKRLVSELDDANLQVENVRDQALILMNARGSSSRELVEPKLAELNRNFEKVSQHIKSAKLLIAQEPLYQCLVTTETFETGVPFSDLEKLENDIENMLKFVEKHLESSDEDEKMDEESAQIEEVLQRGEEMLHQPMEDNKKEKIRLQLLLLHTRYNKIKAIPIQQRKMGQLASGIRSSLLPTDYLVEINKILLCMDDVELSLNVPELNTAIYEDFSFQEDSLKNIKDQLDKLGEQIAVIHEKQPDVILEASGPEAIQIRDTLTQLNAKWDRINRMYSDRKGCFDRAMEEWRQFHCDLNDLTQWITEAEELLVDTCAPGGSLDLEKARIHQQELEVGISSHQPSFAALNRTGDGIVQKLSQADGSFLKEKLAGLNQRWDAIVAEVKDRQPRLKGESKQVMKYRHQLDEIICWLTKAEHAMQKRSTTELGENLQELRDLTQEMEVHAEKLKWLNRTELEMLSDKSLSLPERDKISESLRTVNMTWNKICREVPTTLKECIQEPSSVSQTRIAAHPNVQKVVLVSSASDIPVQSHRTSEISIPADLDKTITELADWLVLIDQMLKSNIVTVGDVEEINKTVSRMKITKADLEQRHPQLDYVFTLAQNLKNKASSSDMRTAITEKLERVKNQWDGTQHGVELRQQQLEDMIIDSLQWDDHREETEELMRKYEARLYILQQARRDPLTKQISDNQILLQELGPGDGIVMAFDNVLQKLLEEYGSDDTRNVKETTEYLKTSWINLKQSIADRQNALEAEWRTVQASRRDLENFLKWIQEAETTVNVLVDASHRENALQDSILARELKQQMQDIQAEIDAHNDIFKSIDGNRQKMVKALGNSEEATMLQHRLDDMNQRWNDLKAKSASIRAHLEASAEKWNRLLMSLEELIKWLNMKDEELKKQMPIGGDVPALQLQYDHCKALRRELKEKEYSVLNAVDQARVFLADQPIEAPEEPRRNLQSKTELTPEERAQKIAKAMRKQSSEVKEKWESLNAVTSNWQKQVDKALEKLRDLQGAMDDLDADMKEAESVRNGWKPVGDLLIDSLQDHIEKIMAFREEIAPINFKVKTVNDLSSQLSPLDLHPSLKMSRQLDDLNMRWKLLQVSVDDRLKQLQEAHRDFGPSSQHFLSTSVQLPWQRSISHNKVPYYINHQTQTTCWDHPKMTELFQSLADLNNVRFSAYRTAIKIRRLQKALCLDLLELSTTNEIFKQHKLNQNDQLLSVPDVINCLTTTYDGLEQMHKDLVNVPLCVDMCLNWLLNVYDTGRTGKIRVQSLKIGLMSLSKGLLEEKYRYLFKEVAGPTEMCDQRQLGLLLHDAIQIPRQLGEVAAFGGSNIEPSVRSCFQQNNNKPEISVKEFIDWMHLEPQSMVWLPVLHRVAAAETAKHQAKCNICKECPIVGFRYRSLKHFNYDVCQSCFFSGRTAKGHKLHYPMVEYCIPTTSGEDVRDFTKVLKNKFRSKKYFAKHPRLGYLPVQTVLEGDNLETPITLISMWPEHYDPSQSPQLFHDDTHSRIEQYATRLAQMERTNGSFLTDSSSTTGSVEDEHALIQQYCQTLGGESPVSQPQSPAQILKSVEREERGELERIIADLEEEQRNLQVEYEQLKDQHLRRGLPVGSPPESIISPHHTSEDSELIAEAKLLRQHKGRLEARMQILEDHNKQLESQLHRLRQLLEQPESDSRINGVSPWASPQHSALSYSLDPDASGPQFHQAAGEDLLAPPHDTSTDLTEVMEQIHSTFPSCCPNVPSRPQAM

SEQ ID NO: 7478 - protein, 316 aa, Homo sapiens
MLLLELNAPEHVLETINFQTLTAFCNTFHILRPTKAPGFVYAWLELISHRIFIARMLAHTPQQKGWPMYAQLLIDLFKYLAPFLRNVELTKPMQILYKGTLRVLLVLLHDFPEFLCDYHYGFCDVIPPNCIQLRNLILSAFPRNMRLPDPFTPNLKVDMLSEINIAPRILTNFTGVMPPQFKKDLDSYLKTRSPVTFLSDLRRTVQVSNEPGNRYNLQLINALVLYVGTQAIAHIHNKGSTPSMSTITHSAHMDIFQNLAVDLDTEGRYLFLNAIANHSGTQIATLTTSVAPCCTFLQRPIRKPSKNRSQEFSWNG

SEQ ID NO: 7479 - protein, 61 aa, Homo sapiens
MKLHRIIRKRLSGCPRTCFHKEKTPRILKVAEFFNYSKNRIQILPCKFLLSYRIILLELEY

SEQ ID NO: 7480 - protein, 224 aa, Homo sapiens
MASKKEPKKELGLHRGILHFYPGSDQPDGRHCHRHEYILAPGAPATSSSVAQETPSSLFRIHTVYMIDTGNVEEHVSHKTVTNPDKLPKTAENFHALSTGEKGFGYKGSCFHRIIPGFMCQGGGFTCHNGTGGKSIYGEKLDDENFILKHTCPGTLSMANAGPNTNGSRFFICTAKTVVGQKHVVSSKVKEGMNIVGAMEHFGSRNGKTSKMITTADCGQLEYI

SEQ ID NO: 7481 - protein, 147 aa, Homo sapiens
MAERPEDLNLPNAVITRIIKEALPDGVNISKEARSAISRAASVFVLYATSCANNFAMKGKRKTLNASDVLSAMEEMEFQRFVTPLKEALEAYRREQKGKKEASEQKKKDKDKKTDSEEQDKSRDEDNDEDEERLEEEEQNEEEEVDN

SEQ ID NO: 7482 - protein, 525 aa, Homo sapiens
MLGKRKRVVLTIKDKLDIIKKLEEGISFKKLSVVYGIGESTVRDIKKNKERIINYANSSDPTSGVSKRKSMKSSTYEELDRVMIEWFNQQKTDGIPVSGTICAKQAKFFFDALGMEGDFNASSGWLTRFKQRHGIPKAAGKGTKLKGDETAAREFCGSFQEFVEKENLQPEQIYGADQTGLFWKCLPSRTLTLETDQSTSGCRSSRERIIIMCCANATGLHKLNLCVVGKAKKPRAFKGTDLSNLPVTYYSQKGAWIEQSVFRQWFEKYFVPQVQKHLKSKGLLEKAVLLLDFPPARPNEEMLSSDDGRIIVKYLPPNVTSLIQPMSQGVLATVKRYYRAGLLQKYMDEGNDPKIFWKNLTVLDAIYEVSRAWNMVKSSTITKAWKKLFPGNEENSGMNIDEGAILAANLATVLQNTEECEHVDIENIDQWFDSRSSDSSCQVLTDSESAEDQTKAAEQKPSSKSRKTELNPEKHISHKAALEWTENLLDYLEQQDDMLLSDKLVLRRLRTIIRKKQKIQNNKNH

SEQ ID NO: 7483 - protein, 1890 aa, Homo sapiens
MLSLQNILNGLGAAAAPCHRDVYKAARSCLTDRSMAVRCAAAKCLLELQNEAIFMWSTDLDSVATLCFKSFEGSNYDVRISVSKLLGIILAKAVISKHPGTAASRQSIRRVSLEEVLELLGTGFLRGSSGFLRASGDMLKGTSSVSRDVRVGVTQAYVVFVSTLGGAWLEKNFAAFFSHILSLASPSHPKATQTQIDAVCCRRCVSFILRTTIGGLLGEKAQLAAVKDICQAIWKLKKVMDAVMSDGNLETRLGSTDVAASQHMLVCALQELGNLIHNLGTTAAPLLQDSSTGLLDSILSVILHPSISVRLAAAWCLHCIAVALPSYLTPLLDRCLERLTGHKSSPEAVTGFSFAVAALLGAVKHCPLGIPHGKGKIIMTLAEDLLCSAAQNSRLSAQRTQAGWLLISALMTLGPAVVSHHLARVLLLWKCVFPASPKDLETEKSRGDSFTWQVTLEGRAGALCAIKSFVSHCGDLLTEEVTQRLLPPLPCAVDLLTQLSSILKMYGSPLKTPSVVYRQRLYELLILLPPETYEGNLCAILRELAADLTAPDIQVAASTFLLPPLCHQDDLLILSPFLQETDHRFIEEQLLLGNGVACGSLEYDPYSIYEKDVEGDSVPKPLPPALSVISSASKLFGVVCAHVGETQRLLILEQLLDSIKHTKGARQQVVQLHVVSSVSSFLKYVAGSKGCLGPEEMKRFALTLVMGALESPNPLLRCAAAESWARLAQVVDDGAFTAGLAQVSFDKLKSARDVVTRTGHSLALGSLHRYLGGISSSQHLNSCIGILYTLAQDSTSPDVQTWALHSLSLIIDSAGPLYYVHVEPTLSLIIMLLLNVPPTHAEVHQSLGRCLNALITTLGPELQGNSTSISTLRTSCLLGCAVMQDNPDCLVQAQAISCLQQLHMFAPRHVNLSSLVSCLCVNLCSPYLLLRRAVLACLRQLVQREAAEVSEHAVMLAKDSREELTPDANIREVGLEGALLILLDKETDERLCHDIKETLNYMLTSMAVEKLSLWLKLCKDVLAASADFTAVTCVDTMQEEEGDKGDDASVLTTRRDEKSHPFTNPRWATRVFAAECVCRIINQCENANSAHFDIALAQEMKKRDSRNDFLVLHLADLIRMAFMAATDHSDQLRLSGLEMLLVVIRRFATVPEPEFPGHVILEQYQANVGAALRPAFTSETPPDVTAKACQVCSAWIASGVVSDLNDLRRVHQLLVSSLTKIQAGKEALSHLYNESASTMEILAVLKAWAEVYIIAVQRHKNHRQPLKTTTCLEDGIRNGSCSSDGLLDLVYADLGTLSRLWLAALQDFALLTLPSEFASQLPAEGGAFYTAETSENAKLHYYNSWALILHATALWLTSTGFVVADPDEGASNLSRPVTPTSMCQGSSSGATIKSPEDVYTDRFHLILGISVEFLCSLRSDATMESITACLHALQALLDVPWPRSKIGSDQDLGIELLNVLHRVILTRESPSIQLASLEVVRQIICAAQEHVKEKRRSAEVDDGAAEKETLPEFGEGKDTGGLVPGKSLVFATLELCVCILVRQLPELNPKLTGSPGVKATKPQILLEDGSRLVSAALVILSELPAVCSPEGSISILPTILYLTIGVLRETAVKLPGGQLSSTVAASLQALKGILSSPMARAEKSRTAWTDLLRSALTTILDCWDPVDETHQELDEVSLLTAITVFILSTSPEVTTIPCLQKRCIDKFKATLEIKDPVVQIKTYQLLHSIFQYPNPAVSYPYIYSLASCIMEKLQEIDKRKPENTAELEIFQEGIKVLETLVTVAEEHHRAQLVACLLPILISFLLDENSLGSATSIMRNLHDFALQNLMQIGPQYSSVFKSLVASSPALKARLEAAIKGNQESVKVKIPTSKYTKSPGKNSSIQLKTSFL

SEQ ID NO: 7484 - protein, 2071 aa, Homo sapiens
MELAHSLLLNEEALAQITEAKRPVFIFEWLRFLDKVLVAANKTDVKEKQKKLVEQLTGLISSSPGPPTRKLLAKNLAALYSIGDTFTVFQTLDKCNDIIRNKDDTAAYLPTKLAAVACVGAFYEKMGRMLGSAFPETVNNLLKSLKSAESQGRSEILMSLQKVLSGLGGAAASSHRDIYKNARSLLTDRSMAVRCAVAKCLLELQNEAVFMWTAELENIATLCFKALENSNYGVRVAVSKLLGTVMATALMPKQATVMRQNVKRATFDEVLELMATGFLRGGSGFLKSGGEMLKVGGSVNREVRVGVTQAYVVFVTTLGGQWLERSFATFLSHVLDLVSHPRATQTHVEAVYSRRCVSFILRATVGSLLGEKAQIAAAKEICQAIGKQMKAVEAVVNDTSGENKSGAADIAASQHVMVCALQELGSLVQSLNATASPLIQEASIGLLEIVTSVLLHPSMAARLAAAWCLRCVAVALPFQLTPFLDRCAERLNNLKTSPEAVSGYSFAMAALLGGVHQCPLGIPHAKGKMVVSIAEDLLRTAAQNSRLSLQRTQAGWLLLGALMTLGPSVVRYHLPKMLLLWRNVFPRSLKELEAEKARGDSFTWQVTLEGRAGALCAMRSFVAHCPELLTEDVIRKLMTPIECAMTMMSHIPSVMKAHGAHLKASAAMVRLRLYDILALLPPKTYEGSFNALLRELVAEFTLTDNSANTTTSLLRSLCHYDDSVLLGSWLQETDHKSIEDQLQPNSASGSGALEHDPSSIYLRIPAGEAVPGPLPLGVSVIDASVALFGVVFPHVSYKHRLQMLDHFAECVKQAKGVRQQAVQLNIFTAVLSALKGLAENKSTLGPEEVRKSALTLVMGPLDNPNPILRCAAGEALGRMAQVVGEATFIARMAQYSFDKLKSARDVVSRTGHSLALGCLHRYVGGIGSGQHLKTSVSILLALAQDGTSPEVQTWSLHSLALIVDSSGPMYRGYVEPTLSLVLTLLLTVPPSHTEVHQCLGRCLGAIITTVGPELQGNGATTSTIRSSCLVGCAITQDHSDSLVQAAAISCLQQLHMFAPRHVNLSSLVPSLCVHLCSSHLLLRRAAVACLRQLAQREAAEVCEYAMSLAKNTGDKESSSANVSPFAPGVSSRTDIHCRHQGVNITETGLEGLLFGMLDRETDRKLCSDIHDTLGHMLSSLAVEKLSHWLMLCKDVLAASSDMSTATLLSSGKDEEAEKKDEMDDDTMFTTLGEEDKSKPFVAPRWATRVFAADCLCRIINLCENADQAHFDLALARSAKLRNPTNDLLVLHLSDLIRMAFMAATDHSNQLRMAGLQALEDIIKKFASVPEPEFPGHVILEQYQANVGAALRPAFSQDTPSDIIAKACQVCSTWIGSGVVSDLNDLRRVHNLLVSSLDKVQAGKGSSSQLYRESATTMEKLAVLKAWAEVYVVAMNIKKEAESKPKRAIKNTDDDDDDCGTIDELPPDSLITLVQPELPTLSRLWLAALKDYALLTLPAEFSSQLPPDGGAFYTPETIDTARLHYRNSWAPILHAVALWLNSTGFTCSESTEAAAISGLQKRSTSVNLNQASGAVGSAKSLPEINKDRMHLILGVSIQFLCSPRPEEPIEHVTACLQALHTLLDSPYARVHIAEDQLIGVELLSVLHRLLLTWNPSSVQLLVTGVVQQIVRAAQDYLQEKRNTLNEDDMEKEACTVLGEGGDSGGLIPGKSLVFATMELLMFILVRHMPHLSTKVSDSPSHIATKTRLSEESARLVAATVTILSDLPSLCSPAGCMTILPTILFLIARILKDTAIKSADNQVPPPVSAALQGIKSIVTLSMAKTEAGVQKQWTALIRSTLACILEYSQPEDSVPTPDEVSMLTAIALFLWSASNEIIGVQSLQNGCMNRFKNALNSCDPWVQAKCYQLLLSVFQHSNRALSTPYIHSLAPIVVEKLKAVERNRPASNIELLAVQEGIKVLETLVALGEEQNRVQLLALLVPTLISYLLDENSFASASSASKDLHEFALQNLMHIGPLYPHAFKTVMGAAPELKVRLETAVRASQASKAKAAARQPAPAIHSAPTIKLKTSFF

SEQ ID NO: 7485 - protein, 684 aa, Homo sapiens
MIAGQVSKPLLSVRSEMNAELRGEDKAATSDSELNEPLLAPVESNDSEDTPSKLFGARGNPALSDPGTPDQHQASQTHPPFPVGPQPLLTAQQLASAVAGVMPGGPPALNQPILIPFNMAGQLGGQQGLVLTLPTANLTNIQGLVAAAAAGGIMTLPLQNLQATSSLNSQLQQLQLQLQQQQQQQQQQQPPPSTNQHPQPAPQAPSQSQQQPLQPTPPQQPPPASQQPPAPTSQLQQAPQPQQHQPHSHSHNQNQPSPTQQSSSPPQKPSQSPGHGLPSPLTPPNPLQLVNNPLASQAAAAAAAMSSIASSQAFGNALSSLQGVTGQLVTNAQGQIIGTIPLMPNPGPSSQAASGTQGLQVQPITPQLLTNAQGQIIATVIGNQILPVINTQGITLSPIKPGQQLHQPSQTSVGQAASQGNLLHLAHSQASMSQSPVRQASSSSSSSSSSSALSVGQLVSNPQTAAGEVDGVNLEEIREFAKAFKIRRLSLGLTQTQVGQALSATEGPAYSQSAICRHTILRSHFFLPQEAQENTIASSLTAKLNPGLLYPARFEKLDITPKSAQKIKPVLERWMAEAEARHRAGMQNLTEFIGSEPSKKRKRRTSFTPQALEILNAHFEKNTHPSGQEMTEIAEKLNYDREVVRVWFCNKRQALKNTIKRLKQHEPATAVPLEPLTDSLEENS

SEQ ID NO: 7486 - protein, 648 aa, Homo sapiens
MIAGQVSKPLLSVRSEMNAELRGEDKAATSDSELNEPLLAPVESNDSEDTPSKLFGARGNPALSDPGTPDQHQASQTHPPFPVGPQPLLTAQQLASAVAGVMPGGPPALNQPILIPFNMAGQLGGQQGLVLTLPTANLTNIQGLVAAAAAGGIMTLPLQNLQATSSLNSQLQQLQLQLQQQQQQQQQQQPPPSTNQHPQPAPQAPSQSQQQPLQPTPPQQPPPASQQPPAPTSQLQQAPQPQQHQPHSHSHNQNQPSPTQQSSSPPQKPSQSPGHGLPSPLTPPNPLQLVNNPLASQAAAAAAAMSSIASSQAFGNALSSLQGVTGQLVTNAQGQIIGTIPLMPNPGPSSQAASGTQGLQVQPITPQLLTNAQGQIIATVIGNQILPVINTQGITLSPIKPGQQLHQPSQTSVGQAASQGNLLHLAHSQASMSQSPVRQASSSSSSSSSSSALSVGQLVSNPQTAAGEVDGVNLEEIREFAKAFKIRRLSLGLTQTQVGQALSATEGPAYSQSAICRFEKLDITPKSAQKIKPVLERWMAEAEARHRAGMQNLTEFIGSEPSKKRKRRTSFTPQALEILNAHFEKNTHPSGQEMTEIAEKLNYDREVVRVWFCNKRQALKNTIKRLKQHEPATAVPLEPLTDSLEENS

SEQ ID NO: 7487 - protein, 1130 aa, Homo sapiens
MAVRKKDGGPNVKYYEAADTVTQFDNVRLWLGKNYKKYIQAEPPTNKSLSSLVVQLLQFQEEVFGKHVSNAPLTKLPIKCFLDFKAGGSLCHILAAAYKFKSDQGWRRYDFQNPSRMDRNVEMFMTIEKSLVQNNCLSRPNIFLCPEIEPKLLGKLKDIIKRHQGTVTEDKNNASHVVYPVPGNLEEEEWVRPVMKRDKQVLLHWGYYPDSYDTWIPASEIEASVEDAPTPEKPRKVHAKWILDTDTFNEWMNEEDYEVNDDKNPVSRRKKISAKTLTDEVNSPDSDRRDKKGGNYKKRKRSPSPSPTPEAKKKNAKKGPSTPYTKSKRGHREEEQEDLTKDMDEPSPVPNVEEVTLPKTVNTKKDSESAPVKGGTMTDLDEQEDESMETTGKDEDENSTGNKGEQTKNPDLHEDNVTEQTHHIIIPSYAAWFDYNSVHAIERRALPEFFNGKNKSKTPEIYLAYRNFMIDTYRLNPQEYLTSTACRRNLAGDVCAIMRVHAFLEQWGLINYQVDAESRPTPMGPPPTSHFHVLADTPSGLVPLQPKTPQGRQVDADTKAGRKGKELDDLVPETAKGKPELQTSASQQMLNFPDKGKEKPTDMQNFGLRTDMYTKKNVPSKSKAAASATREWTEQETLLLLEALEMYKDDWNKVSEHVGSRTQDECILHFLRLPIEDPYLEDSEASLGPLAYQPIPFSQSGNPVMSTVAFLASVVDPRVASAAAKSALEEFSKMKEEVPTALVEAHVRKVEEAAKVTGKADPAFGLESSGIAGTTSDEPERIEESGNDEARVEGQATDEKKEPKEPREGGGAIEEEAKEKTSEAPKKDEEKGKEGDSEKESEKSDGDPIVDPEKEKEPKEGQEEVLKEVVESEGERKTKVERDIGEGNLSTAAAAALAAAAVKAKHFAAVEERKIKSLVALLVETQMKKLEIKLRHFEELETIMDREREALEYQRQQLLADRQAFHMEQLKYAEMRARQQHFQQMHQQQQQPPPALPPGSQPIPPTGAAGPPAVHGLAVAPASVVPAPAGSGAPPGSLGPSEQIGQAGSTAGPQQQQPAGAPQPGAVPPGVPPPGPHGPSPFPNQQTPPSMMPGAVPGSGHPGVADPGTPLPPDPTAPSPGTVTPVPPPQ

SEQ ID NO: 7488 - protein, 1214 aa, Homo sapiens
MAVRKKDGGPNVKYYEAADTVTQFDNVRLWLGKNYKKYIQAEPPTNKSLSSLVVQLLQFQEEVFGKHVSNAPLTKLPIKCFLDFKAGGSLCHILAAAYKFKSDQGWRRYDFQNPSRMDRNVEMFMTIEKSLVQNNCLSRPNIFLCPEIEPKLLGKLKDIIKRHQGTVTEDKNNASHVVYPVPGNLEEEEWVRPVMKRDKQVLLHWGYYPDSYDTWIPASEIEASVEDAPTPEKPRKVHAKWILDTDTFNEWMNEEDYEVNDDKNPVSRRKKISAKTLTDEVNSPDSDRRDKKGGNYKKRKRSPSPSPTPEAKKKNAKKGPSTPYTKSKRGHREEEQEDLTKDMDEPSPVPNVEEVTLPKTVNTKKDSESAPVKGGTMTDLDEQEDESMETTGKDEDENSTGNKGEQTKNPDLHEDNVTEQTHHIIIPSYAAWFDYNSVHAIERRALPEFFNGKNKSKTPEIYLAYRNFMIDTYRLNPQEYLTSTACRRNLAGDVCAIMRVHAFLEQWGLINYQVDAESRPTPMGPPPTSHFHVLADTPSGLVPLQPKTPQQTSASQQMLNFPDKGKEKPTDMQNFGLRTDMYTKKNVPSKSKAAASATREWTEQETLLLLEALEMYKDDWNKVSEHVGSRTQDECILHFLRLPIEDPYLEDSEASLGPLAYQPIPFSQSGNPVMSTVAFLASVVDPRVASAAAKSALEEFSKMKEEVPTALVEAHVRKVEEAAKVTGKADPAFGLESSGIAGTTSDEPERIEESGNDEARVEGQATDEKKEPKEPREGGGAIEEEAKEKTSEAPKKDEEKGKEGDSEKESEKSDGDPIVDPEKEKEPKEGQEEVLKEVVESEGERKTKVERDIGEGNLSTAAAAALAAAAVKAKHLAAVEERKIKSLVALLVETQMKKLEIKLRHFEELETIMDREREALEYQRQQLLADRQAFHMEQLKYAEMRARQQHFQQMHQQQQQPPPALPPGSQPIPPTGAAGPPAVHGLAVAPASVVPAPAGSGAPPGSLGPSEQIGQAGSTAGPQQQQPAGAPQPGAVPPGVPPPGPHGPSPFPNQQTPPSMMPGAVPGSGHPGVAGNAPLGLPFGMPPPPPPPAPSIIPFGSLADSISINLPAPPNLHGHHHHLPFAPGTLPPPNLPVSMANPLHPNLPATTTMPSSLPLGPGLGSAAAQSPAIVAAVQGNLLPSASPLPDPGTPLPPDPTAPSPGTVTPVPPPQ

SEQ ID NO: 7489 - protein, 450 aa, Homo sapiens [sequence omitted]

SEQ ID NO: 7490 - protein, 191 aa, Homo sapiens
LLHIVSLHPATCPRVPLSPLPQGRRRRRHQSAGYQPLPRGPRAQNRKAIVDKFGGAASGPTALFRNTKAAGAAIGGVKNMLLEWCRAMTKKYEHVDIQNFSSSWSSGMAFCALIHKFFPDAFDYAELDPAKRRHNFTLAFSTAEKLADCAQLLDVDDMVRLAVPDSKCVYTYIQELYRSLVQKGLVKTKKK

SEQ ID NO: 7491 - protein, 514 aa, Homo sapiens
MEQKEGKLSEDGTTVSPAADNPEMSGGGAPAEETKGTAGKAINEGPPTESGKQEKAPAEDGMSAELQGEANGLDEVKVESQREAGGKEDAEAELKKEDGEKEETTVGSQEMTGRKEETKSEPKEAEEKESTLASEKQKAEEKEAKPESGQKADANDRDKPEPKATVEEEDAKTASQEETGQRKECSTEPKEKATDEEAKAESQKAVVEDEAKAEPKEPDGKEEAKHGAKEEADAKEEAEDAEEAEPGSPSEEQEQDVEKEPEGGAGVIPSSPEEWPESPTGEGHNLSTDGLGPDCVASGQTSPSASESSPSDVPQSPPESPSSGEKKEKAPERRVSAPARPRGPRAQNRKAIVDKFGGGALHGLLPLWLGLAPLSPHRAASGPTALFRNTKAAGAAIGGVKNMLLEWCRAMTKKYEHVDIQNFSSSWSSGMAFCALIHKFFPDAFDYAELDPAKRRHNFTLAFSTAEKLADCAQLLDVDDMVRLAVPDSKCVYTYIQELYRSLVQKGLVKTKKK

SEQ ID NO: 7492 - protein, 1445 aa, Homo sapiens
MGNLVIPLGKGRAGRVESGQRIPPPAPRPSVECTGDDIALQMEKMLFPLKSPSATWLSPSSTPWMMDFILTSVCGLVLLFLLLLYVHSDPPSPPPGRKRSSREPQRERSGRSRSRKISALKACRILLRELEETRDLNYLLESHLRKLAGEGSSHLPLGGDPLGDVCKPVPAKAHQPHGKCMQDPSPASLSPPAPPAPLASTLSPGPMTFSEPFGPHSTLSASGPPEPLLPLKCPATQPHVVFPPSPQPHGPLASSPPPPDSSLAGLQCGSTTCPVPQSSPLHNQVLPPPTRVISGLGCSSDPIWDLYCWREAATTWGLSTYSHGKSQPRHLPDHPSEASFWGDPTPKHMEVGGCTFIHPDVQKLLETLIAKRALMKMWQEKERKRADHPHMTSLGKEWDITTLNPFWNVSTQPQQLPRPQQVSDATTVGNHLQQKRSQLFWDLPSLNSESLATTVWVSRNPSSQNAHSVPLDKASTSLPGEPEVEASSQLSQAPPQPHHMAQPQHFTPAWPQSQPPPLAEIQTQAHLSPPVPSLGCSSPPQIRGCGASYPTSQERTQSVIPTGKEYLEWPLKKRPKWKRVLPSLLKKSQAVLSQPTAHLPQERPASWSPKSAPILPGVVTSPELPEHWWQGRNAIHQEQSCGPPSRLQASGDLLQPDGEFPGRPQSQAEDTQQALLPSQPSEFAGKGRKDVQKTGFRSSGRFSDKGCLGSKLGPDPSRDQGSGRTSVKALDEDKEAEGDLRRSWKYQSVSSTPRDPDKEHLENKLQIHLARKVGEIKEGWIPMPVRRSWLMAKCAVPKSDTHRKPEKLASWRGGKAHVNTSQELSFLHPCTQQILEVHLVRFCVRHSWGTDLQSLEPINVWSGEAQAPPFPQSTFTPWASWVSRVESVPKVPIFLGKRPQSGPGDNRTTSKSVPTVSGPLAAPPPEQEGVQRPPRGSQSADTHGRSEAFPTGHKGRGCSQPPTCSLVGRTWQSRTVLESGKPKPRLEGSMGSEMAGNEAWLESESMSPGDPCSSRALQELSIGSQWARAEDALQALKVGEKPPTWEVTLGASVRASSGSVQEDLRSTGALGTTGNPSASSVCVAQDPEQLHLKAQVVSEIALIVQVDSEEQLPGRAPGILLQDGATGLCLPGRHMDMLTAADRLPTQAPLSTSQSVSGKNMTASQGPCALLWKGGDSPGQQEPGSPKAKAPQKSQKTLGCAGKGEAHRRPRTGEQGHRSKGPRTSEASGRSHPAQAREIGDKQERKYNQLQLEKGQTPPESHFQRKISHHPQGLHPRKGGTRWEDVLQKGKPGADAFQSWGSGPPRQFMDCMADKAWTISRVVGQILVDKLGLQWGRGPSEVNRHKGDFHAQENVPSCCHRGHCHQERSREMRALACSPKATPKGHHCPVKNRGIRDRDSSWAPPPREPVSPAGPHHHRPRMASTSGGPHPQLQELMSAQRCLAS

SEQ ID NO: 7493 - protein, 780 aa, Homo sapiens
MDEQAGPGVFFSNNHPGAGGAKGLGPLAEAAAAGDGAAAAGAARAQYSLPGILHFLQHEWARFEVERAQWEVERAELQAQIAFLQGERKGQENLKKDLVRRIKMLEYALKQERAKYHKLKYGTELNQGDMKPPSYDSDEGNETEVQPQQNSQLMWKQGRQLLRQYLQEVGYTDTILDVKSKRVRALLGFSIDVTDREDDKNQDSVVNGTEAEVKETAMIAKSELTDSASVLDNFKFLESAAADFSDEDEDDDVDGREKSVIDTSTIVRKKALPDSGEDRDTKEALKEFDFLVTSEEGDNESRSAGDGTDWEKEDQCLMPEAWNVDQGVITKLKEQYKKERKGKKGVKRPNRSKLQDMLANLRDVDELPSLQPSVGSPSRPSSSRLPEHEINRADEVEALTFPPSSGKSFIMGADEALESELGPGELAGLTVANEADSLTYDIANNKDALRKTWNPKFTLRSHFDGIRALAFHPIEPVLITASEDHTLKMWNLQKTAPAKKSTSLDVEPIYTFRAHKGPVLCVVMSSNGEQCYSGGTDGLIQGWNTTNPNIDPYDSYDPSVLRGPLLGHTDAVWGLAYSAAHQRLLSCSADGTLRLWNTTEVAPALSVFNDIKELGIPASVDLVSSDPSHMVASFSKGYTSIFNMETQQRILTLESNVDTTANSSCQINRVISHPTLSISITAHEDRHIKFYDNNTGKLIHSMVAHLEAVTSLAVDPNGLYLMSGSHDCSIRLWNLESKTCIQEFTAHRKKFEESIHDVAFHPSKCYIASAGADALAKVFV

SEQ ID NO: 7494 - protein, 851 aa, Homo sapiens [sequence omitted]

SEQ ID NO: 7495 - protein, 903 aa, Homo sapiens
MEERRPHLDARPRNSHTNHRGPVDGELPPRARNQANNPPANALRGGASHPGRHPRANNHPAAYWQREERFRAMGRNPHQGRRNQEGHASDEARDQRHDQENDTRWRNGNQDCRNRRPPWSNDNFQQWRTPHQKPTEQPQQAKKLGYKFLESLLQKDPSEVVITLATSLGLKELLSHSSMKSNFLELICQVLRKACSSKMDRQSVLHVLGILKNSKFLKVCLPAYVVGMITEPIPDIRNQYPEHISNIISLLQDLVSVFPASSVQETSMLVSLLPTSLNALRASGVDIEEETEKNLEKVQTIIEHLQEKRREGTLRVDTYTLVQPEAEDHVESYRTMPIYPTYNEVHLDERPFLRPNIISGKYDSTAIYLDTHFRLLREDFVRPLREGILELLQSFEDQGLRKRKFDDIRIYFDTRIITPMCSSSGIVYKVQFDTKPLKFVRWQNSKRLLYGSLVCMSKDNFETFLFATVSNREQEDLCRGIVQLCFNEQSQQLLAEVQPSDSFLMVETTAYFEAYRHVLEGLQEVQEEDVPFQRNIVECNSHVKEPRYLLMGGRYDFTPLIENPSATGEFLRNVEGLRHPRINVLDPGQWPSKEALKLDDSQMEALQFALTRELAIIQGPPGTGKTYVGLKIVQALLTNESVWQISLQKFPILVVCYTNHALDQFLEGIYNCQKTSIVRVGGRSNSEILKQFTLRELRNKREFRRNLPMHLRRAYMSIMTQMKESEQELHEGAKTLECTMRGVLREQYLQKYISPQHWESLMNGPVQDSEWICFQHWKHSMMLEWLGLGVGSFTQSVSPAGPENTAQAEGDEEEEGEEESSLIEIAEEADLIQADRVIEEEEVVRPQRRKKEESGADQELAKMLLAMRLDHCGTGTAAGQEQATGEWQTVPCLVLMSADPAQP

SEQ ID NO: 7496 - protein, 1918 aa, Homo sapiens
MEERRPHLDARPRNSHTNHRGPVDGELPPRARNQANNPPANALRGGASHPGRHPRANNHPAAYWQREERFRAMGRNPHQGRRNQEGHASDEARDQRHDQENDTRWRNGNQDCRNRRPPWSNDNFQQWRTPHQKPTEQPQQAKKLGYKFLESLLQKDPSEVVITLATSLGLKELLSHSSMKSNFLELICQVLRKACSSKMDRQSVLHVLGILKNSKFLKVCLPAYVVGMITEPIPDIRNQYPEHISNIISLLQDLVSVFPASSVQETSMLVSLLPTSLNALRASGVDIEEETEKNLEKVQTIIEHLQEKRREGTLRVDTYTLVQPEAEDHVESYRTMPIYPTYNEVHLDERPFLRPNIISGKYDSTAIYLDTHFRLLREDFVRPLREGILELLQSFEDQGLRKRKFDDIRIYFDTRIITPMCSSSGIVYKVQFDTKPLKFVRWQNSKRLLYGSLVCMSKDNFETFLFATVSNREQEDLCRGIVQLCFNEQSQQLLAEVQPSDSFLMVETTAYFEAYRHVLEGLQEVQEEDVPFQRNIVECNSHVKEPRYLLMGGRYDFTPLIENPSATGEFLRNVEGLRHPRINVLDPGQWPSKEALKLDDSQMEALQFALTRELAIIQGPPGTGKTYVGLKIVQALLTNESVWQISLQKFPILVVCYTNHALDQFLEGIYNCQKTSIVRVGGRSNSEILKQFTLRELRNKREFRRNLPMHLRRAYMSIMTQMKESEQELHEGAKTLECTMRGVLREQYLQKYISPQHWESLMNGPVQDSEWICFQHWKHSMMLEWLGLGVGSFTQSVSPAGPENTAQAEGDEEEEGEEESSLIEIAEEADLIQADRVIEEEEVVRPQRRKKEESGADQELAKMLLAMRLDHCGTGTAAGQEQATGEWQTQRNQKKKMKKRVKDELRKLNTMTAAEANEIEDVWQLDLSSRWQLYRLWLQLYQADTRRKILSYERQYRTSAERMAELRLQEDLHILKDAQVVGMTTTGAAKYRQILQKVEPRIVIVEEAAEVLEAHTIATLSKACQHLILIGDHQQLRPSANVYDLAKNFNLEVSLFERLVKVNIPFVRLNYQHRMCPEIARLLTPHIYQDLENHPSVLKYEKIKGVSSNLFFVEHNFPEQEIQEGKSHQNQHEAHFVVELCKYFLCQEYLPSQITILTTYTGQLFCLRKLMPAKTFAGVRVHVVDKYQGEENDIILLSLVRSNQEGKVGFLQISNRICVALSRAKKGMYCIGNMQMLAKVPLWSKIIHTLRENNQIGPMLRLCCQNHPETHTLVSKASDFQKVPEGGCSLPCEFRLGCGHVCTRACHPYDSSHKEFQCMKPCQKVICQEGHRCPLVCFQECQPCQVKVPKTIPRCGHEQMVPCSVPESDFCCQEPCSKSLRCGHRCSHPCGEDCVQLCSEMVTIKLKCGHSQPVKCGHVEGLLYGGLLVKCTTKCGTILDCGHPCPGSCHSCFEGRFHERCQQPCKRLLICSHKCQEPCIGECPPCQRTCQNRCVHSQCKKKCGELCSPCVEPCVWRCQHYQCTKLCSEPCNRPPCYVPCTKLLVCGHPCIGLCGEPCPKKCRICHMDEVTQIFFGFEDEPDARFVQLEDCSHIFEVQALDRYMNEQKDDEVAIRLKVCPICQVPIRKNLRYGTSIKQRLEEIEIIKEKIQGSAGEIATSQERLKALLERKSLLHQLLPEDFLMLKEKLAQKNLSVKDLGLVENYISFYDHLASLWDSLKKMHVLEEKRVRTRLEQVHEWLAKKRLSFTSQELSDLRSEIQRLTYLVNLLTRYKIAEKKVKDSIAVEVYSVQNILEKTCKFTQEDEQLVQEKMEALKATLPCSGLGISEEERVQIVSAIGYPRGHWFKCRNGHIYVIGDCGGAMERGTCPDCKEVIGGTNHTLERSNQLASEMDGAQHAAWSDTANNLMNFEEIQGMM

SEQ ID NO: 7497 - protein, 611 aa, Homo sapiens
MPNQGEDCYFFFYSTCTKGDSCPFRHCEAAIGNETVCTLWQEGRCFRQVCRFRHMEIDKKRSEIPCYWENQPTGCQKLNCAFHHNRGRYVDGLFLPPSKTVLPTVPESPEEEVKASQLSVQQNKLSVQSNPSPQLRSVMKVESSENVPSPTHPPVVINAADDDEDDDDQFSEEGDETKTPTLQPTPEVHNGLRVTSVRKPAVNIKQGECLNFGIKTLEEIKSKKMKEKSKKQGEGSSGVSSLLLHPEPVPGPEKENVRTVVRTVTLSTKQGEEPLVRLSLTERLGKRKFSAGGDSDPPLKRSLAQRLGKKVEAPETNIDKTPKKAQVSKSLKERLGMSADPDNEDATDKVNKVGEIHVKTLEEILLERASQKRGELQTKLKTEGPSKTDDSTSGARSSSTIRIKTFSEVLAEKKHRQQEAERQKSKKDTTCIKLKIDSEIKKTVVLPPIVASRGQSEEPAGKTKSMQEVHIKTLEEIKLEKALRVQQSSESSTSSPSQHEATPGARRLLRITKRTGMKEEKNLQEGNEVDSQSSIRTEAKEASGETTGVDITKIQVKRCETMREKHMQKQPGNGKKKKKKKKKKKKKKKKKKKKKKKKKKKKKKKKKKKKK

SEQ ID NO: 7498 - protein, 818 aa, Homo sapiens
MPNQGEDCYFFFYSTCTKGDSCPFRHCEAAIGNETVCTLWQEGRCFRQVCRFRHMEIDKKRSEIPCYWENQPTGCQKLNCAFHHNRGRYVDGLFLPPSKTVLPTVPESPEEEVKASQLSVQQNKLSVQSNPSPQLRSVMKVESSENVPSPTHPPVVINAADDDEDDDDQFSEEGDETKTPTLQPTPEVHNGLRVTSVRKPAVNIKQGECLNFGIKTLEEIKSKKMKEKSKKQGEGSSGVSSLLLHPEPVPGPEKENVRTVVRTVTLSTKQGEEPLVRLSLTERLGKRKFSAGGDSDPPLKRSLAQRLGKKVEAPETNIDKTPKKAQVSKSLKERLGMSADPDNEDATDKVNKVGEIHVKTLEEILLERASQKRGELQTKLKTEGPSKTDDSTSGARSSSTIRIKTFSEVLAEKKHRQQEAERQKSKKDTTCIKLKIDSEIKKTVVLPPIVASRGQSEEPAGKTKSMQEVHIKTLEEIKLEKALRVQQSSESSTSSPSQHEATPGARRLLRITKRTGMKEEKNLQEGNEVDSQSSIRTEAKEASGETTGVDITKIQVKRCETMREKHMQKQQEREKSVLTPLRGDVASCNTQVAEKPVLTAVPGITRHLTKRLPTKSSQKVEVETSGIGDSLLNVKCAAQTLEKRGKGKYFLPFVAKPKVNVKPSVVKVVSSPKLAPKRKAVEMHAAVIAAVKPLSSSSVLQEPPAKKAAVAVVPLVSEDKSVTVPEAENPRDSLVLPPTQSSSDSSPPEVSGPSSSQMSMKTRRLSSASTGKPPLSVEDDFEKLIWEISGGKLEAEIDLDPGKDEDDLLLELSEMIDS

SEQ ID NO: 7499 - protein, 180 aa, Homo sapiens
MEIAPQEAPPVPGADGDIEEAPAEAGSPSPASPPADGRLKAAAKRVTFPSDEDIVSGAVEPKDPWRHAQNVTVDEVIGAYKQACQKLNCRQIPKLLRQLQEFTDLGHRLDCLDLKGEKLDYKTCEALEEVFKRLQFKVVDLEQTNLDEDGASALFDMIEYYESATHLNISFNKHIGTRGW

SEQ ID NO: 7500 - protein, 1412 aa, Homo sapiens
MMRGVEGPQGSPRPPAPIQQLNRSSSERDGPPVENEMFFCQHCDYGNRTVKGVLIHYQKKHRDFKANADVIRQHTATIRSLCDRNQKKPASCVLVSPSNLERDKTKLRALKCRQCSYTSPYFYALRKHIKKDHPALKATVTSIMRWAFLDGLIEAGYHCEWCIYSHTEPNGLLLHYQRRHPEHYVDYTYMATKLWAGPDPSPPSLTMPAEAKTYRCRDCVFEAVSIWDITNHYQAFHPWAMNGDESVLLDIIKEKDAVEKPILSSEELAGPVNCENSIPTPFPEQEAECPEDARLSPEKSLQLASANPAISSTPYQCTVCQSEYNNLHGLLTHYGKKHPGMKVKAADFAQDIDINPGAVYKCRHCPYINTRIHGVLTHYQKRHPSIKVTAEDFVHDVEQSADISQNDVEETSRIFKQGYGAYRCKLCPYTHGTLEKLKIHYEKYHNQPEFDVFSQSPPKLPVPLEPEMTTEVSPSQVSITEEEVGEEPVSTSHFSTSHLVSHTVFRCQLCKYFCSTRKGIARHYRIKHNNVRAQPEGKNNLFKCALCAYTNPIRKGLAAHYQKRHDIDAYYTHCLAASRTISDKPNKVIIPSPPKDDSPQLSEELRRAVEKKKCSLCSFQSFSKKGIVSHYMKRHPGVFPKKQHASKLGGYFTAVYADEHEKPTLMEEEERGNFEKAEVEGEAQEIEWLPFRCIKCFKLSFSTAELLCMHYTDHHSRDLKRDFIILGNGPRLQNSTYQCKHCDSKLQSTAELTSHLNIHNEEFQKRAKRQERRKQLLSKQKYADGAFADFKQERPFGHLEEVPKIKERKVVGYKCKFCVEVHPTLRAICNHLRKHVQYGNVPAVSAAVKQEADDPAHLFLDGLEAAKDASGALVGRVDGEHCLLDGMLEDETRPGGYHCSQCDRVLMSMQGLRSHERSHLALAMFTREDKYSCQYCSFVSAFRHNLDRHMQTHHGHHKPFRCKLCSFKSSYNSRLKTHILKAHAGEHAYKCSWCSFSTMTISQLKEHSLKVHGKALTLPRPRIVSLLSSHSHHSSQKATPAEEVEDSNDSSYSEPPDVQQQLNHYQSAALARNNSRVSPVPLSGAAAGTEQKTEAVLHCEFCEFSSGYIQSIRRHYRDKHGGKKLFKCKDCSFYTGFKSAFTMHVEAGHSAVPEEGPKDLRCPLCLYHTKYKRNMIDHIVLHREERVVPIEVCRSKLSKYLQGVVFRCDKCTFTCSSDESLQQHIEKHNELKPYKCQLCYYETKHTEELDSHLRDEHKVSRNFELVGRVNLDQLEQMKEKMESSSSDDEDKEEEMNSKAEDRELMRFSDHGAALNTEKRFPCEFCGRAFSQGSEWERHVLRHGMALNDTKQVSREEIHPKEIMENSVKMPSIEEKEDDEAIGIDFSLKNETVAICVVTADKSLLENAEAKKE

SEQ ID NO: 7501 - protein, 853 aa, Homo sapiens
MSEKVDWLQSQNGVCKVDVYSPGDNQAQDWKMDTSTDPVRVLSWLRRDLEKSTAEFQDVRFKPGESFGGETSNSGDPHKGFSVDYYNTTTKGTPERLHFEMTHKEIPCQGPRAQLGNGSSVDEVSFYANRLTNLVIAMARKEINEKIDGSENKCVYQSLYMGNEPTPTKSLSKIASELVNETVSACSRNAAPDKAPGSGDRVSGSSQSPPNLKYKSTLKIKESTKERQGPDDKPPSKKSFFYKEVFESRNGDYAREGGRFFPRERKRFRGQERPDDFTASVSEGIMTYANSVVSDMMVSIMKTLKIQVKDTTIATILLKKVLLKHAKEVVSDLIDSFLRNLHSVTGTLMTDTQFVSAVKRTVFSHGSQKATDIMDAMLRKLYNVMFAKKVPEHVRKAQDKAESYSLISMKGMGDPKNRNVNFAMKSETKLREKMYSEPKSEEETCAKTLGEHIIKEGLTLWHKSQQKECKSLGFQHAAFEAPNTQRKPASDISFEYPEDIGNLSLPPYPPEKPENFMYDSDSWAKDLIVSALLLIQYHLAQGGRRDARSFVEAAGTTNFPANEPPVAPDESCLKSAPIVGDQEQAEKKDLRSVFFNFIRNLLSETIFKRDQSPEPKVPEQPVKEDRKLCERPLASSPPRLYEDDETPGALSGLTKMAVSQIDGHMSGQMVEHLMNSVMKLCVIIAKSCDASLAELGDDKSGDASRLTSAFPDSLYECLPAKGTGSAEAVLQNAYQAIHNEMRGTSGQPPEGCAAPTVIVSNHNLTDTVQNKQLQAVLQWVAASELNVPILYFAGDDEGIQEKLLQLSAAAVDKGCSVGEVLQSVLRYEKERQLNEAVGNVTPLQLLDWLMVNL

SEQ ID NO: 7502 - protein, 336 aa, Homo sapiens
MDCVGWPPGRKWHLEKNTSCGGSSGICASYVTQMADDQGCIEEQGVEDSANEDSVDAKPDRSSFVPSLFSKKKKNVTMRSIKTTRDRVPTYQYNMNFEKLGKCIIINNKNFDKVTGMGVRNGTDKDAEALFKCFRSLGFDVIVYNDCSCAKMQDLLKKASEEDHTNAACFACILLSHGEENVIYGKDGVTPIKDLTAHFRGDRCKTLLEKPKLFFIQACRGTELDDGIQADSGPINDTDANPRYKIPVEADFLFAYSTVPGYYSWRSPGRGSWFVQALCSILEEHGKDLEIMQILTRVNDRVARHFESQSDDPHFHEKKQIPCVVSMLTKELYFSQ

SEQ ID NO: 7503 - protein, 303 aa, Homo sapiens
MADDQGCIEEQGVEDSANEDSVDAKPDRSSFVPSLFSKKKKNVTMRSIKTTRDRVPTYQYNMNFEKLGKCIIINNKNFDKVTGMGVRNGTDKDAEALFKCFRSLGFDVIVYNDCSCAKMQDLLKKASEEDHTNAACFACILLSHGEENVIYGKDGVTPIKDLTAHFRGDRCKTLLEKPKLFFIQACRGTELDDGIQADSGPINDTDANPRYKIPVEADFLFAYSTVPGYYSWRSPGRGSWFVQALCSILEEHGKDLEIMQILTRVNDRVARHFESQSDDPHFHEKKQIPCVVSMLTKELYFSQ

SEQ ID NO: 7504 - protein, 1586 aa, Homo sapiens
MSTPTDPGAMPHPGPSPGPGPSPGPILGPSPGPGPSPGSVHSMMGPSPGPPSVSHPMPTMGSTDFPQEGMHQMHKPIDGIHDKGIVEDIHCGSMKGTGMRPPHPGMGPPQSPMDQHSQGYMSPHPSPLGAPEHVSSPMSGGGPTPPQMPPSQPGALIPGDPQAMSQPNRGPSPFSPVQLHQLRAQILAYKMLARGQPLPETLQLAVQGKRTLPGLQQQQQQQQQQQQQQQQQQQQQQQPPQPQTQQQQQPALVNYNRPSGPGPELSGPSTPQKLPVPAPGGRPSPAPPAAAQPPAAAVPGPSVPQPAPGQPSPVLQLQQKQSRISPIQKPQGLDPVEILQEREYRLQARIAHRIQELENLPGSLPPDLRTKATVELKALRLLNFQRQLRQEVVACMRRDTTLETALNSKAYKRSKRQTLREARMTEKLEKQQKIEQERKRRQKHQEYLNSILQHAKDFKEYHRSVAGKIQKLSKAVATWHANTEREQKKETERIEKERMRRLMAEDEEGYRKLIDQKKDRRLAYLLQQTDEYVANLTNLVWEHKQAQAAKEKKKRRRRKKKAEENAEGGESALGPDGEPIDESSQMSDLPVKVTHTETGKVLFGPEAPKASQLDAWLEMNPGYEVAPRSDSEESDSDYEEEDEEEESSRQETEEKILLDPNSEEVSEKDAKQIIETAKQDVDDEYSMQYSARGSQSYYTVAHAISEWVEKQSALLINGTLKHYQLQGLEWMVSLYNNNLNGILADEMGLGKTIQTIALITYLMEHKRLNGPYLIIVPLSTLSNWTYEFDKWAPSVVKISYKGTPAMRRSLVPQLRSGKFNVLLTTYEYIIKDKHILAKIRWKYMIVDEGHRMKNHHCKLTQVLNTHYVAPRRILLTGTPLQNKLPELWALLNFLLPTIFKSCSTFEQWFNAPFAMTGERVDLNEEETILIIRRLHKVLRPFLLRRLKKEVESQLPEKVEYVIKCDMSALQKILYRHMQAKGILLTDGSEKDKKGKGGAKTLMNTIMQLRKICNHPYMFQHIEESFAEHLGYSNGVINGAELYRASGKFELLDRILPKLRATNHRVLLFCQMTSLMTIMEDYFAFRNFLYLRLDGTTKSEDRAALLKKFNEPGSQYFIFLLSTRAGGLGLNLQAADTVVIFDSDWNPHQDLQAQDRAHRIGQQNEVRVLRLCTVNSVEEKILAAAKYKLNVDQKVIQAGMFDQKSSSHERRAFLQAILEHEEENEEEDEVPDDETLNQMIARREEEFDLFMRMDMDRRREDARNPKRKPRLMEEDELPSWIIKDDAEVERLTCEEEEEKIFGRGSRQRRDVDYSDALTEKQWLRAIEDGNLEEMEEEVRLKKRKRRRNVDKDPAKEDVEKAKKRRGRPPAEKLSPNPPKLTKQMNAIIDTCINYKDSCNVEKVPSNSQLEIEGNSSGRQLSEVFIQLPSRKELPEYYELIRKPVDFKKIKERIRNHKYRSLGDLEKDVMLLCHNAQTFNLEGSQIYEDSIVLQSVFKSARQKIAKEEESEDESNEEEEEEDEEESESEAKSVKVKIKLNKKDDKGRDKGKGKKRPNRGKAKPVVSDFDSDEEQDEREQSEGSGTDDE

SEQ ID NO: 7505 - protein, 1023 aa, Homo sapiens
  VARIANT 311, 970: Xaa = Any Amino Acid
MAGPVSLRDLLMGASAWMGSESPGGSPTEGGGSAAGGPEPPWREDEICVVGIFGKTALRLNSEKFSLVNTVCDRQVFPLFRHQDPGDPGPGIRTEAGAVGEAGGAEDPGAAAGGSVRGSGAVAEGNRTEAGSQDYSLLQAYYSQESKVLYLLLTSICDNSQLLRACRALQSGEAGGGLSLPHAEAHEFWKHQEKLQCLSLLYLFSVCHILLLVHPTCSFDITYDRVFRALDGLRQKVLPLLKTAIKDCPVGKDWKLNCRPCPPRLLFLFQLNGALKVEPPRNQDPAHPDKPKKHSPKRRLQHALEDQIYRXFRKSRVLTNQSINCLFTVPANQAFVYIVPGSQEEDPVGMLLDQLRSHCTVKDPESLLVPAPLSGPRRYQVMRQHSRQQLSFHIDSSSSSSSGQLVDFTLREFLWQHVELVLSKKGFDDSVGRNPQPSHFELPTYQKWISAASKLYEVAIDGKEEDLGSPTGELTSKILSSIKVLEGLLDFDPKFSENRCQKALPMAHSAYQSNLPHNYPMPVHKNQLAQARRVYSQHARGPAFHKYAMQLHEDCYKFWSNGHQLCEERSLTDQHCVHKFHSLPKSGEKPEADRNPPVLYHNSRARSTGACNCGRKQAPRDDPFDIKAANYDFYQLLEEKCCGKLDHINFPVFEPSTPDPAPAKNESSPAPPDSDADKLKEKEPQTQGESTSLSLALSLGQSTDSLGTYPADPQAGGDNPEVHGQVEVKTEKRPNFVDRQASTVEYLPGMLHSNCPKGLLPKFSSWSLVKLGPAKSYNFHTGLDQQGFIPGTNYLMPWDIVIRTRAEDEGDLDTNSWPAPNKAIPGKRSAVVMGRGRRRDDIARAFVGFEYEDSRGRRFMCSGPDKVMKVMGSGPKESALKALNSDMPLYILSSSQGRGLKPHYAQLMRLFVVVPDAPLQIILMPQVQPGPPPCPVFYPEKQEITLPPDGLWVLRFPYAYGLREDLVSPXGKKQEIPLPPDGLWVLRFPYAYVTERGPCFPPKENVQLMSYKVLRGVLKAVTQ

SEQ ID NO: 7506 - protein, 991 aa, Homo sapiens
MAGPVSLRDLLMGASAWMGSESPGGSPTEGGGSAAGGPEPPWREDEICVVGIFGKTALRLNSEKFSLVNTVCDRQVFPLFRHQDPGDPGPGIRTEAGAVGEAGGAEDPGAAAGGSVRGSGAVAEGNRTEAGSQDYSLLQAYYSQESKVLYLLLTSICDNSQLLRACRALQSGEAGGGLSLPHAEAHEFWKHQEKLQCLSLLYLFSVCHILLLVHPTCSFDITYDRVFRALDGLRQKVLPLLKTAIKDCPVGKDWKLNCRPCPPRLLFLFQLNGALKVEPPRNQDPAHPDKPKKHSPKRRLQHALEDQIYRIFRKSRVLTNQSINCLFTVPANQAFVYIVPGSQEEDPVGMLLDQLRSHCTVKDPESLLVPAPLSGPRRYQVMRQHSRQQLSFHIDSSSSSSSGQLVDFTLREFLWQHVELVLSKKGFDDSVGRNPQPSHFELPTYQKWISAASKLYEVAIDGKEEDLGSPTGELTSKILSSIKVLEGFLDIDTKFSENRCQKALPMAHSAYQSNLPHNYTMTVHKNQLAQALRVYSQHARGPAFHKYAMQLHEDCYKFWSNGHQLCEERSLTDQHCVHKFHSLPKSGEKPEADRNPPVLYHNSRARSTGACNCGRKQAPRDDPFDIKAANYDFYQLLEEKCCGKLDHINFPVFEPSTPDPAPAKNESSPAPPDSDADKLKEKEPQTQGESTSLSLALSLGQSTDSLGTYPADPQAGGDNPEVHGQVEVKTEKRPNFVDRQASTVEYLPGMLHSNCPKGLLPKFSSWSLVKLGPAKSYNFHTGLDQQGFIPGTNYLMPWDIVIRTRAEDEGDLDTNSWPAPNKAIPGKRSAVVMGRGRRRDDIARAFVGFEYEDSRGRRFMCSGPDKVMKVMGSGPKESALKALNSDMPLYILSSSQGRGLKPHYAQLMRLFVVVPDAPLQIILMPQVQPGPPPCPVFYPEKQEITLPPDGLWVLRFPYAYVTERGPCFPPKENVQLMSYKVLRGVLKAVTQ

SEQ ID NO: 7507 - protein, 478 aa, Homo sapiens
MKMSIRTPPRLLELAGRSLLRDQALAMSTLEELPTELFPPLFMEAFSRRRCEALKLMVQAWPFRRLPLRPLIKMPCLEAFQAVLDGLDALLTQGVRPRRWKLQVLDLQDVCENFWMVWSEAMAHGCFLNAKRNKKPVQDCPRMRGRQPLTVFVELWLKNRTLDEYLTYLLLWVKQRKDLLHLCCKKLKILGMPFRNIRSILKMVNLDCIQEVEVNCKWVLPILTQFTPYLGHMRNLQKLVLSHMDVSRYVSPEQKKEIVTQFTTQFLKLRCLQKLYMNSVSFLEGHLDQLLSCLKTSLKVLTITNCVLLESDLKHLSQCPSISQLKTLDLSGIRLTNYSLVPLQILLEKVAATLEYLDLDDCGIIDSQVNAILPALSRCFELNTFSFCGNPICMATLENLLSHTIILKNLCVELYPAPRESYGADGTLCWSRFAQIRAELMNRVRDLRHPKRILFCTDYCPDCGNRSFYDLEADQYCC

SEQ ID NO: 7508 - protein, 500 aa, Homo sapiens
PAWFFLRSEHLLDYIQICFPCRFMKMSIWTPPRLLELAGRSLLRDQALAMSTLEELPTELFPPLFMEAFSRRRCEALKLMVQSWPFRRLPLRPLIKMPCLEAFQAVLDGLDALLNLGVRPRRWKLQVLDLQDVCENFWMVWSEAMAHGCFLNAKRNKKPVEDCPRMRGRQPLTVFVELWLKNRTLDEYLTCLLLWVKQRKDLLHLCCKKLKILGMPFRNIRSILKMVNLDCIQEVEVNCKWVLPILTQFTPYLGHMRNLQKLILSHMDVSRYVSPEQKKEIVTQFTTQFLKLRCLQKLYMNSVSFLEGHLDQLLSCLKTSLKFLTITNCVLLESDLKHLSQCPSISQLKTLDLSGIRLTNYSLVPLQILLEKVAATLEYLDLDDCGIIDSQVNAILPALSRCFELNTFSFCGNPICMATLENLLSHTIILKNLCVELYPAPRESYGADGTLCWSRFAQIRAELMNRVRDLRHPKRILFCTDYCPDCGNRSFYDLEADQYC

SEQ ID NO: 7509 - protein, 434 aa, Homo sapiens [sequence omitted]

SEQ ID NO: 7510 - protein, 638 aa, Homo sapiens
MAGSISVEISKISAWKNPDADFERFSRAAARGRPALPNPEGRAREPCPNRTAASWGFHCEDGASSPQHPPRRGRSFGTPGDTWGRVHCEDRETLRDTWGRRGESEKKAFCPRSPTPEGPGLGTPGDTWGRVRCEDRETLLQLRDTWGRRGKAQGQDAGYECEFVSGERPWYRERRRNAETPSGGGDVGDWQAPQPEFWEVISDEHAIDSAGTYHGDSHLQLERINVHHHEASGATPVLPPPNVHHHEASGGRYVPRAVLVDLEPGTMDSVRSGPFGQVLRPDNFIFGQCGAGNNWAKGRYTEGAELTESVMDVVRKEAESCDCLQGFQLTHSLGGGTGSGMVTLLISKIREEYPDRIINTFSILPSPKVSDTVVEPYNATLSVHQLIENADETFCIDNEALYDICSKTLKLPTPTYGDLNHLVSATMSGVTTCLRFPGQLNADLRKLAVNMVPFPRLHFFMPGFAPLTSRGSQQYRALTVAELTQQMFDAKNMRAARDPRHGRYLTAAAIFQGRMPMREVDEQMFNIQDKNSSYFADWFPDNVKTAICDIPPRGLKMSASFIGNNAAIQELFTCVSEQFTAMFRRKAFLHWYTGEGMDEMEFTEAESNMNDLVSEYQQYQDATAKEEEDEEYAEEEVA

SEQ ID NO: 7511 - protein, 217 aa, Homo sapiens
MAGRTVRAETRSRAKDDIKKVMATIEKVRRWEKRWVTVGDTSLRIFKWVPVVDPQEEERRRAGGGAERSRGRERRGRGASPRGGGPLILLDLNDENSNQSFHSEGSLPKGTEPSPGGTPQPSRPVSPAGPPEGVPEEAQPPRLGQERDPGGITAGSTDEPPMLTKEEPVPELLEAEAPEAYPVFEPVPPVPEAAQGDTEDSGGAPPLKRICPNAPDP

SEQ ID NO: 7512 - protein, 607 aa, Homo sapiens
MAFRRQVKNFVKNYSDAEIKVREATSNDPWGPSSSLMLDISDLTFNTISLSEIMNMLWHRLNDHGKNWRHVYKSLTLMDYLIKNGSKKVIQHCREGFCNLQTLKDFQHIDEAGKDQGYYIREKSKQVITLLMDEPLLCKEREVACRTRQRTSHSILFSKRQLGSSNSLTACTSAPTPDISASEKKYKLPKFGRLHNKRNVCKAGLKQEHCQDVHLPTETMLSQETLPLKIHGWKSTEDLMTFLDDDPELPLLATPPSIVSPITCLSEAEEVCNLSGADAVPTLSENSPSGQRDVSLDKRSDGIFTNTVTENLLETPLEKQSAAEGLKTLTILPACWSSKEEFISPDLRVSKSDSTFHNQASVETLCLSPSFKIFDRVKEIVINKAYQKPAQSSIQMDDKILKTTTRVSTASEGASSFSPLSMSSPDLASPEKSAHLLSPILAGPSFWTLSHQQLSSTSFKDEDKTAKLHHSFASRGPVSSDVEENDSLNLLGILPNNSDSAKKNISHISSSHWGEFSTQNVDQFIPLSCSGFQSTKDFPQEPEAKNSISVLLREVKRAIARLHEDLSTVIQELNVINNILMSMSLNSSQISQSSQVPQSSEGSSDQI

SEQ ID NO: 7513 - protein, 329 aa, Homo sapiens
MADGGSPFLGRRDFVYPSSTRDPSASNGGGSPARREEKKRKAARLKFDFQAQSPKELTLQKGDIVYIHKEVDKNWLEGEHHGRLGIFPANYVEVLPADEIPKPIKPPTYQVLEYGEAVAQYTFKGDLEVELSFRKGEHICLIRKVNENWYEGRITGTGRQGIFPASYVQVSREPRLRLCDDGPQLPTSPRLTAAARSARHPSSPSALRSPADPTDLGGQTSPRRTGFSFPTQEPRPQTQNLGTPGPALSHSRGPSHPLDLGTSSPNTSQIHWTPYRAMYQYRPQNEDELELREGDRVDVMQQCDDGWFVGVSRRTQKFGTFPGNYVAPV

SEQ ID NO: 7514 - protein, 671 aa, Homo sapiens
MQGPPRSLRAGLSLDDFIPGHLQSHIGSSSRGTRVPVIRNGGSNTLNFQFHDPAPRTVCNGGYTPRRDASQHPDPAWYQTWPGPGSKPSASTKIPASQHTQNWSATWTKDSKRRDKRWVKYEGIGPVDESGMPIAPRSSVDRPRDWYRRMFQQIHRKMPDLQLDWTFEEPPRDPRHLGAQQRPAHRPGPATSSSGRSWDHSEELPRSTFNYRPGAFSTVLQPSNQVLRRREKVDNVWTEESWNQFLQELETGQRPKKPLVDDPGEKPSQPIEVLLERELAELSAELDKDLRAIETRLPSPKSSPAPRRAPEQRPPAGPASAWSSSYPHAPYLGSARSLSPHKMADGGSPFLGRRDFVYPSSTRDPSASNGGGSPARREEKKRKAARLKFDFQAQSPKELTLQKGDIVYIHKEVDKNWLEGEHHGRLGIFPANYVEVLPADEIPKPIKPPTYQVLEYGEAVAQYTFKGDLEVELSFRKGEHICLIRKVNENWYEGRITGTGRQGIFPASYVQVSREPRLRLCDDGPQLPTSPRLTAAARSARHPSSPSALRSPADPTDLGGQTSPRRTGFSFPTQEPRPQTQNLGTPGPALSHSRGPSHPLDLGTSSPNTSQIHWTPYRAMYQYRPQNEDELELREGDRVDVMQQCDDGWFVGVSRRTQKFGTFPGNYVAPV

SEQ ID NO: 7515 - protein, 390 aa, Homo sapiens
MVEADRPGKLFIGGLNTETNEKALETVFGKYGRIVEVLLIKDRETNKSRGFAFVTFESPADAKDAARDMNGKSLDGKAIKVEQATKPSFERGRHGPPPPPRSRGPPRGFGAGRGGSGGTRGPPSRGGHMDDGGYSMNFNMSSSRGPLPVKRGPPPRSGGPSPKRSAPSGLVRSSSGMGGRAPLSRGRDSYGGPPRREPLPSRRDVYLSPRDDGYSTKDSYSSRDYPSSRDTRDYAPPPRDYTYRDYGHSSSRDDYPSRGYGDRDGYGRDRDYSDHPSGGSYRDSYESYGNSRSAPLTRGPPPSYGGSSRYDDYSSSRDGYGGSRDSYSSSRSDLYSSCDRVGRQERGLPPSVERGYPSSRDSYSSSSRGAPRGAGPGGSRSDRGGGRSRY

SEQ ID NO: 7516 - protein, 391 aa, Homo sapiens
MVEADRPGKLFIGGLNTETNEKALEAVFGKYGRIVEVLLMKDRETNKSRGFAFVTFESPADAKDAARDMNGKSLDGKAIKVEQATKPSFESGRRGPPPPPRSRGPPRGLRGGRGGSGGTRGPPSRGGHMDDGGYSMNFNMSSSRGPLPVKRGPPPRSGGPPPKRSAPSGPVRSSSGMGGRAPVSRGRDSYGGPPRREPLPSRRDVYLSPRDDGYSTKDSYSSRDYPSSRDTRDYAPPPRDYTYRDYGHSSSRDDYPSRGYSDRDGYGRDRDYSDHPSGGSYRDSYESYGNSRSAPPTRGPPPSYGGSSRYDDYSSSRDGYGGSRDSYSSSRSDLYSSGRDRVGRQERGLPPSMERGYPPPRDSYSSSSRGAPRGGGRGGSRSDRGGGRSRY

SEQ ID NO: 7517 - protein, 1097 aa, Homo sapiens [sequence omitted]

SEQ ID NO: 7518 - protein, 1051 aa, Homo sapiens
MGWRPGRDAPHFPPAARPPPLPPRGASSRRGFLSPPPTPRGSPRPPTAGPGCPIPLASRALQRGPSPGPLSPSLLSNSPSGRCHHVEASAATTALPAPAAAPHATCRGPSAPRGHSPPNGGLPGPLATSAAPPGPPAAASPCLGPVAAAGSGLRRGAEGILAPQPPPPQQHQERPGAAAIGSARGQSTGKGPPQSPVFEGVYNNSRMLHFLTAVVGSTCDVKVKNGTTYEGIFKTLSSKFELAVDAVHRKASEPAGGPRREDIVDTMVFKPSDVMLVHFRNVDFNYATKDKFTDSAIAMNSKVNGEHKEKVLQRWEGGDSNSDDYDLESDMSNGWDPNEMFKFNEENYGVKTTYDSSLSSYTVPLEKDNSEEFRQRELRAAQLAREIESSPQYRLRIAMENDDGRTEEEKHSAVQRQGSGRESPSLASREGKYIPLPQRVREGPRGGVRCSSSRGGRPGLSSLPPRGPHHLDNSSPGPGSEARGINGGPSRMSPKAQRPLRGAKTLSSPSNRLLENFCSTSSCSGPDVSPRSPKSAAPAPISASCPEPPIGSAVPTSSASIPVTSSVSDPGVGSISPASPKISLAPTDVKELSTKEPGRTLEPQELARIAGKVPGLQNEQKRFQLEELRKFGAQFKLQPSSSPENSLDPFPPRILKEEPKGKEKEVDGLLTSEPMGSPVSSKTESVSDKEDKPPLAPSGGTEGPEQPPPPCPSQTGSPPVGLIKGEDKDEGPVAEQVKKSTLNPNAKEFNPTKPLLSVNKSTSTPTSPGPRTHSTPSIPVLTAGQSGLYSPQYISYIPQIHMGPAVQAPQMYPYPVSNSVPGQQGKYRGAKGSLPPQRSDQHQPASAPPMMQAAAAAGPPLVAATPYSSYIPYNPQQFPGQPAMMQPMAHYPSQPVFAPMLQSNPRMLTSGSHPQAIVSSSTPQYPSAEQPTPQALYATVHQSYPHHATQLHAHQPQPATTPTGSQPQSQHAAPSPVQVPAMGGAEWSWCRNGWPEEGIELGVISEWRGLGASELLACVALNLPLPSSIRRGRPHTWAVDSHSRICTTQGP

SEQ ID NO: 7519 - protein, 1044 aa, Homo sapiens [sequence omitted]

SEQ ID NO: 7520 - protein, 1075 aa, Homo sapiens [sequence omitted]

SEQ ID NO: 7521 - protein, 1062 aa, Homo sapiens [sequence omitted]

SEQ ID NO: 7522 - protein, 1044 aa, Homo sapiens [sequence omitted]

SEQ ID NO: 7523 - protein, 210 aa, Homo sapiens
KEPEQLRKLFIGGLSFETTDDSLREHFEKWGTLTDCVVMRDPQTKRSRGFGFVTYSCVEEVDAAMCARPHKVDGRVVEPKRAVSREDSVKPGAHLTVKKIFVGGIKEDTEEYNLRDYFEKYGKIETIEVMEDRQSGKKRGFAFVTFDDHDTVDKIVVQKYHTINGHNCEVKKALSKQEMQSAGSQRGNYGGGGNYNDFGNYSGQQQSNYG

SEQ ID NO: 7524 - protein, 1019 aa, Homo sapiens
MSALCDPPGAPGPPGPAPATHGPAPLSAQELSQEIKAFLTGVDPILGHQLSAREHARCGLLLLRSLPPARAAVLDHLRGVFDESVRAHLAALDETPVAGPPHLRPPPPSHVPAGGPGLEDVVQEVQQVLSEFIRANPKAWAPVISAWSIDLMGQLSSTYSGQHQRVPHATGALNELLQLWMGCRATRTLMDIYVQCLSALIGSCPDACVDALLDTSVQHSPHFDWVVAHIGSSFPGTIISRVLSCGLKDFCVHGGAGGGAGSSGGSSSQTPSTDPFPGSPAIPAEKRVPKIASVVGILGHLASRHGDSIRRELLRMFHDSLAGGSGGRSGDPSLQATVPFLLQLAVMSPALLGTVSGELVDCLKPPAVLSQLQQHLQGFPREELDNMLNLAVHLVSQASGAGAYRLLQFLVDTAMPASVITTQGLAVPDTVREACDRLIQLLLLHLQKLVHHRGGSPGEGVLGPPPPPRLVPFLDALKNHVGELCGETLRLERKRFLWQHQLLGLLSVYTRPSCGPEALGHLLSRARSPEELSLATQLYAGLVVSLSGLLPLAFRSCLARVHAGTLQPPFTARFLRNLALLVGWEQQGGEGPAALGAHFGESASAHLSDLAPLLLHPEEEVAEAAASLLAICPFPSEALSPSQLLGLVRAGVHRFFASLRLHGPPGVASACQLLTRLSQTSPAGLKAVLQLLVEGALHRGNTELFGGQVDGDNETLSVVSASLASASLLDTNRRHTAAVPGPGGIWSVFHAGVIGRGLKPPKFVQSRNQQEVIYNTQSLLSLLVHCCSAPGGTECGECWGAPILSPEAAKAVAVTLVESVCPDAAGAELAWPPEEHARATVERDLRIGRRFREQPLLFELLKLVAAAPPALCYCSVLLRGLLAALLGHWEASRHPDTTHSPWHLEASCTLVAVMAEGSLLPPALGNMHEVFSQLAPFEVRLLLLSVWGFLREHGPLPQKFIFQSERGRFIRDFSREGGGEGGPHLAVLHSVLHRNIDRLGLFSGRFQAPSPSTLLRQGT

SEQ ID NO: 7525 - protein, 919 aa, Homo sapiens
MKFAYRFSNLLGTVYRRGNLNFTCNGNSVISPVGNRVTVFDLKNNKSDTLPLATRYNVKCVGLSPDGRLAIIVDEGGDALLVSLVCRSVLHHFHFKGSVHSVSFSPDGRKFVVTKGNIAQMYHAPGKKREFNAFVLDKTYFGPYDETTCIDWTDDSRCFVVGSKDMSTWVFGAERWDNLIYYALGGHKDAIVACFFESNSLDLYSLSQDGVLCMWQCDTPPEGLRLKPPAGWKADLLQREEEEEEEEDQEGDRETTIRGKATPAEEEKTGKVKYSRLAKYFFNKEGDFNNLTAAAFHKKSHLLVTGFASGIFHLHELPEFNLIHSLSISDQSIASVAINSSGDWIAFGCSGLGQLLVWEWQSESYVLKQQGHFNSMVALAYSPDGQYIVTGGDDGKVKVWNTLSGFCFVTFTEHSSGVTGVTFTATGYVVVTSSMDGTVRAFDLHRYRNFRTFTSPRPTQFSCVAVDASGEIVSAGAQDSFEIFVWSMQTGRLLDVLSGHEGPISGLCFNPMKSVLASASWDKTVRLWDMFDSWRTKETLALTSDALAVTFRPDGAELAVATLNSQITFWDPENAVQTGSIEGRHDLKTGRKELDKITAKHAAKGKAFTALCYSADGHSILAGGMSKFVCIYHVREQILMKRFEISCNLSLDAMEEFLNRRKMTEFGNLALIDQDAGQEDGVAIPLPGVRKGDMSSRHFKPEIRVTSLRFSPTGRCWAATTTEGLLIYSLDTRVLFDPFELDTSVTPGRVREALRQQDFTRAILMALRLNESKLVQEALEAVPRGEIEVVTSSLPELYVEKVLEFLASSFEVSRHLEFYLLWTHKLLMLHGQKLKSRAGTLLPVIQFLQKSIQRHLDDLSKLCSWNHYNMQYALAVSKQRGTKRSLDPLGSEEEAEASEDDSLHLLGGGGRDSEEEMLA

SEQ ID NO: 7526 - protein, 762 aa, Homo sapiens
MENYFQAEAYNLDKVLDEFEQNEDETVSSTLLDTKWNKILDPPSHRLSFNPTLASVNESAVSNESQPQLKVFSLAHSAPLTTEEEDHCANGQDCNLNPEIATMWIDENAVAEDQLIKRNYSWDDQCSAVEVGEKKCGNLACLPDEKNVLVVAVMHNCDKRTLQNDLQDCNNYNSQSLMDAFSCSLDNENRQTDQFSFSINESTEKDMNSEKQMDPLNRPKTEGRSVNHLCPTSSDSLASVCSPSQLKDDGSIGRDPSMSAITSLTVDSVISSQGTDGCPAVKKQENYIPDEDLTGKISSPRTDLGSPNSFSHMSEGILMKKEPAEESTTEESLRSGLPLLLKPDMPNGSGRNNDCERCSDCLVPNEVRADENEGYEHEETLGTTEFLNMTEHFSESQDMTNWKLTKLNEMNDSQVNEEKEKFLQISQPEDTNGDSGGQCVGLADAGLDLKGTCISESEECDFSTVIDTPAANYLSNGCDSYGMQDPGVSFVPKTLPSKEDSVTEEKEIEESKSECYSNIYEQRGNEATEGSGLLLNSTGDLMKKNYLHNFCSQVPSVLGQSSPKVVASLPSISVPFGGARPKQPSNLKLQIPKPLSDHLQNDFPANSGNNTKNKNDILGKAKLGENSATNVCSPSLGNISNVDTNGEHLESYEAEISTRPCLALAPDSPDNDLRAGQFGISARKPFTTLGEVAPVWVPDSQAPNCMKCEARFTFTKRRHHCRACGKVFCASCCSLKCKLLYMDRKEARVCVICHSVLMNGKY

SEQ ID NO: 7527 - protein, 1425 aa, Homo sapiens
MENYFQAEAYNLDKVLDEFEQNEDETVSSTLLDTKWNKILDPPSHRLSFNPTLASVNESAVSNESQPQLKVFSLAHSAPLTTEEEDHCANGQDCNLNPEIATMWIDENAVAEDQLIKRNYSWDDQCSAVEVGEKKCGNLACLPDEKNVLVVAVMHNCDKRTLQNDLQDCNNYNSQSLMDAFSCSLDNENRQTDQFSFSINESTEKDMNSEKQMDPLNRPKTEGRSVNHLCPTSSDSLASVCSPSQLKDDGSIGRDPSMSAITSLTVDSVISSQGTDGCPAVKKQENYIPDEDLTGKISSPRTDLGSPNSFSHMSEGILMKKEPAEESTTEESLRSGLPLLLKPDMPNGSGRNNDCERCSDCLVPNEVRADENEGYEHEETLGTTEFLNMTEHFSESQDMTNWKLTKLNEMNDSQVNEEKEKFLQISQPEDTNGDSGGQCVGLADAGLDLKGTCISESEECDFSTVIDTPAANYLSNGCDSYGMQDPGVSFVPKTLPSKEDSVTEEKEIEESKSECYSNIYEQRGNEATEGSGLLLNSTGDLMKKNYLHNFCSQVPSVLGQSSPKVVASLPSISVPFGGARPKQPSNLKLQIPKPLSDHLQNDFPANSGNNTKNKNDILGKAKLGENSATNVCSPSLGNISNVDTNGEHLESYEAEISTRPCLALAPDSPDNDLRAGQFGISARKPFTTLGEVAPVWVPDSQAPNCMKCEARFTFTKRRHHCRACGKVFCASCCSLKCKLLYMDRKEARVCVICHSVLMNAQAWENMMSASSQSPNPNNPAEYCSTIPPLQQAQASGALSSPPPTVMVPVGVLKHPGAEVAQPREQRRVWFADGILPNGEVADAAKLTMNGTSSAGTLAVSHDPVKPVTTSPLPAETDICLFSGSITQVGSPVGSAMNLIPEDGLPPILISTGVKGDYAVEEKPSQISVMQQLEDGGPDPLVFVLNANLLSMVKIVNYVNRKCWCFTTKGMHAVGQSEIVILLQCLPDEKCLPKDIFNHFVQLYRDALAGNVVSNLGHSFFSQSFLGSKEHGGFLYVTSTYQSLQDLVLPTPPYLFGILIQKWETPWAKVFPIRLMLRLGAEYRLYPCPLFSVRFRKPLFGETGHTIMNLLADFRNYQYTLPVVQGLVVDMEVRKTSIKIPSNRYNEMMKAMNKSNEHVLAGGACFNEKADSHLVCVQNDDGNYQTQAISIHNQPRKVTGASFFVFSGALKSSSGYLAKSSIVEDGVMVQITAENMDSLRQALREMKDFTITCGKADAEEPQEHIHIQWVDDDKNVSKGVVSPIDGKSMETITNVKIFHGSEYKANGKVIRWTEVFFLENDDQHNCLSDPADHSRLTEHVAKAFCLALCPHLKLLKEDGMTKLGLRVTLDSDQVGYQAGSNGQPLPSQYMNDLDSALVPVIHGGACQLSEGPVVMELIFYILENIV

SEQ ID NO: 7528 - protein, 1210 aa, Homo sapiens
MENYFQAEAYNLDKVLDEFEQNEDETVSSTLLDTKWNKILDPPSHRLSFNPTLASVNESAVSNESQPQLKVFSLAHSAPLTTEEEDHCANGQDCNLNPEIATMWIDENAVAEDQLIKRNYSWDDQCSAVEVGEKKCGNLACLPDEKNVLVVAVMHNCDKRTLQNDLQDCNNYNSQSLMDAFSCSLDNENRQTDQFSFSINESTEKDMNSEKQMDPLNRPKTEGRSVNHLCPTSSDSLASVCSPSQLKDDGSIGRDPSMSAITSLTVDSVISSQGTDGCPAVKKQENYIPDEDLTGKISSPRTDLGSPNSFSHMSEGILMKKEPAEESTTEESLRSGLPLLLKPDMPNGSGRNNDCERCSDCLVPNEVRADENEGYEHEETLGTTEFLNMTEHFSESQDMTNWKLTKLNEMNDSQVNEEKEKFLQISQPEDTNGDSGGQCVGLADAGLDLKGTCISESEECDFSTVIDTPAANYLSNGCDSYGMQDPGVSFVPKTLPSKEDSVTEEKEIEESKSECYSNIYEQRGNEATEGSGLLLNSTGDLMKKNYLHNFCSQVPSVLGQSSPKVVASLPSISVPFGGARPKQPSNLKLQIPKPLSDHLQNDFPANSGNNTKNKNDILGKAKLGENSATNVCSPSLGNISNVDTNGEHLESYEAEISTRPCLALAPDSPDNDLRAGQFGISARKPFTTLGEVAPVWVPDSQAPNCMKCEARFTFTKRRHHCRACGKVFCASCCSLKCKLLYMDRKEARVCVICHSVLMNVAQPREQRRVWFADGILPNGEVADAAKLTMNGTSSAGTLAVSHDPVKPVTTSPLPAETDICLFSGSITQVGSPVGSAMNLIPEDGLPPILISTGVKGDYAVEEKPSQISVMQQLEDGGPDPLVFVLNANLLSMVKIVNYVNRKCWCFTTKGMHAVGQSEIVILLQCLPDEKCLPKDIFNHFVQLYRDALAGNVVSNLGHSFFSQSFLGSKEHGGFLYVTSTYQSLQDLVLPTPPYLFGILIQKWETPWAKVFPIRLMLRLGAEYRLYPCPLFSVRFRKPLFGETGHTIMNLLADFRNYQYTLPVVQGLVVDMEVRKTSIKIPSNRYNEMMKAMNKSNEHVLAGGACFNEKADSHLVCVQNDDGNYQTQAISIHNQPRKVTGASFFVFSGALKSSSGYLAKSSIVEDGVMVQITAENMDSLRQALRDEGLHHHLWEGGRGGTPGAHPHPVGG

SEQ ID NO: 7529 - protein, 116 aa, Homo sapiens
MCHPEASRPFSPWYPPPRSCLPKPSSCCCSHNKCHHQGPSSCQCRLSRAGDWGTCSHHLSNSGGSQASQGSDDDRNEKWDDSSTLVDELRTPGRGMYLVFDGSVDLHYNCSAKCKS

SEQ ID NO: 7530 - protein, 318 aa, Homo sapiens
MFAKGRGSAVPSDGQAWEKLASYVYEYLLHVRVQKSAETFLSEIRWEKNITLGEPPGFLHSWWCVFGDLYCAAPQRRDTCEHSSEAKAFHDYSAAAAPSPVLGNIPPNDGMPGGPIPPGFFQGPPGSQPSPHAQPPPHNPSSMMGPHSQPFMSPRYVGGPGPPIRMGNQPPGGVLGTQPLLPNSMDPTRQQGHPNMGGSMQRMNPPRGMGPMGTPIMPSPADSTNSSDNIYTMTGGRSNFPMGPGSDGPMGGMGGMEPHHMNGSLGSGDIDGLPKNSPNNISGISNPPGTPRDDGELGGSFLHSFQNDNYSPSMTMSV

SEQ ID NO: 7531 - protein, 412 aa, Homo sapiens
MISFCPDCGKSIQAAFKFCPYCGNSLPVEEHVGSQTFVNPHVSSFQGSKRGLNSSFETSPKKVKWSSTVTSPRLSLFSDGDSSESEDTLSSSERSKGSGSRPPTPKSSPQKTRKSPQVTRGSPQKTSCSPQKTRQSPQTLKRSRVTTSLEALPTGTVLTDKSGRQWKLKSFQTRDNQGILYEAAPTSTLTCDSGPQKQKFSLKLDAKDGRLFNEQNFFQRAAKPLQVNKWKKLYSTPLLAIPTCMGFGVHQDKYRFLVLPSLGRSLQSALDVSPKHVLSERSVLQVACRLLDALEFLHENEYVHGNVTAENIFVDPEDQSQVTLAGYGFAFRYCPSGKHVAYVEGSRSPHEGDLEFISMDLHKGCGPSRRSDLQSLGYCMLKWLYGFLPWTNCLPNTEDIMKQKQKLPWDSF

SEQ ID NO: 7532 - protein, 474 aa, Homo sapiens
MISFCPDCGKSIQAAFKFCPYCGNSLPVEEHVGSQTFVNPHVSSFQGSKRGLNSSFETSPKKVKWSSTVTSPRLSLFSDGDSSESEDTLSSSERSKGSGSRPPTPKSSPQKTRKSPQVTRGSPQKTSCSPQKTRQSPQTLKRSRVTTSLEALPTGTVLTDKSGRQWKLKSFQTRDNQGILYEAAPTSTLTCDSGPQKQKFSLKLDAKDGRLFNEQNFFQRAAKPLQVNKWKKLYSTPLLAIPTCMGFGVHQDKYRFLVLPSLGRSLQSALDVSPKHVLSERSVLQVACRLLDALEFLHENEYVHGNVTAENIFVDPEDQSQVTLAGYGFAFRYCPSGKHVAYVEGSRSPHEGDLEFISMDLHKGCGPSRRSDLQSLGYCMLKWLYGFLPWTNCLPNTEDIMKQKQKFVDKPGPFVGPCGHWIRPSETLQKYLKVVMALTYEEKPPYAMLRNNLEALLQDLRVSPYDPIGLPMVP

SEQ ID NO: 7533 - protein, 350 aa, Homo sapiens
MPGPAAGSRARVYAEVNSLRSREYWDYEAHVPSWGNQDDYQLVRKLGRGKYSEVFEAINITNNERVVVKILKPVKKKKIKREVKILENLRGGTNIIKLIDTVKDPVSKTPALVFEYINNTDFKQLYQILTDFDIRFYMYELLKALDYCHSKGIMHRDVKPHNVMIDHQQKKLRLIDWGLAEFYHPAQEYNVRVASRYFKGPELLVDYQMYDYSLDMWSLGCMLASMIFRREPFFHGQDNYDQLVRIAKVLGTEELYGYLKKYHIDLDPHFNDILGQHSRKRWENFIHSENRHLVSPEALDLLDKLLRYDHQQRLTAKEAMEHPYFYPVVKEQSQPCADNAVLSSGLTAAR

SEQ ID NO: 7534 - protein, 253 aa, Homo sapiens
TRGKMADSSGRGAGKPATGPTNSSSAKKKDKRVQGGRVIESRYLQYEKKTTQKAPAGDGSQTRGKMSEGGRKSSLLQKSKADSSGVGKGDLQSTLLEGHGTAPPDLDLSAINDKSIVKKTPQLAKTISKKPESTSFSAPRKKSPDLSEAMEMMESQTLLLTLLSVKMENNLAEFERRAEKNLLIMCKEKEKLQKKAHELKRRLLLSQRKRELADVLDAQIEMLSPLRGSGHTLQGAIQDIRHGPWTLPGTSCP

SEQ ID NO: 7535 - protein, 787 aa, Homo sapiens
MSVQSSSGSLEGPPSWSQLSTSPTPGSAAAARSLLNHTPPSGRPREGAMDELHSLDPRRQELLEARFTGVASGSTGSTGSCSVGAKASTNNESSNHSFGSLGSLSDKESETPEKKQSESSRGRKRKAENQNESSQGFPNLPVFQSLAYWEMGRTAGGKSIGGRGHKISDYFEYQGGNGSSPVRGIPPAIRSPQNSHSHSTPSSSVRPNSPSPTALAFGDHPIVQPKQLSFKIIQTDLTMLKLAALESNKIQDLEKKEGRIDDLLRANCDLRRQIDEQQKLLEKYKERLNKCISMSKKLLIEKSTQEKLSSREKSMQDRLRLGHFTTVRHGASFTEQWTDGFAFQNLVKQQEWVNQQREDIERQRKLLAKRKPPTANNSQAPSTNSEPKQRKNKAVNGAENDPFVRPNLPQLLTLAEYHEQEEIFKLRLGHLKKEEAEIQAELERLERVRNLHIRELKRINNEDNSQFKDHPTLNERYLLLHLLGRGGFSEVYKAFDLYEQRYAAVKIHQLNKSWRDEKKENYHKHACREYRIHKELDHPRIVKLYDYFSLDTDTFCTVLEYCEGNDLDFYLKQHKLMSEKEARSIVMQIVNALRYLNEIKPPIIHYDLKPGNILLVDGTACGEIKITDFGLSKIMDDDSYGVDGMDLTSQGAGTYWYLPPECFVVGKEPPKISNKVDVWSVGVIFFQCLYGRKPFGHNQSQQDILQENTILKATEVQFPVKPVVSSEAKAFIRRCLAYRKEDRFDVHQLANDPYLLPHMRRSNSSGNLHMAGLTASPTPPSSSIITY

SEQ ID NO: 7536 - protein, 766 aa, Homo sapiens
MSVQSSSGSLEGPPSWSQLSTSPTPGSAAAARSLLNHTPPSGRPREGAMDELHSLDPRRQELLEARFTGVASGSTGSTGSCSVGAKASTNNESSNHSFGSLGSLSDKESETPEKKQSESSRGRKRKAENQNESSQGKSIGGRGHKISDYFEYQGGNGSSPVRGIPPAIRSPQNSHSHSTPSSSVRPNSPSPTALAFGDHPIVQPKQLSFKIIQTDLTMLKLAALESNKIQDLEKKEGRIDDLLRANCDLRRQIDEQQKLLEKYKERLNKCISMSKKLLIEKSTQEKLSSREKSMQDRLRLGHFTTVRHGASFTEQWTDGFAFQNLVKQQEWVNQQREDIERQRKLLAKRKPPTANNSQAPSTNSEPKQRKNKAVNGAENDPFVRPNLPQLLTLAEYHEQEEIFKLRLGHLKKEEAEIQAELERLERVRNLHIRELKRINNEDNSQFKDHPTLNERYLLLHLLGRGGFSEVYKAFDLYEQRYAAVKIHQLNKSWRDEKKENYHKHACREYRIHKELDHPRIVKLYDYFSLDTDTFCTVLEYCEGNDLDFYLKQHKLMSEKEARSIVMQIVNALRYLNEIKPPIIHYDLKPGNILLVDGTACGEIKITDFGLSKIMDDDSYGVDGMDLTSQGAGTYWYLPPECFVVGKEPPKISNKVDVWSVGVIFFQCLYGRKPFGHNQSQQDILQENTILKATEVQFPVKPVVSSEAKAFIRRCLAYRKEDRFDVHQLANDPYLLPHMRRSNSSGNLHMAGLTASPTPPSSSIITY

SEQ ID NO: 7537 - protein, 442 aa, Homo sapiens
GSSSFRGGLGGGYSGASGMGGITAVMVNQSLLSPLVLEVDPNIQAVCTQEKEQIKTLNNKFASFTDKVRFLEQQNKMLETKWSLLQQQKMARSNMDNMFESYINNLRRQLETLGQEKLKLEAELGNMQRLVEDFKNKYEDEINKHTEMENEFVLIKKDVDEAYMNKVELESRLEGLTDEINFLRQLYEKEIRELQSQISDTSVVLSMDNSRSLDMDSIIAEVKAQYEDIANQRRAEAESMYQIKYEELQSLAGKHGDDLWRTKTEISEMNWNISQLQAEIEGLKGQRASLEAAIADAEQRGELAIKDANAKLSELEAALQRAKQDMARQLREYQELMNVKLALDIEIATYRKLLEGKESRLKSGMQNMSIHTKTTSGYAGGLSSAYGGLTSPGLSYGLGSSFGSGAGSSSLSRTSSSRAVVVKKIETCDGKLVSESSDILPK

SEQ ID NO: 7538 - protein, 482 aa, Homo sapiens
  VARIANT 287, 372: Xaa = Any Amino Acid
MSIRTTQKSYRVSTSGPRAFSSHFYTSGPGASISSSSFSQVGSSSFRGGLGGGYGGASGMGGITTVTVNQSLLSPLNLEVDPHIQAVHTQKKEQIKTLNTKFATFIYKVQFLEQQNKMLETKWSLLQQQKTARSNMDTIFQSYINNLRQQLETLGQEKLKLEAELGNMQGLVEDFKNKYEDEINKRTEMENEFVLIKKDVDEAYLNKVELESRLEGLTDEINFLRQLYEEDIPELQSQISDTSVVLPMDNSHSLDMDSIINEVKRSYEITNRSQVEAQSMYQIKYEXLQTLAGKHGDDLQHTKTEISAMNRNISWLQAEIEGLKGQRASLEAAIADAEQRGELAVKDASAKLSELEAALQQTKQDVVLQLHXYQELMNDKLALDIEIATYRQLLEGEESWLESGMQSMSIHTKTISSYAGGLSSAYGGLTSPGLSCGLGSSFGSGAGSSSFSCISYTRAVVVKKIETRDGTLVSEFSDVLPK

SEQ ID NO: 7539 - protein, 448 aa, Homo sapiens
MAEASATGACGEAMAAAEGSSGPAGLTLGRSFSNYRPFEPQALGLSPSWRLTGFSGMKGCGCKVPQEALLKLLAGLTRPDVRPPLGRGLVGGQEEASQEAGLPAGAGPSPTFPALGIGMDSCVIPLRHGGLSLVQTTDFFYPLVEDPYMMGRIACANVLSDLYAMGITECDNMLMLLSVSQSMSEEEREKVTPLMVKGFRDAAEEGGTAVTGGQTVVNPWIIIGGVATVVCQPNEFIMPDSAVVGDVLVLTKPLGTQVAVNAHQWLDNPERWNKVKMVVSREEVELAYQEAMFNMATLNRTAAGLMHTFNAHAATDITGFGILGHSQNLAKQQRNEVSFVIHNLPIIAKMAAVSKASGRFGLLQGTSAETSGGLLICLPREQAARFCSEIKSSKYGEGHQAWIVGIVEKGNRTARIIDKPRVIEVLPRGATAAVLAPDSSNASSEPSS

SEQ ID NO: 7540 - protein, 399 aa, Homo sapiens [sequence omitted]

SEQ ID NO: 7541 - protein, 898 aa, Homo sapiens
MSVTEEDLCHHMKVVVRVRPENTKEKAAGFHKVVHVVDKHILVFDPKQEEVSFFHGKKTTNQNVIKKQNKDLKFVFDAVFDETSTQSEVFEHTTKPILRSFLNGYNCTVLAYGATGAGKTHTMLGSADEPGVMYLTMLHLYKCMDEIKEEKICSTAVSYLEVYNEQIRDLLVNSGPLAVREDTQKGVVVHGLTLHQPKSSEEILHLLDNGNKNRTQHPTDMNATSSRSHAVFQIYLRQQDKTASINQNVRIAKMSLIDLAGSERASTSGAKGTRFVEGTNINRSLLALGNVINALADSKRKNQHIPYRNSKLTRLLKDSLGGNCQTIMIAAVSPSSVFYDDTYNTLKYANRAKDIKSSLKSNVLNVNNHITQYVKICNEQKAEILLLKEKLKAYEEQKAFTNENDQAKLMISNPQEKEIERFQEILNCLFQNREEIRQEYLKLEMLLKENELKSFYQQQCHKQIEMMCSEDKVEKATGKRDHRLAMLKTRRSYLEKRREEELKQFDENTNWLHRVEKEMGLLSQNGHIPKELKKDLHCHHLHLQNKDLKAQIRHMMDLACLQEQQHRQTEAVLNALLPTLRKQYCTLKEAGLSNAAFESDFKEIEHLVERKKVVVWADQTGEQPKQNDLPGISVLMTFSQLGPVQPIPCCSSSGGTNLVKIPTEKRTRRKLMPSPLKGQHTLKSPPSQSVQLNDSLSKELQPIVYTPEDCRKAFQNPSTVTLMKPSSFTTSFQAISSNINSDNCLKMLCEVAIPHNRRKECGQEDLDSTFTICEDIKSSKCKLPEQESLPNDNKDILQRLDPSSFSTKHSMPVPSMVPSYMAMTTAAKRKRKLTSSTSNSSLTADVNSGFAKRVRQDNSSEKHLQENKPTMEHKRNICKINPSMVRKFGRNISKGNLR

SEQ ID NO: 7542 - protein, 223 aa, Homo sapiens
MEVQKEAQRIMTLSVWKMYHSRMQRGGLRLHRSLQLSLVMRSARELYLSAKVEALEPEVSLPAALPSDPRLHPPREAESTAETATPDGEHPFPEPMDTQEAPTAEETSACCAPRPAKVSRKRRSSSLSDGGDVGLVPSKKARLEEKEEEEGASSEVADRLQPPPGQAEGAFPNLARVLQRRFSGLLNCSPAAPPTAPPACEAKPACRPADSMLNVLVRAVVAF

SEQ ID NO: 7543 - protein, 217 aa, Homo sapiens
MSCAGAAAAPRLWRLRPGARRSLSAYGRRTSVRFRSSGMTLDNISRAAVDRIIRVDHAGEYGANRIYAGQMAVLGRTSVGPVIQKMWDQEKDHLKKFNELMVTFRVRPTVLMPLWNVLGFALGAGTALLGKEGAMACTVAVEESIAHHYNNQIRTLMEEDPEKYEELLQLIKKFRDEELEHHDIGLDHDAELAPAYAVLKSIIQAGCRVAIYLSERL

SEQ ID NO: 7544 - protein, 217 aa, Homo sapiens
MSCAGAAAAPRLWRLRPGARRSLSAYGRRTSVRFRSSGMTLDNISRAAVDRIIRVDHAGEYGANRIYAGQMAVLGRTSVGPVIQKMWDQEKDHLKKFNELMVMFRVRPTVLMPLWNVLGFALGAGTALLGKEGAMACTVAVEESIAHHYNNQIRTLMEEDPEKYEELLQLIKKFRDEELEHHDIGLDHDAELAPAYAVLKSIIQAGCRVAIYLSERL

SEQ ID NO: 7545 - protein, 1391 aa, Homo sapiens
MVKEQFRETDVAKKTSHICFGMKSPEEMRQQAHIQVVSKNLYSQDNQHAPLLYGVLDHRMGTSEKDRPCETCGKNLADCLGHYGYIDLELPCFHVGYFRAVIGILQMICKTCCHIMLSQEEKKQFLDYLKRPGLTYLQKRGLKKKISDKCRKKNICHHCGAFNGTVKKCGLLKIIHEKYKTNKKVVDPIVSNFLQSFETAIEHNKEVEPLLGRAQENLNPLVVLNLFKRIPAEDVPLLLMNPEAGKPSDLILTRLLVPPLCFRPSVVSDLKSGTNEDDLTMKLTEIIFLNDVIKKHRISGAKTQMIMEDWDFLQLQCALYINSELSGIPLNMAPKKWTRGFVQRLKGKQGRFRGNLSGKRVDFSGRTVISPDPNLRIDEVAVPVHVAKILTFPEKVNKANINFLRKLVQNGPEVHPGANFIQQRHTQMKRFLKYGNREKMAQELKYGDIVERHLIDGDVVLFNRQPSLHKLSIMAHLARVKPHRTFRFNECVCTPYNADFDGDEMNLHLPQTEEAKAEALVLMGTKANLVTPRNGEPLIAAIQDFLTGAYLLTLKDTFFDRAKACQIIASILVGKDEKIKVRLPPPTILKPVTLWTGKQIFSVILRPSDDNPVRANLRTKGKQYCGKGEDLCANDSYVTIQNSELMSGSMDKGTLGSGSKNNIFYILLRDWGQNEAADAMSRLARLAPVYLSNRGFSIGIGDVTPGQGLLKAKYELLNAGYKKCDEYIEALNTGKLQQQPGCTAEETLEALILKELSVIRDHAGSACLRELDKSNSPLTMALCGSKGSFINISQMIACVGQQAISGSRVPDGFENRSLPHFEKHSKLPAAKGFVANSFYSGLTPTEFFFHTMAGREGLVDTAVKTAETGYMQRRLVKSLEDLCSQYDLTVRSSTGDIIQFIYGGDGLDPAAMEGKDEPLEFKRVLDNIKAVFPCPSEPALSKNELILTTESIMKKSEFLCCQDSFLQEIKKFIKGVSEKIKKTRDKYGINDNGTTEPRVLYQLDRITPTQVEKFLETCRDKYMRAQMEPGSAVGALCAQSIGEPGTQMTLKTFHFGGVASMNITLGVPRIKEIINASKAISTPIITAQLDKDDDADYARLVKGRIEKTLLGEISEYIEEVFLPDDCFILVKLSLERIRLLRLEVNAETVRYSICTSKLRVKPGDVAVHGEAVVCVTPRENSKSSMYYVLQFLKEDLPKVVVQGIPEVSRAVIHIDEQSGKEKYKLLVEGDNLRAVMATHGVKGTRTTSNNTYEVEKTLGIEAARTTIINEIQYTMVVNHGMSIDRRHVMLLSDLMTYKGEVLGITRFGLAKMKESVLMLASFEKTADHLFDAAYFGQKDSVCGVSECIIMGIPMNIGTGLFKLLHKADRDPNPPKRPLIFDTNEFHIPLVT

SEQ ID NO: 7546 - protein, 1390 aa, Homo sapiens
MVKEQFRETDVAKKISHICFGMKSPEEMRQQAHIQVVSKNLYSQDNQHAPLLYGVLDHRMGTSEKDRPCETCGKNLADCLGHYGYIDLELPCFHVGYFRAVIGILQMICKTCCHIMLSQEEKKQFLDYLKRPGLTYLQKRGLKKKISDKCRKKNICHHCGAFNGTVKKCGLLKIIHEKYKTNKKVVDPIVSNFLQSFETAIEHNKEVEPLLGRAQENLNPLVVLNLFKRIPAEDVPLLLMNPEAGKPSDLILTRLLVPPLCIRPSVVSDLKSGTNEDDLTMKLTEIIFLNDVIKKHRISGAKTQMIMEDWDFLQLQCALYINSELSGIPLNMAPKKWTRGFVQRLKGKQGRFRGNLSGKRVDFSGRTVISPDPNLRIDEVAVPVHVAKILTFPEKVNKANINFLRKLVQNGPEVHPGANFIQQRHTQMKRFLKYGNREKMAQELKYGDIVERHLIDGDVVLFNRQPSLHKLSIMAHLARVKPHRTFRFNECVCTPYNADFDGDEMNLHLPQTEEAKAEALVLMGTKANLVTPRNGEPLIAAIQDFLTGAYLLTLKDTFFDRAKACQIIASILVGKDEKIKVRLPPPTILKPVTLWTGKQIFSVILRPSDDNPVRANLRTKGKQYCGKGEDLCANDSYVTIQNSELMSGSMDKGTLGSGSKNNIFYILLRDWGQNEAADAMSRLARLAPVYLSNRGFSIGIGDVTPGQGLLKAKYELLNAGYKKCDEYIEALNTGKLQQQPGCTAEETLEALILKELSVIRDHAGSACLRELDKSNSPLTMALCGSKGSFINISQMIACVGQQAISGSRVPDGFENRSLPHFEKHSKLPAAKGFVANSFYSGLTPTEFFFHTMAGREGLVDTAVKTAETGYMQRRLVKSLEDLCSQYDLTVRSSTGDIIQFIYGGDGLDPAAMEGKDEPLEFKRVLDNIKAVFPCPSEPALSKNELILTTESIMKKSEFLCCQDSFLQEIKKFIKGVSEKIKKTRDKYGINDNGTTEPRVLYQLDRITPTQVEKFLETCRDKYMRAQMEPGSAVGALCAQSIGEPGTQMTLKTFHFAGVASMNITLGVPRIKEIINASKAISTPIITAQLDKDDDADYARLVKGRIEKTLLGEISEYIEEVFLPDDCFILVKLSLERIRLLRLEVNAETVRYSICTSKLRVKPGDVAVHGEAVVCVTPRENSKSSMYYVLQFLKEDLPKVVVQGIPEVSRAVIHIDEQSGKEKYKLLVEGDNLRAVMATHGVKGTRTTSNNTYEVEKTLGIEAARTTIINEIQYTMVNHGMSIDRRHVMLLSDLMTYKGEVLGITRFGLAKMKESVLMLASFEKTADHLFDAAYFGQKDSVCGVSECIIMGIPMNIGTGLFKLLHKADRDPNPPKRPLIFDTNEFHIPLVT

SEQ ID NO: 7547 - protein, 252 aa, Homo sapiens
MFQPAPKRCFTIESLVAKDSPLPASRSEDPIRPAALSYANSSPINPFLNGFHSAAAAAAGRGVYSNPDLVFAEAVSHPPNPAVPVHPVPPPHALAAHPLPSSHSPHPLFASQQRDPSTFYPWLIHRYRYLGHRFQGNDTSPESFLLHNALARKPKRIRTAFSPSQLLRLEHAFEKNHYVVGAERKQLAHSLSLTETQVKVWFQNRRTKFKRQKLEEEGSDSQQKKKGTHHINRWRIATKQASPEEIDVTSDD

SEQ ID NO: 7548 - protein, 215 aa, Homo sapiens
QVVMRFNNSLLPTEPSQQLQAYVAWVNAQLKKRPAVKPVQDLRQDLRDGVILAYLIEIVAGEKLSGVQLSPGNQQEMKNNVEKVLQFVASKKIRMHQTSAKDIVDGNLKSIMRLVLALAAHFKPGSSRTVNQGRDSRAPLQSHRPHCATAVAQGAAAALADVCHDMSRSGRDVFRYRQRNSSMDEEIENPYWSVRALVQQYEGQQRSPSESSCSR

SEQ ID NO: 7549 - protein, 565 aa, Homo sapiens
HHHHHHRAQPPQQSHHPPHHHRPQPHLGSFPESCSSDSESSSYSDHAANDSDFGSSLSSSSNSVSSEEEEEEGEEEEEEEEEEEEGGSGASDSSEVSSEEEDSSTESDSSSGSSQVSVQSIRFRRTSFCKPPSVQAQANFLYHLASAAAATKPAAFEDAGRLPDLKSSVKAESPAEWNLQSWAPKASPVYCPASLGSCFAEIRNDRVSEITFPHSEISNAVKRTDLTINCLAEGASSPSPKTNNAFPQQRILREARKCLQTTPTTHCADNNTIAARFLNNDSSGAEANSEKYSKILHCPEFATDLPSSQTDPEVNAAGAAATKAENPCTDTGDKTLPFLHNIKIKVEDSSANEEYEPHLFTNKLKCECNDTKGEFYSVTESKEEDALLTTAKEGFACPEKETPSLNPLAQSQGLSCTLGSPKPEDGEYKFGARVRKNYRTLVLGKRPVLQTPPVKPNLKSARSPRPTGKTETNEGTLDDFTVINRRKKVASNVASAVKRPFHFMANFPCPPSLIIGRDGDLWPAYSLNTTKDSQTPHKAHPIWKWQLGGSAIPLPPSHKFRKFNS

SEQ ID NO: 7550 - protein, 941 aa, Homo sapiens
MYQGEFGLNMKLGYGKFSWPTGESYHGQFYRDHCHGLGTYMWPDGSSFTGTFYLSHREGYGTMYMKTRLFQGLYKADQRFGPGVETYPDGSQDVGLWFREQLIKLCTQIPSGFSLLRYPEFSSFITHSPARISLSEEEKTEWGLQEGQDPFFYDYKRFLLNDNLTLPPEMYVYSTNSDHLPMTSSFRKELDARIFLNEIPPFVEDGEPWFIINETPLLVKIQKQTYKFRNKPAHTSWNMGAILEGKRSGFAPCGPKEQLSMEMILKAEEGNHEWICRILKDNFASADVADAKGYTVLAAAATHCHNDIVNLLLDCGADVNKCSDEGLTALSMCFLLHYPAQSFKPNVAERTIPEPQEPPKFPVVPILSSSFMDTNLESLYYEVNVPSQGSYELRPPPAPLLLPRVSGSHEGGHFQDTGQCGGSIDHRSSSLKGDSPLVKGSLGHVESGLEDVLGNTDRGSLCSAETKFESNVCVCDFSIELSQAMLERSAQSHSLLKMASPSPCTSSFDKGTMRRMALSMIERRKRWRTIKLLLRRGADPNLCCVPMQVLFLAVKAGDVDGVRLLLEHGARTDICFPPQLSTLTPLHIAAALPGEEGVQIVELLLHAITDVDAKASDEDDTYKPGKLDLLPSSLKLSNEPGPPQAYYSTDTALPEEGGRTALHMACEREDDNKCARDIVRLLLSHGANPNLLWSGHSPLSLSIASGNELVVKELLTQGADPNLPLTKGLGSALCVACDLTYEHQRNMDSKLALIDRLISHGADILKPVMLRQGEKEAVGTAVDYGYFRFFQDRRIARCPFHTLMPAERETFLARKRLLEYMGLQLRQAVFAKESQWDPTWLYLCKRAELIPSHRMKKKGPSLPRGLDVKEQGQIPFFKFCYQCGRSIGVRLLPCPRCYGILTCSKYCKTKAWTEFHKKDCGDLVAIVTQLEQVSRRREEFQ

SEQ ID NO: 7551 - protein, 148 aa, Homo sapiens
MARMNRPAPVEVSYKHMRFLITHNPTNATLSTFIEDLKKYGATTVVRVCEVTYDKTPLEKDGITVVDWPFDDGAPPPGKVVEDWLSLVKAKFCEAPGSCVAVHCVAGLGRKRRGAINSKQLTYLEKYRPKQRLRFKDPHTHKTRCCVM

SEQ ID NO: 7552 - protein, 87 aa, Homo sapiens
MARMNRPAPVEVSYKHMRFLITHNPTNATLSTFIEDLKKYEDAIQFIRQKRRGAINSKQLTYLEKYRPKQRLRFKDPHTHKTRCCVM

SEQ ID NO: 7553 - protein, 173 aa, Homo sapiens
MARMNRPAPVEVSYKHMRFLITHNPTNATLSTFIEDLKKYGATTVVRVCEVTYDKTPLEKDGITVVDWPFDDGAPPPGKVVEDWLSLVKAKFCEAPGSCVAVHCVAGLGRAPVLVALALIESGMKYEDAIQFIRQKRRGRINSKQLTYLEKYRPKQRLRFKDPHTHKTRCCVM

SEQ ID NO: 7554 - protein, 469 aa, Homo sapiens
MFSEQAAQRAHTLLSPPSANNATFARVPVATYTNSSQPFRLGERSFSRQYAHIYATRLIQMRPFLENRAQQHWGSGVGVKKLCELQPEEKCCVVGTLFKAMPLQPSILREVSEEHNLLPQPPRSKYIHPDDELVLEDELQRIKLKGTIDVSKLVTGTVLAVFGSVRDDGKFLVEDYCFADLAPQKPAPPLDTDRFVLLVSGLGLGGGGGESLLGTQLLVDVVTGQLGDEGEQCSAAHVSRVILAGNLLSHSTQSRDSINKAKYLTKKTQAASVEAVKMLDEILLQLSASVPVDVMPGEFDPTNYTLPQQPLHPCMFPLATAYSTLQLVTNPYQATIDGVRFLGTSGQNVSDIFRYSSMEDHLEILEWTLRVRHISPTAPDTLGCYPFYKTDPFIFPECPHVYFCGNTPSFGSKIIRGPEDQTVLLVTVPDFSATQTACLVNLRSLACQPISFSGFGAEDDDLGGLGLGP

SEQ ID NO: 7555 - protein, 144 aa, Homo sapiens
MRKIDLCLSSEGSEVILATSSDEKHPPENIIDGNPETFWTTTGMFPQEFIICFHKHVRIERLVIQSYFVQTLKIEKSTSKEPVDFEQWIEKDLVHTEGQLQNEEIVAHDGSATYLRFIIVSAFDHFASVHSVSAEGTVVSNLSS

SEQ ID NO: 7556 - protein, 459 aa, Homo sapiens
MSNCLQNFLKITSTRLLCSRLCQQLRSKRKFFGTVPISRLHRRVVITGIGLVTPLGVGTHLVWDRLIGGESGIVSLVGEEYKSIPCSVAAYVPRGSDEGQFNEQNFVSKSDIKSMSSPTIMAIGAAELAMKDSGWHPQSEADQVATGVAIGMGMIPLEVVSETALNFQTKGYNKVSPFFVPKILVNMAAGQVSIRYKLKGPNHAVSTACTTGAHAVGDSFRFIAHGDADVMVAGGTDSCISPLSLAGFSRARALSTNSDPKLACRPFHPKRDGFVMGEGAAVLVLEEYEHAVQRRARIYAEVLGYGLSGDAGHITAPDPEGEGALRCMAAALKDAGVQPEEISYINAHATSTPLGDAAENKAIKHLFKDHAYALAVSSTKGATGHLLGAAGAVEAAFTTLACYYQKLPPTLNLDCSEPEFDLNYVPLKAQEWKTEKRFIGLTNSFGFGGTNATLCIAGL

SEQ ID NO: 7557 - protein, 293 aa, Homo sapiens
MNAGVEADSASLPVLLEPFVGSCVSSANAPEKSITRPEFESSCFFMWSWEQAQLWALILLLEERRREKSDVAANQGSDLISYSSSMADFRKFFAKAKHVVVISGADVIAVSGVPPFRQAGGHGENVSPGPGSSSVLCPRFSGCGSSPLRVRGQAEQEPSPHLATIECDALLGGQGRQGMIMTEYPWAAPKAGAKNLLEIHCSLFKLHVPLVESCLRIMRVEAESRGLPQPHALWFGKNLDPAFLEEMSAKGVPVTEFNMETTSAMRRFRFHFQGPCGRMLPEPLAGHENETVS

SEQ ID NO: 7558 - protein, 508 aa, Homo sapiens
MIMSNTHKARLERRVTGSTNRWRLPKQPFSGDLLSLSQMCKALSIDFEEALRNPDRLCISQIQKFFFENFKNKDIQSGEADVILECLGFKWELHQPQLFQSETLAKLYLKALAQGTTHPLRELEELLRAQSPKKTKEKSPAKRIIISLKINDPLVTKVAFATALKNLYMSEVEINLEDLLGVLASAHILQFSGLFQRCVDVMIARLKPSTIKKFYEAGCKYKEEQLTTGCEKWLEMNLVPLGGTQIHLHKIPQDLLHKVLKSPRLFTFSEFHLLKTMLLWVFLQLNYKIQAIPTYETVMTFFKSFPENCCFLDRDIGRSLRPLFLCLRLHGITKGKDLEVLRHLNFFPESWLDQVTVNHYHALENGGDMVHLKDLNTQAVRFGLLFNQENTTYSKTIALYGFFFKIKGLKHDTTSYSFYMQRIKHTDLESPSAVYEHNHVSLRAARLVKYEIRAEALVDGKWQEFRTNQIKQKFGLTTSSCKSHASTLKIQTVGIPIYVSFAFIFPAS

SEQ ID NO: 7559 - protein, 919 aa, Homo sapiens [sequence omitted]

SEQ ID NO: 7560 - protein, 179 aa, Homo sapiens [sequence omitted]

SEQ ID NO: 7561 - protein, 176 aa, Homo sapiens
MDLPDSASRVFCGRILSMVNTDDVNAIILAQKNMLDRFEKTNEMLLNFNNLSSARLQQMSERFLHHTRTLVEMKRDLDSIFRRIRTLKGKLARQHPEAFSHIPEASFLEEEDEDPIPPSTTTTIATSEQSTGSCDTSPDTVSPSLSPGFEDLSHVQAGSPAINGRSQTDDEEMTGE

SEQ ID NO: 7562 - protein, 274 aa, Homo sapiens
RRRNSTRTDRPPAPAEAEAVARSGPGPWAPRAARVMRTEAEAAGPPLEPGDFVQLPVPVIQQLYHWDCGLACSRMVLRYLGQLDDSEFERALQKLQLTRSIWTIDLAYLMHHFGVRHRFCTQTLGVDKGYKNQSFYRKHFDTEETRVNQLFAQAKACKVLVEKCTVSVKDIQAHLAQGHVAIVLVNSGVLHCDLCSSPVKYCCFTPSGHHCFCRTPDYQGHFIVLRGYNRATGCIFYNNPAYADRMCSTSISNFEEARTSYGTDEDILFVYLDS

SEQ ID NO: 7563 - protein, 229 aa, Homo sapiens
RNSTRTDRPPAPAEAEAVARSGPGPWAPRAARVMRTEAEAAGPPLEPGDFVQLPVPVIQQLYHWDCGLACSRMVLRYLGQLDDSEFERALQKLQLTRSIWTIDLAYLMHHFGVRHRFCTQTLGVDKGYKNQSFYRKHFDTEETRVNQLFAQAKACKVLVEKCGHHCFCRTPDYQGHFIVLRGYNRATGCIFYNNPAYADRMCSTSISNFEEARTSYGTDEDILFVYLDS

SEQ ID NO: 7564 - protein, 296 aa, Homo sapiens
MTGPGGRRNDPWGRQRAREGAHTSKHPTPRTGWTARRRRGAWALRPGTAGGWAKGQDFPSQFHLLIPAPPGDFVQLPVPVIQQLYHWDCGLACSRMVLRYLGQLDDSEFERALQKLQLTRSIWTIDLAYLMHHFGVRHRFCTQTLGVDKGYKNQSFYRKHFDTEETRVNQLFAQAKACKVLVEKCTVSVKDIQAHLAQGHVAIVLVNSGVLHCDLCSSPVKYCCFTPSGHHCFCRTPDYQGHFIVLRGYNRATGCIFYNNPAYADPGMCSTSISNFEEARTSYGTDEDILFVYLDS

SEQ ID NO: 7565 - protein, 239 aa, Homo sapiens
MRTEAEAAGPPLEPGDFVQLPVPVIQQLYHWDCGLACSRMVLRYLGQLDDSEFERALQKLQLTRSIWTIDLAYLMHHFGVRHRFCTQTLGVDKGYKNQSFYRKHFDTEETRVNQLFAQAKACKVLVEKCTVSVKDIQAHLAQGHVAIVLVNSGVLHCDLCSSPVKYCCFTPSGHHCFCRTPDYQGHFIVLRGYNRATGCIFYNNPAYADRMCSTSISNFEEARTSYGTDEDILFVYLDS

SEQ ID NO: 7566 - protein, 745 aa, Homo sapiens
  VARIANT 146, 206, 517, 676: Xaa = Any Amino Acid
MGKEYGLWAPGAIHVGCRCCGSINQSFDGRAQSVVEEAGWDRALIQLQVRALLSSTGSQAVAMDLGNRKLEISSGKLARFANGSAVIQSGDTAVMATAVSKTKPSPSQFMPLVVDYGQKAAAVGRIPTNPLRREISTSDKEILTRXIVDCSVRPIFPAGYFCDIQVLCNLLAVDGINELDVLAINGNSVALSLSDILWNGPVGTVXIGMTDGECVVNPTRKEMSSSTLNVVVAGAPKSQTVMLEASAENILQQDFCHAIKVGVKYTQQIIQGIQQLVKEIGVTKRTPQKLFTPSQEIVKHAHKLTMERLYAVFTDYEHDKISRDEAVNKIRLDTEEQLKEIFPEVDLYEIIESFNTVAKKVFRSIILNEYKRCDGRDLTLLRNISCEVDMFKTLHGSELFQRGQTQLLCAVTFDSLESSIKLDRVITTINGIKDKNFMLHYEFPPYATNEIVKVTGINRRELGPDALAEKALYPVIPKDFPFAIRVTSEVLESNGSSSMASACGGSLALMDSGLPIXSAVTGVAMGLATKTDLEKGEIEDYHLLTDILGIEAYNGDMDFKIAGTNKGITALQADIKLPGITMKIVMEAIQQASAETVVTISQVDEETFSIFAPTPGAMHEARDFIAEIRKDDQEQQLEFGAVCTATITESRDTGVMVKLYPNMILVLLYNTQLDQXNIKHPTALGLEVGQEIQVKYFGCDPADGRMRLSHKVLQSSATTVVRTLNDRSSIVLGEPISQSSSNNSQ

SEQ ID NO: 7567 - protein, 763 aa, Homo sapiens
RYPGARCRNLPSSWPATVRPDPHPDQSSCPGCCDAGSAGCRRAAGAPEGYRVHERLALPALPRPLARRPARRLARQPLGARRRRRRWRRRSQEVPSASQVRASLPEPRNSAAAMASNMDREMILADFQACTGIENIDEAITLLEQNNWDLVAAINGVIPQENGILQSEYGGETIPGPAFNPASHPASAPTSSSSSAFRPVMPSRQIVERQPRMLDFRVEYRDRNVDVVLEDTCTVGEIKQILENELQIPVSKMLLKGWKTGDVEDSTVLKSLHLPKNNSLYVLTPDLPPPSSSSHAGALQESLNQNFMLIITHREVQREYNLNFSGSSTIQEVKRNVYDLTSIPVRHQLWEGWPTSATDDSMCLAESGLSYPCHRLTVGRRSSPAQTREQSEEQITDVHMVSDSDGDDFEDATEFGVDDGEVFGMASSALRKSPMMPENAENEGDALLQFTAEFSSRYGDCHPVFFIGSLEAAFQEAFYVKARDRKLLAIYLHHDESVLTNVFCSQMLCAESIVSYLSQNFITWAWDLTKDSNRARFLTMCNRHFGSVVAQTIRTQKTDQFPLFLIIMGKRSSNEVLNVIQGNTTVDELMMRLMAAMEIFTAQQQEDIKDEDEREARENVKREQDEAYRLSLEADRAKREAHEREMAEQFRLEQIRKEQEEEREAIRLSLEQALPPEPKEENAEPVSKLRIRTPSGEFLERRFLASNKLQIVFDFVASKGFPWDEYKLLSTFPRRDVTQLDPNKSLLEVKLFPQETLFLEAKE

SEQ ID NO: 7568 - protein, 1578 aa, Homo sapiens
MEELETSLFQTRKAHRIEQMVARWLRRSRDSSARAKVAAADGPARNPTQTLIPVRHTVKIDKDTLLQDYGFHISESLPLTVVAVTAGGSAHGKLFPGDQILQMNNEPAEDLSWERAVDILREAEDSLSITVVRCTSGVPKSSFLTEEKRARLKTNPVKVHFAEEVLISGHSQGNSLLCMPNVLKLYLENGQTKAFKFEANTTVKDIILTVKEKLSIRSIEYFALALEEQYSISRLHLLHEEELIQQVVEREESHDYRCLFRVCFVPKDPLDLLKEDPVAFEYLYLQSCSDVLQERFAVEMKCSSALRLAALHIQERIYACAQPQKISLKYIEKDWGIENFISPTLLRNMKGKDIKKAISFHMKRNQNLLEPRQKQLISAAQLRLNYLQILGELKTYGGRIFNATLMLQDRESYIALLVGAKYGISQVINSKLNIMSTLAEFANISRVELTEESEKVSVVKVYLQDVKVLTLLLESNSAKDLACLIAGYYRLLVDPVTSIFLWPGNKQQAHRVSAEEGYESRACSDSEESSEVDCVLEPLSDRRLVKLAPCRSLIKEEQPPGNSPTPEVARRGPSTCGASSTTDSAESEASDSANTESRGYRTSGSSESMDALEEDDLDTCSSSRSTFFHFGSPGLAESIDSDSQEERSGIETSGFLCLLDLAQRANPQCQKTEFSESAALETFGWAPELSTVRLDPRLYEGSHADYYSLCSSVSPASYLSDSSESTASRQGGAPPAWGQQGWTEAQPSSMLEPLALHPPLAFEDGSSDEEYYDAADKLTPPGPPSGPRDVSTAEPSATSLQNKASTSSPENSLPCGPDGRQPSRRGGVKKYAKTLRKRRSFLQTDYTSQVSFPLVPSASLESVDDVCYYDREPYLALGAPSPTVSSLQDMQGEPGLLETKALGLLAPLRETKSTNPASRVMEMEPETMETKSVIDSRVSSISAIRFRIDPNNKENSGVVPAASSSASTPHCSNPGSSGPDTAQARPSQILPLSQDLDGIAPKEPTIEHGDSSFSLSSGDPNPDRACLASNPGLNNVSQGDTLELQLEPHVQLEMGLESFCTNHIQETAPKYTEPLLSPRDEPRSDECGINPGEKIASIPTKEEPQGQLSLERDREVTNKNGTNVFQEESRKDSGDSPGDVSNNVSQTLDISSPAGKIVTSLSLDAPVTGTEQIPPHPPRDPQGQSREPPGQGCQAQEQKLFVELDLDPDFFLGKQTVSPAVPPEGIKAEAPNHVTGQDIAPRDSPEWVCFNPEPSLPEPLPCPQEDPHLETSNHCLLLEGKSDSSSICLSAEKSFLCFAPESHPEVSASLRVATSLGFAGMNEMVAPRIGMDQCSCQFSYATCFRGPQPETEEEDRDLEAHPMAPLTSPPSAGSPVVLPWRPARAHSCTTAPLSRKSHIWPEYCSRALRQLKATPASTPEGFIQLMESLLELQDILETSWGVGNKHPPEKCTWHFTESRSRLCMGSQKLLSSCRHVIRMDQSPEEMQGAVRDTFQHLVQLAGLCFQFTDCSRCSARHREAAGNLRDVVYTYHQFIEAAKSTCERGYHDLSVKLLARQCTALTAAVFCLTQKFRASTAL

SEQ ID NO: 7569 - protein, 453 aa, Homo sapiens
MWSPEREAEAPAGGDPAGLLPPEWEEDEERMSFLFSAFKRSREVNSTDWDSKMGFWAPLVLSHSRRQGVVRLRLRDLQEAFQRKGSVPLGLATVLQDLLRRGELQRESDFMASVDSSWISWGVGVFLLKPLKWTLSNMLGDNKVPAEEVLVAVELLKEKAEEVYRLYQNSPLSSHPVVALSELSTLCANSCPDERTFYLVLLQLQKEKRVTVLEQNGEKIVKFARGPRAKVSPVNDVDVGVYQLMQSEQLLSRKVESLSQEAERCKEEARRACRAGKKQLALRSLKAKQRTEKRIEALHAKLDTVQGILDRIYASQTDQMVFNAYQAGVGALKLSMKDVTVEKAESLVDQIQELCDTQDEVSQTLAGGVTNGLDFDSEELEKELDILLQDTTKEPLDLPDNPRNRHFTNSVPNPRISDAELEAELEKLSLSEGGLVPSSKSPKRQLEPTLKPL

SEQ ID NO: 7570 - protein, 491 aa, Homo sapiens
MWSPEREAEAPAGGDPAGLLPPEWEEDEERMSFLFSAFKRSREVNSTDWDSKMGFWAPLVLSHSRRQGVVRLRLRDLQEAFQRKGSVPLGLATVLQDLLRRGELQRESDFMASVDSSWISWGVGVFLLKPLKWTLSNMLGDNKVPAEEVLVAVELLKEKAEEVYRLYQNSPLSSHPVVALSELSTLCANSCPDERTFYLVLLQLQKEKRVTVLEQNGEKIVKFARGPRAKVSPVNDVDVGVYQLMQSEQLLSRKVESLSQEAERCKEEARRACRAGKKQLALRSLKAKQRTEKRIEALHAKLDTVQGILDRIYASQTDQMVFNAYQAGVGALKLSMKDVTVEKAESLVDQIQELCDTQDEVSQTLAGGVTNGLDFDSEELEKELDILLQDTTKEPLDLPDNPRNRHFTNSVPNPRISDAELEAELEKLSLSEELVPSSNLQKAIGTDSKAIVGPSSEGPSCKRETRLAGCVHSYLNKKLSECVWKRRKENH

SEQ ID NO: 7571 - protein, 286 aa, Homo sapiens [sequence omitted]

SEQ ID NO: 7572 - protein, 318 aa, Homo sapiens
  VARIANT 132: Xaa = Any Amino Acid
METSVIEGGLNITLTIRLLMHGKEVGSIIGKKGESVKKMREESGAPINISEGNCPERIITFAGPANAVFKGFAMIIDKLEEDISSSMTSSTAATRPPVTLRLVVPASQCGSLIGKGGCKIKEIRESTGAQVXMAGDMLPNSTEQAITIAGIPQSIIECVKQICVVMLESPPKGVTIPYQLKPSSSPVIFAGGQAYTLQGQFAIPQPDLTMLHQLAMQQSHFPMTHGNTGFSAGLDTSAQTTSHELTIPNDLIGCIIGRQGAKINEIRQMSGAQIKIANPVEGSTDRQVTITGSAASISLAQYLINVRLSSETGGMGSS

SEQ ID NO: 7573 - protein, 276 aa, Homo sapiens
MGNSMKSTPAPAERPLPNPEGLDSDFLAVLSDYPSPDISPPIFRRGEKLRVISDEGGWWKAISLSTGRESYIPGICVARVYHGWLFEGLGRDKAEELLQLPDTKVGSFMIRESETKKGFYSLSVRHRQVKHYRIFRLPNNWYYISPRLTFQCLEDLVNHYSEVADGLCCVLTTPCLTQSTAAPAVRASSSPVTLRQKTVDWRRVSRLQEDPEGTENPLGVDESLFSYGLRESIASYLSLTSEDNTSFDRKKKSISLMYGGSKRKSSFFSSPPYFED

SEQ ID NO: 7574 - protein, 275 aa, Homo sapiens
GNSMKSTPAPAERPLPNPEGLDSDFLAVLSDYPSPDISPPIFRRGEKLRVISDEGGWWKAISLSTGRESYIPGICVARVYHGWLFEGLGRDKAEELLQLPDTKVGSFMIRESETKKGFYSLSVRHRQVKHYRIFRLPNNWYYISPRLTFQCLEDLVNHYSEVADGLCCVLTTPCLTQSTAAPAVRASSSPVTLRQKTVDWRRVSRLQEDPEGTENPLGVDESLFSYGLRESIASYLSLTSEDNTSFDRKKKSISLMYGGSKRKSSFFSSPPYFED

SEQ ID NO: 7575 - protein, 6457 aa, Homo sapiens
MKACASFWKKPTLPEKGSSDVQETEDSCPKSRKLAPENWSVINSSSGERVGTFLEKRITSSLTSEEKECNFEDRILFSREILWSGTSESEDQVSPSSESHVPSSNGISSSLPLFYSEVEETCLSHTEHPDREYETIQFSSKKLFSMMKTNKNKNSGFSSDLSFSASRFTVENEDLDVAPCPLAHLFLSRDQVRLLEENVRNQIPSKPKTKLGSRTTYQCSRSQESLNQNQPSVGMVISVQAQDSFPGQNAFQNQGLYEVQFTSQAQYINHNQESIKSQPESKASNFAQPEDVMKKPFSSSTQDSFQSQDLDRNQHFVEVPSIVEAKYSVKGLESDEHLGEDQHCVWFIDSNKVKYSIKGQDTIFKNAEFLVLTLNPNLVTEDMPQLRSVKAQGQQQIVSSELNQDSVYSSVPLLSTIKGQKNRRKTPDSKSKLSLNVPSLKAKKTPTSQVFQITVCHTLKNRNELGCKNNTEKKELHERKDISDIALHLISVSKLILPYVKNYSRKQLVKVMPGLIKCGHFLQKQNKSPDTEKINYAGPLEETGISDITKKEKEYDKENKRLKNISPKMLPQLEQSFMVNTVQLKAPCLLVETNGKSKESLKDSITQAKGIGITEFHVLNSKKPFDLHIPKHKTSLEEAISKPMQKLVSSPEMESNNRMKIQEDLQSSENSHLQLSNGEELPTSTPKTQRCFPRENTQKQKDFLELVLELSNVGLLISPGSKMHKSSEELEAIKIQVNTESVNLKESKPLILNVTEDSDLRESEELECNTGSNITNMHQDKETSDAFHSATYTTISQLPDTETHSISKAKADTLRIIRLSHSASKQEKLPDEKETQNAEYIDKSCTFKKPQQCDRKEQEKEANSELTQGFRFSIHLKQKPKYVKFQMEQISSGSSKAPNKEQEVQPQTLSTQTILENSPCPMMDPFQVEKVKQSTDRPTDRESAGDPKNPLTMPENLPVGELLIETTEYSVPFGGNLQKTTDSHIAEEKEDVKRYLPAVALGSFNNHLLTLPYFKRQEIKKKLSETKSVLSVKYVIMKVKKPAISLMPYINICGTSNHRKKMGGNFEIIIKQILQDKIAAGMLLNVIYPPMSILPNTRMYSRLNAENHSHIKLVQEESQIEREEKYPYFINEGNESQNTLDAKLQDEVKGVKETLPKAVLHDSCNLGLDAHLEKEIKTEKEMHQPIPFTETIIESVVSPIMELSHAENVKSTQKTQTDCKCTADSETPSPISGKSLIGDPLNQTRESYIPSNGSDTREMGYCFAEEKTEIPKDLPATSPETFNYCTPVLSCSKVMKKRVTFALTTSTAKPKCVNTKAVKPSISETVSVTSHRKKSELDFKTKFKKINQTKGLVPECLNTLCSPMHSRLQREFCLPASQLKQGETADKTYTDVFAKNSISHDREEKLQDGKEEEHKVLLEAAPQLSQHLGSEAGQMKEIHLESDPVLNCLTLELHINGQRLQHQTGFEQTTLETSLQMGPLEAEELQKANETENDIKVLGGPKIPPPKALQALENSDGLILNAYQKDNELVKSDEELNQPGSTNIQVQPQTHFTQTILKSTSCPTLDQFPFEKVESHVRFSPLKSGEAKVDEIIFYAREGGISSDSSHQKEQAGGTEKKETAIFGSCMPALSTPKTTRNLKQFSDMKTLVNPKCGIIKAKKPSISYMLNIRAGAGPKRRKELSCNLTTKMKELHQGKKGVDETYAFLTMTPDINKYSKVETEKDTLREKRLSSTQVKQDTSPHEDSITSRDIKETLLQDEEQEERKQEALLKVIPQHLQHFMFRSGQGKDLDFHKLENQGSRKILFVTKQDVPQQLQPAEPIQREETKKCLQTQNGTICTVNSKLLPLKSEDSVNGEVLTGAIKRGVPTDRKCMGEQHNSGKGEKAEFNKDLQATVLELQKSPHGGEAQKANLTDMESGSSNAMNMNVQHEREDKNIQKMLTESVPCYSQHLRFSTHQMKDPDPCKSGSEPKSPEGRSWNLSHIVQKTKQETHFRETVLEPISGYMMKQSPHMQEGIKCMEGLKTSFPKTGKSKIGSIPRDTPWDENPRRKWDSSISEKTAWNQKNLQTVLKPLDFSSLMSSEYESRSYTLEFIGKKSMSPKCVTLKAKQLRILQLFNIIRYSTENHRKKKQHRFKYKMKGKQWYTSIGEALLSATEYAKSTTSKSMIDKLLYNTAARCILSNRTRRQNLDGHITEEKEEVQENVAAIFLGLLDFFMPVLSDSKNQRNTAQLSEKEIIFNAKCLTMKEKKSSISQIHKINRESTRKHRKKCKSYLKTVSNRKCQENHGHITEEEEEVQENSPATFLGPLDFFMPVLSDSKNQINTIQLSERKIILNPKCLTMKEKKPPISQIHKISGQFTTKHRKKLESNLKTKLKAMWQGENVADTFPNTTSFTPDSSDIKRQSGFQTEIDMRISGLSHTQPTQIESLAEGIARYSDPIDKRRTSNLVKGAKLHDRESGEEKQEHLTEMDPFYAENFMANTYLRKDRHLGKSEDVLLGETFFSKSQIYKGNSEKNVKIEKNKNGKESLKVGLARMEKSDNCAELSEATDDAISNKYDKQNIGHSVLKENAFCNLAAIVPDSVGRHSPASEEMKRQNGRLKMADRSSPQGRPLQAKQSAVSQSPDTAGYAVVSNNKEQKQNFKAQKTEAEVDLIDQEAKINVAEEFNPESVFFSKIHPLQIENKKEFKTADWKTRADPKTFALPKKQQELCVSGTIWSYPNPYTSISPKIIRHKDKAKTADVESTMHTKQIKLKAKRITVSQLLEYGTASNKKELRGNIQQQKSFQLSKNAVHRVLKAVYDSGYCVSSIKKLTEVKMEKDKPKDRTCILPQPKLEKPLKEMQRSLSGCTDMSSILRKQEQDIREKEQKHQSISEDISQYYIGPLRISSQQINYSSFDAPRIRTDEELEFLIAQRAKEKDVGIAKHSVSIPWEREGSKRLDIPLNSKGQNIFFTELDTSQQKTCQEQELLKQEDISMTNLGSMACPIMEPLHLENTGKVTEEEDVYINRKISSHVLGKEGLKETDIFVGSKGQKFLCTNSEVQHKVPAEQKEQVNPDHVPESILDSESFLSKDPLHLKQAVNTARKENVTISESFNENLWGKEQSKLDITLKSNRQKMDFSKKLRMKHLSNYYQNKENILESVLPCILHQLYIENPKKEGSAEEIMSSKVLSPMVEKASHEVGIPVDQPPCSEGIHLNIKGRKEHPQESTHEAFPASVSHSLMDVLQIKSPKVKKALKAINSLGYLTSNTKGIGLLFPRQAEKEEKYTYKALPKPASHSKTDLFQFNASMQQEKLDAMDIPHYDYLTSQTREAVKQMDVIVGYTQNSKKRQDLLKTGQKWQYLPISYENFWEHISCPQKYPCLLQHLMPQEKEALSEGGNLSSRTPGLDLFSADQLSTITKNRLEWIVPLISPRQMKKQDSMLPLGSYHKTIKYASLLFPKGMKSSDGVQVFDLISNNSSPKLRLGKKIETQKANEKVQKEVCLPITLHSLSASMPILQESKGQKDSVEQVIRKGVICHKRRTSKWKKSVFSHILNTSDCGASSNRLEMQWNMTDKMVNVKHRMSEIDLVAAKIYIIKQEGKMQEGKGKSSMKLTNLCTSLPSLSHSNSNSRTKAGKDKSGTLKGCLPPLKLQASSNARRVSSAESINRDSLSNVIESKCFPQKKKEDRENIVDVKDVMGLKCITLKGKKSLFRHLLHGKEPQRSNKKLEKMTQEDESNLNVVQNKLCASILSPPHLEWNPRIKEVYMRGITRFCLSSSTQQELSDTMEKCEQPIDDSLSSIEKAKHMPQKDKDRVEKALEKIMHSKRIALEVKQPSIFQELELNIKEKGGKIQEDKEVEIWSKPFASISFLPYSKVGTIEGEEAMRIKMRSSFSQPNLQESSDTEKTAYEKCISDNISNSVKKALESILQKEQRQKMEKIRALKKMKSSISQGIQLDIKEQEKRIEHIKGEPSVLLTNACASIPSPSHLQLDTRREKAEYVTEITRYYLPELSHQKSSEAGEKADGVASKGDITIKVQKAKDYMQQKEDDEVKISAKKDIMHPEDKDKRTAGKKEEQGVTRSFLPPSWHMESSDTGKLKYTLSYLNDITGDSNRTKYMAQIQKDKANISEKSVMHPEYIAVKAEKSPLSHILKTKELQVNISQQGEKAQEGEVEIVVLLSKTCPFVTSSAFLELDSIKEEEGEPRITRSFMPHLEIQESLPSRQTAPTKPTESLVKKEKQLLPQKEDRVQTVSMHGLMHPNGAVFKAKTSAPPQVFSITEHSPLSKRKEPQWGMKERAGQKQDRTGRPHVILTKTHPFMPSLSHHRFSPSQPKLPISSGAGKSRLANSNEGISSHKVILKANQQMPYKEAKDRVKIEGREGRILPKRIHLRAEALPLALLCNGKNYSLHIEEQGEGVQESKKEPGVVPRKSASFPPPPFYLNCDTRRNEKEGTLGKTQFSFPPLKIQDSSDSGKKAYTESLHGYTLSNSKGPVQPTAQGEEKGGLRIDMEDKMLPKCTDLKAKQLLLSDILNTKKLQWKSKEQKRKIQEDKNKQVKGLPSINTSLLTPPYLKFDTTEGQENVIRIAKVSLPQSRSKESSDAGRIACPEATHGELSSDVKQLKAHLLQKEEKDREKVADMTSVLDPNKMYLKAKKSPVLHTHSFSDLQWKTREQEEEKVQKVKSGPGVMLSKSPSRSSPLHLNVNTGFQEESIPILTRPSFPLVKLQVSPDTEGGTCIRPIAGDILIYLQKGKHVSQNKEEDDVQIVSILIFPKHQEEKVQECEGEPGVVLTKSTSLPSLSQLELDKETHLGNEMLRLKRPILRRISHIGETVHRESVVGDIPKDVKNEKQHIPQKEERNQKKIIDMRGTDITLKSKKSPRSCMLHRTELHVNIGGQGRKEHEGQDKPPGMIQRKMCILFSKPLPSNLKLERATHADEERLGGKTSFVLPLMPSALPDTEKTADAEARSGDVRKGKPHRSQKENRHEVKTIDMRFRIHCQEARISPMSHILNAKELVLNINKLEKKVHKDKDEACVVLSRTFLSIPSAPPLYLDSGNKTDKDTPGITGSSCPQRTLHVPSNTQKITNRDSVEGVDKNVVKQAEQYVPRPEAEQQLTSNFMISVQQRNQPSRVRKISKELYVTLGTPANSKGFSVSERYAHQQETSSKVSPELAGSCKFDKPKEDGQSNDRISKMFSPKVLAPQTKGSLKKISIVTNWNAPQNIEEQDIVMKKQVIRRCEHGHKTRTNTILSKFPLQSGKQKTPSETDVDKKTTAHLSLQMLPGIHMDMTEIDPAKGGRKQALLISEQEEGVLEFLPKSLFPPWTFQFQSGDLEEKHQTDANTNINLEQKKLEMDNDSTVNQKEGKLKIGTNRALHLQEEKTEMHKARTANLEKERGRMDTSSSAHPHLLSLKAEESQMKTQVITHRENSRLIMQKQKKELEASNAKQSIQLQKLFQRNVLDSFYSYVPLSPKRKDQKGRLTIRDLKRELSTKYLTMKIQNHPIPQMLNITGRGTPSNRKKLEYDVKLKNIASWSKDVSGIFIRSLSISIMRSPHTDPKTNLEREKRICLPKFQEKSPNTSEMSKRDTLTIVKGEQNFTNTVPQDPQPFAVDKQQMQKLPNVKSEANLRSEMNKKYLKAQTKERIVPEHDVSRIIKKPDLRIIEQEEKILKRILTPTECPSMLEDPKLPKQRDQSEPVWDMTTQKVQQQKAFPGTVPIPPQVKSSEVKIVADSTNAEHLLPICEATKAISESQVKNMIQDKVSSDKLDNIQAYKPDDLKSPPFPEGPDTISTAIYPKTQHKSLLEQFTPKEKNKLTSHLESKALEIQLNLIPEMARKSLQMFNFYPKGTISKDNSWRFYSRHKTMNFMSLEGTDTIEPNSKHKHQKDSPLASNMKTLIVDVSSDSEETITKLQSINKLENGTSAVTSASEMLLPHTLQNHSVKEKGKLLMHFSVKTLEIQMKAFPRIVRESYAMTSAHERKKPLSNCIHPGFTGPKRQNRILLLSEEKSLHQIDLDLQYKYLRFLLGLPVGSTFPKPNVLPKHSKLNTIAVCKNVNAGGQSGSLSIDTELLEQHISFKKQSPHENSSLIRKFPQPTLVCASDRDLHSPRKKDTQVLSESEFHVTPEKNKQYHVWFQERNTCESVDLRTQRNATGSAVSCETQISEDFVDIQTDIESPADLDECSCLEVSESEECVFLEANSYLSQESENILFELQTGIPLENVYKITTDLKSFYSEDSGSHCTRECRKETLIITPPSCKSHKSRKYRSSSKMKSPDWLCHSSSNTAEIQSRSSSVSFSEEKISWTTKSRTSYSSAPLTESNIKSHLAKNQGKSHRHPESQERKKARSDLFRKNSSHWDHDYSCTHSKGKRDRKKRVYDYESERLDCFQSKHKSASKPHHDDINFYSERKQNRPFFFACVPADSLEVIPKTIRWTIPPETLRKRNFRIPLVAKISSSWNIWSSSKKLLGSLSGSLTTVFHS

SEQ ID NO: 7576 - protein, 1539 aa, Homo sapiens
MDSYFKAAVSDLDKLLDDFEQNPDEQDYLQDVQNAYDSNHCSVSSELASSQRTSLLPKDQECVNSCASSETSYGTNESSLNEKTLKGLTSIQNEKNVTGLDLLSSVDGGTSDEIQPLYMGRCSKPICDLISDMGNLVHATNSEEDIKKLLPDDFKSNADSLIGLDLSSVSDTPCVSSTDHDSDTVREQQNDTSSELQNREIGGIKELGIKVDTTLSDSYNYSGTENLKDKKIFNQLESIVDFNMSSALTRQSSKMFHAKDKLQHKSQPCGLLKDVGLVKEEVDVAVITAAECLKEEGKTSALTCSLPKNEDLCLNDSNSRDENFKLPDFSFQEDKTVIKQSAQEDSKSLDLKDNDVIQDSSSALHVSSKDVPSSLSCLPASGSMCGSLIESKARGDFLPQHEHKDNIQDAVTIHEEIQNSVVLGGEPFKENDLLKQEKCKSILLQSLIEGMEDRKIDPDQTVIRAESLDGGDTSSTVVESQEGLSGTHVPESSDCCEGFINTFSSNDMDGQDLDYFNIDEGAKSGPLISDAELDAFLTEQYLQTTNIKSFEENVNDSKSQMNQIDMKGLDDGNINNIYFNAEAGAIGESHGINIICETVDKQNTIENGLSLGEKSTIPVQQGLPTSKSEITNQLSVSDINSQSVGGARPKQLFSLPSRTRSSKDLNKPDVPDTIESEPSTADTVVPITCAIDSTADPQVSFNSNYIDIESNSEGGSSFVTANEDSVPENTCKEGLVLGQKQPTWVPDSEAPNCMNCQVKFTFTKRRHHCRACGKVFCGVCCNRKCKLQYLEKEARVCVVCYETISKAQAFERMMSPTGSNLKSNHSDECTTVQPPQENQTSSIPSPATLPVSALKQPGVEGLCSKEQKRVWFADGILPNGEVADTTKLSSGSKRCSEDFSPLSPDVPMTVNTVDHSHSTTVEKPNNETGDITRNEIIQSPISQVPSVEKLSMNTGNEGLPTSGSFTLDDDVFAETEEPSSPTGVLVNSNLPIASISDYRLLCDINKYVCNKISLLPNDEDSLPPLLVASGEKGSVPVVEEHPSHEQIILLLEGEGFHPVTFVLNANLLVNVKFIFYSSDKYWYFSTNGLHGLGQAEIIILLLCLPNEDTIPKDIFRLFITIYKDALKGKYIENLDNITFTESFLSSKDHGGFLFITPTFQKLDDLSLPSNPFLCGILIQKLEIPWAKVFPMRLMLRLGAEYKAYPAPLTSIRGRKPLFGEIGHTIMNLLVDLRNYQYTLHNIDQLLIHMEMGKSCIKIPRKKYSDVMKVLNSSNEHVISIGASFSTEADSHLVCIQNDGIYETQANSATGHPRKVTGASFVVFNGALKTSSGFLAKSSIVEDGLMVQITPETMNGLRLALREQKDFKITCGKVDAVDLREYVDICWVDAEEKGNKGVISSVDGISLQGFPSEKIKLEADFETDEKIVKCTEVFYFLKDQDLSILSTSYQFAKEIAMACSAALCPHLKTLKSNGMNKIGLRVSIDTDMVEFQAGSEGQLLPQHYLNDLDSALIPVIHGGTSNSSLPLEIELVFFIIEHLF

SEQ ID NO: 7577 - protein, 1778 aa, Homo sapiens
MSIVIPLGVDTAETSYLEMAAGSEPESVEASPVVVEKSNSYPHQLYTSSSHHSHSYIGLPYADHNYGARPPPTPPASPPPSVLISKNEVGIFTTPNFDETSSATTISTSEDGSYGTDVTRCICGFTHDDGYMICCDKCSVWQHIDCMGIDRQHIPDTYLCERCQPRNLDKERAVLLQRRKRENMSDGDTSATESGDEVPVELYTAFQHTPTSITLTASRVSKVNDKRRKKSGEKEQHISKCKKAFREGSRKSSRVKGSAPEIDPSSDGSNFGWETKIKAWMDRYEEANNNQYSEGVQREAQRIALRLGNGNDKKEMNKSDLNTNNLLFKPPVESHIQKNKKILKSAKDLPPDALIIEYRGKFMLREQFEANGYFFKRPYPFVLFYSKFHGLEMCVDARTFGNEARFIRRSCTPNAEVRHEIQDGTIHLYIYSIHSIPKGTEITIAFDFDYGNCKYKVDCACLKENPECPVLKRSSESMENINSGYETRRKKGKMTREERKMEAILQAFARLEKREKRREQALERISTAKTEVKTECKDTQIVSDAEVIQEQAKEENASKPTPAKVNRTKQRKSFSRSRTHIGQQRRRHRTVSMCSDIQPSSPDIEVTSQQNDIENTVLTIEPETETALAEIITETEVPALNKCPTKYPKTKKHLVNEWLSEKNEKTGKPSDGLSERPLRITTDPEVLATQLNSLPGLTYSPHVYSTPKHYIRFTSPFLSEKRRRKEPTENISGSCKKRWLKQALEEENSAILHRFNSPCQERSRSPAVNGENKSPLLLNDSCSLPDLTTPLKKRRFYQLLDSVYSETSTPTPSPYATPTHTDITPMDPSFATPPRIKSDDETCRNGYKPIYSPVTPVTPGTPGNTMHFENISSPESSPEIKRRTYSQEGYDRSSTMLTLGPFRNSNLTELGLQEIKTIGYTSPRSRTEVNRQCPGEKEPVSDLQLGLDAVEPTALHKTLETPAHDRAEPNSQLDSTHSGRGTMYSSWVKSPDRTGVNFSVNSNLRDLTPSHQLEVGGGFRISESKCLMQDDTRGMFMETTVFCTSEDGLVSGFGRTVNDNLIDGNCTPQNPPQKKKVSLLEYRKRQREARKSGSKTENFPLISVSPHASGSLSNNGDGCASSNDNGEQVDHTASLPLPTPATVYNATSEETSNNCPVKDATASEKNEPEVQWTASTSVEQVRERSYQRALLLSDHRKDKDSGGESPCVSCSPSHVQSSPSSHSNHIPQLQAKGPVPSFSELMEDPDPENPEPTTTNECPSPDTSQNTCKSPPKMSKPGSPGSVIPAQAHGKIFTKPDPQWDSTVSASEAENGVHLKTELQQKQLSNNNQALSKNHPPQTHVRNSSEQLSQKLPSVPTKLHCPPSPHLENPPKSSTPHTPVQHGYLSPKPPSQQLGSPYRPHHSQSPQVGTPQREPQRNFYPAAQNLPANTQQATSGTLFTQTPSGQSSATYSQFNQQSLNSTAPPPPPPPPPSSSYYQNQQPSANFQNYNQLKGSLSQQTVFTSGPNQALPGTTSQQTVPGHHVTPGHFLPSQNPTIHHQTAAAVVPPPPPPPPAPGPHLVQQPNSHQQHSVAHVVGPVHAVTPGSHIHSQTAGHHLPPPPPPPGPAPHHHPPPHPSTGLQGLQAQHQHVVNSAPPPPPPPPPSSVLASGHHTTSAQALHHPPHQGPPLFPSSAHPTVPPYPSQATHHTTLGPGPQHQPSGTGPHCPLPVTGPHLQPQGPNSIPTPTASGFCPHPGSVALPHGVQGPQQASPVPGQIPIHRAQVPPTFQNNYHGSGWH

SEQ ID NO: 7578 - protein, 443 aa, Homo sapiens
ASPPPSVLISKNEVGIFTTPNFDETSSATTISTSEDGSYGTDVTRCICGFTHDDGYMICCDKCSVWQHIDCMGIDRQHIPDTYLCERCQPRNLDKERAVLLQRRKRENMSDGDTSATESGDEVPVELYTAFQHTPTSITLTASRVSKVNDKRRKKSGEKEQHISKCKKAFREGSRKSSRVKGSAPEIDPSSDGSNFGWETKIKAWMDRYEEANNNQYSEGVQREAQRIALRLGNGNDKKEMNKSDLNTNNLLFKPPVESHIQKNKKILKSAKDLPPDALIIEYRGKFMLREQFEANGYFFKRPYPFVLFYSKFHGLEMCVDARTFGNEARFIRRSCTPNAEVRHEIQDGTIHLYIYSIHSIPKGTEITIAFDFDYGNCKYKVDCACLKENPECPVLKRSSESMENINSGYETRRKKGKTKIFQKKKIHKIRILLWIVKERPTK

SEQ ID NO: 7579 - protein, 453 aa, Homo sapiens
MVLVLSDTSASPLLSVLISKNEVGIFTTPNFDETSSATTISTSEDGSYGTDVTRCICGFTHDDGYMICCDKCSVWQHIDCMGIDRQHIPDTYLCERCQPRNLDKERAVLLQRRKRENMSDGDTSATESGDEVPVELYTAFQHTPTSITLTASRVSKVNDKRRKKSGEKEQHISKCKKAFREGSRKSSRVKGSAPEIDPSSDGSNFGWETKIKAWMDRYEEANNNQYSEGVQREAQRIALRLGNGNDKKEMNKSDLNTNNLLFKPPVESHIQKNKKILKSAKDLPPDALIIEYRGKFMLREQFEANGYFFKRPYPFVLFYSKFHGLEMCVDARTFGNEARFIRRSRTPNAEVRHEIQDGTIHLYIYSIHSIPKGTEITIAFDFDYGNCKYKVDCACLKENPECPVLKRSSESMENINSGYETRRKKGKKTKIFQKKKIHKIRILLRIVKERPTK

SEQ ID NO: 7580 - protein, 1858 aa, Homo sapiens
MSIVIPLGVDTAETSYLEMAAGSEPESVEASPVVVEKSNSYPHQLYTSSSHHSHSYIGLPYADHNYGARPPPTPPASPPPSVLISKNEVGIFTTPNFDETSSATTISTSEDGSYGTDVTRCICGFTHDDGYMICCDKCSVWQHIDCMGIDRQHIPDTYLCERCQPRNLDKERAVLLQRRKRENMSDGDTSATESGDEVPVELYTAFQHTPTSITLTASRVSKVNDKRRKKSGEKEQHISKCKKAFREGSRKSSRVKGSAPEIDPSSDGSNFGWETKIKAWMDRYEEANNNQYSEGVQREAQRIALRLGNGNDKKEMNKSDLNTNNLLFKPPVESHIQKNKKILKSAKDLPPDALIIEYRGKFMLREQFEANGYFFKRPYPFVLFYSKFHGLEMCVDARTFGNEARFIRRSCTPNAEVRHEIQDGTIHLYIYSIHSIPKGTEITIAFDFDYGNCKYKVDCACLKENPECPVLKRSSESMENINSGYETRRKKGKKDKDISKEKDTQNQNITLDCEGTTNKMKSPETKQRKLSPLRLSVSNNQEPDFIDDIEEKTPISNEVEMESEEQIAERKRKMTREERKMEAILQAFARLEKREKRREQALERISTAKTEVKTECKDTQIVSDAEVIQEQAKEENASKPTPAKVNRTKQRKSFSRSRTHIGQQRRRHRTVSMCSDIQPSSPDIEVTSQQNDIENTVLTIEPETETALAEIITETEVPALNKCPTKYPKTKKHLVNEWLSEKNEKTGKPSDGLSERPLRITTDPEVLATQLNSLPGLTYSPHVYSTPKHYIRFTSPFLSEKRRRKEPTENISGSCKKRWLKQALEEENSAILHRFNSPCQERSRSPAVNGENKSPLLLNDSCSLPDLTTPLKKRRFYQLLDSVYSETSTPTPSPYATPTHTDITPMDPSFATPPRIKSDDETCRNGYKPIYSPVTPVTPGTPGNTMHFENISSPESSPEIKRRTYSQEGYDRSSTMLTLGPFRNSNLTELGLQEIKTIGYTSPRSRTEVNRQCPGEKEPVSDLQLGLDAVEPTALHKTLETPAHDRAEPNSQLDSTHSGRGTMYSSWVKSPDRTGVNFSVNSNLRDLTPSHQLEVGGGFRISESKCLMQDDTRGMFMETTVFCTSEDGLVSGFGRTVNDNLIDGNCTPQNPPQKKKVSLLEYRKRQREARKSGSKTENFPLISVSPHASGSLSNNGDGCASSNDNGEQVDHTASLPLPTPATVYNATSEETSNNCPVKDATASEKNEPEVQWTASTSVEQVRERSYQRALLLSDHRKDKDSGGESPCVSCSPSHVQSSPSSHSNHIPQLQAKGPVPSFSELMEDPDPENPEPTTTNECPSPDTSQNTCKSPPKMSKPGSPGSVIPAQAHGKIFTKPDPQWDSTVSASEAENGVHLKTELQQKQLSNNNQALSKNHPPQTHVRNSSEQLSQKLPSVPTKLHCPPSPHLENPPKSSTPHTPVQHGYLSPKPPSQQLGSPYRPHHSQSPQVGTPQREPQRNFYPAAQNLPANTQQATSGTLFTQTPSGQSSATYSQFNQQSLNSTAPPPPPPPPPSSSYYQNQQPSANFQNYNQLKGSLSQQTVFTSGPNQALPGTTSQQTVPGHHVTPGHFLPSQNPTIHHQTAAAVVPPPPPPPPAPGPHLVQQPNSHQQHSVAHVVGPVHAVTPGSHIHSQTAGHHLPPPPPPPGPAPHHHPPPHPSTGLQGLQAQHQHVVNSAPPPPPPPPPSSVLASGHHTTSAQALHHPPHQGPPLFPSSAHPTVPPYPSQATHHTTLGPGPQHQPSGTGPHCPLPVTGPHLQPQGPNSIPTPTASGFCPHPGSVALPHGVQGPQQASPVPGQIPIHRAQVPPTFQNNYHGSGWH

SEQ ID NO: 7581 - protein, 1858 aa, Homo sapiens
MSIVIPLGVDTAETSYLEMAAGSEPESVEASPVVVEKSNSYPHQLYTSSSHHSHSYIGLPYADHNYGARPPPTPPASPPPSVLISKNEVGIFTTPNFDETSSATTISTSEDGSYGTDVTRCICGFTHDDGYMICCDKCSVWQHIDCMGIDRQHIPDTYLCERCQPRNLDKERAVLLQRRKRENMSDGDTSATESGDEVPVELYTAFQHTPTSITLTASRVSKVNDKRRKKSGEKEQHISKCKKAFREGSRKSSRVKGSAPEIDPSSDGSNFGWETKIKAWMDRYEEANNNQYSEGVQREAQRIALRLGNGNDKKEMNKSDLNTNNLLFKPPVESHIQKNKKILKSAKDLPPDALIIEYRGKFMLREQFEANGYFFKRPYPFVLFYSKFHGLEMCVDARTFGNEARFIRRSCTPNAEVRHEIQDGTIHLYIYSIHSIPKGTEITIAFDFDYGNCKYKVDCACLKENPECPVLKRSSESMENINSGYETRRKKGKKDEDISKEKDTQNQNITLDCEGATNKMKSPETKQRKLSPLRLSVSNNQEPDFIDDIEEKTPISNEVEMESEEQIAERKRKMTREERKMEAILQAFARLEKREKRREQALERISTAKTEVKTECKDTQIVSDAEVIQEQAKEENASKPTPAKVNRTKQRKSFSRSRTHIGQQRRRHRTVSMCSDIQPSSPDIEVTSQQNDIENTVLTIEPETETALAEIITETEVPALNKCPTKYPKTKKHLVNEWLSEKNEKTGKPSDGLSERPLRITTDPEVLATQLNSLPGLTYSPHVYSTPKHYIRFTSPFLSEKRRRKEPTENISGSCKKRWLKQALEEENSAILHRFNSPCQERSRSPAVNGENKSPLLLNDSCSLPDLTTPLKKRRFYQLLDSVYSETSTPTPSPYATPTHTDITPMDPSFATPPRIKSDDETCRNGYKPIYSPVTPVTPGTPGNTMHFENISSPESSPEIKRRTYSQEGYDRSSTMLTLGPFRNSNLTELGLQEIKTIGYTSPRSRTEVNRQCPGEKEPASDLQLGLDAVEPTALHKTLETPAHDRAEPNSQLDSTHSGRGTMYSSWVKSPDSTGVNFSVNSNLRDLTPPHQLEVGGGSRISESKCLMQDDTRGMFMETTVFCTSEDGLVSGFGRTVNDNLIDGNCTPQNPPQKKKVSLLEYRKRQRKARKSGSKTENFPLISVSPHASGSLSNNGDGCASSNDNGEQVDHTASLPLPTPATVYNATSEETSNNCPVKDATASEKNEPEVQWTASTSVEQVRERSYQRALLLSDHRKDKDSGGESPCVSCSPSHVQSSPSSHSNHIPQLQAKGPVPSFSELMEDPDPENPEPTTTNECPSPDTSQNTCKSPPKMSKPGSPGSVIPAQAHGKIFTKPDPQWDSTVSASEAENGVHLKTELQQKQLSNNNQALSKNHPPQTHVRNSSEQLSQKLPSVPTKLHCPPSPHLENPPKSSTPHTPVQHGYLSPKPPSQQLGSPYRPHHSQSPQVGTPQREPQRNFYPAAQNLPANTQQATSGTLFTQTPSGQSSATYSQFNQQSLNSTAPPPPPPPPPSSSYYQNQQPSANFQNYNQLKGSLSQQTVFTSGPNQALPGTTSQQTVPGHHVTPGHFLPSQNPTIHHQTAAAVVPPPPPPPPAPGPHLVQQPNSHQQHSVAHVVGPVHAVTPGSHIHSQTAGHHLPPPPPPPGPAPHHHPPPHPSTGLQGLQAQHQHVVNSAPPPPPPPPPSSVLASGHHTTSAQALHHPPHQGPPLFPSSAHPTVPPYPSQATHHTTLGPGPQHQPSGTGPHCPLPVTGPHLQPQGPNSIPTPTASGFCPHPGSVALPHGVQGPQQASPVPGQIPIHRAQVPPTFQNNYHGSGWH

SEQ ID NO: 7582 - protein, 592 aa, Homo sapiens
MSIVIPLGVDTAETSYLEMAAGSEPESVEASPVVVEKSNSYPHQLYTSSSHHSHSYIGLPYADHNYGARPPPTPPASPPPSVLISKNEVGIFTTPNFDETSSATTISTSEDGSYGTDVTRCICGFTHDDGYMICCDKCSVWQHIDCMGIDRQHIPDTYLCERCQPRNLDKERAVLLQRRKRENMSDGDTSATESGDEVPVELYTAFQHTPTSITLTASRVSKVNDKRRKKSGEKEQHISKCKKGSAPEIDPSSDGSNFGWETKIKAWMDRYEEANNNQYSEGVQREAQRIALRLGNGNDKKEMNKSDLNTNNLLFKPPVESHIQKNKKILKSAKDLPPDALIIEYRGKFMLREQFEANGYFFKRPYPFVLFYSKFHGLEMCVDARTFGNEARFIRRSCTPNAEVRHEIQDGTIHLYIYSIHSIPKGTEITIAFDFDYGNCKYKVDCACLKENPECPVLKRSSESMENINSGYETRRKKGKKDKDISKEKDTQNQNITLDCEGTTNKMKSPETKQRKLSPLRLSVSNNQEPDFIDDIEEKTPISNEVEMESEEQIAERKRKMNWTVDGCGSWFWFRAEASVKALGLTLNVLFG

SEQ ID NO: 7583 - protein, 727 aa, Homo sapiens
MNGEADCPTDLEMAAPKGQDRWSQEDMLTLLECMKNNLPSNDSSKFKTTESHMDWEKVAFKDFSGDMCKLKWVEISNEVRKFRTLTELILDAQEHVKNPYKGKKLKKHPDFPKKPLTPYFRFFMEKRAKYAKLHPEMSNLDLTKILSKKYKELPEKKKMKYIQDFQREKQEFERNLARFREDHPDLIQNAKKSDIPEKPKTPQQLWYTHEKKVYLKVRPDEIMRDYIQKHPELNISEEGITKSTLTKAERQLKDKFDGRPTKPPPNSYSLYCAELMANMKDVPSTERMVLCSQQWKLLSQKEKDAYHKKCDQKKKDYEVELLRFLESLPEEEQQRVLGEEKMLNINKKQATSPASKKPAQEGGKGGSEKPKRPVSAMFIFSEEKRRQLQEERPELSESELTRLLARMWNDLSEKKKAKYKAREAALKAQSERKPGGEREERGKLPESPKRAEEIWQQSVIGDYLARFKNDRVKALKAMEMTWNNMEKKEKLMWIKKAAEDQKRYERELSEMRAPPAATNSSKKMKFQGEPKKPPMNGYQKFSQELLSNGELNHLPLKERMVEIGSRWQRISQSQKEHYKKLAEEQQKQYKVHLDLWVKSLSPQDRAAYKEYISNKRKSMTKLRGPNPKSSRTTLQSKSESEEDDEEDEDDEDEDEEEEDDENGDSSEDGGDSSESSSEDESEDGDENEEDDEDEDDDEDDDEDEDNESEGSSSSSSSSGDSSDSDSN

SEQ ID NO: 7584 - protein, 654 aa, Homo sapiens
MKYIQDFQREKQEFERNLARFREDHPDLIQNAKKSDIPEKPKTPQQLWYTHEKKVYLKVRPDATTKEVKDSLGKQWSQLSDKKRLKWIHKALEQRKEYEEIMRDYIQKHPELNISEEGITKSTLTKAERQLKDKFDGRPTKPPPNSYSLYCAELMANMKDVPSTERMVLCSQQWKLLSQKEKDAYHKKCDQKKKDYEVELLRFLESLPEEEQQRVLGEEKMLNINKKQATSPASKKPAQEGGKGGSEKPKRPVSAMFIFSEEKRRQLQEERPELSESELTRLLARMWNDLSEKKKAKYKAREAALKAQSERKPGGEREERGKLPESPKRAEEIWQQSVIGDYLARFKNDRVKALKAMEMTWNNMEKKEKLMWIKKAAEDQKRYERELSEMRAPPAATNSSKKMKFQGEPKKPPMNGYQKFSQELLSNGELNHLPLKERMVEIGSRWQRISQSQKEHYKKLAEEQQKQYKVHLDLWVKSLSPQDRAAYKEYISNKRKSMTKLRGPNPKSSRTTLQSKSESEEDDEEDEDDEDEDEEEEDDENGDSSEDGGDSSESSSEDESEDGDEVGQTGHSGRGGESCQEGHLVTPHPFSPPRMKRMTRTKTTTRMTMRMKIMSPRAAAPAPPPQGTPQTLTPTEAQPHPRAARESPGAPLPN

SEQ ID NO: 7585 - protein, 764 aa, Homo sapiens
MNGEADCPTDLEMAAPKGQDRWSQEDMLTLLECMKNNLPSNDSSKFKTTESHMDWEKVAFKDFSGDMCKLKWVEISNEVRKFRTLTELILDAQEHVKNPYKGKKLKKHPDFPKKPLTPYFRFFMEKRAKYAKLHPEMSNLDLTKILSKKYKELPEKKKMKYIQDFQREKQEFERNLARFREDHPDLIQNAKKSDIPEKPKTPQQLWYTHEKKVYLKVRPDATTKEVKDSLGKQWSQLSDKKRLKWIHKALEQRKEYEEIMRDYIQKHPELNISEEGITKSTLTKAERQLKDKFDGRPTKPPPNSYSLYCAELMANMKDVPSTERMVLCSQQWKLLSQKEKDAYHKKCDQKKKDYEVELLRFLESLPEEEQQRVLGEEKMLNINKKQATSPASKKPAQEGGKGGSEKPKRPVSAMFIFSEEKRRQLQEERPELSESELTRLLARMWNDLSEKKKAKYKAREAALKAQSERKPGGEREERGKLPESPKRAEEIWQQSVIGDYLARFKNDRVKALKAMEMTWNNMEKKEKLMWIKKAAEDQKRYERELSEMRAPPAATNSSKKMKFQGEPKKPPMNGYQKFSQELLSNGELNHLPLKERMVEIGSRWQRISQSQKEHYKKLAEEQQKQYKVHLDLWVKSLSPQDRAAYKEYISNKRKSMTKLRGPNPKSSRTTLQSKSESEEDDEEDEDDEDEDEEEEDDENGDSSEDGGDSSESSSEDESEDGDENEEDDEDEDDDEDDDEDEDNESEGSSSSSSSSGDSSDSDSN

SEQ ID NO: 7586 - protein, 835 aa, Homo sapiens
MSRRKQGKPQHLSKREFSPEPLEAILTDDEPDHGPLGAPEGDHDLLTCGQCQMNFPLGDILIFIEHKRKQCNGSLCLEKAVDKPPSPSPIEMKKASNPVEVGIQVTPEDDDCLSTSSRRICPKQEHIADKLLHWRGLSSPRSAHGALIPTPGMSAEYAPQGICKDEPSSYTCTTCKQPFTSAWFLLQHAQNTHGLRIYLESEHGSPLTPRVGIPSGLGAECPSQPPLHGIHIADNNPFNLLRIPGSVSREASGLAEGRFPPTPPLFSPPPRHHLDPHRIERLGAEEMALATHHPSAFDRVLRLNPMAMEPPAMDFSRRLRELAGNTSSPPLSPGRPSPMQRLLQPFQPGSKPPFLATPPLPPLQSAPPPSQPPVKSKSCEFCGKTFKFQSNLVVHRRSHTGEKPYKCNLCDHACTQASKLKRHMKTHMHKSSPMTVKSDDGLSTASSPEPGTSDLVGSASSALKSVVAKFKSENDPNLIPENGDEEEEEDDEEEEEEEEEEEEELTESERVDYGFGLSLEAARHHENSSRGAVVGVGDESRALPDVMQGMVLSSMQHFSEAFHQVLGEKHKRGHLAEAEGHRDTCDEDSVAGESDRIDDGTVNGRGCSPGESASGGLSKKLLLGSPSSLSPFSKRIKLEKEFDLPPATMPNTENVYSQWLAGYAASRQLKDPFLSFGDSRQSPFASSSEHSSENGSLRFSTPPGELDGGISGRSGTGSGGSTPHISGPGTGRPSSKEGRRSDTCEYCGKVFKNCSNLTVHRRSHTGERPYKCELCNYACAQSSKLTRHMKTHGQVGKDVYKCEICKMPFSVYSTLEKHMKKWHSDRVLNNDIKTE

SEQ ID NO: 7587 - protein, 800 aa, Homo sapiens
PGSPDVNRAVVRPPPPPPPPPPAPQPTMSRRKQGKPQHLSKREFSPEPLEAILTDDEPDHGPLGAPEGDHDLLTCGQCQMNFPLGDILIFIEHKRKQCNGSLCLEKAVDKPPSPSPIEMKKASNPVEVGIQVTPEDDDCLSTSSRGICPKQEHIADKLLHWRGLSSPRSAHGALIPTPGMSAEYAPQGICKDEPSSYTCTTCKQPFTSAWFLLQHAQNTHGLRIYLESEHGSPLTPRVGIPSGLGAECPSQPPLHGIHIADNNPFNLLRIPGSVSREASGLAEGRFPPTPPLFSPPPRHHLDPHRIERLGAEEMALATHHPSAFDRVLRLNPMAMEPPAMDFSRRLRELAGNTSSPPLSPGRPSPMQRLLQPFQPGSKPPFLATPPLPPLQSAPPPSQPPVKSKSCEFCGKTFKFQSNLVVHRRSHTGEKPYKCNLCDHACTQASKLKRHMKTHMHKSSPMTVKSDDGLSTASSPEPGTSDLVGSASSALKSVVAKFKSENDPNLIPENGDEEEEEDDEEEEEEEEEEEEELTESERVDYGFGLSLEAARHHENSSRGAVVGVGDESRALPDVMQGMVLSSMQHFSEAFHQVLGEKHKRGHLAEAEGHRDTCDEDSVAGESDRIDDGTVNGRGCSPGESASGGLSKKLLLGSPSSLSPFSKRIKLEKEFDLPPAAMPNTENVYSQWLAGYAASRQLKDPFLSFGDSRQSPFASSSEHSSENGSLRFSTPPGELDGGISGRSGTGSGGSTPHISGPGPGRPSSKEGRRSDTCSSHTPIRRSTQRAQDVWQFSDGSSRALKF

SEQ ID NO: 7588 - protein, 779 aa, Homo sapiens
MSRRKQGKPQHLSKREFSPEPLEAILTDDEPDHGPLGAPEGDHDLLTCGQCQMNFPLGDILIFIEHKRKQCNGSLCLEKAVDKPPSPSPIEMKKASNPVEVGIQVTPEDDDCLSTSSRGICPKQEHIADKLLHWRGLSSPRSAHGALIPTPGMSAEYAPQGICKDEPSSYTCTTCKQPFTSAWFLLQHAQNTHGLRIYLESEHGSPLTPRVGIPSGLGAECPSQPPLHGIHIADNNPFNLLRIPGSVSREASGLAEGRFPPTPPLFSPPPRHHLDPHRIERLGAEEMALATHHPSAFDRVLRLNPMAMEPPAMDFSRRLRELAGNTSSPPLSPGRPSPMQRLLQPFQPGSKPPFLATPPLPPLQSAPPPSQPPVKSKSCEFCGKTFKFQSNLVVHRRSHTGEKPYKCNLCDHACTQASKLKRHMKTHMHKSSPMTVKSDDGLSTASSPEPGTSDLVGSASSALKSVVAKFKSENDPNLIPENGDEEEEEDDEEEEEEEEEEEEELTESERVDYGFGLSLEAARHHENSSRGAVVGVGDESRALPDVMQGMVLSSMQHFSEAFHQVLGEKHKRGHLAEAEGHRDTCDEDSVAGESDRIDDGTVNGRGCSPGESASGGLSKKLLLGSPSSLSPFSKRIKLEKEFDLPPAAMPNTENVYSQWLAGYAASRQLKDPFLSFGDSRQSPFASSSEHSSENGSLRFSTPPGELDGGISGRSGTGSGGSTPHISGPGPGRPSSKEGRRSDTFSNLFLGSSHTPIRRSTQRAQDVWQFSDGSSRALKF

SEQ ID NO: 7589 - protein, 754 aa, Homo sapiens [sequence omitted]

SEQ ID NO: 7590 - protein, 715 aa, Homo sapiens
MGTDEQTDFGLGDAHQSDGLNLEREIVSQTTATQEKSQEELPTTNNSVSKEIWLDFEDFCVCFQNIYIFHKPSSYCLNFQKSEFKFSEERVSYYLFVDSLKPIELLVCFSALVRWGEYGALTKDSPPIEPGLLTAETFSWKSLKPGSLVLKIHTYATKATVVRLPVGRHMLLFNAYSPVGHSIHICSMVSFVIGDEHVVLPNFEPESCRFTEQSLLIMKAIGNVIANFKDKGKLSAALKDLQTAHYPVPFHDKELTAQHFRVFHLSLWRLMKKVQITKPPPNFKFAFRAMVLDLELLNSSLEEVSLVEWLDVKYCMPTSDKEYSAEEVAAAIKIQAMWRGTYVRLLMKARIPDTKENISVADTLQKVWAVLEMNLEQYAVSLLRLMFKSKCKSLESYPCYQDEETKIAFADYTVTYQEQPPNSWFIVFRETFLVHQDMILVPKVYTTLPICILHIVNNDTMEQVPKVFQKVVPYLYTKNKKGYTFVAEAFTGDTYVAASRWKLRLIGSSAPLPCLSRDSPCNSFAIKEIRDYYIPNDKKILFRYSVKVLTPQPATIQVRTSKPDAFIKLQVLENEETMVSSTGKGQAIIPAFHFLKSEKGLSSQSYGERHEELINLGSPDSHTISEGQKSSVTSKTTRKGKEKSSEKEKTAKEKQAPRFEPQISTVHPQQEDPNKPYWILRLLRLVCITLAGSLRKHLMLRVRLYLKAKLNQKKK

SEQ ID NO: 7591 - protein, 375 aa, Homo sapiens
MSGSQNNDKRQFLLERLLDAVKQCQIRFGGRKEIASDSDSRVTCLCAQFEAVLQHGLKRSRGLALTAAAIKQAAGFASKTETEPVFWYYVKEVLNKHELQRFYSLRHIASDVGRGRAWLRCALNEHSLERYLHMLLADRCRLSTFYEDWSFVMDEERSSMLPTMAAGLNSILFAINIDNKDLDGQSKFAPTVSDLLKESTQNVTSLLKESTQGVSSLFREITASSAVSILIKPEQETDPLPVVSRNVSADAKCKKERKKKKKVTNIISFDDEEDEQNSGDVFKKTPGAGESSEDNSDRSSVNIMSAFESPFGPNSNGSQSSNSWKIDSLSLNGEFGYQKLDVKGIDDEDVDENEDDVYGNSSGRKHRGHSESPEK

SEQ ID NO: 7592 - protein, 108 aa, Homo sapiens
QKSDSECAEQLRQLARRITEDHVIQHGLVVDGTSLSLALREHEKLLMEVCRNCSAVLCCRMAPLQKAKVIRLIKISPEKPITLAVGDGANDESWVKKEDRLQETVTMQ

SEQ ID NO: 7593 - protein, 577 aa, Homo sapiens
MTELAGASSSCCHRPAGRGAMQSVLHHFQRLRGREGGSHFINTSSPRGEAKMSITSDEVNFLVYRYLQESGFSHSAFTFGIESHISQSNINGTLVPPAALISILQKGLQYVEAEISINEDGTVFDGRPIESLSLIDAVMPDVVQTRQQAFREKLAQQQASAAAAAAAATAAATAATTTSAGVSHQNPSKNREATVNGEENRAHSVNNHAKPMEIDGEVEIPSSKATVLRGHESEVFICAWNPVSDLLASGSGDSTARIWNLNENSNGGSTQLVLRHCIREGGHDVPSNKDVTSLDWNTNGTLLATGSYDGFARIWTEDGNLASTLGQHKGPIFALKWNRKGNYILSAGVDKTTIIWDAHTGEAKQQFPFHSAPALDVDWQNNTTFASCSTDMCIHVCRLGCDRPVKTFQGHTNEVNAIKWDPSGMLLASCSDDMTLKIWSMKQEVCIHDLQAHNKEIYTIKWSPTGPATSNPNSNIMLASASFDSTVRLWDIERGVCTHTLTKHQEPVYSVAFSPDGKYLASGSFDKCVHIWNTQSGNLVHSYRGTGGIFEVCWNARGDKVGASASDGSVCVLDLRK

SEQ ID NO: 7594 - protein, 421 aa, Homo sapiens
SISHFPLTIACNAGFSLIGCGTGKYLKVNSQVHTVGCDYCGPLVEIARNRGCEAMVCDNLNLPFRDEGFDAIISIGVIHHFSTKQRRIRAIKEMARVLVPGGQLMIYVWAMEQKNRRFEKQDVLVPWNRALCSQLFSESSQSGRKRQCGYPERGHPYHPPCSECSCSVCFKEQGGSKRSHSVGYEPAMARTCFANISKEGEEEYGFYSTLGKSFRSWFFSRSLDESTLRKQIERVRPLKNTEVWASSTVTVQPSRHSSLDFDHQEPFSTKEQSLDEEVFVESSSGKHLEWLRAPGTLKHLNGDHQGEMRRNGGGNFLDSTNTGVNCVDAGNIEDDNPSASKILRRISAVDSTDFNPDDTMSVEDPQTDVLDSTAFMRYYHVFREGELCSLLKENVSELRILSSGNDHGNWCIIAEKKGGCD

SEQ ID NO: 7595 - protein, 999 aa, Homo sapiens
MENLESRLKNAPYFRCEKGTDSNPLCRKCETCVLAWKIFSTKEWFCRINDISQRRFLVGILKQLNSLYLLHYFQNILQTTQGKDFIYNRSRINLSKKEGKVVKSSLNQMLDKTVEQKMKEILYWFANSTQWTKANYTLLLLQMCNPKLLLTAANVIRVLFLREENNISGLNQDITDVCFSPEKDHSSKSATSQVYWTAKTQHTSLPLSKAPENEHLLGAASNPEEPWRNSLRCISKMNRLFSGKGDITKPGYDPCNLLVDLDDIRDLSSGFSKYRDFIRYLPIHLSKYILRMLDRHTLNKCASVSQHWAAMAQQVKMDLSAHGFIQNQITFLQGSYTRGIDPNYANKVSIPVPKMVDDGKSMRVKHPKWKLRTKNEYNLWTAYQNEETQQVLIEERNVFCGTYNVRILSDTWVQNRVIHYSGGDLIAVSSNRKIHLLDIIQVKAIPVEFRGHAGSVRALFLCEEENFLLSGSYDLSIRYWDLKSGVCTRIFGGHQGTITCMDLCKNRLVSGGRDCQVKVWDVDTGKCLKTFRHKDPILATRINDTYIVSSCERGLVKVWHIAMAQLVKTLSGHEGAVKCLFFDQWHLLSGSTDGLVMAWSMVGKYERCLMAFKHPKMVVNTESNVLMFQFEHIKWQYAVEKTKQKKNKEKEEEKEENSLMEILSKCNIQVHSPRESVSSKQTVIQELLPGKPPKSRVLLKPAKFSSAVLIEELQSQGKSKSPRRDADDVEKAQKQGQLETPGKLPSHPKKKSWKIPMSPDQFLLTVSTLQHAHNSGEFAYPCRPQTEITDVWGPSISYPRKVLNFKGKSIQRAVDRLRLSNPPIDVKRTSIPLEIQKLQPNLKISLHSPRVQSTIPQPMIIRSRFSGSLKGGDQVTSSIERAVCSTGPLTSMQVIKPNRMLAPQVGTATLSLKKERPRIYTALDPFRVNTEFVLLTVKEEKEHQEAKMKEYQARESTGVVDPGKVSKAAWIRKIKGLPIDNFTKQGKTAAPELGQNVFI

SEQ ID NO: 7596 - protein, 1061 aa, Homo sapiens
MENLESRLKNAPYFRCEKGTDSIPLCRKCETCVLAWKIFSTKEWFCRINDISQRRFLVGILKQLNSLYLLHYFQNILQTTQGKDFIYNRSRINLSKKEGKVVKSSLNQMLDKTVEQKMKEILYWFANSTQWTKANYTLLLLQMCNPKLLLTAANVIRVLFLREENNISGLNQDITDVCFSPEKDHSSKSATSQVYWTAKTQHTSLPLSKAPENEHLLGAASNPEEPWRNSLRCISEMNRLFSGKGDITKPGYDPCNLLVDLDDIRDLSSGFSKYLDFIRYLPIHLSKYILSMLGCMRGFPRHLPSWPSSGVSGSIFFFPGMLDRHTLNKCASVSQHWAAMAQQVKMDLSAHGFIQNQITFLQGSYTRGIDPNYANKVSIPVPKMVDDGKSMRVKHPKWKLRTKNEYNLWTAYQNEETQQVLIEERNVFCGTYNVRILSDTWDQNRVIHYSGGDLIAVSSNRKIHLLDIIQVKAIPVEFRGHAGSVRALFLCEEENFLLSGSYDLSIRYWDLKSGVCTRIFGGHQGTITCMDLCKNRLVSGGRDCQVKVWDVDTGKCLKTFRHKDPILATRINDTYIVSSCERGLVKVWHIAMAQLVKTLSGHEGAVKCLFFDQWHLLSGSTDGLVMAWSMVGKYERCLMAFKHPKEVLDVSLLFLRVISACADGKIRIYNFLNGNCMKVLKANGRGDPVLSFFIQGNRMVVNTESNVLMFQFEHIKWQYAVEKTKQKKNKEKEEEKEENSLMEILSKCNIQVHSPRESVSSKQTVIQELLPGKPPKSRVLLKPAKFSSDDVEKAQKQGQLETPGKLPSHPKKKSWKIPMSPDQFLLTVSALQHAHNSGEFAYPCRPQTEITDVWGPSISYPRKVLNFKGKSIQRAVDRLRLSNPPIDVKRTSIPLEIQKLQPNLKISLHSPRVQSTIPQPMIIRSRFSGSLKGGDQVTSSIERAVCSTGPLTSMQVIKPNRMLAPQVGTATLSLKKERPRIYTALDPFRVNTEFVLLTVKEEKEHQEAKMKEYQARESTGVVDPGKVSKAAWIRKIKGLPIDNFTKQGKTAAPELGQNVFI

SEQ ID NO: 7597 - protein, 511 aa, Homo sapiens
MSTLLINQPQYAWLKELGLREENEGVYNGSWGGRGEVITTYCPANNEPIARVRQASVADYEETVKKAREAWKIWADIPAPKRGEIVRQIGDALREKIQVLGSLVSLEMGKILVEGVGEVQEYVDICDYAVGLSRMIGGPILPSERSGHALIEQWNPVGLVGIITAFNFPVAVYGWNNAIAMICGNVCLWKGAPTTSLISVAVTKIIAKVLEDNKLPGAICSLTCGGADIGTAMAKDERVNLLSFTGSTQVGKQVGLMVQERFGRSLLELGGNNAIIAFEDADLSLVVPSALFAAVGTAGQRCTTARRLFIHESIHDEVVNRLKKAYAQIRVGNPWDPNVLYGPLHTKQAVSMFLGAVEEAKKEGGTVVYGGKVMDRPGNYVEPTIVTGLGHDASIAHTETFAPILYVFKFKNEEEVFAWNNEVKQGLSSSIFTKDLGRIFRWLGPKGSDCGIVNVNIPTSGAEIGGAFGGEKHTGGGRESGSDAWKQYMRRSTCTINYSKDLPLAQGIKFQ

SEQ ID NO: 7598 - protein, 1205 aa, Homo sapiens
MIWPTGLLRGFRFWASVSPPVLDLTHFTGLQGGWGGGGRRQCGPEAASAGSCSAETPSPPPRAPGRGPIMFSRKKRELMKTPSISKKNRAGSPSPQPSGELPRKDGADAVFPGPSLEPPAGSSGVKATGTLKRPTSLSRHASAAGFPLSGAASWTLGRSHRSPLTAASPGELPTEGAGPDVVEDISHLLADVARFAEGLEKLKECVLRDDLLEARRPRAHECLGEALRVMHQIISKYPLLNTVETLTAAGTLIAKVKAFHYESNNDLEKQEFEKALETIAVAFSSTVSEFLMGEVDSSTLLAVPPGDSSQSMESLYGPGSEGTPPSLEDCDAGCLPAEEVDVLLQRCEGGVDAALLYAKNMAKYMKDLISYLEKRTTLEMEFAKGLQKIAHNCRQSVMQEPHMPLLSIYSLALEQDLEFGHSMVQAVGTLQTQTFMQPLTLRRLEHEKRRKEIKEAWHRAQRKLQEAESNLRKAKQGYVQRCEDHDKARFLVAKAEEEQAGSAPGAGSTATKTLDKRRRLEEEAKNKAEEAMATYRTCVADAKTQKQELEDTKVTALRQIQEVIRQSDQTIKSATISYYQMMHMQTAPLPVHFQMLCESSKLYDPGQQYASHVRQLQRDQEPDVHYDFEPHVSANAWSPVMRARKSSFNVSDVARPEAAGSPPEEGGCTEGTPAKDHRAGRGHQVHKSWPLSISDSDSGLDPGPGAGDFKKFERTSSSGTMSSTEELVDPDGGAGASAFEQADLNGMTPELPVAVPSGPFRHEGLSKAARTHRLRKLRTPAKCRECNSYVYFQGAECEECCLACHKKCLETLAIQCGHKKLQGRLQLFGQDFSHAARSAPDGVPFIVKKCVCEIERRALRTKGIYRVNGVKTRVEKLCQAFENGKELVELSQASPHDISNVLKLYLRQLPEPLISFRLYHELVGLAKDSLKAEAEAKAASRGRQDGSESEAVAVALAGRLRELLRDLPPENRASLQYLLRHLRRIVEVEQDNKMTPGNLGIVFGPTLLRPRPTEATVSLSSLVDYPHQARVIETLIVHYGLVFEEEPEETPGGQDESSNQRAEVVVQVPYLEAGEAVVYPLQEAAADGCRESRVVSNDSDSDLEEASELLSSSEASALGHLSFLEQQQSEASLEVASGSHSGSEEQLEATAREDGDGDEDGPAQQLSGFNTNQSNNVLQAPLPPMRLRGGRMTLGSCRERQPEFV

SEQ ID NO: 7599 - protein, 736 aa, Homo sapiens
MATEGMILTNHDHQIRVGVLTVSDSCFRNLAEDRSGINLKDLVQDPSLLGGTISAYKIVPDEIEEIKETLIDWCDEKELNLILTTGGTGFAPRDVTPEATKEVIEREAPGMALAMLMGSLNVTPLGMLSRPVCGIRGKTLIINLPGSKKGSQECFQFILPALPHAIDLLRDAIVKVKEVHDELEDLPSPPPPLSPPPTTSPHKQTEDKGVQCEEEEEEKKDSGVASTEDSSSSHITAAAIAAKIPDSIISRGVQVLPRDTASLSTTPSESPRAQATSRLSTASCPTPKVQSRCSSKENILRASHSAVDITKVARRHRMSPFPLTSMDKAFITVLEMTPVLGTEIINYRDGMGRVLAQDVYAKDNLPPFPASVKDGYAVRAADGPGDRFIIGESQAGEQPTQTVMPGQVMRVTTGAPIPCGADAVVQVEDTELIRESDDGTEELEVRILVQARPGQDIRPIGHDIKRGECVLAKGTHMGPSEIGLLATVGVTEVEVNKFPVVAVMSTGNELLNPEDDLLPGKIRDSNRSTLLATIQEHGYPTINLGIVGDNPDDLLNALNEGISRADVIITSGGVSMGEKDYLKQVLDIDLHAQIHFGRVFMKPGLPTTFATLDIDGVRKIIFALPGNPVSAVVTCNLFVVPALRKMQGILDPRPTIIKARLSCDVKLDPRPEYHRCILTWHHQEPLPWAQSTGNQMSSRLMSMRSANGLLMLPPKTEQYVELHKGEVVDVMVIGRL

SEQ ID NO: 7600 - protein, 769 aa, Homo sapiens
MATEGMILTNHDHQIRVGVLTVSDSCFRNLAEDRSGINLKDLVQDPSLLGGTISAYKIVPDEIEEIKETLIDWCDEKELNLILTTGGTGFAPRDVTPEATKEVIEREAPGMALAMLMGSLNVTPLGMLSRPVCGIRGKTLIINLPGSKKGSQECFQFILPALPHAIDLLRDAIVKVKEVHDELEDLPSPPPPLSPPPTTSPHKQTEDKGVQCEEEEEEKKDSGVASTEDSSSSHITAAAIAAKKHPFYTSPAVVMAHGEQPIPGLINYSHHSTDERIPDSIISRGVQVLPRDTASLSTTPSESPRAQATSRLSTASCPTPKVQSRCSSKENILRASHSAVDITKVARRHRMSPFPLTSMDKAFITVLEMTPVLGTEIINYRDGMGRVLAQDVYAKDNLPPFPASVKDGYAVRAADGPGDRFIIGESQAGEQPTQTVMPGQVMRVTTGAPIPCGADAVVQVEDTELIRESDDGTEELEVRILVQARPGQDIRPIGHDIKRGECVLAKGTHMGPSEIGLLATVGVTEVEVNKFPVVAVMSTGNELLNPEDDLLPGKIRDSNRSTLLATIQEHGYPTINLGIVGDNPDDLLNALNEGISRADVIITSGGVSMGEKDYLKQVLDIDLHAQIHFGRVFMKPGLPTTFATLDIDGVRKIIFALPGNPVSAVVTCNLFVVPALRKMQGILDPRPTIIKARLSCDVKLDPRPEYHRCILTWHHQEPLPWAQSTGNQMSSRLMSMRSANGLLMLPPKTEQYVELHKGEVVDVMVIGRL

SEQ ID NO: 7601 - protein, 202 aa, Homo sapiens
MMKKTTMDLNIRDAKKRTALHWACANGHAEVVTLLADRKYQLDVLDGENRTTLMKALQCQREACANILIDSGADPNIVGVYGNTAVHYAVNSENLSVVAKLLSCGADIELKNKAGHTPLLLAIRKRSEQIVEFLLTKNANAIAVDKFKCIHQQLLEYKQKISKNSQNSNPEGTSEGTLDEAAPLAERTPDTAESLVERTPDE

SEQ ID NO: 7602 - protein, 704 aa, Homo sapiens
MAVPPRGGRAAHMAAIRALQQWCRQQCEGYRDVNICNMTSHLPAAASASPKLTGLVPRQPGAMGVDSRTSCSPQKAQEANKARPLAWEPAAGNSPARASVPAAPNPAATSATSVHVRSPARPSESRLAPTPTEGKVRPRVTNSSPMGWSSAAPCTAAAASHPAVPPSAPDPRPATPQGGGAPRVAAPQTTLSSSSTSAATVDPPAWTPSASRTQQARNKFFQTSAVPPGTSLSGRGPTPSLVLSKDSSKEQARNFLKQALSALEEAGAPAPGRPSPATAAVPSSQPKTEAPQASPLAKPLQSSSPRVLGLPSRMEPPAPLSTSSTSQASALPPAGRRNLAESSGVGRVGAGSRPKPEAPMAKGKSTTLTQDMSTSLQEGQEDGPAGWRANLKPVDRRSPAERTLKPKEPRALAEPRAGEAPRKVSGSFAGSVHITLTPVRPDRTPRPASPGPSLPARSPSPPRRRRLAVPASLDVCDNWLRPEPPGQEARVQSWKEEEKKPHLQGRPGRPLSPANVPALPGETVTSPVRLHPDYLSPEEIQRQLQDIERRLDALELRGVELEKRLRAAEGDDAEDSLMVDWFWLIHEKQLLLRQESELMYKSKAQRLEEQQLDIEGELRRLMAKPEALKSLQERRREQELLEQYVSTVNDRSDIVDSLDEDRLREQEEDQMLRDMIEKLGLQRKKSKFRLSKIWSPKSKSSPSQ

SEQ ID NO: 7603 - protein, 533 aa, Homo sapiens
MAHGSVTFRDVAIDFSQEEWEFLDPAQRDLYRDVMWENYSNFISLGPSISKPDVITLLDEERKEPGMVVREGTRRYCPDLESRYRTNTLSPEKDIYEIYSFQWDIMERIKSYSLQGSIFRNDWECKSKIEGEKEQQEGYFGQVKITSEKMTTYKRHNFLTEYQIVHNGEKVYECKECRKTFIRRSTLSQHLRIHTGEKPYKCKECGQAFRQRAHLIRHHKLHTGEKPYECKECGKAFTVLQELTQHQRLHTGEKPYECKECGKAFRVHQQLARHQRIHTGEKPYECKDCGKTFRQCTHLTRHQRLHTAEKLYECKECGKAFVCGPDLRVHQKIHFGEKPYECKECGKAFRICQQLTVHQSIHTGEKPYECKECGKTFRLRQQLVRHQRIHTREKPYECMECWKTFSSYSQLISHQSIHIGERPYECEECGKAFRLLSQLTQHQSIHTGEKPYECKECRKPFRLLSQLTQHQSIHTGEKPYECKECGKAFRLYSFLTQHQRIHTGEKPYKCKECKKAFRQHSHLTQHQKIHNGI

SEQ ID NO: 7604 - protein, 522 aa, Homo sapiens
MAVSHLPTMVQESVTFKDVAILFTQEEWGQLSPAQRALYRDVMLENYSNLVSLGLLGPKPDTFSQLEKREVWMPEDTPGGFCLDWMTMPASKKSTVKAEIPEEELDQWTIKERFSSSSHWKCASLLEWQCGGQEISLQRVVLTHPNTPSQEYDESGSTMSSSLHSDQSQGFQPSKNAFECSECGKVFSKSSTLNKHQKIHNEKNANQKIHIKEKRYECRECGKAFHQSTHLIHHQRIHTGEKPYECKECGKAFSVSSSLTYHQKIHTGEKPFECNLCGKAFIRNIHLAHHHRIHTGEKPFKCNICEKAFVCRAHLTKHQNIHSGEKPYKCNECGKAFNQSTSFLQHQRIHTGEKPFECNECGKAFRVNSSLTEHQRIHTGEKPYKCNECGKAFRDNSSFARHRKIHTGEKPYRCGLCEKAFRDQSALAQHQRIHTGEKPYTCNICEKAFSDHSALTQHKRIHTREKPYKCKICEKAFIRSTHLTQHQRIHTGEKPYKCNKCGKAFNQTANLIQHQRHHIGEK

SEQ ID NO: 7605 - protein, 231 aa, Homo sapiens
VHTGCCQRPLRFQALGGEGQSADLRPLLTDFRLQFICAPASSLSLRRLRLRPQKEISILCPEQNRMAMSQESLTFKDVFVDFTLEEWQQLDSAQKNLYRDVMLENYSHLVSVGYLVAKPDVIFRLGPGEESWMADGGTPVRTCAEVWQVDEQIDHYKESQDKLPWQAAFIGKETLKDESGQESRTCRKSIYLSTEFDSVRQRLPKYYSWEKAFKTSFKLSWSKWKLCKKER

SEQ ID NO: 7606 - protein, 98 aa, Homo sapiens
MAMSQESLTFKDVFVDFTLEEWQQLDSAQKNLYRDVMLENYSHLVSVGYLVAKPDVIFRLGPGEESWMADGGTPVRTCAGEDRPDVSIFASCILKCCY

SEQ ID NO: 7607 - protein, 480 aa, Homo sapiens
  VARIANT 170, 400: Xaa = Any Amino Acid
MAQADIVLIRLAVMGQNLILTMKDHGFVVCAFNRTVSEVDDFLANEAKGTKVVGAQSLKEMVSKLKKPQRIILLVKAGQAVDYFIKKLIPLLDIGDIIIDGGNSEYRDTTRRCQDLKAKGILFVGSGVSGGEEGAWYGSLLTPGGNKEAWPHIKTIFQGVAAKVGPCCDXVGDEGAGHFVKMAHNRIEYGDMQLICEAYHLMKDVLGMAQDKMAQAFEDWNKTELDSFLIEITANILKFQGADGKHLLPKIRDSAGQKGMGKWTTISALEYGIPVTLIGEAVFAWCLSSLKDGRIQASKKLKGPQKFQFDGDKKSFLEDIRMSLYASKIISYAQGFMLLRQGATEFGWTLNYGDIALMWRGGCIIRSVFLGKIKDAFDRNPEPQNLLLDDFLKSAVENHXDSWWWAVSTGVQAGIPMPCFVTALSFYDKYRHEMLPANLIQAQRDSFGAHTYELLAKPGQFIHTNWTGHGGSVSSSSYNA

SEQ ID NO: 7608 - protein, 392 aa, Homo sapiens
MEAPLVSLDEEFEDLRPSCSEDPEEKPQCFYGSSPHHLEDPSLSELENFSSEIISFKSMEDLVNEFDEKLNVCFRNYNAKTENLAPVKNQLQIQEEEETLQDEEVWDALTDNYIPSLSEDWRDPNIEALNGNCSDTEIHEKEEEEFNEKSENDSGINEEPLLTADQVIEEIEEMMQNSPDPEEEEEVLEEEDGGETSSQADSVLLQEMQALTQTFNNNWSYEGLRHMSGSELTELLDQVEGAIRDFSEELVQQLARRDELEFEKEVKNSFITVLIEVQNKQKEQRELMKKRRKEKGLSLQSSRIEKGNQMPLKRFSMEGISNILQSGIRQTFGSSGTDKQYLNTVIPYEKKASPPSVEDLQMLTNILFAMKEDNEKVPTLLTDYILKVLCPT

SEQ ID NO: 7609 - protein, 391 aa, Homo sapiens
SRDNGPDGMEPECVIESNWNEIVDSFDDMNLSESLLRDIYAYGFEKPSAIQQQAILPCIRGYNVIAQARSGTGKMATFAISILQQIELDLKATQALVLAPTRELAQQIQKVVMALVDYMGASCHACVRGTNMRAEVQKLQMEAPHIIVGTPSRVFDMLNQRYLSPKYIKMFVLDKADEMLSRGFKDQIYDIFQKLNSNTQVVLLSATMPSDMLEVIKKFMRDPIRILVKKEELTLEGIRQFYINVEQEEWKLDTLCDLYETLTITQEVIFINTRRKVDWLTEKMHARDFTVSAMHGDMDQKEQDVIMREFHSGSSRVLITTDLLARGIDVQQVSLVINYDLPTNRENYIHRISRGGRFGRKGVAINMVTEEDKRTLQDIEIFYNTSIEEMP

SEQ ID NO: 7610 - protein, 1289 aa, Homo sapiens [sequence omitted]

SEQ ID NO: 7611 - protein, 1230 aa, Homo sapiens
MPRKGTQPSTARRREEGPPPPSPDGASSDAEPEPPSGRTESPATAAETASEELDNRSLEEILNSIPPPPPPAMTNEAGAPRLMITHIVNQNFKSYAGEKILGPFHKRFSCIIGPNGSGKSNVIDSMLFVFGYRAQKIRSKKLSVLIHNSDEHKDIQSCTVEVHFQKIIDKEGDDYEVIPNSNFYVSRTACRDNTSVYHISGKKKTFKDVGNLLRSHGIDLDHNRFLILQGEVEQIAMMKPKGQTEHDEGMLEYLEDIIGCGRLNEPIKVLCRRVEILNEHRGEKLNRVKMVEKEKDALEGEKNIAIEFLTLENEIFRKKNHVCQYYIYELQKRIAEMETQKEKIHEDTKEINEKSNILSNEMKAKNKDVKDTEKKLNKITKFIEENKEKFTQLDLEDVQVREKLKHATSKAKKLEKQLQKDKEKVEEFKSIPAKSNNIINETTTRNNALEKEKEKEEKKLKEVMDSLKQETQGLQKEKESREKELMGFSKSVNEARSKMDVAQSELDIYLSRHNTAVSQLTKAKEALIAASETLKERKAAIRDIEGKLPQTEQELKEKEKELQKLTQEETNFKSLVHDLFQKVEEAKSSLAMNRSRGKVLDAIIQEKKSGRIPGIYGRLGDLGAIDEKYDVAISSCCHALDYIVVDSIDIAQECVNFLKRQNIGVATFIGLDKMAVWAKKMTEIQTPENTPRLFDLVKVKDEKIRQAFYFALRDTLVADNLDQATRVAYQKDRRWRVVTLQGQIIEQSGTMTGGGSKVMKGRMGSSLVIEISEEEVNKMESQLQNDSKKAMQIQEQKVQLEERVVKLRHSEREMRNTLEKFTASIQRLIEQEEYLNVQVKELEANVLATAPDKKKQKLLEENVSAFKTEYDAVAEKAGKVEAEVKRLHNTIVEINNHKLKAQQDKLDKINKQLDECASAITKAQVAIKTADRNLQKAQDSVLRTEKEIKDTEKEVDDLTAELKSLEDKAAEVVKNTNAAEISKISLHPIEDNPIEEISVLSPEDLEAIKNPDSITNQIALLEARCHEMKPNLGAIAEYKKKEELYLQRVAELDKITYERDSFRQAYEDLRKQRLNEFMAGFYIITNKLKENYQMLTLGGDAELELVDSLDPFSEGIMFSVRPPKKSWKKIFNLSGGEKTLSSLALVFALHHYKPTPLYFMDEIDAALDFKNVSIVAFYIYEQTKNAQFIIISLRNNMFEISDRLIGIYKTYNITKSVAVNPKEIASKGLC

SEQ ID NO: 7612 - protein, 768 aa, Homo sapiens
MSNLSKGTGSRKDTKMRIRAFPMTMDEKYVNSIWDLLKNAIQEIQRKNNSGLSFEELYRNAYTMVLHKHGEKLYTGLREVVTEHLINKVREDVLNSLNNNFLQTLNQAWNDHQTAMVMIRDILMYMDRVYVQQNNVENVYNLGLIIFRDQVVRYGCIRDHLRQTLLDMIARERKGEVVDRGAIRNACQMLMILGLEGRSVYEEDFEAPFLEMSAEFFQMESQKFLAENSASVYIKKVEARINEEIERVMHCLDKSTEEPIVKVVERELISKHMKTIVEMENSGLVHMLKNGKTEDLGCMYKLFSRVPNGLKTMCECMSSYLREQGKALVSEEGEGKNPVDYIQGLLDLKSRFDRFLLESFNNDRLFKQTIAGDFEYFLNLNSRSPEYLSLFIDDKLKKGVKGLTEQEVETILDKAMVLFRFMQEKDVFERYYKQHLARRLLTNKSVSDDSEKNMISKLKTECGCQFTSKLEGMFRDMSISNTTMDEFRQHLQATGVSLGGVDLTVRVLTTGYWPTQSATPKCNIPPAPRHAFEIFRRFYLAKHSGRQLTLQHHMGSADLNATFYGPVKKEDGSEVGVGGAQVTGSNTRKHILQVSTFQMTILMLFNNREKYTFEEIQQETDIPERELVRALQSLACGKPTQRVLTKEPKSKEIENGHIFTVNDQFTSKLHRVKIQTVAAKQGESDPERKETRQKVDDDRKHEIEAAIVRIMKSRKKMQHNVLVAEVTQQLKARFLPSPVVIKKRIEGLIEREYLARTPEDRKVYTYVA

SEQ ID NO: 7613 - protein, 744 aa, Homo sapiens
MDEKYVNSIWDLLKNAIQEIQRKNNSGLSFEELYRNAYTMVLHKHGEKLYTGLREVVTEHLINKVREDVLNSLNNNFLQTLNQAWNDHQTAMVMIRDILMYMDRVYVQQNNVENVYNLGLIIFRDQVVRYGCIRDHLRQTLLDMIARERKGEVVDRGAIRNACQMLMILGLEGRSVYEEDFEAPFLEMSAEFFQMESQKFLAENSASVYIKKVEARINEEIERVMHCLDKSTEEPIVKVVERELISKHMKTIVEMENSGLVHMLKNGKTEDLGCMYKLFSRVPNGLKTMCECMSSYLREQGKALVSEEGEGKNPVDYIQGLLDLKSRFDRFLLESFNNDRLFKQTIAGDFEYFLNLNSRSPEYLSLFIDDKLKKGVKGLTEQEVETILDKAMVLFRFMQEKDVFERYYKQHLARRLLTNKSVSDDSEKNMISKLKTECGCQFTSKLEGMFRDMSISNTTMDEFRQHLQATGVSLGGVDLTVRVLTTGYWPTQSATPKCNIPPAPRHAFEIFRRFYLAKHSGRQLTLQHHMGSADLNATFYGPVKKEDGSEVGVGGAQVTGSNTRKHILQVSTFQMTILMLFNNREKYTFEEIQQETDIPERELVRALQSLACGKPTQRVLTKEPKSKEIENGHIFTVNDQFTSKLHRVKIQTVAAKQGESDPERKETRQKVDDDRKHEIEAAIVRIMKSRKKMQHNVLVAEVTQQLKARFLPSPVVIKKRIEGLIEREYLARTPEDRKVYTYVA

SEQ ID NO: 7614 - protein, 702 aa, Homo sapiens
MSNLSKGTGSRKDTKMRIRAFPVREDVLNSLNNNFLQTLNQAWNDHQTAMVMIRDILMYMDRVYVQQNNVENVYNLGLIIFRDQVVRYGCIRDHLRQTLLDMIARERKGEVVDRGAIRNACQMLMILGLEGRSVYEEDFEAPFLEMSAEFFQMESQKFLAENSASVYIKKVEARINEEIERVMHCLDKSTEEPIVKVVERELISKHMKTIVEMENSGLVHMLKNGKTEDLGCMYKLFSRVPNGLKTMCECMSSYLREQGKALVSEEGEGKNPVDYIQGLLDLKSRFDRFLLESFNNDRLFKQTIAGDFEYFLNLNSRSPEYLSLFIDDKLKKGVKGLTEQEVETILDKAMVLFRFMQEKDVFERYYKQHLARRLLTNKSVSDDSEKNMISKLKTECGCQFTSKLEGMFRDMSISNTTMDEFRQHLQATGVSLGGVDLTVRVLTTGYWPTQSATPKCNIPPAPRHAFEIFRRFYLAKHSGRQLTLQHHMGSADLNATFYGPVKKEDGSEVGVGGAQVTGSNTRKHILQVSTFQMTILMLFNNREKYTFEEIQQETDIPERELVRALQSLACGKPTQRVLTKEPKSKEIENGHIFTVNDQFTSKLHRVKIQTVAAKQGESDPERKETRQKVDDDRKHEIEAAIVRIMKSRKKMQHNVLVAEVTQQLKARFLPSPVVIKKRIEGLIEREYLARTPEDRKVYTYVA

SEQ ID NO: 7615 - protein, 1550 aa, Homo sapiens
APDPSHRPAASASPDSPPGDPEAPTSSEMSRNDKEPFFVKFLKSSDNSKCFFKALESIKEFQSEEYLQIITEEEALKIKENDRSLYICDPFSGVVFDHLKKLGCRIVGPQVVIFCMHHQRCVPRAEHPVYNMVMSDVTISCTSLEKEKREEVHKYVQMMGGRVYRDLNVSVTHLIAGEVGSKKYLVAANLKKPILLPSWIKTLWEKSQEKKITRYTDINMEDFKCPIFLGCIICVTGLCGLDRKEVQQLTVKHGGQYMGQLKMNECTHLIVQEPKGQKYECAKRWNVHCVTTQWFFDSIEKGFCQDESIYKTEPRPEAKTMPNSSTPTSQINTIDSRTLSDVSNISNINASCVSESICNSLNSKLEPTLENLENLDVSAFQAPEDLLDGCRIYLCGFSGRKLDKLRRLINSGGGVRFNQLNEDVTHVIVGDYDDELKQFWNKSAHRPHVVGAKWLLECFSKGYMLSEEPYIHANYQPVEIPVSHQPESKAALLKKKNSSFSKKDFAPSEKHEQADEDLLSQYENGSSTVVEAKTSEARPFNDSTHAEPLNDSTHISLQEENQSSVSHCVPDVSTITEEGLFSQKSFLVLGFSNENESNIANIIKENAGKIMSLLSRTVADYAVVPLLGCEVEATVGEVVTNTWLVTCIDYQTLFDPKSNPLFTPVPVMTGMTPLEDCVISFSQCAGAEKESLTFLANLLGASVQEYFVRKSNAKKGMFASTHLILKERGGSKYEAAKKWNLPAVTIAWLLETARTGKRADESHFLIENSTKEERSLETEITNGINLNSDTAEHPGTRLQTHRKTVVTPLDMNRFQSKAFRAVVSQHARQVAASPAVGQPLQKEPSLHLDTPSKFLSKDKLFKPSFDVKDALAALETPGRPSQQKRKPSTPLSEVIVKNLQLALANSSRNAVALSASPQLKEAQSEKEEAPKPLHKVVVCVSKKLSKKQSELNGIAASLGADYRWSFDETVTHFIYQGRPNDTNREYKSVKERGVHIVSEHWLLDCAQECKHLPESLYPHTYNPKMSLDISAVQDGRLCNSRLLSAVSSTKDDEPDPLILEENDVDNMATNNKESAPSNGSGKNDSKGVLTQTLEMRENFQKQLQEIMSATSIVKPQGQRTSLSRSGCNSASSTPDSTRSARSGRSRVLEALRQSRQTVPDVNTEPSQNEQIIWDDPTAREERARLASNLQWPSCPTQYSELQVDIQNLEDSPFQKPLHDSEIAKQAVCDPGNIRVTEAPKHPISEELETPIKDSHLIPTPQAPSIAFPLANPPVAPHPREKIITIEETHEELKKQYIFQLSSLNPQERIDYCHLIEKLGGLVIEKQCFDPTCTHIVVGHPLRNEKYLASVAAGKWVLHRSYLEACRTAGHFVQEEDYEWGSSSILDVLTGINVQQRRLALAAMRWRKKIQQRQESGIVEGAFSGWKVILHVDQSREAGFKRLLQSGGAKVLPGHSVPLFKEATHLFSDLNKLKPDDSGVNIAEAAAQNVYCLRTEYIADYLMQESPPHVENYCLPEAISFIQNNKELGTGLSQKRKAPTEKNKIKRPRVH

SEQ ID NO: 7616 - protein, 383 aa, Homo sapiens
MPQLDSGGGGAGGGDDLGAPDELLAFQDEGEEQDDKSRDSAGPERDLAELKSSLVNESEGAAGSAGIPGVPGAGAGARGEAEALGREHRAQRLFPDKLPEPLEDGLKAPECTSGMYKETVYSAFNLLMHYPPPSGAGQHPQPQPPLHKANQPPHGVPQLSLYEHFNSPHPTPAPADISQKQVHRPLQTPDLSGFYSLTSGSMGQLPHTVSWFTHPSLMLGSGVPGHPAAIPHPAIVPPSGKQELQPFDRNLKTQAESKAEKEAKKPTIKKPLNAFMLYMKEMRAKVIAECTLKESAAINQILGRRWHALSREEQAKYYELARKERQLHMQLYPGWSARDNYGKKKRRSREKHQESTTETNWPRELKDGNGQESLSMSSSSSPA

SEQ ID NO: 7617 - protein, 382 aa, Homo sapiens
MPQLDSGGGGAGGGDDLGAPDELLAFQDEGEEQDDKSRDSAGPERDLAELKSSLVNESEGAAGSAGIPGVPGAGAGARGEAEALGREHRAQRLFPDKLPEPLEDGLKAPECTSGMYKETVYSAFNLLMHYPPPSGAGQHPQPQPPLHKANQPPHGVPQLSLYEHFNSPHPTPAPADISQKQVHRPLQTPDLSGFYSLTSGSMGQLPHTVSWFTHPSLMLGSGVPGHPAAIPHPAIVPPSGKQELQPFDRNLKTQAESKAEKEAKKPTIKKPLNAFMLYMKEMRAKVIAECTLKESAAINQILGRRWHALSREEQAKYYELARKERQLHMQLYPGWSARDNYGKKKRRSREKHQESTTDPGSPKKCRARFGLNQQTDWCGPCR

SEQ ID NO: 7618 - protein, 383 aa, Homo sapiens
MPQLDSGGGGAGGGDDLGAPDELLAFQDEGEEQDDKSRDSAGPERDLAELKSSLVNESEGAAGSAGIPGVPGAGAGARGEAEALGREHRAQRLFPDKLPEPLEDGLKAPECTSGMYKETVYSAFNLLMHYPPPSGAGQHPQPQPPLHKANQPPHGVPQLSLYEHFNSPHPTPAPADISQKQVHRPLQTPDLSGFYSLTSGSMGQLPHTVSWFTHPSLMLGSGVPGHPAAIPHPAIVPPSGKQELQPFDRNLKTQAESKAEKEAKKPTIKKPLNAFMLYMKEMRAKVIAECTLKESAAINQILGRRWHALSREEQAKYYELARKERQLHMQLYPGWSARDNYGKKKRRSREKHQESTTGGKRNAFGTYPEKAAAPAPFLPMTVL

SEQ ID NO: 7619 - protein, 494 aa, Homo sapiens
MPQLDSGGGGAGGGDDLGAPDELLAFQDEGEEQDDKSRDSAGPERDLAELKSSLVNESEGAAGSAGIPGVPGAGAGARGEAEALGREHRAQRLFPDKLPEPLEDGLKAPECTSGMYKETVYSAFNLLMHYPPPSGAGQHPQPQPPLHKANQPPHGVPQLSLYEHFNSPHPTPAPADISQKQVHRPLQTPDLSGFYSLTSGSMGQLPHTVSWFTHPSLMLGSGVPGHPAAIPHPAIVPPSGKQELQPFDRNLKTQAESKAEKEAKKPTIKKPLNAFMLYMKEMRAKVIAECTLKESAAINQILGRRWHALSREEQAKYYELARKERQLHMQLYPGWSARDNYGKKKRRSREKHQESTTDPGSPKKCRARFGLNQQTDWCGPCRRKKKCIRYLPGEGRCPSPVPSDDSALGCPGSPAPQDSPSYHLLPRFPTELLTSPAERHLHPQVSPLLSASQPQGPHRPPAAPCRAHRYSNRNLRDRWPSRHRTPGRLQEPTP

SEQ ID NO: 7620 - protein, 384 aa, Homo sapiens
MPQLDSGGGGAGGGDDLGAPDELLAFQDEGEEQDDKSRDSAAGPERDLAELKSSLVNESEGAAGGAGIPGVPGAGAGARGEAEALGREHAAQRLFPDKLPEPLEDGLKAPECTSGMYKETVYSAFNLLMHYPPPSGAGQHPQPQPPLHKANQPPHGVPQLSLYEHFNSPHPTPAPADISQKQVHRPLQTPDLSGFYSLTSGSMGQLPHTVSWFTHPSLMLGSGVPGHPAAIPHPAIVPPSGKQELQPFDRNLKTQAESKAEKEAKKPTIKKPLNAFMLYMKEMRAKVIAECTLKESAAINQILGRRWHALSREEQAKYYELARKERQLHMQLYPGWSARDNYGKKKRRSREKHQESTTETNWPRELKDGNGQESLSMSSSSSPA

SEQ ID NO: 7621 - protein, 384 aa, Homo sapiens
MPQLDSGGGGAGGGDDLGAPDELLAFQDEGEEQDDKSRDSAAGPERDLAELKSSLVNESEGAAGGAGIPGVPGAGAGARGEAEALGREHAAQRLFPDKLPEPLEDGLKAPECTSGMYKETVYSAFNLLMHYPPPSGAGQHPQPQPPLHKANQPPHGVPQLSLYEHFNSPHPTPAPADISQKQVHRPLQTPDLSGFYSLTSGSMGQLPHTVSWFTHPSLMLGSGVPGHPAAIPHPAIVPPSGKQELQPFDRNLKTQAESKAEKEAKKPTIKKPLNAFMLYMKEMRAKVIAECTLKESAAINQILGRRWHALSREEQAKYYELARKERQLHMQLYPGWSARDNYGKKKRRSREKHQESTTGGKRNAFGTYPEKAAAPAPFLPMTVL

SEQ ID NO: 7622 - protein, 669 aa, Homo sapiens [sequence omitted]

SEQ ID NO: 7623 - protein, 149 aa, Homo sapiens
MADQLTEEQVTEFKEAFSLFDKDGDGCITTRELGTVMRSLGQNPTEAELRDMMSEIDRDGNGTVDFPEFLGMMARKMKDTDNEEEIREAFRVFDKDGNGFVSAAELRHVMTRLGEKLSDEEVDEMIRAADTDGDGQVNYEEFVRVLVSK

SEQ ID NO: 7624 - protein, 811 aa, Homo sapiens [sequence omitted]

SEQ ID NO: 7625 - protein, 4377 aa, Homo sapiens
MAHAASQLKKNRDLEINAEEEPEKKRKHRKRSRDRKKKSDANASYLRAARAGHLEKALDYIKNGVDINICNQNGLNALHLASKEGHVEVVSELLQREANVDAATKKGNTALHIASLAGQAEVVKVLVTNGANVNAQSQNGFTPLYMAAQENHLEVVKFLLDNGASQSLATEDGFTPLAVALQQGHDQVVSLLLENDTKGKVRLPALHIAARKDDTKAAALLLQNDNNADVESKSGFTPLHIAAHYGNINVATLLLNRAAAVDFTARNDITPLHVASKRGNANMVKLLLDRGAKIDAKTRDGLTPLHCGARSGHEQVVEMLLDRAAPILSKTKNGLSPLHMATQGDHLNCVQLLLQHNVPVDDVTNDYLTALHVAAHCGHYKVAKVLLDKKANPNAKALNGFTPLHIACKKNRIKVMELLLKHGASIQAVTESGLTPIHVAAFMGHVNIVSQLMHHGASPNTTNVRGETALHMAARSGQAEVVRYLVQDGAQVEAKAKDDQTPLHISARLGKADIVQQLLQQGASPNAATTSGYTPLHLSAREGHEDVAAFLLDHGASLSITTKKGFTPLHVAAKYGKLEVANLLLQKSASPDAAGKSGLTPLHVAAHYDNQKVALLLLDQGASPHAAAKNGYTPLHIAAKKNQMDIATTLLEYGADANAVTRQGIASVHLAAQEGHVDMVSLLLGRNANVNLSNKSGLTPLHLAAQEDRVNVAEVLVNQGAHVDAQTKMGYTPLHVGCHYGNIKIVNFLLQHSAKVNAKTKNGYTPLHQAAQQGHTHIINVLLQNNASPNELTVNGNTALGIARRLGYISVVDTLKIVTEETMTTTTVTEKHKMNVPETMNEVLDMSDDEVRKANAPEMLSDGEYISDVEEGEDAMTGDTDKYLGPQDLKELGDDSLPAEGYMGFSLGARSASLRSFSSDRSYTLNRSSYARDSMMIEELLVPSKEQHLTFTREFDSDSLRHYSWAADTLDNVNLVSSPIHSGFLVSFMVDARGGSMRGSRHHGMRIIIPPRKCTAPTRITCRLVKRHKLANPPPHGERRGISSRLVEMGPAGAQFLGPVIVEIPHFGSMRGKERELIVLRSENGETWKEHQFDSKNEDLTELLNGMDEELDSPEELGKKRICRIITKDFPQYFAVVSRIKQESNQIGPEGGILSSTTVPLVQASFPEGALTKRIRVGLQAQPVPDEIVKKILGNKATFSPIVTVEPRRRKFHKPITMTIPVPPPSGEGVSNGYKGDTTPNLRLLCSITGGTSPAQWEDITGTTPLTFIKDCVSFTTNVSARFWLADCHQVLETVGLATQLYRELICVPYMAKFVVFAKMNDPVESSLRCFCMTDDKVDKTLEQQENFEEVARSKDIEVLEGKPIYVDCYGNLAPLTKGGQQLVFNFYSFKENRLPFSIKIRDTSQEPCGRLSFLKERKTTKGLPQTAVCNLNITLPAHKKETESDQDDEIEKTDRRQSFASLALRKRYSYLTEPGMIERSTGATRSLPTTYSYKPFFSTRPYQSWTTAPITVPGPAKSGFTSLSSSSSNTPSASPLKSIWSVSTPSPIKSTLGASTTSSVKSISDVASPIRSLRTMSSPIKTVVSQSPYNIQVSSGTLARAPAVTEATPLKGLASNSTFSSRTSPVTTAGSLLERSSITMTPPASPKSNINMYSSSLPFKSIITSAAPLISSPLKSVVSPVKSRVDVISSAKITMASSLSSPVKQMPGHAEVALVNGSISPLKYASSSTLINGCKATATLQEKISSATNSVSSVVSAATDTVEKVFSTTTAMPFSPLRSYVSAAPSAFQSLRTPSASALYTSLGSSISATTSSVTSSIITVPVYSVVNVLPEPALKKLPDSNSFTKSAAALLSPIKTLTTETHPQPHFSRTSSPVKSSLFLAPSALKLSTPSSLSSSQEILKDVAEMKEDLMRMTAILQTDVPEEKPFQPELPKEGRIDDEEPFKIVEKVKEDLVKVSEILKKDVCVDNKGSPKSPKSDKGHSPEDDWIEFSSEEIREARQQAAASQSPSLPERVQVKAKAASEKDYNLTKVIDYLTNDIGSSSLTNLKYKFEDAKKDGEGGQKRVLKPAIALQEHKLKMPPASMRTSTSEKELCKMADSFFGTDTILESPDDFSQHDQDKSPLSDSGFETRSEKTPSAPQSAETTGPKPLFHEVPIPPVITETRTEVVHVIRSYDPSAGDVPQTQPEEPVSPKPSPTFMELEPKPTTSSIKEKVKAFQMKASSEEDDHNRVLSKGMRVKEETHITTTTRMVYHSPPGGEGASERIEETMSVHDIMKAFQSGRDPSKELAGLFEHKSAVSPDVHKSAAETSAQHAEKDNQMKPKLERIIEVHIEKGNQAEPTEVIIRETKKHPEKEMYVYQKDLSRGDINLKDFLPEKHDAFPCSEEQGQQEEEELTAEESLPSYLESSRVNTPVSQEEDSRPSSAQLISDDSYKTLKLLSQHSIEYHDDELSELRGESYRFAEKMLLSEKLDVSHSDTEESVTDHAGPPSSELQGSDKRSREKIATAPKKEILSKIYKDVSENGVGKVSKDEHFDKVTVLHYSGNVSSPKHAMWMRFTEDRLDRGREKLIYEDRVDRTVKEAEEKLTEVSQFFRDKTEKLNDELQSPEKKARPKNGKEYSSQSPTSSSPEKVLLTELLASNDEWVKARQHGPDGQGFPKAEEKAPSLPSSPEKMVLSQQTEDSKSTVEAKGSISQSKAPDGPQSGFQLKQSKLSSIRLKFEQGTHAKSKDMSQEDRKSDGQSRIPVKKIQESKLPVYQVFAREKQQKAIDLPDESVSVQKDFMVLKTKDEHAQSNEIVVNDSGSDNVKKQRTEMSSKAMPDSFSEQQAKDLACHITSDLATRGPWDKKVFRTWESSGATNNKSQKEKLSHVLVHDVRENHIGHPESKSVDQKNEFMSVTERERKLLTNGSLSEIKEMTVKSPSKKVLYREYVVKEGDHPGGLLDQPSRRSESSAVSHIPVRVADERRMLSSNIPDGFCEQSAFPKHELSQKLSQSSMSKETVETQHFNSIEDEKVTYSEISKVSKHQSYVGLCPPLEETETSPTKSPDSLEFSPGKESPSSDVFDHSPIDGLEKLAPLAQTEGGKEIKTLPVYVSFVQVGKQYEKEIQQGGVKKIISQECKTVQETRGTFYTTRQQKQPPSPQGSPEDDTLEQVSFLDSSGKSPLTPETPSSEEVSYEFTSKTPDSLIAYIPGKPSPIPEVSEESEEEEQAKSTSLKQTTVEETAVEREMPNDVSKDSNQRPKNNRVAYIEFPPPPPLDADQIESDKKHHYLPEKEVDMIEVNLQDEHDKYQLAEPVIRVQPPSPVPPGADVSDSSDDESIYQPVPVKKYTFKLKEVDDEQKEKPKASAEKASNQKELESNGSGKDNEFGLGLDSPQNEIAQNGNNDQSITECSIATTAEFSHDTDATEIDSLDGYDLQDEDDGLTESDSKLPIQAMEIKKDIWNTEGILKPADRSFSQSKLEVIEEEGKVGPDEDKPPSKSSSSEKTPDKTDQKSGAQFFTLEGRHPDRSVFPDTYFSYKVDEEFATPFKTVATKGLDFDPWSNNRGDDEVFDSKSREDETKPFGLAVEDRSPATTPDTTPARTPTDESTPTSEPNPFPFHEGKMFEMTRSGAIDMSKRDFVEERLQFFQIGEHTSEGKSGDQGEGDKSMVTATPQPQSGDTTVETNLERNVETPTVEPNPSIPTSGECQEGTSSSGSLEKSAAATNTSKVDPKLRTPIKMGISASTMTMKKEGPGEITDKIEAVMTSCQGLENETITMISNTANSQMGVRPHEKHDFQKDNFNNNNNLDSSTIQTDNIMSNIVLTEHSAPTCTTEKDNPVKVSSGKKTGVLQGHCVRDKQKVLGEQQKTKELIGIRQKSKLPIKATSPKDTFPPNHMSNTKASKMKQVSQSEKTKALTTSSCVDVKSRIPVKNTPRDNIIAVRKACATQKQGQPEKGKAKQLPSKLPVKVRSTCVTTTTTTATTTTTTTTTTTTSCTVKVRKSQLKEVCKHSIEYFKGISGETLKLVDRLSEEEKKMQSELSDEEESTSRNTSLSETSRGGQPSVTTKSARDKKTEAAPLKSKSEKAGSEKRSSRRTGPQSPCERTDIRMAIVADHLGLSWTELARELNFSVDEINQIRVENPNSLISQSFMLLKKWVTRDGKNATTDALTSVLTKINRIDIVTLLEGPIFDYGNISGTRSFADENNVFHDPVDGWQNETSSGNLESCAQARRVTGGLLDRLDDSPDQCRDSITSYLKGEAGKFEANGSHTEITPEAKTKSYFPESQNDVGKQSTKETLKPKIHGSGHVEEPASPLAAYQKSLEETSKLIIEETKPCVPVSMKKMSRTSPADGKPRLSLHEEEGSSGSEQKQGEGFKVKTKKEIRHVEKKSHS

SEQ ID NO: 7626 - protein, 2348 aa, Homo sapiens
MHPGVVCIMVRLLPRLYHEDHPQLSEEIQCSLASHIQSLVKSEKNRQVMCEAGLLGTLMASCHRALVTSGSPLHSRLIRIFEKLASQAIEPDVLRQFLGLGIPSSLSATTKILDSSHTHRGNPGCSGSQTAQGLAEGPWPAAPDAGLHPGVTQAPQPLGESQDSTTALQTALSLISMTSPRNLQPQRAALAPSFVEFDMSVEGYGCLFIPTLSTVMGTSTEYSVSGGIGTGATRPFPPPGGLTFSCWFLISRHGAATEGHPLRFLTLVRHLARTEQPFVCFSVSLCPDDLSLVVSTEEKEFQPLDVMEPEDDSEPSAGCQLQVRCGQLLACGQWHHLAVVVTKEMKRHCTVSTCLDGQVIGSAKMLYIQALPGPFLSMDPSAFVDVYGYIATPRVWKQKSSLIWRLGPTYLFEEAISMETLEVINKLGPRYCGNFQAVHVQGEDLDSEATPFVAEERVSFGLHIASSSITSVADIRNAYNEVDSRLIAKEMNISSRDNAMPVFLLRNCAGHLSGSLRTIGAVAVGQLGVRVFHSSPAASSLDFIGGPAILLGLISLATDDHTMYAAVKVLHSVLTSNAMCDFLMQHICGYQIMAFLLRKKASLLNHRIFQLILSVAGTVELGFRSSAITNTGVFQHILCNFELWMNTADNLELSLFSHLLEILQSPREGPRNAEAAHQAQLIPKLIFLFNEPSLIPSKISTIIGILACQLRGHFSTQDLLRIGLFVVYTLKPSSVNERQICMDGALDPSLPAGSQTSGKTIWLRNQLLEMLLSVISSPQLHLSSESKEEMFLKLGPDWFLLLLQGHLHASTTVLALKLLLYFLASPSLRTRFRDGLCAGSWVERSTEGVDIVMDNLKSQSPLPEQSPCLLPGFRVLNDFLAHHVHIPEVYLIVSTFFLQTPLTELMDGPKDSLDAMLQWLLQRHHQEEVLQAGLCTEGALLLLEMLKATMSQPLAGSEDGAWAQTFPASVLQFLSLVHRTYPQDPAWRAPEFLQTLAIAAFPLGAQKGVGAESTRNTSSPEAAAEGDSTVEGLQAPTKAHPARRKLREFTQLLLRELLLGASSPKQWLPLEVLLEASPDHATSQQKRDFQSEVLLSAMELFHMTSGGDAAMFRDGKEPQPSAEAAAAPSLANISCFTQKLVEKLYSGMFSADPRHILLFILEHIMVVIETASSQRDTVLSTLYSSLNKVILYCLSKPQQSLSECLGLLSILGFLQEHWDVVFATYNSNISFLLCLMHCLLLLNERSYPEGFGLEPKPRMSTYHQVFLSPNEDVKEKREDLPSLSDVQHNIQKTVQTLWQQLVAQRQQTLEDAFKIDLSVKPGEREVKIEEVTPLWEETMLKAWQHYLASEKKSLASRSNVAHHSKVTLWSGSLSSAMKLMPGRQAKDPECKTEDFVSCIENYRRRGQELYASLYKDHVQRRKCGNIKAANAWARIQEQLFGELGLWSQGEETKPCSPWELDWREGPARMRKRIKRLSPLEALSSGRHKESQDKNDHISQTNAENQDELTLREAEGEPDEVGVDCTQLTFFPALHESLHSEDFLELCRERQVILQELLDKEKVTQKFSLVIVQGHLVSEGVLLFGHQHFYICENFTLSPTGDVYCTRHCLSNISDPFIFNLCSKDRSTDHYSCQCHSYADMRELRQARFLLQDIALEIFFHNGYSKFLVFYNNDRSKAFKSFCSFQPSLKGKATSEDTLSLRRYPGSDRIMLQKWQKRDISNFEYLMYLNTAAGRTCNDYMQYPVFPWVLADYTSETLNLANPKIFRDLSKPMGAQTKERKLKFIQRFKEVEKTEGDMTVQCHYYTHYSSAIIVASYLVRMPPFTQAFCALQGGSFDVADRMFHSVKSTWESASRENMSDVRELTPEFFYLPEFLTNCNGVEFGCMQDGTVLGDVQLPPWADGDPRKFISLHRKALESDFVSANLHHWIDLIFGYKQQGPAAVDAVNIFHPYFYGDRMDLSSITDPLIKSTILGFVSNFGQVPKQLFTKPHPARTAAGKPLPGKDVSTPVSLPGHPQPFFYSLQSLRPSQVTVKDMYLFSLGSESPKGAIGHIVSTEKTILAVERNKVLLPPLWNRTFSWGFDDFSCCLGSYGSDKVLMTFENLAAWGRCLCAVCPSPTTIVTSGTSTVVCVWELSMTKGRPRGLRLRQALYGHTQAVTCLAASVTFSLLVSGSQDCTCILWDLDHLTHVTRLPAHREGISAITISDVSGTIVSCAGAHLSLWNVNGQPLASITTAWGPEGAITCCCLMEGPAWDTSQIIITGSQDGMVRVWKTEDVKMSVPGLQMGRKREAAEALAQQCQAEGGRGDWGLSSAYRRNPQGLLPHSSQGRASGNHSSAAQPSPWPMGLL

SEQ ID NO: 7627 - protein, 1270 aa, Homo sapiens
RDFQSEVLLSAMELFHMTSGGDAAMFRDGKEPQPSAEAAAAPSLANISCFTQKLVEKLYSGMFSADPRHILLFILEHIMVVIETASSQRDTVLSTLYSSLNKVILYCLSKPQQSLSECLGLLSILGFLQEHWDVVFATYNSNISFLLCLMHCLLLLNERSYPEGFGLEPKPRMSTYHQVFLSPNEDVKEKREDLPSLSDVQHNIQKTVQTLWQQLVAQRQQTLEDAFKIDLSVKPGEREVKIEEVTPLWEETMLKAWQHYLASEKKSLASRSNVAHHSKVTLWSGSLSSAMKLMPGRQAKDPECKTEDFVSCIENYRRRGQELYASLYKDHVQRRKCGNIKAANAWARIQEQLFGELGLWSQGEETKPCSPWELDWREGPARMRKRIKRLSPLEALSSGRHKESQDKNDHISQTNAENQDELTLREAEGEPDEVGVDCTQLTFFPALHESLHSEDFLELCRERQVILQELLDKEKVTQKFSLVIVQGHLVSEGVLLFGHQHFYICENFTLSPTGDVYCTRHCLSNISDPFIFNLCSKDRSTDHYSCQCHSYADMRELRQARFLLQDIALEIFFHNGYSKFLVFYNNDRSKAFKSFCSFQPSLKGKATSEDTLNLRRYPGSDRIMLQKWQKRDISNFEYLMYLNTAAGRTCNDYMQYPVFPWVLADYTSETLNLANPKIFRDLSKPMGAQTKERKLKFIQRFKEVEKTEGDMTVQCHYYTHYSSAIIVASYLVRMPPFTQAFCALQGGSFDVADRMFHSVKSTWESASRENMSDVRELTPEFFYLPEFLTNCNGVEFGCMQDGTVLGDVQLPPWADGDPRKFISLHRKALESDFVSANLHHWIDLIFGYKQQGPAAVDAVNIFHPYFYGDRMDLSSITDPLIKSTILGFVSNFGQVPKQLFTKPHPARTAAGKPLPGKDVSTPVSLPGHPQPFFYSLQSLRPSQVTVKDMYLFSLGSESPKGAIGHIVSTEKTILAVERNKVLLPPLWNRTFSWGFDDFSCCLGSYGSDKVLMTFENLAAWGRCLCAVCPSPTTIVTSGTSTVVCVWELSMTKGRPRGLRLRQALYGHTQAVTCLAASVTFSLLVSGSQDCTCILWDLDHLTHVTRLPAHREGISAITISDVSGTIVSCAGAHLSLWNVNGQPLASITTAWGPEGAITCCCLMEGPAWDTSQIIITGSQDGMVRVWKTEDVKMSVPGRPAGEEPLAQPPSPRGHKWEKNLALSRELDVSIALTGKPSKTSPAVTALAVSRNHTKLLVGDERGRIFCWSADG

SEQ ID NO: 7628 - protein, 951 aa, Homo sapiens
MSRGGSYPHLLWDVRKRSLGLEDPSRLRSRYLGRREFIQRLKLEATLNVHDGCVNTICWNDTGEYILSGSDDTKLVISNPYSRKVLTTIRSGHRANIFSAKFLPCTNDKQIVSCSGDGVIFYTNVEQDAETNRQCQFTCHYGTTYEIMTVPNDPYTFLSCGEDGTVRWFDTRIKTSCTKEDCKDDILINCRRAATSVAICPPIPYYLAVGCSDSSVRIYDRRMLGTRATGNYAGRGTTGMVARFIPSHLNNKSCRVTSLCYSEDGQEILVSYSSDYIYLFDPKDDTARELKTPSAEERREELRQPPVKRLRLRGDWSDTGPRARPESERERDGEQSPNVSLMQRMSDMLSRWFEEASEVAQSNRGRGRSRPRGGTSQSDISTLPTVPSSPDLEVSETAMEVDTPAEQFLQPSTSSTMSAQAHSTSSPTESPHSTPLLSSPDSEQRQSVEASGHHTHHQSEFLRGPEIALLRKRLQQLRLKKAEQQRQQELAAHTQQQPSTSDQSSHEGSSQDPHASDSPSSVVNKQLGSMSLDEQQDNNNEKLSPKPGTGEPVLSLHYSTEGTTTSTIKLNFTDEWSSIASSSRGIGSHCKSEGQEESFVPQSSVQPPEGDSETKAPEESSEDVTKYQEGVSAENPVENHINITQSDKFTAKPLDSNSGERNDLNLDRSCGVPEESASSEKAKEPETSDQTSTESATNENNTNPEPQFQTEATGPSAHEETSTRDSALQDTDDSDDDPVLIPGARYRAGPGDRFNIRGTTIGDRIMRRSAVARIQEFFRRRKERKEMEELDTLNIRRPLVKMVYKGHRNSRTMIKEANFWGANFVMSGSDCGHIFIWDRHTAEHLMLLEADNHVVNCLQPHPFDPILASSGIDYDIKIWSPLEESRIFNRKLADEVITRNELMLEETRNTITVPASFMLRMLASLNHIRADRLEGDRSEGSGQENENEDEE

SEQ ID NO: 7629 - protein, 418 aa, Homo sapiens
MDPEASDLSRGILALRDVAAEAGVSKYTGGRGVSVGPILSSSASDIFCDNENGPNFLFHNRGDGTFVDAAASAGVDDPHQHGRGVALADFNRDGKVDIVYGNWNGPHRLYLQMSTHGKVRFRDIASPKFSMPSPVRTVITADFDNDQELEIFFNNIAYRSSSANRLFRVIRREHGDPLIEELNPGDALEPEGRGTGGVVTDFDGDGMLDLILSHGESMAQPLSVFRGNQGFNNNWLRVVPRTRVGAFARGAKVVLYTKKSGAHLRIIDGGSGYLCEMEPVAHFGLGKDEASSVEVTWPDGKMVSRNVASGEMNSVLEILYPRDEDTLQDPAPLETPMNASSSHSCALETSPYVSTPMEATGAGPTRSAVGATSPTRMAQPAWGLSASHRAPAPPPPPLLLPLPLLLPLLELPLLHRSS

SEQ ID NO: 7630 - protein, 890 aa, Homo sapiens
MNYVGQLAGQVFVTVKELYKGLNPATLSGCIDIIVIRQPNGNLQCSPFHVRFGKMGVLRSREKVVDIEINGESVDLHMKLGDNGEAFFVQETDNDQEVIPMHLATSPILSEGASRMECQLKRGSVDRMRGLDPSTPAQVIAPSETPSSSSVVKKRRKRRRKSQLDSLKRDDNMNTSEDEDMFPIEMSSDEAMELLESSRTLPNDIPPFQDDIPEENLSLAVIYPQSASYPNSDREWSPTPSPSGSRPSTPKSDSELVSKSTERTGQKNPEMLWLWGELPQAAKSSSPHKMKESSPLSSRKICDKSHFQAIHSESSDTFSDQSPTLVGGALLDQNKPQTEMQFVNEEDLETLGAAAPLLPMIEELKPPSASVVQTANKTDSPSRKRDKRSRHLGADGVYLDDLTDMDPEVAALYFPKNGDPSGLAKHASDNGARSANQSPQSVGSSGVDSGVESTSDGLRDLPSIAISLCGGLSDHREITKDAFLEQAVSYQQFVDNPAIIDDPNLVVKIGSKYYNWTTAAPLLLAMQAFQKPLPKATVESIMRDKMPKKGGRWWFSWRGRNTTIKEESKPEQCLAGKAHSTGEQPPQLSLATRVKHESSSSDEERAAAKPSNAGHLPLLPNVSYKKTLRLTSEQLKSLKLKNGPNDVVFSVTTQYQGTCRCEGTIYLWNWDDKVIISDIDGTITRSDTLGHILPTLGKDWTHQGIAKLYHKVSQNGYKFLYCSARAIGMADMTRGYLHWVNERGTVLPQGPLLLSPSSLFSALHREVIEKKPEKFKVQCLTDIKNLFFPNTEPFYAAFGNRPADVYSYKQVGVSLNRIFTVNPKGELVQEHAKTNISSYVRLCEVVDHVFPLLKRSHSSDFPCSDTFSNFTFWREPLPPFENQDIHSASA

SEQ ID NO: 7631 - protein, 326 aa, Homo sapiens [sequence omitted]

SEQ ID NO: 7632 - protein, 2111 aa, Homo sapiens
EGQEGTGRWQQGSPAGARPREWRRDTHGFPGPAAALTSASRSGTRRVRDCAGTMDNFFTEGTRVWLRENGQHFPSTVNSCAEGIVVFRTDYGQVFTYKQSTITHQKVTAMHPTNEEGVDDMASLTELHGGSIMYNLFQRYKRNQIYTYIGSILASVNPYQPIAGLYEPATMEQYSRRHLGELPPHIFAIANECYRCLWKRHDNQCILISGESGAGKTESTKLILKFLSVISQQSLELSLKEKTSCVERAILESSPIMEAFGNAKTVYNNNSSRFGKFVQLNICQKGNIQGGRIVDYLLEKNRVVRQNPGERNYHIFYALLAGLEHEEREEFYLSTPENYHYLNQSGCVEDKTISDQESFREVITAMDVMQFSKEEVREVSRLLAGILHLGNIEFITAGGAQVSFKTALGRSAELLGLDPTQLTDALTQRSMFLRGEEILTPLNVQQAVDSRDSLAMALYACCFEWVIKKINSRIKGNEDFKSIGILDIFGFENFEVNHFEQFNINYANEKLQEYFNKHIFSLEQLEYSREGLVWEDIDWIDNGECLDLIEKKLGLLALINEESHFPQATDSTLLEKLHSQHANNHFYVKPRVAVNNFGVKHYAGEVQYDVRGILEKNRDTFRDDLLNLLRESRFDFIYDLFEHVSSRNNQDTLKCGSKHRRPTVSSQFKDSLHSLMATLSSSNPFFVRCIKPNMQKMPDQFDQAVVLNQLRYSGMLETVRIRKAGYAVRRPFQDFYKRYKVLMRNLALPEDVRGKCTSLLQLYDASNSEWQLGKTKVFLRESLEQKLEKRREEEVSHAAMVIRAHVLGFLARKQYRKVLYCVVIIQKNYRAFLLRRRFLHLKKAAIVFQKQLRGQIARRVYRQLLAEKREQEEKKKQEEEEKKKREEEERERERERREAELRAQQEEETRKQQELEALQKSQKEAELTRELEKQKENKQVEEILRLEKEIEDLQRMKEQQELSLTEASLQKLQERRDQELRRLEEEACRAAQEFLESLNFDEIDECVRNIERSLSVGSEFSSELAESACEEKPNFNFSQPYPEEEVDEGFEADDDAFKDSPNPSEHGHSDQRTSGIRTSDDSSEEDPYMNDTVVPTSPSADSTVLLAPSVQDSGSLHNSSSGESTYCMPQNAGDLPSPDGDYDYDQDDYEDGAITSGSSVTFSNSYGSQWSPDYRCSVGTYNSSGAYRFSSEGAQSSFEDSEEDFDSRFDTDDELSYRRDSVYSCVTLPYFHSFLYMKGGLMNSWKRRWCVLKDETFLWFRSKQEALKQGWLHKKGGGSSTLSRRNWKKRWFVLRQSKLMYFENDSEEKLKGTVEVRTAKEIIDNTTKENGIDIIMADRTFHLIAESPEDASQWFSVLSQVHASTDQEIQEMHDEQANPQNAVGTLDVGLIDSVCASDSPDRPNSFVIITANRVLHCNADTPEEMHHWITLLQRSKGDTRVEGQEFIVRGWLHKEVKNSPKMSSLKLKKRWFVLTHNSLDYYKSSEKNALKLGTLVLNSLCSVVPPDEKIFKETGYWNVTVYGRKHCYRLYTKLLNEATRWSSAIQNVTDTKAPIDTPTQQLIQDIKENCLNSDVVEQIYKRNPILRYTHHPLHSPLLPLPYGDINLNLLKDKGYTTLQDEAIKIFNSLQQLESMSDPIPIIQGILQTGHDLRPLRDELYCQLIKQTNKVPHPGSVGNLYSWQILTCLSCTFLPSRGILKYLKFHLKRIREQFPGTEMEKYALFTYESLKKTKCREFVPSRDEIEALIHRQEMTSTVYCHGGGSCKITINSHTTAGEVVEKLIRGLAMEDSRNMFALFEYNGHVDKAIESRTVVADVLAKFEKLAATSEVGDLPWKFYFKLYCFLDTDNVPKDSVEFAFMFEQAHEAVIHGHHPAPEENLQVLAALRLQYLQGDYTLHAAIPPLEEVYSLQRLKARISQSTKTFTPCERLEKRRTSFLEGTLRRSFRTGSVVRQKVEEEQMLDMWIKEEVSSARASIIDKWRKFQGMNQEQAMAKYMALIKEWPGYGSTLFDVECKEGGFPQELWLGVSADAVSVYKRGEGRPLEVFQYEHILSFGAPLANTYKIVVDERELLFETSEVVDVAKLMKAYISMIVKKRYSTTRSASSQGSSR

SEQ ID NO: 7633 - protein, 2058 aa, Homo sapiens
MDNFFTEGTRVWLRENGQHFPSTVNSCAEGIVVFRTDYGQVFTYKQSTITHQKVTAMHPTNEEGVDDMASLTELHGGSIMYNLFQRYKRNQIYTYIGSILASVNPYQPIAGLYEPATMEQYSRRHLGELPPHIFAIANECYRCLWKRHDNQCILISGESGAGKTESTKLILKFLSVISQQSLELSLKEKTSCVERAILESSPIMEAFGNAKTVYNNNSSRFGKFVQLNICQKGNIQGGRIVDYLLEKNRVVRQNPGERNYHIFYALLAGLEHEEREEFYLSTPENYHYLNQSGCVEDKTISDQESFREVITAMDVMQFSKEEVWEVSRLLAGILHLGNIEFITAGGAQVSFKTALGRSAELLGLDPTQLTDALTQRSMFLRGEEILTPLNVQQAVDSRDSLAMALYACCFEWVIKKINSRIKGNEDFKSIGILDIFGFENFEVNHFEQFNINYANEKLQEYFNKHIFSLEQLEYSREGLVWEDIDWIDNGECLDLIEKKLGLLALINEESHFPQATDSTLLEKLHSQHANNHFYVKPRVAVNNFGVKHYAGEVQYDVRGILEKNRDTFRDDLLNLLRESRFDFIYDLFEHVSSRNNQDTLKCGSKHRRPTVSSQFKDSLHSLMATLSSSNPFFVRCIKPNMQKMPDQFDQAVVLNQLRYSGMLETVRIRKAGYAVRRPFQDFYKRYKVLMRNLALPEDVRGKCTSLLQLYDASNSEWQLGKTKVFLRESLEQKLEKRREEEVSHAAMVIRAHVLGFLARKQYRKVLYCVVIIQKNYRAFLLRRRFLHLKKAAIVFQKQLRGQIARRVYRQLLAEKREQEEKKKQEEEEKKKREEEERERERERREAELRAQQEEETRKQQELEALQKSQKEAELTRELEKQKENKQVEEILRLEKEIEDLQRMKEQQELSLTEASLQKLQERRDQELRRLEEEACRAAQEFLESLNFDEIDECVRNIERSLSVGSEFSSELAESACEEKPNFNFSQPYPEEEVDEGFEADDDAFKDSPNPSEHGHSDQRTSGIRTSDDSSEEDPYMNDTVVPTSPSADSTVLLAPSVQDSGSLHNSSSGESTYCMPQNAGDLPSPDGDYDYDQDDYEDGAITSGSSVTFSNSYGSQWSPDYRCSVGTYNSSGAYRFSSEGAQSSFEDSEEDFDSRFDTDDELSYRRDSVYSCVTLPYFHSFLYMKGGLMNSWKRRWCVLKDETFLWFRSKQEALKQGWLHKKGGGSSTLSRRNWKKRWFVLRQSKLMYFENDSEEKLKGTVEVRTAKEIIDNTTKENGIDIIMADRTFHLIAESPEDASQWFSVLSQVHASTDQEIQEMHDEQANPQNAVGTLDVGLIDSVCASDSPDRPNSFVIITANRVLHCNADTPEEMHHWITLLQRSKGDTRVEGQEFIVRGWLHKEVKNSPKMSSLKLKKRWFVLTHNSLDYYKSSEKNALKLGTLVLNSLCSVVPPDEKIFKETGYWNVTVYGRKHCYRLYTKLLNEATRWSSAIQNVTDTKAPIDTPTQQLIQDIKENCLNSDVVEQIYKRNPILRYTHHPLHSPLLPLPYGDINLNLLKDKGYTTLQDEAIKIFNSLQQLESMSDPIPIIQGILQTGHDLRPLRDELYCQLIKQTNKVPHPGSVGNLYSWQILTCLSCTFLPSRGILKYLKFHLKRIREQFPGTEMEKYALFTYESLKKTKCREFVPSRDEIEALIHRQEMTSTVYCHGGGSCKITINSHTTAGEVVEKLIRGLAMEDSRNMFALFEYNGHVDKAIESRTVVADVLAKFEKLAATSEVGDLPWKFYFKLYCFLDTDNVPKDSVEFAFMFEQAHEAVIHGHHPAPEENLQVLAALRLQYLQGDYTLHAAIPPLEEVYSLQRLKARISQSTKTFTPCERLEKRRTSFLEGTLRRSFRTGSVVRQKVEEEQMLDMWIKEEVSSARASIIDKWRKFQGMNQEQAMAKYMALIKEWPGYGSTLFDVECKEGGFPQELWLGVSADAVSVYKRGEGRPLEVFQYEHILSFGAPLANTYKIVVDERELLFETSEVVDVAKLMKAYISMIVKKRYSTTRSASSQGSSR

SEQ ID NO: 7634 - protein, 1223 aa, Homo sapiens
MRSRSNSGVRLDGYARLVQQTILCHQNPVTGLLPASYDQKDAWVRDNVYSILAVWGLGLAYRKNADRDEDKAKAYELEQSVVKLMRGLLHCMIRQVDKVESFKYSQSTKDSLHAKYNTKTCATVVGDDQWGHLQLDATSVYLLFLAQMTASGLHIIHSLDEVNFIQNLVFYIEAAYKTADFGIWERGDKTNQGISELNASSVGMAKAALEALDELDLFGVKGGPQSVIHVLADEVQHCQSILNSLLPRASTSKEVDASLLSVVSFPAFAVEDSQLVELTKQEIITKLQGRYGCCRFLRDGYKTPKEDPNRLYYEPAELKLFENIECEWPLFWTYFILDGVFSGNAEQVQEYKEALEAVLIKGKNGVPLLPELYSVPPDRVDEEYQNPHTVDRVPMGKLPHMWGQSLYILGSLMAEGFLAPGEIDPLNRRFSTVPKPDVVVQVSILAETEEIKTILKDKGIYVETIAEVYPIRVQPARILSHIYSSLGCNNRMKLSGRPYRHMGVLGTSKLYDIRKTIFTFTPQFIDQQQFYLALDNKMIVEMLRTDLSYLCSRWRMTGQPTITFPISYSMLDEDGTSLNSSILAALRKMQDGYFGGARVQTGKLSEFLTTSCCTHLSFMDPGPEGKLYSEDYDDNYDYLESGNWMNDYDSTSHARCGDEVARYLDHLLAHTAPHPKLAPTSQKGGLDRFQAAVQTTCDLMSLVTKAKELHVQNVHMYLPTKLFQASRPSFNLLDSPHPRQENQVPSVRVEIHLPRDQSGEVDFKALVLQLKETSSLQEQADILYMLYTMKGPDWNTELYNERSATVRELLTELYGKVGEIRHWGLIRYISGILRKKVEALDEACTDLLSHQKHLTVGLPPEPREKTISAPLPYEALTQLIDEASEGDMSISILTQEIMVYLAMYMRTQPGLFAEMFRLRIGLIIQVMATELAHSLRCSAEEATEGLMNLSPSAMKNLLHHILSGKEFGVERSVRPTDSNVSPAISIHEIGAVGATKTERTGIMQLKSEIKQVEFRRLSISAESQSPGTSMTPSSGSFPSAYDQQSSKDSRQGQWQRRRRLDGALNRVPVGFYQKVWKVLQKCHGLSVEGFVLPSSTTREMTPGEIKFSVHVESVLNRVPQPEYRQLLVEAILVLTMLADIEIHSIGSIIAVEKIVHIANDLFLQEQKTLGADDTMLAKDPASGICTLLYDSAPSGRFGTMTYLSKAAATYVQEFLPHSICAMQ

SEQ ID NO: 7635 - protein, 1210 aa, Homo sapiens
MRSRSNSGVRLDGYARLVQQTILCHQNPVTGLLPASYDQKDAWVRDNVYSILAVWGLGLAYRKNADRDEDKAKAYELEQSVVKLMRGLLHCMIRQVDKVESFKYSQSTKDSLHAKYNTKTCATVVGDDQWGHLQLDATSVYLLFLAQMTASGLHIIHSLDEVNFIQNLVFYIEAAYKTADFGIWERGDKTNQGISELNASSVGMAKAALEALDELDLFGVKGGPQSVIHVLADEVQHCQSILNSLLPRASTSKEVDASLLSVVSFPAFAVEDSQLVELTKQEIITKLQGRYGCCRFLRDGYKTPKEDPNRLYYEPAELKLFENIECEWPLFWTYFILDGVFSGNAEQVQEYKEALEAVLIKGKNGVPLLPELYSVPPDRVDEEYQNPHTVDRVPMGKLPHMWGQSLYILGSLMAEGFLAPGEIDPLNRRFSTVPKPDVVVQVSILAETEEIKTILKDKGIYVETIAEVYPIRVQPARILSHIYSSLGCNNRMKLSGRPYRHMGVLGTSKLYDIRKTIFTFTPQFIDQQQFYLALDNKMIVEMLRTDLSYLCSRWRMTGQPTITFPISYSMLDEDGTSLNSSILAALRKMQDGYFGGARVQTGKLSEFLTTSCCTHLSFMDPGPEGKLYSEDYDDNYDYLESGNWMNDYDSTSHARCGDEVARYLDHLLAHTAPHPKLAPTSQKGGLDRFQAAVQTTCDLMSLVTKAKELHVQNVHMYLPTKLFQASRPSFNLLDSPHPRQENQVPSVRVEIHLPRDQSGEVDFKALVLQLKETSSLQEQADILYMLYTMKGPDWNTELYNERSATVRELLTELYGKVGEIRHWGLIRYISGILRKKVEALDEACTDLLSHQKHLTVGLPPEPREKTISAPLPYEALTQLIDEASEGDMSISILTQEIMVYLAMYMRTQPGLFAEMFRLRIGLIIQVMATELAHSLRCSAEEATEGLMNLSPSAMKNLLHHILSGKEFGVERSVRPTDSNVSPAISIHEIGAVGATKTERTGIMQLKSEIKQSPGTSMTPSSGSFPSAYDQQSSKDSRQGQWQRRRRLDGALNRVPVGFYQKVWKVLQKCHGLSVEGFVLPSSTTREMTPGEIKFSVHVESVLNRVPQPEYRQLLVEAILVLTMLADIEIHSIGSIIAVEKIVHIANDLFLQEQKTLGADDTMLAKDPASGICTLLYDSAPSGRFGTMTYLSKAAATYVQEFLPHSICAMQ

SEQ ID NO: 7636 - protein, 497 aa, Homo sapiens
ARAGRGAASGPPRVAQTSDPDSSEACAEEEEGLMPQGPQLLDFSVDEVAEQLTLIDLELFSKVRLYECLGSVWSQRDRPGAAGASPTVRATVAQFNTVTGCVLGSVLGAPGLAAPQRAQRLEKWIRIAQRCRELRNFSSLRAILSALQSNPIYRLKRSWGAVSREPLSTFRKLSQIFSDENNHLSSREILFQEEATEGSQEEDNTPGSLPSKPPPGPVPYLGTFLTDLVMLDTALPDMLEGDLINFEKRRKEWEILARIQQLQRRCQSYTLSPHPPILAALHAQNQLTEEQSYRLSRVIEPPAASCPSSPRIRRRISLTKRLSAKLAREKSSSPSGSPGDPSSPTSSVSPGSPPSSPRSRDAPAGSPPASPGPQGPSTKLPLSLDLPSPRPFALPLGSPRIPLPAQQSSEACVIRVSIDNDHGNLYRSILLTSQDKAPSVVRRALQKHNVPQPWACDYQLFQVLPGDRGWEEMLISAIKSVGTFFGMFAMCQARFYR

SEQ ID NO: 7637 - protein, 605 aa, Homo sapiens
MAAGQREARPQVSLTFEDVAVLFTRDEWRKLAPSQRNLYRDVMLENYRNLVSLGLPFTKPKVISLLQQGEDPWEVEKDGSGVSSLGSKSSHKTTKSTQTQDSSFQGLILKRSNRNVPWDLKLEKPYIYEGRLEKKQDKKGSFQIVSATHKKIPTIERSHKNTELSQNFSPKSVLIRQQILPREKTPPKCEIQGNSLKQNSQLLNQPKITADKRYKCSLCEKTFINTSSLRKHEKNHSGEKLFKCKECSKAFSQSSALIQHQITHTGEKPYICKECGKAFTLSTSLYKHLRTHTVEKSYRCKECGKSFSRRSGLFIHQKIHAEENPCKYNPGRKASSCSTSLSGCQRIHSRKKSYLCNECGNTFKSSSSLRYHQRIHTGEKPFKCSECGRAFSQSASLIQHERIHTGEKPYRCNECGKGFTSISRLNRHRIIHTGEKYYNCNECGKALSSHSTLIIHERIHTGEKPCKCKVCGKAFRQSSALIQHQRMHTGERPYKCNECGKTFRCNSSLSNHQRIHTGEKPYRCEECGISFGQSSALIQHRRIHTGEKPFKCNTCGKTFRQSSSRIAHQRIHTGEKPYECNTCGKLFNHRSSLTNHYKIHIEEDP

SEQ ID NO: 7638 - protein, 612 aa, Homo sapiens
MAAGQREARPQVSLTFEDVAVLFTWDEWRKLAPSQRNLYRDVMLENYRNLVSLGLSFTKPKVISLLQQGEDPWEVEKDSSGVSSLGCKSTPKMTKSTQTQDSFQEQIRKRLKRDEPWNFISERSCIYEEKLKKQQDKNENLQIISVAHTKILTVDRSHKNVEFGQNFYLKSVFIKQQRFAKEKTPSKCEIQRNSFKQNSNLLNQSKIKTAEKRYKCSTCEKAFIHNSSLRKHQKNHTGEKLFKCKECLKAFSQSSALIQHQRTHTGEKPYICKECGKAFSHSASLCKHLRTHTVEKCYRCKECGKSFSRRSGLFIHQKIHAQENPHKYNPGRKASSYSTSLSGSQKIHLRKKSYLCNECGNTFKSSSSLRYHQRIHTGEKPFKCSECGRAFSQSASLIQHERIHTGEKPYRCNECGKGFTSISRLNRHRIIHTGEKLYNCNECGKALSSHSTLIIHERIHTGEKPCKCKVCGKAFRQSSALIQHQRMHTGERPYKCNECDKTFRCNSSLSNHQRIHTGEKPYRCLECGMSFGQSAALIQHQRIHTGEKPFKCNTCGKTFRQSSSLIAHQRIHTGEKPYECNACGKLFSQRSSLTNHYKIHIEEDSLKADLHV

SEQ ID NO: 7639 - protein, 2303 aa, Homo sapiens
MTSEEMTASVLIPVTQRKVVSAQSAADESSEKVSDINISKAHTVRRSGETSHTISQLNKLKEEPSGSNLPKILSIAREKIVSDENSNEKCWEKIMPDSAKNLNINCNNILRNHQHGLPQRQFYEMYNSVAEEDLCLETGIPSPLERKVFPGIQLELDRPSMGISPLGNQSVIIETGRAHPDSRRAVFHFHYEVDRRMSDTFCTLSENLILDDCGNCVPLPGGEEKQKKNYVAYTCKLMELAKNCDNKNEQLQCDHCDTLNDKYFCFEGSCEKVDMVYSGDSFCRKDFTDSQAAKTFLSHFEDFPDNCDDVEEDAFKSKKERSTLLVRRFCKNDREVKKSVYTGTRAIVRTLPSGHIGLTAWSYIDQKRNGPLLPCGRVMEPPSTVEIRQDGSQRLSEAQWYPIYNAVRREETENTVGSLLHFLTKLPASETAHGRISVGPCLKQCVRDTVCEYRATLQRTSISQYITGSLLEATTSLGARSGLLSTFGGSTGRMMLKERQPGPSVANSNALPSSSAGISKELIDLQPLIQFPEEVASILMEQEQTIYRRVLPVDYLCFLTRDLGTPECQSSLPCLKASISASILTTQNGEHNALEDLVMRFNEVSSWVTWLILTAGSMEEKREVFSYLVHVAKCCWNMGNYNAVMEFLAGLRSRKVLKMWQFMDQSDIETMRSLKDAMAQHESSCEYRKVVTRALHIPGCKVVPFCGVFLKELCEVLDGASGLMKLCPRYNSQEETLEFVADYSGQDNFLQRVGQNGLKNSEKESTVNSIFQVIRSCNRSLETDEEDSPSEGNSSRKSSLKDKSRWQFIIGDLLDSDNDIFEQSKEYDSHGSEDSQKAFDHGTELIPWYVLSIQADVHQFLLQGATVIHYDQDTHLSARCFLQLQPDNSTLTWVKPTTASPASSKAKLGVLNNTAEPGKFPLLGNAGLSSLTEGVLDLFAVKAVYMGHPGIDIHTVCVQNKLGSMFLSETGVTLLYGLQTTDNRLLHFVAPKHTAKMLFSGLLELTRAVRKMRKFPDQRQQWLRKQYVSLYQEDGRYEGPTLAHAVELFGGRRWSARNPSPGTSAKNAEKPNMQRNNTLGISTTKKKKKILMRGESGEVTDDEMATRKAKMHKECRSRSGSDPQDINEQEESEVNAIANPPNPLPSRRAHSLTTAGSPNLAAGTSSPIRPVSSPVLSSSNKSPSSAWSSSSWHGRIKGGMKGFQSFMVSDSNMSFVEFVELFKSFSVRSRKDLKDLFDVYAVPCNRSGSESAPLYTNLTIDENTSDLQPDLDLLTRNVSDLGLFIKSKQQLSDNQRQISDAIAAASIVTNGTGIESTSLGIFGVGILQLNDFLVNCQGEHCTYDEILSIIQKFEPSISMCHQGLMSFEGFARFLMDKENFASKNDESQENIKELQLPLSYYYIESSHNTYLTGHQLKGESSVELYSQVLLQGCRSVELDCWDGDDGMPIIYHGHTPTTKIPFKEVVEAIDRSAFINSDLPIIISIENHCSLPQQRKMAEIFKTVFGEKLVTKFLFETDFSDDPMLPSPDQLRKKVLLKNKKLKAHQTPVDILKQKAHQLASMQVQAYNGGNANPRPANNEEEEDEEDEYDYDYESLSDDNILEDRPENKSCNDKLQFEYNEEIPKRIKKADNSACNKGKVYDMELGEEFYLDQNKKESRQIAPELSDLVIYRQAVKFPGLSTLNASGSSRGKERKSRKSIFGNNPGRMSPGETASFNKTSGKSSCEGIRQTWEESSSPLNPTTSLSAIIRTPKCYHISSLNENAAKRLCRRYSQKLIQHTACQLLRTYPAATRIDSSNPNPLMFWLHGIQLVALNYQTDDLPLHLNAAMFEANGGCGYVLKPPVLWDKNCPMYQKFSPLERDLDSMDPAVYSLTIVSGQNVCPSNSMGSPCIEVDVLGMPLDSCHFRTKPIHRNTLNPMWNEQFLFRVHFEDLVFLRFAVVENNSSAVTAQRIIPLKALKRGYRHLQLRNLHNEVLEISSLFINSRRMEENSSGNTMSASSMFNTEERKCLQTHRVTVHGVPGPEPFTVFTINGGTKAKQLLQQILTNEQDIKPVTTDYFLMEEKYFISKEKNECRKQPFQRAIGPEEEIMQILSSWFPEEGYMGRIVLKTQQENLEEKNIVQDDKEVILSSEEESFFVQVHDVSPEQPRTVIKAPRVSTAQDVIQQTLCKAKYSYSILSNPNPSDYVLLEEVVKDTTNKKTTTPKSSQRVLLDQECVFQAQSKWKGAGKFILKLKEQVQASREDKKKGISFASELKKLTKSTKQPRGLTSPSQLLTSESIQTKEEKPVGGLSPVTQWITDSD

SEQ ID NO: 7640 - protein, 1994 aa, Homo sapiens
MVSEGSAAGRDFAGMEEVRQLHVRFCKGIKIWHQAWFLCSLLGREPQEREAGCQLWLCTLSAVLKVGWPFPLSEVPNFTLLKDGCGCWRLKEDQIYNAVRREETENTVGSLLHFLTKLPASETAHGRISVGPCLKQCVRDTVCEYRATLQRTSISQYITGSLLEATTSLGARSGLLSTFGGSTGRMMLKERQPSPSVANSNALPSSSAGISKELIDLQPLIQFPEEVASILMEQEQTIYRRVLPVDYLCFLTRDLGTPECQSSLPCLKASISASILTTQNGEHNALEDLVMRFNEVSSWVTWLILTAGSMEEKREVFSYLVHVAKCCWNMGNYNAVMEFLAGLRSRKVLKMWQFMDQSDIETMRSLKDAMAQHESSCEYRKVVTRALHIPGCKVFPFCGVFLKELCEVLDGASGLMKLCPRYNSQEETLEFVADYSGQDNFLQRVGQNGLKNSEKESTVNSIFQVIRSCNRSLETDEEDSPSEGNSSRKSSLKDKSRWQFIIGDLLDSDNDIFEQSKEYDSHGSEDSQKAFDHGTELIPWYVLSIQADVHQFLLQGATVIHYDQDTHLSARCFLQLQPDNSTLTWVKPTTASPASSKAKLGVLNNTAEPGKFPLLGNAGLSSLTEGVLDLFAVKAVYMGHPGIDIHTVCVQNKLGSMFLSETGVTLLYGLQTTDNRLLHFVAPKHTAKMLFSGLLELTRAVRKMRKFPDQRQQWLRKQYVSLYQEDGRYEGPTLAHAVELFGGRRWSARNPSPGTSAKNAEKPNMQRNNTLGISTTKKKKKILMRGESGEVTDDEMATRKAKMHKECRSRSGSDPQDINEQEESKVNAIANPPNPLPSRRAHSLTTAGSPNLAAGTSSPIRPVSSPVLSSSNKSPSSAWSSSSWHGRIKGGMKGFQSFMVSDSNMSFVEFVELFKSFSVRSRKDLKDLFDVYAVPCNRSGSESAPLYTNLTIDENTSDLQPDLDLLTRNVSDLGLFIKSKQQLSDNQRQISDAIAAASIVTNGTGIESTSLGIFGVGILQLNDFLVNCQGEHCTYDEILSIIQKFEPSISMCHQGLMSFEGFARFLMDKENFASKNDESQENIKELQLPLSYYYIESSHNTYLTGHQLKGESSVELYSQVLLQGCRSVELDCWDGDDGMPIIYHGHTLTTKIPFKEVVEAIDRSAFINSDLPIIISIENHCSLPQQRKMAEIFKTVFGEKLVTKFLFETDFSDDPMLPSPDQLRKKVLLKNKKLKAHQTPVDILKQKAHQLASMQVQAYNGGNANPQPANNEEEEDEEDEYDYDYESLSDDNILEDRPENKSCNDKLQFEYNEEIPKRIKKADNSACNKGKVYDMELGEEFYLDQNKKESRQIAPELSDLVIYCQAVKFPGLSTLNASGSSRGKERKSRKSIFGNNPGRMSPGETASFNKTSGKSSCEGIRQTWEESSSPLNPTTSLSAIIRTPKCYHISSLNENAAKRLCRRYSQKLTQHTACQLLRTYPAATRIDSSNPNPLMFWLHGIQLVALNYQTDDLPLHLNAAMFEANGGCGYVLKPPVLWDKNCPMYQKFSPLERDLDSMDPAVYSLTIVSGQNVCPSNSMGSPCIEVDVLGMPLDSCHFRTKPIHRNTLNPMWNEQFLFHVHFEDLVFLRFAVVENNSSAVTAQRIIPLKALKRGYRHLQLRNLHNEVLEISSLFINSRRMEENSSGNTMSASSMFNTEERKCLQTHRVTVHGVPGPEPFTVFTINGGTKAKQLLQQILTNEQDIKPVTTDYFLMEEKYFISKEKNECRKQPFQRAIGPEEEIMQILSSWFPEEGYMGRIVLKTQQENLEEKNIVQDDKEVILSSEEESFFVQVHDVSPEQPRTVIKAPRVSTAQDVIQQTLCKAKYSYSILSNPNPSDYVLLEEVVKDTTNKKTTTPKSSQRVLLDQECVFQAQSKWKGAGKFILKLKEQVQASREDKKKGISFASELKKLTKSTKQPRGLTSPSQLLTSESIQTKEEKPVGGLSSSDTMDYRQ

SEQ ID NO: 7641 - protein, 406 aa, Homo sapiens
MTLDVGPEDELPDWAAAKEFYQKYDPKDVIGRGVSSVVRRCVHRATGHEFAVKIMEVTAERLSPEQLEEVREATRRETHILRQVAGHPHIITLIDSYESSSFMFLVFDLMRKGELFDYLTEKVALSEKETRSIMRSLLEAVSFLHANNIVHRDLKPENILLDDNMQIRLSDFGFSCHLEPGEKLRELCGTPGYLAPEILKCSMDETHPGYGKEVDLWACGVILFTLLAGSPPFWHRRQILMLRMIMEGQYQFSSPEWDDRSSTVKDLISRLLQVDPEARLTAEQALQHPFFERCEGSQPWNLTPRQRFRVAVWTVLAAGRVALSTHRVRPLTKNALLRDPYALRSVRHLIDNCAFRLYGHWVKKGEQQNRAALFQHRPPGPFPIMGPEEEGDSAAITEDEAVLVLG

SEQ ID NO: 7642 - protein, 261 aa, Homo sapiens
MFEARLVQGSILKKVLEALKDLINEACWDISSSGVNLQSMDSSHVSLVQLTLRSEGFDTYRCDRNLAMGVNLTSMSKILKCAGNEDIITLRAEDNADTLALVFEAPNQEKVSDYEMKLMDLDVEQLGIPEQEYSCVVKMPSGEFARICRDLSHIGDAVVISCAKDGVKFSASGELGNGNIKLSQTSNVDKEEEAVTIEMNEPVQLTFALRYLNFFTKATPLSSTVTLSMSADVPLVVEYKIADMGHLKYYLAPKIEDEEGS

SEQ ID NO: 7643 - protein, 568 aa, Homo sapiens
MGLLTFRDVAIEFSLEEWQCLDTAQRNLCKNVILENYRNLVFLGIAVSKQDLITCLEQEKEPLTVKRHEMVNEPPVMCSHFAQEFWPEQNIKDSFEKVTLRRYEKCGNDNFQLKGCKSVDECKVHKGGYNGLNQCLPTMQSKMFQCDEYVKVFNKFSHSDRHKIKHMENKPFKCKECGRSFCMLSHLTRHERNYTKVNFCKCEECEKAVNQSSKLTKHKRIYTCEKLYKCQECDRTFNQFSNLTEYKKDYAREKPYKCEECGKAFNQSSHLTTHKIIHTGEKPYKCEECGKASNQFSNLTTHKKIHTGEQPYICEECGKAFTQSSTLTTHKRIHTGEKPYKCEECGKAFNRSSKLTEHKNIHTGEQPYKCEECGKAFNRSSNLTEHRKIHTEEKPYKCKECGKAFKHSSALTTHKRIHTGEKPYKCEECGKAFNRSSKLTEYKKLHTGKKPYKCEECGKAFIQSSKLTEHKKIHSGEIPYKCEECGKAFKHSSSLTTHKRIHTGEKPYKCEECSKAFSRSSKLTEHKIIHTGEKPYECERCDKAFNQSANLTKHKKIHTGEKLQNWNV

SEQ ID NO: 7644 - protein, 540 aa, Homo sapiens [sequence omitted]

SEQ ID NO: 7645 - protein, 160 aa, Homo sapiens
MSYNCCSRNFSSRSFGGYLYYPGSYPSSLVYSTALCSPSTCQLRSSLYRDCQKTCWEPASCQKSCYRPRTSILCCPCQTTCSGSLGFRSSSCRSQGYGSRCCYSLGNGSSGFRFLKYGGCGFPSLSYGSRFCYPNYLASGAWQSSCYRPICGSRFYQFTC

SEQ ID NO: 7646 - protein, 1738 aa, Homo sapiens [sequence omitted]

SEQ ID NO: 7647 - protein, 1726 aa, Homo sapiens
MSDFVESEAEESEEEYNDEGEVVPRVTKKFVEEEDDDEEEEEENLDDQDEQGNLKGFINDDDDEDEGEEDEGSDSGDSEDDVGHKKRKRTSFDDRLEDDDFDLIEENLGVKVKRGQKYRRVKKMSDDEDDDEEEYGKEEHEKEAIAEEIFQDGEGEEGQEAMEAPMAPPEEEEEDDEESDIDDFIVDDDGQPLKKPKWRKKLPGYTDAALQEAQEIFGVDFDYDEFEKYNEYDEELEEEYEYEDDEAEGEIRVRPKKTTKKRVSRRSIFEMYEPSELESSHLTDQDNEIRATDLPERFQLRSIPVKGAEDDELEEEADWIYRNAFATPTISLQESCDYLDRGQPASSFSRKGPSTIQKIKEALGFMRNQHFEVPFIAFYRKEYVEPELHINDLWRVWQWDEKWTQLRIRKENLTRLFEKMQAYQYEQISADPDKPLADGIRALDTTDMERLKDVQSMDELKDVYNHFLLYYGRDIPKMQNAAKASRKKLKRVREEGDEEGEGDEAEDEEQRGPELKQASRRDMYTICQSAGLDGLAKKFGLTPEQFGENLRDSYQRHETEQFPAEPLELAKDYVCSQFPTPEAVLEGARYMVALQIAREPLVRQVLRQTFQERAKLNITPTKKGRKDVDEAHYAYSFKYLKNKPVKELRDDQFLKICLAEDEGLLTTDISIDLKGVEGYGNDQTYFEEIKQFYYRDEFSHQVQEWNRQRTMAIERALQQFLYVQMAKELKNKLLAEAKEYVIKACSRKLYNWLRVAPYRPDQQVEEDDDFMDENQGKGIRVLGIAFSSARDHPVFCALVNGEGEVTDFLRLPHFTKRRTAWREEEREKKAQDIETLKKFLLNKKPHVVTVAGENRDAQMLIEDVKRIVHELDQGQQLSSIGVELVDNELAILYMNSKKSEAEFRDYPPVLRQAVSLARRIQDPLIEFAQVCSSDEDILCLKFHPLQEHVVKEELLNALYCEFINRVNEVGVDVNRAIAHPYSQALIQYVCGLGPRKGTHLLKILKQNNTRLESRTQLVTMCHMGPKVFMNCAGFLKIDTASLGDSTDSYIEVLDGSRVHPETYEWARKMAVDALEYDESAEDANPAGALEEILENPERLKDLDLDAFAEELERQGYGDKHITLYDIRAELSCRYKDLRTAYRSPNTEEIFNMLTKETPETFYIGKLIICNVTGIAHRRPQGESYDQAIRNDETGLWQCPFCQQDNFPELSEVWNHFDSGSCPGQAIGVKTRLDNGVTGFIPTKFLSDKVVKRPEERVKVGMTVHCRIMKIDIEKFSADLTCRTSDLMDRNNEWKLPKDTYYDFDAEAADHKQEEDMKRKQQRTTYIKRVIAHPSFHNINFKQAEKMMETMDQGDVIIRPSSKGENHLTVTWKVSDGIYQHVDVREEGKENAFSLGATLWINSEEFEDLDEIVARYVQPMASFARDLLNHKYYQDCSGGDRKKLEELLIKTKKEKPTFIPYFICACKELPGKFLLGYQPRGKPRIEYVTVTPEGFRYRGQIFPTVNGLFRWFKDHYQDPVPGITPSSSSRTRTPASINATPANINLADLTRAVNALPQNMTSQMFSAIAAVTGQGQNPNATPAQWASSQYGYGGSGGGSSAYHVFPTPAQQPVATPLMTPSYSYTTPSQPITTPQYHQLQASTTPQSAQAQPQPSSSSRQRQQQPKSNSHAAIDWGKMAEQWLQEKEAERRKQKQRLTPRPSPSPMIESTPMSIAGDATPLLDEMDR

SEQ ID NO: 7648 - protein, 345 aa, Homo sapiens
MSKPEWLIVGEDDDDAAFAPVLCETTACGFPAAQWGVRGETSCRATPTPSPANAHVNGSADAPENALHLAEAGGLCGESRARGQQRLLHSGGPGFGRPPIGLADWLTDTPRLPPPPPVPRPASSLPPLPGLGGRRQTEAPLSPRPSPRPFLFPAPRLLPGSGSSCVGGPHSSERREEAASRMKCKPNQTRTYDPEGFKKRAACLCFRSEREDEVLLVSSSRYPDRWIVPGGGMEPEEEPGGAAVREVYEEAGVKGKLGRLLGVFEQNQDPKHRTYVYVLTVTELLEDWEDSVSIGRKREWFKVEDAIKVLQCHKPVHAEYLEKLKLGGSPTNGNSMAPSSPDSDP

SEQ ID NO: 7649 - protein, 1588 aa, Homo sapiens
MVQKKKFCPRLLDYLVIVGARHPSSDSVAQTPELLRRYPLEDHTEFPLPPDVVFFCQPEGCLSVRQRRMSLRDDTSFVFTLTDKDTGVTRYGICVNFYRSFQKRISKEKGEGGAGSRGKEGTHATCASEEGGTESSESGSSLQPLSADSTPDVNQSPRGKRRAKAGSRSRNSTLTSLCVLSHYPFFSTFRECLYTLKRLVDCCSERLLGKKLGIPRGVQRDTMWRIFTGSLLVEEKSSALLHDLREIEAWIYRLLRSPVPVSGQKRVDIEVLPQELQPALTFALPDPSRFTLVDFPLHLPLELLGVDACLQVLTCILLEHKVVLQSRDYNALSMSVMAFVAMIYPLEYMFPVIPLLPTCMASAEQLLLAPTPYIIGVPASFFLYKLDFKMPDDVWLVDLDSNRVIAPTNAEVLPILPEPESLELKKHLKQALASMSLNTQPILNLEKFHEGQEIPLLLGRPSNDLQSTPSTEFNPLIYGNDVDSVDVATRVAMVRFFNSANVLQGFQMHTRTLRLFPRPVVAFQAGSFLASRPRQTPFAEKLARTQAVEYFGEWILNPTNYAFQRIHNNMFDPALIGDKPKWYAHQLQPIHYRVYDSNSQLAEALSVPPERDSDSEPTDDSGSDSMDYDDSSSSYSSLGDFVSEMMKCDINGDTPNVDPLTHAALGDASEVEIDELQNQKEAEEPGPDSENSQENPPLRSSSSTTASSSPSTVIHGANSEPADSTEMDDKAAVGVSKPLPSVPPSIGKSNMDRRQAEIGEGSVRRRIYDNPYFEPQYGFPPEEDEDEQGESYTPRFSQHVSGNRAQKLLRPNSLRLASDSDAESDSRASSPNSTVSNTSTEGFGGIMSFASSLYRNHSTSFSLSNLTLPTKGAREKATPFPSLKGNRRALVDQKSSVIKHSPTVKREPPSPQGRSSNSSENQQFLKEVVHSVLDGQGVGWLNMKKVRRLLESEQLRVFVLSKLNRMVQSEDDARQDIIPDVEISRKVYKGMLDLLKCTVLSLEQSYAHAGLGGMASIFGLLEIAQTHYYSKEPDKRKRSPTESVNTPVGKDPGLAGRGDPKAMAQLRVPQLGPRAPSATGKGPKELDTRSLKEENFIASIGPEVIKPVFDLGETEEKKSQISADSGVSLTSSSQRTDQDSVIGVSPAVMIRSSSQDSEVSTVVSNSSGETLGADSDLSSNAGDGPGGEGSVHLASSRGTLSDSEIETNSATSTIFGKAHSLKPSIKEKLAGSPIRTSEDVSQRVYLYEGLLGKERSTLWDQMQFWEDAFLDAVMLEREGMGMDQGPQEMIDRYLSLGEHDRKRLEDDEDRLLATLLHNLISYMLLMKVNKNDIRKKVRRLMGKSHIGLVYSQQINEVLDQLANLNGRDLSIWSSGSRHMKKQTFVVHAGTDTNGDIFFMEVCDDCVVLRSNIGTVYERWWYEKLINMTYCPKTKVLCLWRRNGSETQLNKFYTKKCRELYYCVKDSMERAAARQQSIKPGPELGGEFPVQDLKTGEGGLLQVTLEGINLKFMHNQVFIELNHIKKCNTVRGVFVLEEFVPEIKEVVSHKYKTPMAHEICYSVLCLFSYVAAVHSSEEDLRTPPRPVSS

SEQ ID NO: 7650 - protein, 1647 aa, Homo sapiens [sequence omitted]

SEQ ID NO: 7651 - protein, 1581 aa, Homo sapiens
MVQKKKFCPRLLDYLVIVGARHPSSDSVAQTPELLRRYPLEDHTEFPLPPDVVFFCQPEGCLSVRQRRMSLRDDTSFVFTLTDKDTGVTRYGICVNFYRSFQKRISKEKGEGGAGSRGKEGTHATCASEEGGTESSESGSSLQPLSADSTPDVNQSPRGKRRAKAGSRSRNSTLTSLCVLSHYPFFSTFRECLYTLKRLVDCCSERLLGKKLGIPRGVQRDTMWRIFTGSLLVEEKSSALLHDLREIEAWIYRLLRSPVPVSGQKRVDIEVLPQELQPALTFALPDPSRFTLVDFPLHLPLELLGVDACLQVLTCILLEHKVVLQSRDYNALSMSVMAFVAMIYPLEYMFPVIPLLPTCMASAEQLLLAPTPYIIGVPASFFLYKLDFKMPDDVWLVDLDSNRVIAPTNAEVLPILPEPESLELKKHLKQALASMSLNTQPILNLEKFHEGQEIPLLLGRPSNDLQSTPSTEFNPLIYGNDVDSVDVATRVAMVRFFNSANVLQGFQMHTRTLRLFPRPVVAFQAGSFLASRPRQTPFAEKLARTQAVEYFGEWILNPTNYAFQRIHNNMFDPALIGDKPKWYAHQLQPIHYRVYDSNSQLAEALSVPPERDSDSEPTDDSGSDSMDYDDSSSSYSSLGDFVSEMMKCDINGDTPNVDPLTHAALGDASEVEIDELQNQKEAEEPGPDSENSQENPPLRSSSSTTASSSPSTVIHGANSEPADSTEMDDKAAVGVSKPLPSVPPSIGKSNVDRRQAEIGEGSVRRRIYDNPYFEPQYGFPPEEDEDEQGESYTPRFSQHVSGNRAQKLLRPNSLRLASDSDAESDSRASSPNSTVSNTSTEGFGGIMSFASSLYRNHSTSFSLSNLTLPTKGAREKATPFPSLKVFGLNTLMEIVTEAGPGSGEGNRRALVDQKSSVIKHSPTVKREPPSPQGRSSNSSENQQFLKEVVHSVLDGQGVGWLNMKKVRRLLESEQLRVFVLSKLNRMVQSEDDARQDIIPDVEISRKVYKGMLDLLKCTVLSLEQSYAHAGLGGMASIFGLLEIAQTHYYSKEPDKRKRSPTESVNTPVGKDPGLAGRGDPKAMAQLRVPQLGPRAPSATGKGPKELDTRSLKEENFIASIELWNKHQEVKKQKALEKQRPEVIKPVFDLGETEEKKSQISADSGVSLTSSSQRTDQDSVIGVSPAVMIRSSSQDSEVSTVVSNSSGETLGADSDLSSNAGDGPGGEGSVHLASSRGTLSDSEIETNSATSTIFGKAHSLKPSIKEKLAGSPIRTSEDVSQRVYLYEGLLGRDKGSMWDQLEDAAMETFSISKERSTLWDQMQFWEDAFLDAVMLEREGMGMDQGPQEMIDRYLSLGEHDRKRLEDDEDRLLATLLHNLISYMLLMKVNKNDIRKKVRRLMGKSHIGLVYSQQINEVLDQLANLNGRDLSIWSSGSRHMKKQTFVVHAGTDTNGDIFFMEVCDDCVVLRSNIGTVYERWWYEKLINMTYCPKTKVLCLWRRNGSETQLNKFYTKKCRELYYCVKDSMERAAARQQSIKPGPELGGEFPVQDLKTGEGGLLQVTLEGINLKFMHNQFLKLKKW

SEQ ID NO: 7652 - protein, 1565 aa, Homo sapiens [sequence omitted]

SEQ ID NO: 7653 - protein, 1545 aa, Homo sapiens
MVQKKKFCPRLLDYLVIVGARHPSSDSVAQTPELLRRYPLEDHTEFPLPPDVVFFCQPEGCLSVRQRRMSLRDDTSFVFTLTDKDTGVTRYGICVNFYRSFQKRISKEKGEGGAGSRGKEGTHATCASEEGGTESSESGSSLQPLSADSTPDVNQSPRGKRRAKAGSRSRNSTLTSLCVLSHYPFFSTFRECLYTLKRLVDCCSERLLGKKLGIPRGVQRDTMWRIFTGSLLVEEKSSALLHDLREIEAWIYRLLRSPVPVSGQKRVDIEVLPQELQPALTFALPDPSRFTLVDFPLHLPLELLGVDACLQVLTCILLEHKVVLQSRDYNALSMSVMAFVAMIYPLEYMFPVIPLLPTCMASAEQLLLAPTPYIIGVPASFFLYKLDFKMPDDVWLVDLDSNRVIAPTNAEVLPILPEPESLELKKHLKQALASMSLNTQPILNLEKFHEGQEIPLLLGRPSNDLQSTPSTEFNPLIYGNDVDSVDVATRVAMVRFFNSANVLQGFQMHTRTLRLFPRPVVAFQAGSFLASRPRQTPFAEKLARTQAVEYFGEWILNPTNYAFQRIHNNMFDPALIGDKPKWYAHQLQPIHYRVYDSNSQLAEALSVPPERDSDSEPTDDSGSDSMDYDDSSSSYSSLGDFVSEMMKCDINGDTPNVDPLTHAALGDASEVEIDELQNQKEAEEPGPDSENSQENPPLRSSSSTTASSSPSTVIHGANSEPADSTEMDDKAAVGVSKPLPSVPPSIGKSNMDRRQAEIGEGAQKLLRPNSLRLASDSDAESDSRASSPNSTVSNTSTEGFGGIMSFASSLYRNHSTSFSLSNLTLPTKGAREKATPFPSLKGNRRALVDQKSSVIKHSPTVKREPPSPQGRSSNSSENQQFLKEVVHSVLDGQGVGWLNMKKVRRLLESEQLRVFVLSKLNRMVQSEDDARQDIIPDVEISRKVYKGMLDLLKCTVLSLEQSYAHAGLGGMASIFGLLEIAQTHYYSKEPDKRKRSPTESVNTPVGKDPGLAGRGDPKAMAQLRVPQLGPRAPSATGKGPKELDTRSLKEENFIASIGPEVIKPVFDLGETEEKKSQISADSGVSLTSSSQRTDQDSVIGVSPAVMIRSSSQDSEVSTVVSNSSGETLGADSDLSSNAGDGPGGEGSVHLASSRGTLSDSEIETNSATSTIFGKAHSLKPSIKEKLAGSPIRTSEDVSQRVYLYEGLLGKERSTLWDQMQFWEDAFLDAVMLEREGMGMDQGPQEMIDRYLSLGEHDRKRLEDDEDRLLATLLHNLISYMLLMKVNKNDIRKKVRRLMGKSHIGLVYSQQINEVLDQLANLNGRDLSIWSSGSRHMKKQTFVVHAGTDTNGDIFFMEVCDDCVVLRSNIGTVYERWWYEKLINMTYCPKTKVLCLWRRNGSETQLNKFYTKKCRELYYCVKDSMERAAARQQSIKPGPELGGEFPVQDLKTGEGGLLQVTLEGINLKFMHNQVFIELNHIKKCNTVRGVFVLEEFVPEIKEVVSHKYKTPMAHEICYSVLCLFSYVAAVHSSEEDLRTPPRPVSS

SEQ ID NO: 7654 - protein, 1588 aa, Homo sapiens
MVQKKKFCPRLLDYLVIVGARHPSSDSVAQTPELLRRYPLEDHTEFPLPPDVVFFCQPEGCLSVRQRRMSLRDDTSFVFTLTDKDTGVTRYGICVNFYRSFQKRISKEKGEGGAGSRGKEGTHATCASEEGGTESSESGSSLQPLSADSTPDVNQSPRGKRRAKAGSRSRNSTLTSLCVLSHYPFFSTFRECLYTLKRLVDCCSERLLGKKLGIPRGVQRDTMWRIFTGSLLVEEKSSALLHDLREIEAWIYRLLRSPVPVSGQKRVDIEVLPQELQPALTFALPDPSRFTLVDFPLHLPLELLGVDACLQVLTCILLEHKVVLQSRDYNALSMSVMAFVAMIYPLEYMFPVIPLLPTCMASAEQLLLAPTPYIIGVPASFFLYKLDFKMPDDVWLVDLDSNRVIAPTNAEVLPILPEPESLELKKHLKQALASMSLNTQPILNLEKFHEGQEIPLLLGRPSNDLQSTPSTEFNPLIYGNDVDSVDVATRVAMVRFFNSANVLQGFQMHTRTLRLFPRPVVAFQAGSFLASRPRQTPFAEKLARTQAVEYFGEWILNPTNYAFQRIHNNMFDPALIGDKPKWYAHQLQPIHYRVYDSNSQLAEALSVPPERDSDSEPTDDSGSDSMDYDDSSSSYSSLGDFVSEMMKCDINGDTPNVDPLTHAALGDASEVEIDELQNQKEAEEPGPDSENSQENPPLRSSSSTTASSSPSTVIHGANSEPADSTEMDDKAAVGVSKPLPSVPPSIGKSNVDRRQAEIGEGSVRRRIYDNPYFEPQYGFPPEEDEDEQGESYTPRFSQHVSGNRAQKLLRPNSLRLASDSDAESDSRASSPNSTVSNTSTEGFGGIMSFASSLYRNHSTSFSLSNLTLPTKGAREKATPFPSLKGNRRALVDQKSSVIKHSPTVKREPPSPQGRSSNSSENQQFLKEVVHSVLDGQGVGWLNMKKVRRLLESEQLRVFVLSKLNRMVQSEDDARQDIIPDVEISRKVYKGMLDLLKCTVLSLEQSYAHAGLGGMASIFGLLEIAQTHYYSKEPDKRKRSPTESVNTPVGKDPGLAGRGDPKAMAQLRVPQLGPRAPSATGKGPKELDTRSLKEENFIASIGPEVIKPVFDLGETEEKKSQISADSGVSLTSSSQRTDQDSVIGVSPAVMIRSSSQDSEVSTVVSNSSGETLGADSDLSSNAGDGPGGEGSVHLASSRGTLSDSEIETNSATSTIFGKAHSLKPSIKEKLAGSPIRTSEDVSQRVYLYEGLLGKERSTLWDQMQFWEDAFLDAVMLEREGMGMDQGPQEMIDRYLSLGEHDRKRLEDDEDRLLATLLHNLISYMLLMKVNKNDIRKKVRRLMGKSHIGLVYSQQINEVLDQLANLNGRDLSIWSSGSRHMKKQTFVVHAGTDTNGDIFFMEVCDDCVVLRSNIGTVYERWWYEKLINMTYCPKTKVLCLWRRNGSETQLNKFYTKKCRELYYCVKDSMERAAARQQSIKPGPELGGEFPVQDLKTGEGGLLQVTLEGINLKFMHNQVFIELNHIKKCNTVRGVFVLEEFVPEIKEVVSHKYKTPMAHEICYSVLCLFSYVAAVHSSEEDLRTPPRPVSS

SEQ ID NO: 7655 - protein, 1479 aa, Homo sapiens [sequence omitted]

SEQ ID NO: 7656 - protein, 1608 aa, Homo sapiens [sequence omitted]

SEQ ID NO: 7657 - protein, 217 aa, Homo sapiens
MEHAPWSPGASSRARAGHTMNTSPGTVGSDPVILATAGYDHTVRFWQAHSGICTRTVQHQDSQVNALEVTPDRSVIAAAGYQHIRMYDLNSNNPNPIISYDGVNKNIASVGFHEDGRWMYTGGEDCTARIWDLRSRNLQCQRIFQVNAPINCVCLHPNQAELIVGDQSGAIHIWDLKTDHNEQLIPEPEVSITSAHIDPDASYMAAVNSTAPRHLLG

SEQ ID NO: 7658 - protein, 456 aa, Homo sapiens
MKIEEVKSTTKTQRIASHSHVKGLGLDESGLAKQAASGLVGQENAREACGVIVELIKSKKMAGRAVLLAGPPGTGKTALALAIAQELGSKVPFCPMVGSEVYSTEIKKTEVLMENFRRAIGLRIKETKEVYEGEVTELTPCETENPMGGYGKTISHVIIGLKTAKGTKQLKLDPSIFESLQKERVEAGDVIYIEANSGAVKRQGRCDTYATEFDLEAEEYVPLPKGDVHKKKEIIQDVTLHDLDVANARPQGGQDILSMMGQLMKPKKTEITDKLRGEINKVVNKYIDQGIAELVPGVLFVDEVHMLDIECFTYLHRALESSIAPIVIFASNRGNCVIRGTEDITSPHGIPLDLLDRVMIIRTMLYTPQEMKQIIKIRAQTEGINISEEALNHLGEIGTKTTLRYSVQLLTPANLLAKINGKDSIEKEHVEEISELFYDAKSSAKILADQQDKYMK

SEQ ID NO: 7659 - protein, 1058 aa, Homo sapiens
VEMLSVVENGLDPQAAIPVIKKKLVGSVKALQKQYVSLDTVVTSEDGDANTMCSALEAVFIHGLHAKHIRAEAGGKRKKSAHQKPLPQPVFWPLLKAVTHKHIISELEHLTFVNTDVGRCRAWLRLALNDGLMECYLKLLLQEQARLHEYYQPTALLRDAEEGEFLLSFLQGLTSLSFELSYKSAILNEWTLTPLALSGLCPLSELDPLSTSGAELQRKESLDSISHSSGSEDIEVHHSGHKIRRNQKLTASSLSLDTASSSQLSCSLNSDSCLLQENGSKSPDHCEEPMSCDSDLGTANAEDSDRSLQEVLLEFSKAQVNSVPTNGLSQETEIPTPQASLSLHGLNTSTYLHCEAPAEPLPAQAASGTQDGVHVQEPRPQAPSPLDLQQPVESTSGQQPSSTVSETAREVGQGNGLQKAQAHDGAGLKLVVSSPTSPKNKSWISEDDFYRPSREQPLESASDHPIASYRGTPGSRPGLHRHFSQEPRKNCSLGALDQACVPSPGRRQAQAAPSQGHKSFRVVHRRQMGLSNPFRGLMKLGTVERRGAMGIWKELFCELSPLEFRLYLSNEEHTCVENCSLLRCESVGPAHSDGRFELVFSGKKLALRASSQDEAEDWLDRVREALQKVRPQQEDEWVNVQYPDQPEEPPEAPQGCLSPSDLLSEPAALQGTQFDWSSAQVPEPDAIKESLLYLYMDRTWMPYIFSLSLEALKCFRIRNNEKMLSDSHGVETIRDILPDTSLGGPSFFKIITAKAVLKLQAGNAEEAALWRDLVRKVLASYLETAEEAVTLGGSLDENCQEVLKFATRENGFLLQYLVAIPMEKGLDSQGCFCAGCSRQIGFSFVRPKLCAFSGLYYCDICHQDDASVIPARIIHNWDLTKRPICRQALKFLTQIRAQPLINLQMVNASLYEHVERMHLIGRRREQLKLLGDYLGLCRSGALKELSKRLNHRNYLLESPHRFSVADLQQIADGVYEGFLKALIEFASQHVYHCDLCTQRGFICQICQHHDIIFPFEFDTTVRCAECKTVFHQSCQAVVKKGCPRCARRRKYQEQNIFA

SEQ ID NO: 7660 - protein, 917 aa, Homo sapiens
MLSVVENGLDPQAAIPVIKKKLVGSVKALQKQYVSLDMVVTSEDGDANTMCSALEAVFIHGLHTKHIRAEAGGKRKKSAHQKPLPQPVFWPLLKAVTPKHIISELEHLTFVNMDVGRCRAWLRLALNNGLMECYLKLLLQEQARLREYYQPTALLRDAEEGEFLLSFLQGLMSLSFELSYKSAILNEWTLTPLALSGLCPLSELDPLSTSGAELQRKESLDSISHSSGSEDIEVHHSGHKIRRNQKPTASSLSLDTASSSQLSCSLNSDSCLLQENGSKSPDHCEEPMSYDSDLGTANAEDSDQSLQEKNKSWISEDDFYRPSREQPLKSASDHPIASYRGTPESRPGLHRHFSQEPRKNCSLGALDQACVPSPGRRQAQAAPSQGHKSFQVVHRRQMGLSNPFQGLMKLGTVERQGAMGIWKELFCELSPLEFRLYLSNEEHTCVENCSLLRCESVGPAHSDGRFELVFSGKKLALRASSQDEAEDWLDLVREALQKVRPQQEDEWVNVQYSDQPEEPPEAPQGCLSPSDLLSEPAALQGTQSDWSSAQVPELDAIKESLLYLYMDRTWMPYIFSLPLEALKCFRIRNNEKMLSDSHGVETIRDILPDTSLGGPSFFKIITAKAVLKLQAGNAEEAALWRDLVRKVLASYLETAEEAVTLGGSLDENCQEVLKFATRENGFLLQYLVAIPMEKGLDSQGCFCAGCSRQIGFSFVRPKLCAFSGLYYCDICHQDDASVIPARIIHNWDLTKRPICRQALKFLTQIRAQPLINLQMVNASLYEHVERMHLIGRSREQLKLLGDYLGLCRSGALKELSKRLNHRNYLLESPHRFRVADLRQIADEVYEGFLKALIEFASQHVYHCDLCTQRSFICQICQHHDIIFPSEFDTTIRCAKCKTVFHQSCQAVVKKGCPRCAR

SEQ ID NO: 7661 - protein, 427 aa, Homo sapiens
  VARIANT 264, 312: Xaa = Any Amino Acid
MSFTTRSTFSTNYRSLGSTQLLSYGAQPIRTVSSVYAGAEASGSRISVSCSTSFRDGLGFSGLAMGMGGGLAGMGGIQNEKKTMQSLNDCLASYVDRVRSMETKNWRLENKIWEHLENNGPQVRVWDHYFKTIEDLRAQIFANTVDNSSIALQTDNTHLAADDLRVRYETELAMCQSVESNIRGLCKVIDDTNVTQLQLETEIEAFKEELLFGKKNHEEEVKSLQAQIASSGLTVEVDAPKSQDLSKIMADNQAQYNELSRKNXEELDKYWSQQIEESTTVVTVQSSKIRAAEMTFTGLRCTVQSLEIDLDXMRNLKASLKNSLREVEARYTMQLDKVLMHLGGGPAASQAEGQHQAQEYEALLNIKIKLEAEIATYHGLLDDGEDFNLGDALDNSNSMQTIQKTTTRKIVDSKVVSEINETRVLRH

SEQ ID NO: 7662 - protein, 1873 aa, Homo sapiens
MEEGVQAPDWDSDETVIEGSVTESDLEEKELPWRRLLFDQDASLKSEFSLHPDTRGMCKGMPSPEIQLGFKLREDLQEQMNKNKMMPVLSEDTILQSQDETERNQALLQTRKNCSMFIGSFRQSGLSLNHQNIEGPEAESPEVLPHIEKELSEGRDSPEVSLLSGTAITVSDTVAVKETSLVEPEKILAAPNTFFEPRKEVTMTMTSEETKDEESSLETFVSALESLLTSPESTQEERLFELVSDFDRKELMNPLSDSLSSISIPLNSWSACHRDLLEDAKDDALPAELLEALNTLSEAKVETICHRKEGGSSLIARNECLEVEFNTSQTNEDCTQIAETLQDPNPSGLQTLAHQNITSCEPLSNKRNSNSVTNSSDQETACVLRRSSRLEKLKVSRDAKYSDHMYKMPEKILPKILGCEDLTNNNSSAQNFRMQDPALMIDGKEKNMHSARFKNGKQIRKNEQFSGKKEKMKVNKISLHSINRRNIFGENLVYKAALHDDADLVHHCIKKGGNVNQPSYAGWTALHEASVGGFYRTASELLKGGADVNIKGLYQITPLHDAVMNGHYKVAELLLLNGADPLFRNDDGKCALDEAKDLCMKRLLERYIPKHQKCLTSAQRSSIDPLDIEDVYQHKKPKFSSKSHIWHVYNENSNRQKLEHVKVNKGSKASLFINKEDVYEYYQKDPKNTKFGKSKHKQSTLDQIYSTGLRKGNLHNVKDPNTNVPKGIGRRKTQHKRTQVDDVDCNPRKILAVSPSRRINRLVTYQQHIPETHNDLPEELCEPSSLTLSSLRNGLDSSTEACSVSKEKHIQNLDLSDSQEVQCLELESVDQTEAVSFPGLLLHKEIKLPVVTTDKQPHTLQEQHHVLYKSHENSNLVPKDERFNKWENSFLSFVKENSDNDDDDDCSTSEKAITSKKVLCSTGGKKHYNFKENLTNKKEMGFQQFLLSEDHLSQENELKAVSLTTLPEQEAVNFSYSDNAVISEHVANYEQCIFGPSFDHSNGNPEQNSLACMRTLLTHEASKLTNHVELFKKPQDYIPRAPTFLMNQTDTHIVEKMAKNCDTERNYIDRDQKIIYSNEPLSIVAHSQVIETTKVEKRRQNHLESETIHNIDSHSTDNMSKELANISKLSQREKKEISHKPGMKAGRINKRNARGESQLHLAVRRGNLPLVKALIESGADVNLNDNAGWTPLHEASNEGSIDIIVELLKAGAKVNCENIDGILPLHDAVANNHLKAAEILLQNGANPNQKDQKQKSALDEADDEKMKELLRSYGAIETVNRDESDAIVNEKIPAVRSKRHKQCFCDDGKTIDSSSLSHQERSRESLSVHQTLSAILQDIEEKQEYLLEFEIRNPEDAEQYIEKMLKIKKIMDNVLAKQKAERDDLAKKYRVSIESFKHGALREQLANLAARQKSLLVVAKKQKKISLKIQNCRNVTSLPCLSLRKLPPRSEISSEKDSQELTSLENLEHPQSGSLSPVSGSMQETQLSLETWNYSQNTNICLNSEAVRRGEFSGNDMNSKQNGSDCTLDGFPKSRHSDGTEKNKLPSQPVAFIGQTEYSQKENDLTEATDKDHEFYVSSPVIGKLNISETASVLAENAAHPSNIICDQDLSNYDPKRGNRKTSSQQSPTGASESLAHQGIAVLGSDTVHQMKPYLKKSVSVVPCADDSQISSSSGSGQQDTIKKALNYSTAPKKKCIQIKDLILLGRINPGNNILEFKTQETTHKASILLNGKLKVESGQIYKNPVTWLKDLLGGNSYVTWNYAWSKVTYLGKELLRYVSEDAPILPEPNSVPQQYQPCLPEVACLDDPVQEPNKSMFEKTKFGQGTSRESMQSSPRYLQINEILLISDQEFLPCHIMDQHWKFCVECEELTP

SEQ ID NO: 7663 - protein, 27051 aa, Homo sapiens
MTTQAPTFTQPLQSVVVLEGSTATFEAHISGFPVPEVSWFRDGQVISTSTLPGVQISFSDGRAKLTIPAVTKANSGRYSLKATNGSGQATSTAELLVKAETAPPNFVQRLQSMTVRQGSQVRLQVRVTGIPTPVVKFYRDGAEIQSSLDFQISQEGDLYSLLIAEAYPEDSGTYSVNATNSVGRATSTAELLVQGEEEVPAKKTKTIVSTAQISESRQTRIEKKIEAHFDARSIATVEMVIDGAAGQQLPHKTPPRIPPKPKSRSPTPPSIAAKAQLARQQSPSPIRHSPSPVRHVRAPTPSPVRSVSPAARISTSPIRSVRSPLLMRKTQASTVATGPEVPPPWKQEGYVASSSEAEMRETTLTTSTQIRTEERWEGRYGVQEQVTISGAAGAAASVSASASYAAEAVATGAKEVKQDADKSAAVATVVAAVDMARVREPVISAVEQTAQRTTTTAVHIQPAQEQVRKEAEKTAVTKVVVAADKAKEQELKSRTKEVITTKQEQMHVTHEQIRKETEKTFVPKVVISAAKAKEQETRISEEITKKQKQVTQEAIMKETRKTVVPKVIVATPKVKEQDLVSRGREGITTKREQVQITQEKMRKEAEKTALSTIAVATAKAKEQETILRTRETMATRQEQIQVTHGKVDVGKKAEAVATVVAAVDQARVREPREPGHLEESYAQQTTLEYGYKERISAAKVAEPPQRPASEPHVVPKAVKPRVIQAPSETHIKTTDQKGMHISSQIKKTTDLTTERLVHVDKRPRTASPHFTVSKISVPKTEHGYEASIAGSAIATLQKELSATSSAQKITKSVKAPTVKPSETRVRAEPTPLPQFPFADTPDTYKSEAGVEVKKEVGVSITGTTVREERFEVLHGREAKVTETARVPAPVEIPVTPPTLVSGLKNVTVIEGESVTLECHISGYPSPTVTWYREDYQIESSIDFQITFQSGIARLMIREAFAEDSGRFTCSAVNEAGTVSTSCYLAVQVSEEFEKETTAVTEKFTTEEKRFVESRDVVMTDTSLTEEQAGPGEPAAPYFITKPVVQKLVEGGSVVFGCQVGGNPKPHVYWKKSGVPLTTGYRYKVSYNKQTGECKLVISMTFADDAGEYTIVVRNKHGETSASASLLEEADYELLMKSQQEMLYQTQVTAFVQEPKVGETAPGFVYSEYEKEYEKEQALIRKKMAKDTVVVRTYVEDQEFHISSFEERLIKEIEYRIIKTTLEELLEEDGEEKMAVDISESEAVESGFDLRIKNYRILEGMGVTFHCKMSGYPLPKIAWYKDGKRIKHGERYQMDFLQDGRASLRIPVVLPEDEGIYTAFASNIKGNAICSGKLYVEPAAPLGAPTYIPTLEPVSRIRSLSPRSVSRSPIRMSPARMSPARMSPARMSPARMSPGRRLEETDESQLERLYKPVFVLKPVSFKCLEGQTARFDLKVVGRPMPETFWFHDGQQIVNDYTHKVVIKEDGTQSLIIVPATPSDSGEWTVVAQNRAGRSSISVILTVEAVEHQVKPMFVEKLKNVNIKEGSRLEMKVRATGNPNPDIVWLKNSDIIVPHKYPKIRIEGTKGEAALKIDSTVSQDSAWYTATAINKAGRDTTRCKVNVEVEFAEPEPERKLIIPRGTYRAKEIAAPELEPLHLRYGQEQWEEGDLYDKEKQQKPFFKKKLTSLRLKRFGPAHFECRLTPIGDPTMVVEWLHDGKPLEAANRLRMINEFGYCSLDYGVAYSRDSGIITCRATNKYGTDHTSATLIVKDEKSLVEESQLPEGRKGLQRIEELERMAHEGALTGVTTDQKEKQKPDIVLYPEPVRVLEGETARFRCRVTGYPQPKVNWYLNGQLIRKSKRFRVRYDGIHYLDIVDCKSYDTGEVKVTAENPEGVIEHKVKLEIQQREDFRSVLRRAPEPRPEFHVHEPGKLQFEVQKVDRPVDTTETKEVVKLKRAERITHEKVPEESEELRSKFKRRTEEGYYEAITAVELKSRKKDESYEELLRKTKDELLHWTKELTEEEKKALAEEGKITIPTFKPDKIELSPSMEAPKIFERIQSQTVGQGSDAHFRVRVVGKPDPECEWYKNGVKIERSDRIYWYWPEDNVCELVIRDVTAEDSASIMVKAINIAGETSSHAFLLVQAKQLITFTQELQDVVAKEKDTMATFECETSEPFVKVKWYKDGMEVHEGDKYRMHSDRKVHFLSILTIDTSDAEDYSCVLVEDENVKTTAKLIVEGAVVEFVKELQDIEVPESYSGELECIVSPENIEGKWYHNDVELKSNGKYTITSRRGRQNLTVKDVTKEDQGEYSFVIDGKKTTCKLKMKPRPIAILQGLSDQKVCEGDIVQLEVKVSLESVEGVWMKDGQEVQPSDRVHIVIDKQSHMLLIEDMTKEDAGNYSFTIPALGLSTSGRVSVYSVDVITPLKDVNVIEGTKAVLECKVSVPDVTSVKWYLNDEQIKPDDRVQAIVKGTKQRLVINRTHASDEGPYKLIVGRVETNCNLSVEKIKIIRGLRDLTCTETQNVVFEVELSHSGIDVLWNFKDKEIKPSSKYKIEAHGKIYKLTVLNMMKDDEGKYTFYAGENITSGKLTVAGGAISKPLTDQTVAESQEAVFECEVANPDSKGEWLRDGKHLPLTNNIRSESDGHKRRLIIAATKLDDIGEYTYKVATSKTSAKLKVEAVKIKKTLKNLTVTETQDAVFTVELTHPNVKGVQWIKNGVVLESNEKYAISVKGTIYSLRIKNCAIVDESVYGFRLGRLGASARLHVETVKIIKKPKDVTALENATVAFEVSVSHDTVPVKWFHKSVEIKPSDKHRLVSERKVHKLMLQNISPSDAGEYTAVVGQLECKAKLFVETLHITKTMKNIEVPETKTASFECEVSHFNVPSMWLKNGVEIEMSEKFKIVVQGKLHQLIIMNTSTEDSAEYTFVCGNDQVSATLTVTPIMITSMLKDINAEEKDTITFEVTVNYEGISYKWLKNGVEIKSTDKCQMRTKKLTHSLNIRNVHFGDAADYTFVAGKATSTATLYVEARHIEFRKHIKDIKVLEKKRAMFECEVSEPDITVQWMKDDQELQITDRIKIQKEKYVHRLLIPSTRMSDAGKYTVVAGGNVSTAKLFVEGRDVRIRSIKKEVQVIEKQRAVVEFEVNEDDVDAHWYKDGIEINFQVQERHKYVVERRIHRMFISETRQSDAGEYTFVAGRNRSSVTLYVNAPEPPQVLQELQPVTVQSGKPARFCAVISGRPQPKISWYKEEQLLSTGFKCKFLHDGQEYTLLLIEAFPEDAAVYTCEAKNDYGVATTSASLSVEVPEVVSPDQEMPVYPPAIITPLQDTVTSEGQPARFQCRVSGTDLKVSWYSKDKKIKPSRFFRMTQFEDTYQLEIAEAYPEDEGTYTFVASNAVGQVSSTANLSLEGFSKFEENTSNSQWHVSLSVSFKKEPLGQKPSFIQPLSSLRVHNGETVRFHARVSGIPKPEIQWFHNQQLILPTKDVVFHFEESTGMALMLIVDAYSEHAGQYSCKAANSAGEATCAATLTVTPKAPESILHERIEQEIEMEMKEFSSSFLSAEEEGLHSAELQLSKINETLELLSESPVYSTKFDSEKEGTGPIFIKEVSNADISMGDVATLSVTVIGIPKPKIQWFFNGVLLTPSADYKFVFDGDDHSLIILFTKLEDEGEYTCMASNDYGKTICSAYLKINSKGEGHKDTETESAVAKSLEKLGGPCPPHFLKELKPIRCAQGLPAIFEYTVVGEPAPTVTWFKENKQLCTSVYYTIIHNPNGSGTFIVNDPQREDSGLYICKAENMLGESTCAAELLVLLEDTDMTDTPCKAKSTPEAPEDFPQTPLKGPAVEALDSEQEIATFVKDTILKAALITEENQQLSYEHIAKANELSSQLPLGAQELQSILEQDKLTPESTREFLCINGSIHFQPLKEPSPNLQLQIVQSQKTFSKEGILMPEEPETQAVLSDTEKIFPSAMSIEQINSLTVEPLKTLLAEPEGNYPQSSIEPPMHSYLTSVAEEVLSPKEKTVSDTNREQRVTLQKQEAQSALILSQSLAEGHVESLQSPDVMISQVNYEPLVPSEHSCTEGGKILIESANPLENAGQDSAVRIEEGKSLRFPLALEEKQVLLKEEHSDNVVMPPDQIIESKREPVAIKKVQEVQGRDLLSKESLLSGIPEEQRLNLKIQICRALQAAVASEQPGLFSEWLRNIEKVEVEAVNITQEPRHIMCMYLVTSAKSVTEEVTIIIEDVDPQMANLKMELRDALCAIIYEEIDILTAEGPRIQQGAKTSLQEEMDSFSGSQKVEPITEPEVESKYLISTEEVSYFNVQSRVKYLDATPVTKGVASAVVSDEKQDESLKPSEEKEESSSESGTEEVATVKIQEAEGGLIKEDGPMIHTPLVDTVSEEGDIVHLTTSITNAKEVNWYFENKLVPSDEKFKCLQDQNTYTLVIDKVNTEDHQGEYVCEALNDSGKTATSAKLTVVKRAAPVIKRKIEPLEVALGHLAKFTCEIQSAPNVRFQWFKAGREIYESDKCSIRSSKYISSLEILRTQVVDCGEYTCKASNEYGSVSCTATLTVTVPGGEKKVRKLLPERKPEPKEEVVLKSVLRKRPEEEEPKVEPKKLEKVKKPAVPEPPPPKPVEEVEVPTVTKRERKIPEPTKVPEIKPAIPLPAPEPKPKPEAEVKTIKPPPVEPEPTPIAAPVTVPVVGKKAEAKAPKEEAAKPKGPIKGVPKKTPSPIEAERRKLRPGSGGEKPPDEAPFTYQLKAVPLKFVKEIKDIILTESEFVGSSAIFECLVSPSTAITTWMKDGSNIRESPKHRFIADGKDRKLHIIDVQLSDAGEYTCVLRLGNKEKTSTAKLVVEELPVRFVKTLEEEVTVVKGQPLYLSCELNKERDVVWRKDGKIVVEKPGRIVPGVIGLMRALTINDADDTDAGTYTVTVENANNLECSSCVKVVEVIRDWLVKPIRDQHVKPKGTAIFACDIAKDTPNIKWFKGYDEIPAEPNDKTEILRDGNHLYLKIKNAMPEDIAEYAVEIEGKRYPAKLTLGEREVELLKPIEDVTIYEKESASFDAEISEADIPGQWKLKGELLRPSPTCEIKAEGGKRFLTLHKVKLDQAGEVLYQALNAITTAILTVKEIELDFAVPLKDVTVPERRQARFECVLTREANVIWSKGPDIIKSSDKFDIIADGKKHILVINDSQFDDEGVYTAEVEGKKTSARLFVTGIRLKFMSPLEDQTVKEGETATFVCELSHEKMHVVWFKNDAKLHTSRTVLISSEGKTHKLEMKEVTLDDISQIKAQVKELSSTAQLKVLEADPYFTVKLHDKTAVEKDEITLKCEVSKDVPVKWFKDGEEIVPSPKYSIKADGLRRILKIKKADLKDKGEYVCDCGTDKTKANVTVEARLIKVEKPLYGVEVFVGETAHFEIELSEPDVHGQWKLKGQPLTASPDCEIIEDGKKHILILHNCQLGMTGEVSFQAANAKSAANLKVKELPLIFITPLSDVKVFEKDEAKFECEVSREPKTFRWLKGTQEITGDDRFELIKDGTKHSMVIKSAAFEDEAKYMFEAEDKHTSGKLIIEGIRLKFLTPLKDVTAKEKESAVFTVELSHDNIRVKWFKNDQRLHTTRSVSMQDEGKTHSITFKDLSIDDTSQIRVEAMGMSSEAKLTVLEGDPYFTGKLQDYTGVEKDEVILQCEISKADAPVKWFKDGKEIKPSKNAVIKADGKKRMLILKKALKSDIGQYTCDCGTDKTSGKLDIEDREIKLVRPLHSVEVMETETARFETEISEDDIHANWKLKGEALLQTPDCEIKEEGKIHSLVLHNCRLDQTGGVDFQAANVKSSAHLRVKPRVIGLLRPLKDVTVTAGETATFDCELSYEDIPVEWYLKGKKLEPSDKVVPRSEGKVHTLTLRDVKLEDAGEVQLTAKDFKTHANLFVKEPPVEFTKPLEDQTVEEGATAVLECEVSRENAKVKWFKNGTEILKSKKYEIVADGRVRKLVIHDCTPEDIKTYTCDAKDFKTSCNLNVVPPHVEFLRPLTDLQVREKEMARFECELSRENAKVKWFKDGAEIKKGKKYDIISKGAVRILVINKCLLDDEAEYSCEVRTARTSGMLTVLEEEAVFTKNLANIEVSETDTIKLVCEVSKPGAEVIWYKGDEEIIETGRYEILTEGRKRILVIQNAHLEDAGNYNCRLPSSRTDGKVKVHELAAEFISKPQNLEILEGEKAEFVCSISKESFPVQWKRDDKTLESGDKYDVIADGKKRVLVVKDATLQDMGTYVVMVGAARAAAHLTVIEKLRIVVPLKDTRVKEQQEVVFNCEVNTEGAKAKWFRNEEAIFDSSKYIILQKDLVYTLRIRDAHLDDQANYNVSLTNHRGENVKSAANLIVEEEDLRIVEPLKDIETMEKKSVTFWCKVNRLNVTLKWTKNGEEVPFDNRVSYRVDKYKHMLTIKDCGFPDEGEYIVTAGQDKSVAELLIIEAPTEFVEHLEDQTVTEFDDAVFSCQLSREKANVKWYRNGREIKEGKKYKFEKDGSIHRLIIKDCRLDDECEYACGVEDRKSRARLFVEEIPVEIIRPPQDILEAPGADVVFLAELNKDKVEVQWLRNNMVVVQGDKHQMMSEGKIHRLQICDIKPRDQGEYRFIAKDKEARAKLELAAAPKIKTADQDLVVDVGKPLTMVVPYDAYPKAEAEWFKENEPLSTKTIDTTAEQTSFRILEAKKGDKGRYKIVLQNKHGKAEGFINLKVIDVPGPVRNLEVTETFDGEVSLAWEEPLTDGGSKIIGYVVERRDIKRKTWVLATDRAESCEFTVTGLQKGGVEYLFRVSARNRVGTGEPVETDNPVEARSKYDVPGPPLNVTITDVNRFGVSLTWEPPEYDGGAEITNYVIELRDKTSIRWDTAMTVRAEDLSATVTDVVEGQEYSFRVRAQNRIGVGKPSAATPFVKVADPIERPSPPVNLTSSDQTQSSVQLKWEPPLKDGGSPILGYIIERCEEGKDNWIRCNMKLVPELTYKVTGLEKGNKYLYRVSAENKAGVSDPSEILGPLTADDAFVEPTMDLSAFKDGLEVIVPNPITILVPSTGYPRPTATWCFGDKVLETGDRVKMKTLSAYAELVISPSERSDKGIYTLKLENRVKTISGEIDVNVIARPSAPKELKFGDITKDSVHLTWEPPDDDGGSPLTGYVVEKREVSRKTWTKVMDFVTDLEFTVPDLVQGKEYLFKVCARNKCGPGEPAYVDEPVNMSTPATVPDPPENVKWRDRTANSIFLTWDPPKNDGGSRIKGYIVERCPRGSDKWVACGEPVAETKMEVTGLEEGKWYAYRVKALNRQGASKPSRPTEEIQAVDTQEAPEIFLDVKLLAGLTVKAGTKIELPATVTGKPEPKITWTKADMILKQDKRITIENVPKKSTVTIVDSKRSDTGTYIIEAVNVCGRATAVVEVNVLDKPGPPAAFDITDVTNESCLLTWNPPRDDGGSKITNYVVERRATDSEVWHKLSSTVKDTNFKATKLIPNKEYIFRVAAENMYGVGEPVQASPITAKYQFDPPGPPTRLEPSDITKDAVTLTWCEPDDDGGSPITGYWVERLDPDTDKWVRCNKMPVKDTTYRVKGLTNKKKYRFRVLAENLAGPGKPSKSTEPILIKDPIDPPWPPGKPTVKDVGKTSVRLNWTKPEHDGGAKIESYVIEMLKTGTDEWVRVAEGVPTTQHLLPGLMEGQEYSFRVRAVNKAGESEPSEPSDPVLCREKLYPPSPPRWLEVINITKNTADLKWTVPEKDGGSPITNYIVEKRDVRRKGWQTVDTTVKDTKCTVTPLTEGSLYVFRVAAENAIGQSDYTEIEDSVLAKDTFTTPGPPYALAVVDVTKRHVDLKWEPPKNDGGRPIQRYVIEKKERLGTRWVKAGKTAGPDCNFRVTDVIEGTEVQFQVRAENEAGVGHPSEPTEILSIEDPTSPPSPPLDLHVTDAGRKHIAIAWKPPEKNGGSPIIGYHVEMCPVGTEKWMRVNSRPIKDLKFKVEEGVVPDKEYVLRVRAVNAIGVSEPSEISENVVAKDPDCKPTIDLETHDIIVIEGEKLSIPVPFRAVPVPTVSWHKDGKEVKASDRLTMKNDHISAHLEVPKSVRADAGIYTITLENKLGSATASINVKVIGLPGPCKDIKASDITKSSCKLTWEPPEFDGGTPILHYVLERREAGRRTYIPVMSGENKLSWTVKDLIPNGEYFFRVKAVNKVGGGEYIELKNPVIAQDPKQPPDPPVDVEVHNPTAEAMTITWKPPLYDGGSKIMGYIIEKIAKGEERWKRCNEHLVPILTYTAKGLEEGKEYQFRVRAENAAGISEPSRATPPTKAVDPIDAPKVILRTSLEVKRGDEIALDASISGSPYPTITWIKDENVIVPEEIKKRAAPLVRRRKGEVQEEEPFVLPLTQRLSIDNSKKGESQLRVRDSLRPDHGLYMIKVENDHGIAKAPCTVSVLDTPGPPINFVFEDIRKTSVLCKWEPPLDDGGSEIINYTLEKKDKTKPDSEWIVVTSTLRHCKYSVTKLIEGKEYLFRVRAENRFGPGPPCVSKPLVAKDPFGPPDAPDKPIVEDVTSNSMLVKWNEPKDNGSPILGYWLEKREVNSTHWSRVNKSLLNALKANVDGLLEGLTYVFRVCAENAAGPGKFSPPSDPKTAHDPISPPGPPIPRVTDTSSTTIELEWEPPAFNGGGEIVGYFVDKQLVGTNEWSRCTEKMIKVRQYTVKEIREGADYKLRVSAVNAAGEGPPGETQPVTVAEPQEPPAVELDVSVKGGIQIMAGKTLRIPAVVTGRPVPTKVWTKEEGELDKDRVVIDNVGTKSELIIKDALRKDHGRYVITATNSCGSKFAAARVEVFDVPGPVLDLKPVVTNRKMCLLNWSDPEDDGGSEITGFIIERKDAKMHTWRQPIETERSKCDITGLLEGQEYKFRVIAKNKFGCGPPVEIGPILAVDPLGPPTSPERLTYTERTKSTITLDWKEPRSNGGSPIQGYIIEKRRHDKPDFERVNKRLCPTTSFLVENLDEHQMYEFRVKAVNEIGESEPSLPLNVVIQDDEVPPTIKLRLSVRGDTIKVKAGEPVHIPADVTGLPMPKIEWSKNETVIEKPTDALQITKEEVSRSEAKTELSIPKAVREDKGTYTVTASNRLGSVFRNVHVEVYDRPSPPRNLAVTDIKAESCYLTWDAPLDNGGSEITHYVIDKRDASRKKAEWEEVTNTAVEKRYGIWKLIPNGQYEFRVRAVNKYGISDECKSDKVVIQDPYRLPGPPGKPKVLARTKGSMLVSWTPPLDNGGSPITGYWLEKREEGSPYWSRVSRAPITKVGLKGVEFNVPRLLEGVKYQFRAMAINAAGIGPPSEPSDPEVAGDPIFPPGPPSCPEVKDKTKSSISLGWKPPAKDGGSPIKGYIVEMQEEGTTDWKRVNEPDKLITTCECVVPNLKELRKYRFRVKAVNEAGESEPSDTTGEIPATDIQEEPEVFIDIGAQDCLVCKAGSQIRIPAVIKGRPTPKSSWEFDGKAKKAMKDGVHDIPEDAQLETAENSSVIIIPECKRSHTGKYSITAKNKAGQKTANCRVKVMDVPGPPKDLKVSDITRGSCRLSWKMPDDDGGDRIKGYVIEKRTIDGKAWTKVNPDCGSTTFVVPDLLSEQQYFFRVRAENRFGIGPPVETIQRTTARDPIYPPDPPIKLKIGLITKNTVHLSWKPPKNDGGSPVTHYIVECLAWDPTGTKKEAWRQCNKRDVEELQFTVEDLVEGGEYEFRVKAVNAAGVSKPSATVGPCDCQRPDMPPSIDLKEFMEVEEGTNVNIVAKIKGVPFPTLTWFKAPPKKPDNKEPVLYDTHVNKLVVDDTCTLVIPQSRRSDTGLYTITAVNNLGTASKEMRLNVLGRPGPPVGPIKFESVSADQMTLSWFPPKDDGGSKITNYVIEKREANRKTWVHVSSEPKECTYTIPKLLEGHEYVFRIMAQNKYGIGEPLDSEPETARNLFSVPGAPDKPTVSSVTRNSMTVNWEEPEYDGGSPVTGYWLEMKDTTSKRWKRVNRDPIKAMTLGVSYKVTGLIEGSDYQFRVYAINAAGVGPASLPSDPATARDPIAPPGPPFPKVTDWTKSSADLEWSPPLKDGGSKVTGYIVEYKEEGKEEWEKGKDKEVRGTKLVVTGLKEGAFYKFRVSAVNIAGIGEPGEVTDVIEMKDRLVSPDLQLDASVRDRIVVHAGGVIRIIAYVSGKPPPTVTWNMNERTLPQEATIETTAISSSMVIKNCQRSHQGVYSLLAKNEAGERKKTIIVDVLDVPGPVGTPFLAHNLTNESCKLTWFSPEDDGGSPITNYVIEKRESDRRAWTPVTYTVTRQNATVQGLIQGKAYFFRIAAENSIGMGPFVETSEALVIREPITVPERPEDLEVKEVTKNTVTLTWNPPKYDGGSEIINYVLESRLIGTEKFHKVTNDNLLSRKYTVKGLKEGDTYEYRVSAVNIVGQGKPSFCTKPITCKDELAPPTLHLDFRDKLTIRVGEAFALTGRYSGKPKPKVSWFKDEADVLEDDRTHIKTTPATLALEKIKAKRSDSGKYCVVVENSTGSRKGFCQVNVVDRPGPPVGPVSFDEVTKDYMVISWKPPLDDGGSKITNYIIEKKEVGKDVWMPVTSASAKTTCKVSKLLEGKDYIFRIHAENLYGISDPLVSDSMKAKDRFRVPDAPDQPIVTEVTKDSALVTWNKPHDGGKPITNYILEKRETMSKRWARVTKDPIHPYTKFRVPDLLEGCQYEFRVSAENEIGIGDPSPPSKPVFAKDPIAKPSPPVNPEAIDTTCNSVDLTWQPPRHDGGSKILGYIVEYQKVGDEEWRRANHTPESCPETKYKVTGLRDGQTYKFRVLAVNAAGESDPAHVPEPVLVKDRLEPPELILDANMAREQHIKVGDTLRLSAIIKGVPFPKVTWKKEDRDAPTKARIDVTPVGSKLEIRNAAHEDGGIYSLTVENPAGSKTVSVKVLVLDKPGPPRDLEVSEIRKDSCYLTWKEPLDDGGSVITNYVVERRDVASAQWSPLSATSKKKSHFAKHLNEGNQYLFRVAAENQYGRGPFVETPKPIKALDPLHPPGPPKDLHHVDVDKTEVSLVWNKPDRDGGSPITGYLVEYQEEGTQDWIKFKTVTNLECVVTGLQQGKTYRFRVKAENIVGLGLPDTTIPIECQEKLVPPSVELDVKLIEGLVVKAGTTVRFPAIIRGVPVPTAKWTTDGSEIKTDEHYTVETDNFSSVLTIKNCLRRDTGEYQITVSNAAGSKTVAVHLTVLDVPGPPTGPINILDVTPEHMTISWQPPKDDGGSPVINYIVEKQDTRKDTWGVVSSGSSKTKLKIPHLQKGCEYVFRVRAENKIGVGPPLDSTPTVAKHKFSPPSPPGKPVVTDITENAATVSWTLPKSDGGSPITGYYMERREVTGKWVRVNKTPIADLKFRVTGLYEGNTYEFRVFAENLAGLSKPSPSSDPIKACRPIKPPGPPINPKLKDKSRETADLVWTKPLSDGGSPILGYVVECQKPGTAQWNRINKDELIRQCAFRVPGLIEGNEYRFRIKAANIVGEGEPRELAESVIAKDILHPPEVELDVTCRDVITVRVGQTIRILARVKGRPEPDITWTKEGKVLVREKRVDLIQDLPRVELQIKEAVRADHGKYIISAKNSSGHAQGSAIVNVLDRPGPCQNLKVTNVTKENCTISWENPLDNGGSEITNFIVEYRKPNQKGWSIVASDVTKRLIKANLLANNEYYFRVCAENKVGVGPTIETKTPILAINPIDRPGEPENLHIADKGKTFVYLKWRRPDYDGGSPNLSYHVERRLKGSDDWERVHKGSIKETHYMVDRCVENQIYEFRVQTKNEGGESDWVKTEEVVVKEDLQKPVLDLKLSGVLTVKAGDTIRLEAGVRGKPFPEVAWTKDKDATDLTRSPRVKIDTRADSSKFSLTKAKRSDGGKYVVTATNTAGSFVAYATVNVLDKPGPVRNLKIVDVSSDRCTVCWDPPEDDGGCEIQNYILEKCETKRMVWSTYSATVLTPGTTVTRLIEGNEYIFRVRAENKIGTGPPTESKPVIAKTKYDKPGRPDPPEVTKVSKEEMTVVWNPPEYDGGKSITGYFLEKKEKHSTRWVPVNKSAIPERRMKVQNLLPDHEYQFRVKAENEIGIGEPSLPSRPVVAKDPIEPPGPPTNFRVVDTTKHSITLGWGKPVYDGGAPIIGYVVEMRPKIADASPDEGWKRCNAAAQLVRKEFTVTSLDENQEYEFRVCAQNQVGIGRPAELKEAIKPKEILEPPEIDLDASMRKLVIVRAGCPIRLFAIVRGRPAPKVTWRKVGIDNVVRKGQVDLVDTMAFLVIPNSTRDDSGKYSLTLVNPAGEKAVFVNVRVLDTPGPVSDLKVSDVTKTSCHVSWAPPENDGGSQVTHYIVEKREADRKTWSTVTPEVKKTSFHVTNLVPGNEYYFRVTAVNEYGPGVPTDVPKPVLASDPLSEPDPPRKLEVTEMTKNSATLAWLPPLRDGGAKIDGYITSYREEEQPADRWTEYSVVKDLSLVVTGLKEGKKYKFRVAARNAVGVSLPREAEGVYEAKEQLLPPKILMPEQITIKAGKKLRIEAHVYGKPHPTCKWKKGEDEVVTSSHLAVHKADSSSILIIKDVTRKDSGYYSLTAENSSGTDTQKIKVVVMDAPGPPQPPFDISDIDADACSLSWHIPLEDGGSNITNYIVEKCDVSRGDWVTALASVTKTSCRVGKLIPGQEYIFRVRAENRFGISEPLTSPKMVAQFPFGVPSEPKNARVTKVNKDCIFVAWDRPDSDGGSPIIGYLIERKERNSLLWVKANDTLVRSTEYPCAGLVEGLEYSFRIYALNKAGSSPPSKPTEYVTARMPVDPPGKPEVIDVTKSTVSLIWARPKHDGGSKIIGYFVEACKLPGDKWVRCNTAPHQIPQEEYTATGLEEKAQYQFRAIARTAVNISPPSEPSDPVTILAENVPPRIDLSVAMKSLLTVKAGTNVCLDATVFGKPMPTVSWKKDGTLLKPAEGIKMAMQRNLCTLELFSVNRKDSGDYTITAENSSGSKSATIKLKVLDKPGPPASVKINKMYSDRAMLSWEPPLEDGGSEITNYIVDKRETSRPNWAQVSATVPITSCSVEKLIEGHEYQFRICAENKYGVGDPVFTEPAIAKNPYDPPGRCDPPVISNITKDHMTVSWKPPADDGGSPITGYLLEKRETQAVNWTKVNRKPIIERTLKATGLQEGTEYEFRVTAINKAGPGKPSDASKAAYARDPQYPPAPPAFPKVYDTTRSSVSLSWGKPAYDGGSPIIGYLVEVKRADSDNWVRCNLPQNLQKTRFEVTGLMEDTQYQFRVYAVNKIGYSDPSDVPDKHYPKDILIPPEGELDADLRKTLILRAGVTMRLYVPVKGRPPPKITWSKPNVNLRDRIGLDIKSTDFDTFLRCENVNKYDAGKYILTLENSCGKKEYTIVVKVLDTPGPPVNVTVKEISKDSAYVTWEPPIIDGGSPIINYVVQKRDAERKSWSTVTTECSKTSFRVANLEEGKSYFFRVFAENEYGIGDPGETRDAVKASQTPGPVVDLKVRSVSKSSCSIGWKKPHSDGGSRIIGYVVDFLTEENKWQRVMKSLSLQYSAKDLTEGKEYTFRVSAENENGEGTPSEITVVARDDVVAPDLDLKGLPDLCYLAKENSNFRLKIPIKGKPAPSVSWKKGEDPLATDTRVSVESSAVNTTLIVYDCQKSDAGKYTITLKNVAGTKEGTISIKVVGKPGIPTGPIKFDEVTAEAMTLKWAPPKDDGGSEITNYILEKRDSVNNKWVTCASAVQKTTFRVTRLHEGMEYTFRVSAENKYGVGEGLKSEPIVARHPFDVPDAPPPPNIVDVRHDSVSLTWTDPKKTGGSPITGYHLEFKERNSLLWKRANKTPIRMRDFKVTGLTEGLEYEFRVMAINLAGVGKPSLPSEPVVALDPIDPPGKPEVINITRNSVTLIWTEPKYDGGHKLTGYIVEKRDLPSKSWMKANHVNVPECAFTVTDLVEGGKYEFRIRAKNTAGAISAPSESTETIICKDEYEAPTIVLDPTIKDGLTIKAGDTIVLNAISILGKPLPKSSWSKAGKDIRPSDITQITSTPTSSMLTIKYATRKDAGEYTITATNPFGTKVEHVKVTVLDVPGPPGPVEISNVSAEKATLTWTPPLEDGGSPIKSYILEKRETSRLLWTVVSEDIQSCRHVATKLIQGNEYIFRVSAVNHYGKGEPVQSEPVKMVDRFGPPGPPEKPEVSNVTKNTATVSWKRPVDDGGSEITGYHVERREKKSLRWVRAIKTPVSDLRCKVTGLQEGSTYEFRVSAENRAGIGPPSEASDSVLMKDAAYPPGPPSNPHVTDTTKKSASLAWGKPHYDGGLEITGYVVEHQKVGDEAWIKDTTGTALRITQFVVPDLQTKEKYNFRISAINDAGVGEPAVIPDVEIVEREMAPDFELDAELRRTLVVRAGLSIRIFVPIKGRPAPEVTWTKDNINLKNRANIENTESFTLLIIPECNRYDTGKFVMTIENPAGKKSGFVNVRVLDTPGPVLNLRPTDITKDSVTLHWDLPLIDGGSRITNYIVEKREATRKSYSTATTKCHKCTYKVTGLSEGCEYFFRVMAENEYGIGEPTETTEPVKASEAPSPPDSLNIMDITKSTVSLAWPKPKHDGGSKITGYVIEAQRKGSDQWTHITTVKGLECVVRNLTEGEEYTFQVMAVNSAGRSAPRESRPVIVKEQTMLPELDLRGIYQKLVIAKAGDNIKVEIPVLGRPKPTVTWKKGDQILKQTQRVNFETTATSTILNINECVRSDSGPYPLTARNIVGEVGDVITIQVHDIPGPPTGPIKFDEVSSDFVTFSWDPPENDGGVPISNYVVEMRQTDSTTWVELATTVIRTTYKATRLTTGLEYQFRVKAQNRYGVGPGITSACIVANYPFKVPGPPGTPQVTAVTKDSMTISWHEPLSDGGSPILGYHVERKERNGILWQTVSKALVPGNIFKSSGLTDGIAYEFRVIAENMAGKSKPSKPSEPMLALDPIDPPGKPVPLNITRHTVTLKWAKPEYTGGFKITSYIVEKRDLPNGRWLKANFSNILENEFTVSGLTEDAAYEFRVIAKNAAGAISPPSEPSDAITCRDDVEAPKIKVDVKFKDTVILKAGEAFRLEADVSGRPPPTMEWSKDGKELEGTAKLEIKIADFSTNLVNKDSTRRDSGAYTLTATNPGGFAKHIFNVKVLDRPGPPEGPLAVTEVTSEKCVLSWFPPLDDGGAKIDHYIVQKRETSRLAWTNVASEVQVTKLKVTKLLKGNEYIFRVMAVNKYGVGEPLESEPVLAVNPYGPPDPPKNPEVTTITKDSMVVCWGHPDSDGGSEIINYIVERRDKAGQRWIKCNKKTLTDLRYKVSGLTEGHEYEFRIMAENAAGISAPSPTSPFYKACDTVFKPGPPGNPRVLDTSRSSISIAWNKPIYDGGSEITGYMVEIALPEEDEWQIVTPPAGLKATSYTITGLTENQEYKIRIYAMNSEGLGEPALVPGTPKAEDRMLPPEIELDADLRKVVTIRACCTLRLFVPIKGRPAPEVKWARDHGESLDKASIESTSSYTLLIVGNVNRFDSGKYILTVENSSGSKSAFVNVRVLDTPGPPQDLKVKEVTKTSVTLTWDPPLLDGGSKIKNYIVEKRESTRKAYSTVATNCHKTSWKVDQLQEGCSYYFRVLAENEYGIGLPAETAESVKASERPLPPGKITLMDVTRNSVSLSWEKPEHDGGSRILGYIVEMQTKGSDKWATCATVKVTEATITGLIQGEEYSFRVSAQNEKGISDPRQLSVPVIAKDLVIPPAFKLLFNTFTVLAGEDLKVDVPFIGRPTPAVTWHKDNVPLKQTTRVNAESTENNSLLTIKDACREDVGHYVVKLTNSAGEAIETLNVIVLDKPGPPTGPVKMDEVTADSITLSWGPPKYDGGSSINNYIVEKRDTSTTTWQIVSATVARTTIKACRLKTGCEYQFRIAAENRYGKSTYLNSEPTVAQYPFKVPGPPGTPVVTLSSRDSMEVQWNEPISDGGSRVIGYHLERKERNSILWVKLNKTPIPQTKFKTTGLEEGVEYEFRVSAENIVGIGKPSKVSECYVARDPCDPPGRPEAIIVTRNSVTLQWKKPTYDGGSKITGYIVEKKELPEGRWMKASFTNIIDTHFEVTGLVEDHRYEFRVIARNAAGVFSEPSESTGAITARDEVDPPRISMDPKYKDTIVVHAGESFKVDADIYGKPIPTIQWIKGDQELSNTARLEIKSTDFATSLSVKDAVRVDSGNYILKAKNVAGERSVTVNVKVLDRPGPPEGPVVISGVTAEKCTLAWKPPLQDGGSDIINYIVERRETSRLVWTVVDANVQTLSCKVTKLLEGNEYTFRIMAVNKYGVGEPLESEPVVAKNPFVVPDAPKAPEVTTVTKDSMIVVWERPASDGGSEILGYVLEKRDKEGIRWTRCHKRLIGELRLRVTGLIENHDYEFRVSAENAAGLSEPSPPSAYQKACDPIYKPGPPNNPKVIDITRSSVFLSWSKPIYDGGCEIQGYIVEKCDVSVGEWTMCTPPTGINKTNIEVEKLLEKHEYNFRICAINKAGVGEHADVPGPIIVEEKLEAPDIDLDLELRKIINIRAGGSLRLFVPIKGRPTPEVKWGKVDGEIRDAAIIDVTSSFTSLVLDNVNRYDSGKYTLTLENSSGTKSAFVTVRVLDTPSPPVNLKVTEITKDSVSITWEPPLLDGGSKIKNYIVEKREATRKSYAAVVTNCHKNSWKIDQLQEGCSYYFRVTAENEYGIGLPAQTADPIKVAEVPQPPGKITVDDVTRNSVSLSWTKPEHDGGSKIIQYIVEMQAKHSEKWSECARVKSLQAVITNLTQGEEYLFRVVAVNEKGRSDPRSLAVPIVAKDLVIEPDVKPAFSSYSVQVGQDLKIEVPISGRPKPTITWTKDGLPLKQTTRINVTDSLDLTTLSIKETHKDDGGQYGITVANVVGQKTASIEIVTLDKPDPPKGPVKFDDVSAESITLSWNPPLYTGGCQITNYIVQKRDTTTTVWDVVSATVARTTLKVTKLKTGTEYQFRIFAENRYGQSFALESDPIVAQYPYKEPGPPGTPFATAISKDSMVIQWHEPVNNGGSPVIGYHLERKERNSILWTKVNKTIIHDTQFKAQNLEEGIEYEFRVYAENIVGVGKASKNSECYVARDPCDPPGTPEPIMVKRNEITLQWTKPVYDGGSMITGYIVEKRDLPDGRWMKASFTNVIETQFTVSGLTEDQRYEFRVIAKNAAGAISKPSDSTGPITAKDEVELPRISMDPKFRDTIVVNAGETFRLEADVHGKPLPTIEWLRGDKEIEESARCEIKNTDFKALLIVKDAIRIDGGQYILRASNVAGSKSFPVNVKVLDRPGPPEGPVQVTGVTSEKCSLTWSPPLQDGGSDISHYVVEKRETSRLAWTVVASEVVTNSLKVTKLLEGNEYVFRIMAVNKYGVGEPLESAPVLMKNPFVLPGPPKSLEVTNIAKDSMTVCWNRPDSDGGSEIIGYIVEKRDRSGIRWIKCNKRRITDLRLRVTGLTEDHEYEFRVSAENAAGVGEPSPATVYYKACDPVFKPGPPTNAHIVDTTKNSITLAWGKPIYDGGSEILGYVVEICKADEEEWQIVTPQTGLRVTRFEISKLTEHQEYKIRVCALNKVGLGEATSVPGTVKPEDKLEAPELDLDSELRKGIVVRAGGSARIHIPFKGRPTPEITWSREEGEFTDKVQIEKGVNYTQLSIDNCDRNDAGKYILKLENSSGSKSAFVTVKVLDTPGPPQNLAVKEVRKDSAFLVWEPPIIDGGAKVKNYVIDKRESTRKAYANVSSKCSKTSFKVENLTEGAIYYFRVMAENEFGVGVPVETVDAVKAAEPPSPPGKVTLTDVSQTSASLMWEKPEHDGGSRVLGYVVEMQPKGTEKWSIVAESKVCNAVVTGLSSGQEYQFRVKAYNEKGKSDPRVLGVPVIAKDLTIQPSLKLPFNTYSIQAGEDLKIEIPVIGRPRPNISWVKDGEPLKQTTRVNVEETATSTVLHIKEGNKDDFGKYTVTATNSAGTATENLSVIVLEKPGPPVGPVRFDEVSADFVVISWEPPAYTGGCQISNYIVEKRDTTTTTWHMVSATVARTTIKITKLKTGTEYQFRIFAENRYGKSAPLDSKAVIVQYPFKEPGPPGTPFVTSISKDQMLVQWHEPVNDGGTKIIGYHLEQKEKNSILWVKLNKTPIQDTKFKTTGLDEGLEYEFKVSAENIVGIGKPSKVSECFVARDPCDPPGRPEAIVITRNNVTLKWKKPAYDGGSKITGYIVEKKDLPDGRWMKASFTNVLETEFTVSGLVEDQRYEFRVIARNAAGNFSEPSDSSGAITARDEIDAPNASLDPKYKDVIVVHAGETFVLEADIRGKPIPDVVWSKDGKELEETAARMEIKSTIQKTTLVVKDCIRTDGGQYILKLSNVGGTKSIPITVKVLDRPGPPEGPLKVTGVTAEKCYLAWNPPLQDGGANISHYIIEKRETSRLSWTQVSTEVQALNYKVTKLLPGNEYIFRVMAVNKYGIGEPLESGPVTACNPYKPPGPPSTPEVSAITKDSMVVTWARPVDDGGTEIEGYILEKRDKEGVRWTKCNKKTLTDLRLRVTGLTEGHSYEFRVAAENAAGVGEPSEPSVFYRACDALYPPGPPSNPKVTDTSRSSVSLAWSKPIYDGGAPVKGYVVEVKEAAADEWTTCTPPTGLQGKQFTVTKLKENTEYNFRICAINSEGVGEPATLPGSVVAQERIEPPEIELDADLRKVVVLRASATLRLFVTIKGRPEPEVKWEKAEGILTDRAQIEVTSSFTMLVIDNVTRFDSGRYNLTLENNSGSKTAFVNVRVLDSPSAPVNLTIREVKKDSVTLSWEPPLIDGGAKITNYIVEKRETTRKAYATITNNCTKTTFRIENLQEGCSYYFRVLASNEYGIGLPAETTEPVKVSEPPLPPGRVTLVDVTRNTATIKWEKPESDGGSKITGYVVEMQTKGSEKWSTCTQVKTLEATISGLTAGEEYVFRVAAVNEKGRSDPRQLGVPVIARDIEIKPSVELPFHTFNVKAREQLKIDVPFKGRPQATVNWRKDGQTLKETTRVNVSSSKTVTSLSIKEASKEDVGTYELCVSNSAGSITVPITIIVLDRPGPPGPIRIDEVSCDSITISWNPPEYDGGCQISNYIVEKKETTSTTWHIVSQAVARTSIKIVRLTTGSEYQFRVCAENRYGKSSYSESSAVVAEYPFSPPGPPGTPKVVHATKSTMLVTWQVPVNDGGSRVIGYHLEYKERSSILWSKANKILIADTQMKVSGLDEGLMYEYRVYAENIAGIGKCSKSCEPVPARDPCDPPGQPEVTNITRKSVSLKWSKPHYDGGAKITGYIVERRELPDGRWLKCNYTNIQETYFEVTELTEDQRYEFRVFARNAADSVSEPSESTGPIIVKDDVEPPRVMMDVKFRDVIVVKAGEVLKINADIAGRPLPVISWAKDGIEIEERARTEIISTDNHTLLTVKDCIRRDTGQYVLTLKNVAGTRSVAVNCKVLDKPGPPAGPLEINGLTAEKCSLSWGRPQEDGGADIDYYIVEKRETSHLAWTICEGELQMTSCKVTKLLKGNEYIFRVTGVNKYGVGEPLESVAIKALDPFTVPSPPTSLEITSVTKESMTLCWSRPESDGGSEISGYIIERREKNSLRWVRVNKKPVYDLRVKSTGLREGCEYEYRVYAENAAGLSLPSETSPLIRAEDPVFLPSPPSKPKIVDSGKTTITIAWVKPLFDGGAPITGYTVEYKKSDDTDWKTSIQSLRGTEYTISGLTTGAEYVFRVKSVNKVGASDPSDSSDPQIAKEREEEPLFDIDSEMRKTLIVKAGASFTMTVPFRGRPVPNVLWSKPDTDLRTRAYVDTTDSRTSLTIENANRNDSGKYTLTIQNVLSAASLTLVVKVLDTPGPPTNITVQDVTKESAVLSWDVPENDGGAPVKNYHIEKREASKKAWVSVTNNCNRLSYKVTNLQEGAIYYFRVSGENEFGVGIPAETKEGVKITEKPSPPEKLGVTSISKDSVSLTWLKPEHDGGSRIVHYVVEALEKGQKNWVKCAVAKSTHHVVSGLRENSEYFFRVFAENQAGLSDPRELLLPVLIKEQLEPPEIDMKNFPSHTVYVRAGSNLKVDIPISGKPLPKVTLSRDGVPLKATMRFNTEITAENLTINLKESVTADAGRYEITAANSSGTTKAFINIVVLDRPGPPTGPVVISDITEESVTLKWEPPKYDGGSQVTNYILLKRETSTAVWTEVSATVARTMMKVMKLTTGEEYQFRIKAENRFGISDHIDSACVTVKLPYTTPGPPSTPWVTNVTRESITVGWHEPVSNGGSAVVGYHLEMKDRNSILWQKANKLVIRTTHFKVTTISAGLIYEFRVYAENAAGVGKPSHPSEPVLAIDACEPPRNVRITDISKNSVSLSWQQPAFDGGSKITGYIVERRDLPDGRWTKASFTNVTETQFIISGLTQNSQYEFRVFARNAVGSISNPSEVVGPITCIDSYGGPVIDLPLEYTEVVKYRAGTSVKLRAGISGKPAPTIEWYKDDKELQTNALVCVENTTDLASILIKDADRLNSGCYELKLRNAMGSASATIRVQILDKPGPPGGPIEFKTVTAEKITLLWRPPADDGGAKITHYIVEKRETSRVVWSMVSEHLEECIITTTKIIKGNEYIFRVRAVNKYGIGEPLESDSVVAKNAFVTPGPPGIPEVTKITKNSMTVVWSRPIADGGSDISGYFLEKRDKKSLGWFKVLKETIRDTRQKVTGLTENSDYQYRVCAVNAAGQGPFSEPSEFYKAADPIDPPGPPAKIRIADSTKSSITLGWSKPVYDGGSAVTGYVVEIRQGEEEEWTTVSTKGEVRTTEYVVSNLKPGVNYYFRVSAVNCAGQGEPIEMNEPVQAKDILEAPEIDLDVALRTSVIAKAGEDVQVLIPFKGRPPPTVTWRKDEKNLGSDARYSIENTDSSSLLTIPQVTRNDTGKYILTIENGVGEPKSSTVSVKVLDTPAACQKLQVKHVSRGTVTLLWDPPLIDGGSPIINYVIEKRDATKRTWSVVSHKCSSTSFKLIDLSEKTPFFFRVLAENEIGIGEPCETTEPVKAAEVPAPIRDLSMKDSTKTSVILSWTKPDFDGGSVITEYVVERKGKGEQTWSHAGISKTCEIEVSQLKEQSVLEFRVFAKNEKGLSDPVTIGPITVKELIITPEVDLSDIPGAQVTVRIGHNVHLELPYKGKPKPSISWLKDGLPLKESEFVRFSKTENKITLSIKNAKKEHGGKYTVILDNAVCRIAVPITVITLGPPSKPKGPIRFDEIKADSVILSWDVPEDNGGGEITCYSIEKRETSQTNWRMVCSSVARTTFKVPNLVKDAEYQFRVRAENRYGVSQPLVSSIIVAKHQFRIPGPPGKPVIYNVTSDGMSLTWDAPVYDGGSEVTGFHVEKKERNSILWQKVNTSPISGREYRATGLVEGLDYQFRVYAENSAGLSSPSDPSKFTLAVSPVDPPGTPDYIDVTRETITLKWNPPLRDGGSKIVGYSIEKRQGNERWVRCNFTDVSECQYTVTGLSPGDRYEFRIIARNAVGTISPPSQSSGIIMTRDENVPPIVEFGPEYFDGLIIKSGESLRIKALVQGRPVPRVTWFKDGVEIEKRMNMEITDVLGSTSLFVRDATRDHRGVYTVEAKNASGSAKAEIKVKVQDTPGKVVGPIRFTNITGEKMTLWWDAPLNDGCAPITHYIIEKRETSRLAWALIEDKCEAQSYTAIKLINGNEYQFRVSAVNKFGVGRPLDSDPVVAQIQYTVPDAPGIPEPSNITGNSITLTWARPESDGGSEIQQYILERREKKSTRWVKVISKRPISETRFKVTGLTEGNEYEFHVMAENAAGVGPASGISRLIKCREPVNPPGPPTVVKVTDTSKTTVSLEWSKPVFDGGMEIIGYIIEMCKADLGDWHKVNAEACVKTRYTVTDLQAGEEYKFRVSAINGAGKGDSCEVTGTIKAVDRLTAPELDIDANFKQTHVVRAGASIRLFIAYQGRPTPTAVWSKPDSNLSLRADIHTTDSFSTLTVENCNRNDAGKYTLTVENNSGSKSITFTVKVLDTPGPPGPITFKDVTRGSATLMWDAPLLDGGARIHHYVVEKREASRRSWQVISEKCTRQIFKVNDLAEGVPYYFRVSAVNEYGVGEPYEMPEPIVATEQPAPPRRLDVVDTSKSSAVLAWLKPDHDGGSRITGYLLEMRQKGSDFWVEAGHTKQLTFTVERLVEKTEYEFRVKAKNDAGYSEPREAFSSVIIKEPQIEPTADLTGITNQLITCKAGSPFTIDVPISGRPAPKVTWKLEEMRLKETDRVSITTTKDRTTLTVKDSMRGDSGRYFLTLENTAGVKTFSVTVVVIGRPGPVTGPIEVSSVSAESCVLSWGEPKDGGGTEITNYIVEKRESGTTAWQLVNSSVKRTQIKVTHLTKYMEYSFRVSSENRFGVSKPLESAPIIAEHPFVPPSAPTRPEVYHVSANAMSIRWEEPYHDGGSKIIGYWVEKKERNTILWVKENKVPCLECNYKVTGLVEGLEYQFRTYALNAAGVSKASEASRPIMAQNPVDAPGRPEVTDVTRSTVSLIWSAPAYDGGSKVVGYIIERKPVSEVGDGRWLKCNYTIVSDNFFTVTALSEGDTYEFRVLAKNAAGVISKGSESTGPVTCRDEYAPPKAELDARLHGDLVTIRAGSDLVLDAAVGGKPEPKIIWTKGDKELDLCEKVSLQYTGKRATAVIKFCDRSDSGKYTLTVKNASGTKAVSVMVKVLDSPGPCGKLTVSRVTQEKCTLAWSLPQEDGGAEITHYIVERRETSRLNWVIVEGECPTLSYVVTRLIKNNEYIFRVRAVNKYGPGVPVESEPIVARNSFTIPSPPGIPEEVGTGKEHIIIQWTKPESDGGNEISNYLVDKREKKSLRWTRVNKDYVVYDTRLKVTSLMEGCDYQFRVTAVNAAGNSEPSEASNFISCREPSYTPGPPSAPRVVDTTKHSISLAWTKPMYDGGTDIVGYVLEMQEKDTDQWYRVHTNATIRNTEFTVPDLKMGQKYSFRVAAVNVKGMSEYSESIAEIEPVERIEIPDLELADDLKKTVTIRAGASLRLMVSVSGRPPPVITWSKQGIDLASRAIIDTTESYSLLIVDKVNRYDAGKYTIEAENQSGKKSATVLVKVYDTPGPCPSVKVKEVSRDSVTITWEIPTIDGGAPVNNYIVEKREAAMRAFKTVTTKCSKTLYRISGLVEGTMYYFRVLPENIYGIGEPCETSDAVLVSEVPLVPAKLEVVDVTKSTVTLAWEKPLYDGGSRLTGYVLEACKAGTERWMKVVTLKPTVLEHTVTSLNEGEQYLFRIRAQNEKGVSEPRETVTAVTVQDLRVLPTIDLSTMPQKTIHVPAGRPVELVIPIAGRPPPAASWFFAGSKLRESERVTVETHTKVAKLTIRETTIRDTGEYTLELKNVTGTTSETIKVIILDKPGPPTGPIKIDEIDATSITISWEPPELDGGAPLSGYVVEQRDAHRPGWLPVSESVTRSTFKFTRLTEGNEYVFRVAATNRFGIGSYLQSEVIECRSSIRIPGPPETLQIFDVSRDGMTLTWYPPEDDGGSQVTGYIVERKEVRADRWVRVNKVPVTMTRYRSTGLTEGLEYEHRVTAINARGSGKPSRPSKPIVAMDPIAPPGKPQNPRVTDTTRTSVSLAWSVPEDEGGSKVTGYLIEMQKVDQHEWTKCNTTPTKIREYTLTHLPQGAEYRFRVLACNAGGPGEPAEVPGTVKVTEMLEYPDYELDERYQEGIFVRQGGVIRLTIPIKGKPFPICKWTKEGQDISKRAMIATSETHTELVIKEADRGDSGTYDLVLENKCGKKAVYIKVRVIGSPNSPEGPLEYDDIQVRSVRVSWRPPADDGGADILGYILERREVPKAAWYTIDSRVRGTSLVVKGLKENVEYHFRVSAENQFGISKPLKSEEPVTPKTPLNPPEPPSNPPEVLDVTKSSVSLSWSRPKDDGGSRVTGYYIERKETSTDKWVRHNKTQITTTMYTVTGLVPDAEYQFRIIAQNDVGLSETSPASEPVVCKDPFDKPSQPGELEILSISKDSVTLQWEKPECDGGKEILGYWVEYRQSGDSAWKKSNKERIKDKQFTIGGLLEATEYEFRVFAENETGLSRPRRTAMSIKTKLTSGEAPGIRKEMKDVTTKLGEAAQLSCQIVGRPLPDIKWYRFGKELIQSRKYKMSSDGRTHTLTVMTEEQEDEGVYTCIATNEVGEVETSSKLLLQATPQFHPGYPLKEKYYGAVGSTLRLHVMYIGRPVPAMTWFHGQKLLQNSENITIENTEHYTHLVMKNVQRKTHAGKYKVQLSNVFGTVDAILDVEIQDKPDKPTGPIVIEALLKNSAVISWKPPADDGGSWITNYVVEKCEAKEGAEWQLVSSAISVTTCRIVNLTENAGYYFRVSAQNTFGISDPLEVSSVVIIKSPFEKPGAPGKPTITAVTKDSCVVAWKPPASDGGAKIRNYYLEKREKKQNKWISVTTEEIRETVFSVKNLIEGLEYEFRVKCENLGGESEWSEISEPITPKSDVPIQAPHFKEELRNLNVRYQSNATLVCKVTGHPKPIVKWYRQGKEIIADGLKYRIQEFKGGYHQLIIASVTDDDATVYQVRATNQGGSVSGTASLEVEVPAKIHLPKTLEGMGAVHALRGEVVSIKIPFSGKPDPVITWQKGQDLIDNNGHYQVIVTRSFTSLVFPNGVERKDAGFYVVCAKNRFGIDQKTVELDVADVPDPPRGVKVSDVSRDSVNLTWTEPASDGGSKITNYIVEKCATTAERWLRVGQARETRYTVINLFGKTSYQFRVIAENKFGLSKPSEPSEPTITKEDKTRAMNYDEEVDETREVSMTKASHSSTKELYEKYMIAEDLGRGEFGIVHRCVETSSKKTYMAKFVKVKGTDQVLVKKEISILNIARHRNILHLHESFESMEELVMIFEFISGLDIFERINTSAFELNEREIVSYVHQVCEALQFLHSHNIGHFDIRPENIIYQTRRSSTIKIIEFGQARQLKPGDNFRLLFTAPEYYAPEVHQHDVVSTATDMWSLGTLVYVLLSGINPFLAETNQQIIENIMNAEYTFDEEAFKEISIEAMDFVDRLLVKERKSRMTASEALQHPWLKQKIERVSTKVIRTLKHRRYYHTLIKKDLNMVVSAARISCGGAIRSQKGVSVAKVKVASIEIGPVSGQIMHAVGEEGGHVKYVCKIENYDQSTQVTWYFGVRQLENSEKYEITYEDGVAILYVKDITKLDDGTYRCKVVNDYGEDSSYAELFVKGVREVYDYYCRRTMKKIKRRTDTMRLLERPPEFTLPLYNKTAYVGENVRFGVTITVHPEPHVTWYKSGQKIKPGDNDKKYTFESDKGLYQLTINSVTTDDDAEYTVVARNKYGEDSCKAKLTVTLHPPPTDSTLRPMFKRLLANAECQEGQSVCFEIRVSGIPPPTLKWEKDGQPLSLGPNIEIIHEGLDYYALHIRDTLPEDTGYYRVTATNTAGSTSCQAHLQVERLRYKKQEFKSKEEHERHVQKQIDKTLRMAEILSGTESVPLTQVAKEALREAAVLYKPAVSTKTVKGEFRLEIEEKKEERKLRMPYDVPEPRKYKQTTIEEDQRIKQFVPMSDMKWYKKIRDQYEMPGKLDRVVQKRPKRIRLSRWEQFYVMPLPRITDQYRPKWRIPKLSQDDLEIVRPARRRTPSPDYDFYYRPRRRSLGDISDEELLLPIDDYLAMKRTEEERLRLEEELELGFSASPPSRSPPHFELSSLRYSSPQAHVKVEETRKDFRYSTYHIPTKAEASTSYAELRERHAQAAYRQPKQRQRIMAEREDEELLRPVTTTQHLSEYKSELDFMSKEEKSRKKSRRQREVTEITEIEEEYEISKHAQRESSSSASRLLRRRRSLSPTYIELMRPVSELIRSRPQPAEEYEDDTERRSPTPERTRPRSPSPVSSERSLSRFERSARFDIFSRYESMKAALKTQKTSERKYEVLSQQPFTLDHAPRITLRMRSHRVPCGQNTRFILNVQSKPTAEVKWYHNGVELQESSKIHYTNTSGVLTLEILDCHTDDSGTYRAVCTNYKGEASDYATLDVTGGDYTTYASQRRDEEVPRSVFPELTRTEAYAVSSFKKTSEMEASSSVREVKSQMTETRESLSSYEHSASAEMKSAALEEKSLEEKSTTRKIKTTLAARILTKPRSMTVYEGESARFSCDTDGEPVPTVTWLRKGQVLSTSARHQVTTTKYKSTFEISSVQASDEGNYSVVVENSEGKQEAEFTLTIQKARVTEKAVTSPPRVKSPEPRVKSPEAVKSPKRVKSPEPSHPKAVSPTETKPTPTEKVQHLPVSAPPKITQFLKAEASKEIAKLTCVVESSVLRAKEVTWYKDGKKLKENGHFQFHYSADGTYELKINNLTESDQGEYVCEISGEGGTSKTNLQFMGQAFKSIHEKVSKISETKKSDQKTTESTVTRKTEPKAPEPISSKPVIVTGLQDTTVSSDSVAKFAVKATGEPRPTAIWTKDGKAITQGGKYKLSEDKGGFFLEIHKTDTSDSGLYTCTVKNSAGSVSSSCKLTIKAIKDTEAQKVSTQKTSEITPQKKAVVQEEISQKALRSEEIKMSEAKSQEKLALKEEASKVLISEEVKKSAATSLEKSIVHEEITKTSQASEEVRTHAEIKAFSTQMSINEGQRLVLKANIAGATDVKWVLNGVELTNSEEYRYGVSGSDQTLTIKQASHRDEGILTCISKTKEGIVKCQYDLTLSKELSDAPAFISQPRSQNINEGQNVLFTCEISGEPSPEIEWFKNNLPISISSNVSISRSRNVYSLEIRNASVSDSGKYTIKAKNFRGQCSATASLMVLPLVEEPSREVVLRTSGDTSLQGSFSSQSVQMSASKQEASFSSFSSSSASSMTEMKFASMSAQSMSSMQESFVEMSSSSFMGISNMTQLESSTSKMLKAGIRGIPPKIEALPSDISIDEGKVLTVACAFTGEPTPEVTWSCGGRKIHSQEQGRFHIENTDDLTTLIIMDVQKQDGGLYTLSLGNEFGSDSATVNIHIRSI

SEQ ID NO: 7664 - protein, 34350 aa, Homo sapiens
MTTQAPTFTQPLQSVVVLEGSTATFEAHISGFPVPEVSWFRDGQVISTSTLPGVQISFSDGRAKLTIPAVTKANSGRYSLKATNGSGQATSTAELLVKAETAPPNFVQRLQSMTVRQGSQVRLQVRVTGIPTPVVKFYRDGAEIQSSLDFQISQEGDLYSLLIAEAYPEDSGTYSVNATNSVGRATSTAELLVQGEEEVPAKKTKTIVSTAQISESRQTRIEKKIEAHFDARSIATVEMVIDGAAGQQLPHKTPHRIPPKPKSRSPTPPSIAAKAQLARQQSPSPIRHSPSPVRHVRAPTPSPVRSVSPAARISTSPIRSVRSPLLMRKTQASTVATGPEVPPPWKQEGYVASSSEAEMRETTLTTSTQIRTEERWEGRYGVQEQVTISGAAGAAASVSASASYAAEAVATGAKEVKQDADKSAAVATVVAAVDMARVREPVISAVEQTAQRTTTTAVHIQPAQEQVRKEAEKTAVTKVVVAADKAKEQELKSRTKEVITTKQEQMHVTHEQIRKETEKTFVPKVVISAAKAKEQETRISEEITKKQKQVTQEAIRQETEITAASMVVVATAKSTKLETVPGAQEETTTQQDQMHLSYEKIMKETRKTVVPKVIVATPKVKEQDLVSRGREGITTKREQVQITQEKMRKEAEKTALSTIAVATAKAKEQETILRTRETMATRQEQIQVTHGKVDVGKKAEAVATVVAAVDQARVREPREPGHLEESYAQQTTLEYGYKERISAAKVAEPPQRPASEPHVVPKAVKPRVIQAPSETHIKTTDQKGMHISSQIKKTTDLTTERLVHVDKRPRTASPHFTVSKISVPKTEHGYEASIAGSAIATLQKELSATSSAQKITKSVKAPTVKPSETRVRAEPTPLPQFPFADTPDTYKSEAGVEVKKEVGVSITGTTVREERFEVLHGREAKVTETARVPAPVEIPVTPPTLVSGLKNVTVIEGESVTLECHISGYPSPTVTWYREDYQIESSIDFQITFQSGIARLMIREAFAEDSGRFTCSAVNEAGTVSTSCYLAVQVSEEFEKETTAVTEKFTTEEKRFVESRDVVMTDTSLTEEQAGPGEPAAPYFITKPVVQKLVEGGSVVFGCQVGGNPKPHVYWKKSGVPLTTGYRYKVSYNKQTGECKLVISMTFADDAGEYTIVVRNKHGETSASASLLEEADYELLMKSQQEMLYQTQVTAFVQEPKVGETAPGFVYSEYEKEYEKEQALIRKKMAKDTVVVRTYVEDQEFHISSFEERLIKEIEYRIIKTTLEELLEEDGEEKMAVDISESEAVESGFDLRIKNYRILEGMGVTFHCKMSGYPLPKIAWYKDGKRIKHGERYQMDFLQDGRASLRIPVVLPEDEGIYTAFASNIKGNAICSGKLYVEPAAPLGAPTYIPTLEPVSRIRSLSPRSVSRSPIRMSPARMSPARMSPARMSPARMSPGRRLEETDESQLERLYKPVFVLKPVSFKCLEGQTARFDLKVVGRPMPETFWFHDGQQIVNDYTHKVVIKEDGTQSLIIVPATPSDSGEWTVVAQNRAGRSSISVILTVEAVEHQVKPMFVEKLKNVNIKEGSQLEMKVRATGNPNPDIVWLKNSDIIVPHKYPKIRIEGTKGEAALKIDSTVSQDSAWYTATAINKAGRDTTRCKVNVEVEFAEPEPERKLIIPRGTYRAKEIAAPELEPLHLRYGQEQWEEGDLYDKEKQQKPFFKKKLTSLRLKRFGPAHFECRLTPIGDPTMVVEWLHDGKPLEAANRLRMINEFGYCSLDYGVAYSRDSGIITCRATNKYGTDHTSATLIVKDEKSLVEESQLPEGRKGLQRIEELERMAHEGALTGVTTDQKEKQKPDIVLYPEPVRVLEGETARFRCRVTGYPQPKVNWYLNGQLIRKSKRFRVRYDGIHYLDIVDCKSYDTGEVKVTAENPEGVIEHKVKLEIQQREDFRSVLRRAPEPRPEFHVHEPGKLQFEVQKVDRPVDTTETKEVVKLKRAERITHEKVPEESEELRSKFKRRTEEGYYEAITAVELKSRKKDESYEELLRKTKDELLHWTKELTEEEKKALAEEGKITIPTFKPDKIELSPSMEAPKIFERIQSQTVGQGSDAHFRVRVVGKPDPECEWYKNGVKIERSDRIYWYWPEDNVCELVIRDVTAEDSASIMVKAINIAGETSSHAFLLVQAKQLITFTQELQDVVAKEKDTMATFECETSEPFVKVKWYKDGMEVHEGDKYRMHSDRKVHFLSILTIDTSDAEDYSCVLVEDENVKTTAKLIVEGAVVEFVKELQDIEVPESYSGELECIVSPENIEGKWYHNDVELKSNGKYTITSRRGRQNLTVKDVTKEDQGEYSFVIDGKKTTCKLKMKPRPIAILQGLSDQKVCEGDIVQLEVKVSLESVEGVWMKDGQEVQPSDRVHIVIDKQSHMLLIEDMTKEDAGNYSFTIPALGLSTSGRVSVYSVDVITPLKDVNVIEGTKAVLECKVSVPDVTSVKWYLNDEQIKPDDRVQAIVKGTKQRLVINRTHASDEGPYKLIVGRVETNCNLSVEKIKIIRGLRDLTCTETQNVVFEVELSHSGIDVLWNFKDKEIKPSSKYKIEAHGKIYKLTVLNMMKDDEGKYTFYAGENITSGKLTVAGGAISKPLTDQTVAESQEAVFECEVANPDSKGEWLRDGKHLPLTNNIRSESDGHKRRLIIAATKLDDIGEYTYKVATSKTSAKLKVEAVKIKKTLKNLTVTETQDAVFTVELTHPNVKGVQWIKNGVVLESNEKYAISVKGTIYSLRIKNCAIVDESVYGFRLGRLGASARLHVETVKIIKKPKDVTALENATVAFEVSVSHDTVPVKWFHKNVEIKPSDKHRLVSERKVHKLMLQNISPSDAGEYTAVVGQLECKAKLFVETLHITKTMKNIEVPETKTASFECEVSHFNVPSMWLKNGVEIEMSEKFKIVVQGKLHQLIIMNTSTEDSAEYTFVCGNDQVSATLTVTPIMITSMLKDINAEEKDTITFEVTVNYEGISYKWLKNGVEIKSTDKCQMRTKKLTHSLNIRNVHFGDAADYTFVAGKATSTATLYVEARHIEFRKHIKDIKVLEKKRAMFECEVSEPDITVQWMKDDQELQITDRIKIQKEKYVHRLLIPSTRMSDAGKYTVVAGGNVSTAKLFVEGRDVRIRSIKKEVQVIEKQRAVVEFEVNEDDVDAHWYKDGIEINFQVQERHKYVVERRIHRMFISETRQSDAGEYTFVAGRNRSSVTLYVNAPEPPQVLQELQPVTVQSGKPARFCAVISGRPQPKISWYKEEQLLSTGFKCKFLHDGQEYTLLLIEAFPEDAAVYTCEAKNDYGVATTSASLSVEVPEVVSPDQEMPVYPPAIITPLQDTVTSEGQPARFQCRVSGTDLKVSWYSKDKKIKPSRFFRMTQFEDTYQLEIAEAYPEDEGTYTFVASNAVGQVSSTANLSLEAPESILHERIEQEIEMEMKEFSSSFLSAEEEGLHSAELQLSKINETLELLSESPVYSTKFDSEKEGTGPIFIKEVSNADISMGDVATLSVTVIGIPKPKIQWFFNGVLLTPSADYKFVFDGDDHSLIILFTKLEDEGEYTCMASNDYGKTICSAYLKINSKGEGHKDTETESAVAKSLEKLGGPCPPHFLKELKPIRCAQGLPAIFEYTVVGEPAPTVTWFKENKQLCTSVYYTIIHNPNGSGTFIVNDPQREDSGLYICKAENMLGESTCAAELLVLLEDTDMTDTPCKAKSTPEAPEDFPQTPLKGPAVEALDSEQEIATFVKDTILKAALITEENQQLSYEHIAKANELSSQLPLGAQELQSILEQDKLTPESTREFLCINGSIHFQPLKEPSPNLQLQIVQSQKTFSKEGILMPEEPETQAVLSDTEKIFPSAMSIEQINSLTVEPLKTLLAEPEGNYPQSSIEPPMHSYLTSVAEEVLSPKEKTVSDTNREQRVTLQKQEAQSALILSQSLAEGHVESLQSPDVMISQVNYEPLVPSEHSCTEGGKILIESANPLENAGQDSAVRIEEGKSLRFPLALEEKQVLLKEEHSDNVVMPPDQIIESKREPVAIKKVQEVQGRDLLSKESLLSGIPEEQRLNLKIQICRALQAAVASEQPGLFSEWLRNIEKVEVEAVNITQEPRHIMCMYLVTSAKSVTEEVTIIIEDVDPQMANLKMELRDALCAIIYEEIDILTAEGPRIQQGAKTSLQEEMDSFSGSQKVEPITEPEVESKYLISPEEVSYFNVQSRVKYLDATPVTKGVASAVVSDEKQDESLKPSEEKEESSSESGTEEVATVKIQEAEGGFIKEDGPMIHTPLVDTVSEEGDIVHLTTSITNAKEVNWYFENKLVPSDEKFKCLQDQNTYTLVIDKVNTEDHQGEYVCEALNDSGKTATSAKLTVVKRAAPVIKRKIEPLEVALGHLAKFTCEIQSAPNVRFQWFKAGREIYESDKCSIRSSKYISSLEILRTQVVDCGEYTCKASNEYGSVSCTATLTVTEAYPPTFLSRPKSLTTFVGKAAKFICTVTGTPVIETIWQKDGAALSPSPNWKISDAENKHILELSNLTIQDRGVYSCKASNKFGADICQAELIIIDKPHFIKELEPVQSAINKKVHLECQVDEDRKVTVTWSKDGQKLPPGKDYKICFEDKIATLEIPLAKLKDSGTYVCTASNEAGSSSCSATVTVREPPSFVKKVDPSYLMLPGESARLHCKLKGSPVIQVTWFKNNKELSESNTVRMYFVNSEAILDITDVKVEDSGSYSCEAVNDVGSDSCSTEIVIKEPPSFIKTLEPADIVRGTNALLQCEVSGTGPFEISWFKDKKQIRSSKKYRLFSQKSLVCLEIFSFNSADVGEYECVVANEVGKCGCMATHLLKEPPTFVKKVDDLIALGGQTVTLQAAVRGSEPISVTWMKGQEVIREDGKIKMSFSNGVAVLIIPDVQISFGGKYTCLAENEAGSQTSVGELIVKEPAKIIERAELIQVTAGDPATLEYTVAGTPELKPKWYKDGRPLVASKKYRISFKNNVAQLKFYSAELHDSGQYTFEISNEVGSSSCETTFTVLDRDIAPFFTKPLRNVDSVVNGTCRLDCKIAGSLPMRVSWFKDGKEIAASDRYRIAFVEGTASLEIIRVDMNDAGNFTCRATNSVGSKDSSGALIVQEPPSFVTKPGSKDVLPGSAVCLKSTFQGSTPLTIRWFKGNKELVSGGSCYITKEALESSLELYLVKTSDSGTYTCKVSNVAGGVECSANLFVKEPATFVEKLEPSQLLKKGDATQLACKVTGTPPIKITWFANDREIKESSKHRMSFVESTAVLRLTDVGIEDSGEYMCEAQNEAGSDHCSSIVIVKESPYFTKEFKPIEVLKEYDVMLLAEVAGTPPFEITWFKDNTILRSGRKYKTFIQDHLVSLQILKFVAADAGEYQCRVTNEVGSSICSARVTLREPPSFIKKIESTSSLRGGTAAFQATLKGSLPITVTWLKDSDEITEDDNIRMTFENNVASLYLSGIEVKHDGKYVCQAKNDAGIQRCSALLSVKEPATITEEAVSIDVTQGDPATLQVKFSGTKEITAKWFKDGQELTLGSKYKISVTDTVSILKIISTEKKDSGEYTFEVQNDVGRSSCKARINVLDLIIPPSFTKKLKKMDSIKGSFIDLECIVAGSHPISIQWFKDDQEISASEKYKFSFHDNTAFLEISQLEGTDSGTYTCSATNKAGHNQCSGHLTVKEPPYFVEKPQSQDVNPNTRVQLKALVGGTAPMTIKWFKDNKELHSGAARSVWKDDTSTSLELFAAKATDSGTYICQLSNDVGTATSKATLFVKEPPQFIKKPSPVLVLRNGQSTTFECQITGTPKIRVSWYLDGNEITAIQKHGISFIDGLATFQISGARVENSGTYVCEARNDAGTASCSIELKVKEPPTFIRELKPVEVVKYSDVELECEVTGTPPFEVTWLKNNREIRSSKKYTLTDRVSVFNLHITKCDPSDTGEYQCIVSNEGGSCSCSTRVALKEPPSFIKKIENTTTVLKSSATFQSTVAGSPPISITWLKDDQILDEDDNVYISFVDSVATLQIRSVDNGHSGRYTCQAKNESGVERCYAFLLVQEPAQIVEKAKSVDVTEKDPMTLECVVAGTPELKVKWLKDGKQIVPSRYFSMSFENNVASFRIQSVMKQDSGQYTFKVENDFGSSSCDAYLRVLDQNIPPSFTKKLTKMDKVLGSSIHMECKVSGSLPISAQWFKDGKEISTSAKYRLVCHERSVSLEVNNLELEDTANYTCKVSNVAGDDACSGILTVKEPPSFLVKPGRQQAIPDSTVEFKAILKGTPPFKIKWFKDDVELVSGPKCFIGLEGSTSFLNLYSVDASKTGQYTCHVTNDVGSDSCTTMLLVTEPPKFVKKLEASKIVKAGDSSRLECKIAGSPEIRVVWFRNEHELPASDKYRMTFIDSVAVIQMNNLSTEDSGDFICEAQNPAGSTSCSTKVIVKEPPVFSSFPPIVETLKNAEVSLECELSGTPPFEVVWYKDKRQLRSSKKYKIASKNFHTSIHILNVDTSDIGEYHCKAQNEVGSDTCVCTVKLKEPPRFVSKLNSLTVVAGEPAELQASIEGAQPIFVQWLKEKEEVIRESENIRITFVENVATLQFAKAEPANAGKYICQIKNDGGMEENMATLMVLEPAVIVEKAGPMTVTVGETCTLECKVAGTPELSVEWYKDGKLLTSSQKHKFSFYNKISSLRILSVERQDAGTYTFQVQNNVGKSSCTAVVDVSDRAVPPSFTRRLKNTGGVLGASCILECKVAGSSPISVAWFHEKTKIVSGAKYQTTFSDNVCTLQLNSLDSSDMGNYTCVAANVAGSDECRAVLTVQEPPSFVKEPEPLEVLPGKNVTFTSVIRGTPPFKVNWFRGARELVKGDRCNIYFEDTVAELELFNIDISQSGEYTCVVSNNAGQASCTTRLFVKEPAAFLKRLSDHSVEPGKSIILESTYTGTLPISVTWKKDGFNITTSEKCNIVTTEKTCILEILNSTKRDAGQYSCEIENEAGRDVCGALVSTLEPPYFVTELEPLEAAVGDSVSLQCQVAGTPEITVSWYKGDTKLRPTPEYRTYFTNNVATLVFNKVNINDSGEYTCKAENSIGTASSKTVFRIQERQLPPSFARQLKDIEQTVGLPVTLTCRLNGSAPIQVCWYRDGVLLRDDENLQTSFVDNVATLKILQTDLSHSGQYSCSASNPLGTASSSARLTAREPKKSPFFDIKPVSIDVIAGESADFECHVTGAQPMRITWSKDNKEIRPGGNYTITCVGNTPHLRILKVGKGDSGQYTCQATNDVGKDMCSAQLSVKEPPKFVKKLEASKVAKQGESIQLECKISGSPEIKVSWFRNDSELHESWKYNMSFINSVALLTINEASAEDSGDYICEAHNGVGDASCSTALTVKAPPVFTQKPSPVGALKGSDVILQCEISGTPPFEVVWVKDRKQVRNSKKFKITSKHFDTSLHILNLEASDVGEYHCKATNEVGSDTCSCSVKFKEPPRFVKKLSDTSTLIGDAVELRAIVEGFQPISVVWLKDRGEVIRESENTRISFIDNIATLQLGSPEASNSGKYICQIKNDAGMRECSAVLTVLEPARIIEKPEPMTVTTGNPFALECVVTGTPELSAKWFKDGRELSADSKHHITFINKVASLKIPCAEMSDKGLYSFEVKNSVGKSNCTVSVHVSDRIVPPSFIRKLKDVNAILGASVVLECRVSGSAPISVGWFQDGNEIVSGPKCQSSFSENVCTLNLSLLEPSDTGIYTCVAANVAGSDECSAVLTVQEPPSFEQTPDSVEVLPGMSLTFTSVIRGTPPFKVKWFKGSRELVPGESCNISLEDFVTELELFEVQPLESGDYSCLVTNDAGSASCTTHLFVKEPATFVKRLADFSVETGSPIVLEATYTGTPPISVSWIKDEYLISQSERCSITMTEKSTILEILESTIEDYAQYSCLIENEAGQDICEALVSVLEPPYFIEPLEHVEAVIGEPATLQCKVDGTPEIRISWYKEHTKLRSAPAYKMQFKNNVASLVINKVDHSDVGEYSCKADNSVGAVASSAVLVIKERKLPPFFARKLKDVHETLGFPVAFECRINGSEPLQVSWYKDGVLLKDDANLQTSFVHNVATLQILQTDQSHIGQYNCSASNPLGTASSSAKLILSEHEVPPFFDLKPVSVDLALGESGTFKCHVTGTAPIKITWAKDNREIRPGGNYKMTLVENTATLTVLKVGKGDAGQYTCYASNIAGKDSCSAHLGVQEPPRFIKKLEPSRIVKQDEFTRYECKIGGSPEIKVLWYKDETEIQESSKFRMSFVDSVAVLEMHNLSVEDSGDYTCEAHNAAGSASSSTSLKVKEPPIFRKKPHPIETLKGADVHLECELQGTPPFHVSWYKDKRELRSGKKYKIMSENFLTSIHILNVDAADIGEYQCKATNDVGSDTCVGSIALKAPPRFVKKLSDISTVVGKEVQLQTTIEGAEPISVVWFKDKGEIVRESDNIWISYSENIATLQFSRVEPANAGKYTCQIKNDAGMQECFATLSVLEPATIVEKPESIKVTTGDTCTLECTVAGTPELSTKWFKDGKELTSDNKYKISFFNKVSGLKIINVAPSDSGVYSFEVQNPVGKDSCTASLQVSDRTVPPSFTRKLKETNGLSGSSVVMECKVYGSPPISVSWFHEGNEISSGRKYQTTLTDNTCALTVNMLEESDSGDYTCIATNMAGSDECSAPLTVREPPSFVQKPDPMDVLTGTNVTFTSIVKGTPPFSVSWFKGSSELVPGDRCNVSLEDSVAELELFDVDTSQSGEYTCIVSNEAGKASCTTHLYIKAPAKFVKRLNDYSIEKGKPLILEGTFTGTPPISVTWKKNGINVTPSQRCNITTTEKSAILEIPSSTVEDAGQYNCYIENASGKDSCSAQILILEPPYFVKQLEPVKVSVGDSASLQCQLAGTPEIGVSWYKGDTKLRPTTTYKMHFRNNVATLVFNQVDINDSGEYICKAENSVGEVSASTFLTVQEQKLPPSFSRQLRDVQETVGLPVVFDCAISGSEPISVSWYKDGKPLKDSPNVQTSFLDNTATLNIFKTDRSLAGQYSCTATNPIGSASSSARLILTEGKNPPFFDIRLAPVDAVVGESADFECHVTGTQPIKVSWAKDSREIRSGGKYQISYLENSAHLTVLKVDKGDSGQYTCYAVNEVGKDSCTAQLNIKERLIPPSFTKRLSETVEETEGNSFKLEGRVAGSQPITVAWYKNNIEIQPTSNCEITFKNNTLVLQVRKAGMNDAGLYTCKVSNDAGSALCTSSIVIKEPKKPPVFDQHLTPVTVSEGEYVQLSCHVQGSEPIRIQWLKAGREIKPSDRCSFSFASGTAVLELRDVAKADSGDYVCKASNVAGSDTTKSKVTIKDKPAVAPATKKAAVDGRLFFVSEPQSIRVVEKTTATFIAKVGGDPIPNVKWTKGKWRQLNQGGRVFIHQKGDEAKLEIRDTTKTDSGLYRCVAFNEHGEIESNVNLQVDERKKQEKIEGDLRAMLKKTPILKKGAGEEEEIDIMELLKNVDPKEYEKYARMYGITDFRGLLQAFELLKQSQEEETHRLEIEEIERSERDEKEFEELVSFIQQRLSQTEPVTLIKDIENQTVLKDNDAVFEIDIKINYPEIKLSWYKGTEKLEPSDKFEISIDGDRHTLRVKNCQLKDQGNYRLVCGPHIASAKLTVIEPAWERHLQDVTLKEGQTCTMTCQFSVPNVKSEWFRNGRILKPQGRHKTEVEHKVHKLTIADVRAEDQGQYTCKYEDLETSAELRIEAEPIQFTKRIQNIVVSEHQSATFECEVSFDDAIVTWYKGPTELTESQKYNFRNDGRCHYMTIHNVTPDDEGVYSVIARLEPRGEARSTAELYLTTKEIKLELKPPDIPDSRVPIPTMPIRAVPPEEIPPVVAPPIPLLLPTPEEKKPPPKRIEVTKKAVKKDAKKVVAKPKEMTPREEIVKKPPPPTTLIPAKAPEIIDVSSKAEEVKIMTITRKKEVQKEKEAVYEKKQAVHKEKRVFIESFEEPYDELEVEPYTEPFEQPYYEEPDEDYEEIKVEAKKEVHEEWEEDFEEGQEYYEREEGYDEGEEEWEEAYQEREVIQVQKEVYEESHERKVPAKVPEKKAPPPPKVIKKPVIEKIEKTSRRMEEEKVQVTKVPEVSKKIVPQKPSRTPVQEEVIEVKVPAVHTKKMVISEEKMFFASHTEEEVSVTVPEVQKEIVTEEKIHVAVSKRVEPPPKVPELPEKPAPEEVAPVPIPKKVEPPAPKVPEVPKKPVPEEKKPVPVPKKEPAAPPKVPEVPKKPVPEEKIPVPVAKKKEAPPAKVPEVQKRVVTEEKITIVTQREESPPPAVPEIPKKKVPEERKPVPRKEEEVPPPPKVPALPKKPVPEEKVAVPVPVAKKAPPPRAEVSKKTVVEEKRFVAEEKLSFAVPQRVEVTRHEVSAEEEWSYSEEEEGVSISVYREEEREEEEEAEVTEYEVMEEPEEYVVEEKLHIISKRVEAEPAEVTERQEKKIVLKPKIPAKIEEPPPAKVPEAPKKIVPEKKVPAPVPKKEKVPPPKVPEEPKKPVPEKKVPPKVIKMEEPLPAKVTERHMQITQEEKVLVAVTKKEAPPKARVPEEPKRAVPEEKVLKLKPKREEEPPAKVTEFRKRVVKEEKVSIEAPKREPQPIKEVTIMEEKERAYTLEEEAVSVQREEEYEEYEEYDYKEFEEYEPTEEYDQYEEYEEREYERYEEHEEYITEPEKPIPVKPVPEEPVPTKPKAPPAKVLKKAVPEEKVPVPIPKKLKPPPPKVPEEPKKVFEEKIRISITKREKEQVTEPAAKVPMKPKRVVAEEKVPVPRKEVAPPVRVPEVPKELEPEEVAFEEEVVTHVEEYLVEEEEEYIHEEEEFITEEEVVPVIPVKVPEVPRKPVPEEKKPVPVPKKKEAPPAKVPEVPKKPEEKVPVLIPKKEKPPPAKVPEVPKKPVPEEKVPVPVPKKVEAPPAKVPEVPKKPVPEKKVPVPAPKKVEAPPAKVPEVPKKLIPEEKKPTPVPKKVEAPPPKVPKKREPVPVPVALPQEEEVLFEEEIVPEEEVLPEEEEVLPEEEEVLPEEEEVLPEEEEIPPEEEEVPPEEEYVPEEEEFVPEEEVLPEVKPKVPVPAPVPEIKKKVTEKKVVIPKKEEAPPAKVPEVPKKVEEKRIILPKEEEVLPVEVTEEPEEEPISEEEIPEEPPSIEEVEEVAPPRVPEVIKKAVPEAPTPVPKKVEAPPAKVSKKIPEEKVPVPVQKKEAPPAKVPEVPKKVPEKKVLVPKKEAVPPAKGRTVLEEKVSVAFRQEVVVKERLELEVVEAEVEEIPEEEEFHEVEEYFEEGEFHEVEEFIKLEQHRVEEEHRVEKVHRVIEVFEAEEVEVFEKPKAPPKGPEISEKIIPPKKPPTKVVPRKEPPAKVPEVPKKIVVEEKVRVPEEPRVPPTKVPDVLPPKEVVPEKKVPVPPAKKPEAPPPKVPEAPKEVVPEKKVPVPPPKKPEVPPTKVPEVPKAAVPEKKVPEAIPPKPESPPPEVPEAPKEVVPEKKVPAAPPKKPEVTPVKVPEAPKEVVPEKKVPVPPPKKPEVPPTKVPEVPKVAVPEKKVPEAIPPKPESPPPEVFEEPEEVALEEPPAEVVEEPEPAAPPQVTVPPKKPVPEKKAPAVVAKKPELPPVKVPEVPKEVVPEKKVPLVVPKKPEAPPAKVPEVPKEVVPEKKVAVPKKPEVPPAKVPEVPKKPVLEEKPAVPVPERAESPPPEVYEEPEEIAPEEEIAPEEEKPVPVAEEEEPEVPPPAVPEEPKKIIPEKKVPVIKKPEAPPPKEPEPEKVIEKPKLKPRPPPPPPAPPKEDVKEKIFQLKAIPKKKVPEKPQVPEKVELTPLKVPGGEKKVRKLLPERKPEPKEEVVLKSVLRKRPEEEEPKVEPKKLEKVKKPAVPEPPPPKPVEEVEVPTVTKRERKIPEPTKVPEIKPAIPLPAPEPKPKPEAEVKTIKPPPVEPEPTPIAAPVTVPVVGKKAEAKAPKEEAAKPKGPIKGVPKKTPSPIEAERRKLRPGSGGEKPPDEAPFTYQLKAVPLKFVKEIKDIILTESEFVGSSAIFECLVSPSTAITTWMKDGSNIRESPKHRFIADGKDRKLHIIDVQLSDAGEYTCVLRLGNKEKTSTAKLVVEELPVRFVKTLEEEVTVVKGQPLYLSCELNKERDVVWRKDGKIVVEKPGRIVPGVIGLMRALTINDADDTDAGTYTVTVENANNLECSSCVKVVEVIRDWLVKPIRDQHVKPKGTAIFACDIAKDTPNIKWFKGYDEIPAEPNDKTEILRDGNHLYLKIKNAMPEDIAEYAVEIEGKRYPAKLTLGEREVELLKPIEDVTIYEKESASFDAEISEADIPGQWKLKGELLRPSPTCEIKAEGGKRFLTLRKVKLDQAGEVLYQALNAITTAILTVKEIELDFAVPLKDVTVPERRQARFECVLTREANVIWSKGPDIIKSSDKFDIIADGKKHILVINDSQFDDEGVYTAEVEGKKTSARLFVTGIRLKFMSPLEDQTVKEGETATFVCELSHEKMHVVWFKNDAKLHTSRTVLISSEGKTHKLEMKEVTLDDISQIKAQVKELSSTAQLKVLEADPYFTVKLHDKTAVEKDEITLKCEVSKDVPVKWFKDGEEIVPSPKYSIKADGLRRILKIKKADLKDKGEYVCDCGTDKTKANVTVEARLIKVEKPLYGVEVFVGETAHFEIELSEPDVHGQWKLKGQPLTASPDCEIIEDGKKHILILHNCQLGMTGEVSFQAANAKSAANLKVKELPLIFITPLSDVKVFEKDEAKFECEVSREPKTFRWLKGTQEITGDDRFELIKDGTKHSMVIKSAAFEDEAKYMFEAEDKHTSGKLIIEGIRLKFLTPLKDVTAKEKESAVFTVELSHDNIRVKWFKNDQRLHTTRSVSMQDEGKTHSITFKDLSIDDTSQIRVEAMGMSSEAKLTVLEGDPYFTGKLQDYTGVEKDEVILQCEISKADAPVKWFKDGKEIKPSKNAVIKADGKKRMLILKKALKSDIGQYTCDCGTDKTSGKLDIEDREIKLVRPLHSVEVMETETARFETEISEDDIHANWKLKGEALLQTPDCEIKEEGKIHSLVLHNCRLDQTGGVDFQAANVKSSAHLRVKPRVIGLLRPLKDVTVTAGETATFDCELSYEDIPVEWYLKGKKLEPSDKVVPRSEGKVHTLTLRDVKLEDAGEVQLTAKDFKTHANLFVKEPPVEFTKPLEDQTVEEGATAVLECEVSRENAKVKWFKNGTEILKSKKYEIVADGRVRKLVIHDCTPEDIKTYTCDAKDFKTSCNLNVVPPHVEFLRPLTDLQVREKEMARFECELSRENAKVKWFKDGAEIKKGKKYDIISKGAVRILVINKCLLDDEAEYSCEVRTARTSGMLTVLEEEAVFTKNLANIEVSETDTIKLVCEVSKPGAEVIWYKGDEEIIETGRYEILTEGRKRILVIQNAHLEDAGNYNCRLPSSRTDGKVKVHELAAEFISKPQNLEILEGEKAEFVCSISKESFPVQWKRDDKTLESGDKYDVIADGKKRVLVVKDATLQDMGTYVVMVGAARAAAHLTVIEKLRIVVPLKDTRVKEQQEVVFNCEVNTEGAKAKWFRNEEAIFDSSKYIILQKDLVYTLRIRDAHLDDQANYNVSLTNHRGENVKSAANLIVEEEDLRIVEPLKDIETMEKKSVTFWCKVNRLNVTLKWTKNGEEVPFDNRVSYRVDKYKHMLTIKDCGFPDEGEYIVTAGQDKSVAELLIIEAPTEFVEHLEDQTVTEFDDAVFSCQLSREKANVKWYRNGREIKEGKKYKFEKDGSIHRLIIKDCRLDDECEYACGVEDRKSRARLFVEEIPVEIIRPPQDILEAPGADVVFLAELNKDKVEVQWLRNNMVVVQGDKHQMMSEGKIHRLQICDIKPRDQGEYRFIAKDKEARAKLELAAAPKIKTADQDLVVDVGKPLTMVVPYDAYPKAEAEWFKENEPLSTKTIDTTAEQTSFRILEAKKGDKGRYKIVLQNKHGKAEGFINLKVIDVPGPVRNLEVTETFDGEVSLAWEEPLTDGGSKIIGYVVERRDIKRKTWVLATDRAESCEFTVTGLQKGGVEYLFRVSARNRVGTGEPVETDNPVEARSKYDVPGPPLNVTITDVNRFGVSLTWEPPEYDGGAEITNYVIELRDKTSIRWDTAMTVRAEDLSATVTDVVEGQEYSFRVRAQNRIGVGKPSAATPFVKVADPIERPSPPVNLTSSDQTQSSVQLKWEPPLKDGGSPILGYIIERCEEGKDNWIRCNMKLVPELTYKVTGLEKGNKYLYRVSAENKAGVSDPSEILGPLTADDAFVEPTMDLSAFKDGLEVIVPNPITILVPSTGYPRPTATWCFGDKVLETGDRVKMKTLSAYAELVISPSERSDKGIYTLKLENRVKTISGEIDVNVIARPSAPKELKFGDITKDSVHLTWEPPDDDGGSPLTGYVVEKREVSRKTWTKVMDFVTDLEFTVPDLVQGKEYLFKVCARNKCGPGEPAYVDEPVNMSTPATVPDPPENVKWRDRTANSIFLTWDPPKNDGGSRIKGYIVERCPRGSDKWVACGEPVAETKMEVTGLEEGKWYAYRVKALNRQGASKPSRPTEEIQAVDTQEAPEIFLDVKLLAGLTVKAGTKIELPATVTGKPEPKITWTKADMILKQDKRITIENVPKKSTVTIVDSKRSDTGTYIIEAVNVCGRATAVVEVNVLDKPGPPAAFDITDVTNESCLLTWNPPRDDGGSKITNYVVERRATDSEVWHKLSSTVKDTNFKATKLIPNKEYIFRVAAENMYGVGEPVQASPITAKYQFDPPGPPTRLEPSDITKDAVTLTWCEPDDDGGSPITGYWVERLDPDTDKWVRCNKMPVKDTTYRVKGLTNKKKYRFRVLAENLAGPGKPSKSTEPILIKDPIDPPWPPGKPTVKDVGKTSVRLNWTKPEHDGGAKIESYVIEMLKTGTDEWVRVAEGVPTTQHLLPGLMEGQEYSFRVRAVNKAGESEPSEPSDPVLCREKLYPPSPPRWLEVINITKNTADLKWTVPEKDGGSPITNYIVEKRDVRRKGWQTVDTTVKDTKCTVTPLTEGSLYVFRVAAENAIGQSDYTEIEDSVLAKDTFTTPGPPYALAVVDVTKRHVDLKWEPPKNDGGRPIQRYVIEKKERLGTRWVKAGKTAGPDCNFRVTDVIEGTEVQFQVRAENEAGVGHPSEPTEILSIEDPTSPPSPPLDLHVTDAGRKHIAIAWKPPEKNGGSPIIGYHVEMCPVGTEKWMRVNSRPIKDLKFKVEEGVVPDKEYVLRVRAVNAIGVSEPSEISENVVAKDPDCKPTIDLETHDIIVIEGEKLSIPVPFRAVPVPTVSWHKDGKEVKASDRLTMKNDHISAHLEVPKSVRADAGIYTITLENKLGSATASINVKVIGLPGPCKDIKASDITKSSCKLTWEPPEFDGGTPILHYVLERREAGRRTYIPVMSGENKLSWTVKDLIPNGEYFFRVKAVNKVGGGEYIELKNPVIAQDPKQPPDPPVDVEVHNPTAEAMTITWKPPLYDGGSKIMGYIIEKIAKGEERWKRCNEHLVPILTYTAKGLEEGKEYQFRVRAENAAGISEPSRATPPTKAVDPIDAPKVILRTSLEVKRGDEIALDASISGSPYPTITWIKDENVIVPEEIKKRAAPLVRRRKGEVQEEEPFVLPLTQRLSIDNSKKGESQLRVRDSLRPDHGLYMIKVENDHGIAKAPCTVSVLDTPGPPINFVFEDIRKTSVLCKWEPPLDDGGSEIINYTLEKKDKTKPDSEWIVVTSTLRHCKYSVTKLIEGKEYLFRVRAENRFGPGPPCVSKPLVAKDPFGPPDAPDKPIVEDVTSNSMLVKWNEPKDNGSPILGYWLEKREVNSTHWSRVNKSLLNALKANVDGLLEGLTYVFRVCAENAAGPGKFSPPSDPKTAHDPISPPGPPIPRVTDTSSTTIELEWEPPAFNGGGEIVGYFVDKQLVGTNEWSRCTEKMIKVRQYTVKEIREGADYKLRVSAVNAAGEGPPGETQPVTVAEPQEPPAVELDVSVKGGIQIMAGKTLRIPAVVTGRPVPTKVWTKEEGELDKDRVVIDNVGTKSELIIKDALRKDHGRYVITATNSCGSKFAAARVEVFDVPGPVLDLKPVVTNRKMCLLNWSDPEDDGGSEITGFIIERKDAKMHTWRQPIETERSKCDITGLLEGQEYKFRVIAKNKFGCGPPVEIGPILAVDPLGPPTSPERLTYTERTKSTITLDWKEPRSNGGSPIQGYIIEKRRHDKPDFERVNKRLCPTTSFLVENLDEHQMYEFRVKAVNEIGESEPSLPLNVVIQDDEVPPTIKLRLSVRGDTIKVKAGEPVHIPADVTGLPMPKIEWSKNETVIEKPTDALQITKEEVSRSEAKTELSIPKAVREDKGTYTVTASNRLGSVFRNVHVEVYDRPSPPRNLAVTDIKAESCYLTWDAPLDNGGSEITHYVIDKRDASRKKAEWEEVTNTAVEKRYGIWKLIPNGQYEFRVRAVNKYGISDECKSDKVVIQDPYRLPGPPGKPKVLARTKGSMLVSWTPPLDNGGSPITGYWLEKREEGSPYWSRVSRAPITKVGLKGVEFNVPRLLEGVKYQFRAMAINAAGIGPPSEPSDPEVAGDPIFPPGPPSCPEVKDKTKSSISLGWKPPAKDGGSPIKGYIVEMQEEGTTDWKRVNEPDKLITTCECVVPNLKELRKYRFRVKAVNEAGESEPSDTTGEIPATDIQEEPEVFIDIGAQDCLVCKAGSQIRIPAVIKGRPTPKSSWEFDGKAKKAMKDGVHDIPEDAQLETAENSSVIIIPECKRSHTGKYSITAKNKAGQKTANCRVKVMDVPGPPKDLKVSDITRGSCRLSWKMPDDDGGDRIKGYVIEKRTIDGKAWTKVNPDCGSTTFVVPDLLSEQQYFFRVRAENRFGIGPPVETIQRTTARDPIYPPDPPIKLKIGLITKNTVHLSWKPPKNDGGSPVTHYIVECLAWDPTGTKKEAWRQCNKRDVEELQFTVEDLVEGGEYEFRVKAVNAAGVSKPSATVGPCDCQRPDMPPSIDLKEFMEVEEGTNVNIVAKIKGVPFPTLTWFKAPPKKPDNKEPVLYDTHVNKLVVDDTCTLVIPQSRRSDTGLYTITAVNNLGTASKEMRLNVLGRPGPPVGPIKFESVSADQMTLSWFPPKDDGGSKITNYVIEKREANRKTWVHVSSEPKECTYTIPKLLEGHEYVFRIMAQNKYGIGEPLDSEPETARNLFSVPGAPDKPTVSSVTRNSMTVNWEEPEYDGGSPVTGYWLEMKDTTSKRWKRVNRDPIKAMTLGVSYKVTGLIEGSDYQFRVYAINAAGVGPASLPSDPATARDPIAPPGPPFPKVTDWTKSSADLEWSPPLKDGGSKVTGYIVEYKEEGKEEWEKGKDKEVRGTKLVVTGLKEGAFYKFRVSAVNIAGIGEPGEVTDVIEMKDRLVSPDLQLDASVRDRIVVHAGGVIRIIAYVSGKPPPTVTWNMNERTLPQEATIETTAISSSMVIKNCQRSHQGVYSLLAKNEAGERKKTIIVDVLDVPGPVGTPFLAHNLTNESCKLTWFSPEDDGGSPITNYVIEKRESDRRAWTPVTYTVTRQNATVQGLIQGKAYFFRIAAENSIGMGPFVETSEALVIREPITVPERPEDLEVKEVTKNTVTLTWNPPKYDGGSEIINYVLESRLIGTEKFHKVTNDNLLSRKYTVKGLKEGDTYEYRVSAVNIVGQGKPSFCTKPITCKDELAPPTLHLDFRDKLTIRVGEAFALTGRYSGKPKPKVSWFKDEADVLEDDRTHIKTTPATLALEKIKAKRSDSGKYCVVVENSTGSRKGFCQVNVVDRPGPPVGPVSFDEVTKDYMVISWKPPLDDGGSKITNYIIEKKEVGKDVWMPVTSASAKTTCKVSKLLEGKDYIFRIHAENLYGISDPLVSDSMKAKDRFRVPDAPDQPIVTEVTKDSALVTWNKPHDGGKPITNYILEKRETMSKRWARVTKDPIHPYTKFRVPDLLEGCQYEFRVSAENEIGIGDPSPPSKPVFAKDPIAKPSPPVNPEAIDTTCNSVDLTWQPPRHDGGSKILGYIVEYQKVGDEEWRRANHTPESCPETKYKVTGLRDGQTYKFRVLAVNAAGESDPAHVPEPVLVKDRLEPPELILDANMAREQHIKVGDTLRLSAIIKGVPFPKVTWKKEDRDAPTKARIDVTPVGSKLEIRNAAHEDGGIYSLTVENPAGSKTVSVKVLVLDKPGPPRDLEVSEIRKDSCYLTWKEPLDDGGSVITNYVVERRDVASAQWSPLSATSKKKSHFAKHLNEGNQYLFRVAAENQYGRGPFVETPKPIKALDPLHPPGPPKDLHHVDVDKTEVSLVWNKPDRDGGSPITGYLVEYQEEGTQDWIKFKTVTNLECVVTGLQQGKTYRFRVKAENIVGLGLPDTTIPIECQEKLVPPSVELDVKLIEGLVVKAGTTVRFPAIIRGVPVPTAKWTTDGSEIKTDEHYTVETDNFSSVLTIKNCLRRDTGEYQITVSNAAGSKTVAVHLTVLDVPGPPTGPINILDVTPEHMTISWQPPKDDGGSPVINYIVEKQDTRKDTWGVVSSGSSKTKLKIPHLQKGCEYVFRVRAENKIGVGPPLDSTPTVAKHKFSPPSPPGKPVVTDITENAATVSWTLPKSDGGSPITGYYMERREVTGKWVRVNKTPIADLKFRVTGLYEGNTYEFRVFAENLAGLSKPSPSSDPIKACRPIKPPGPPINPKLKDKSRETADLVWTKPLSDGGSPILGYVVECQKPGTAQWNRINKDELIRQCAFRVPGLIEGNEYRFRIKAANIVGEGEPRELAESVIAKDILHPPEVELDVTCRDVITVRVGQTIRILARVKGRPEPDITWTKEGKVLVREKRVDLIQDLPRVELQIKEAVRADHGKYIISAKNSSGHAQGSAIVNVLDRPGPCQNLKVTNVTKENCTISWENPLDNGGSEITNFIVEYRKPNQKGWSIVASDVTKRLIKANLLANNEYYFRVCAENKVGVGPTIETKTPILAINPIDRPGEPENLHIADKGKTFVYLKWRRPDYDGGSPNLSYHVERRLKGSDDWERVHKGSIKETHYMVDRCVENQIYEFRVQTKNEGGESDWVKTEEVVVKEDLQKPVLDLKLSGVLTVKAGDTIRLEAGVRGKPFPEVAWTKDKDATDLTRSPRVKIDTRADSSKFSLTKAKRSDGGKYVVTATNTAGSFVAYATVNVLDKPGPVRNLKIVDVSSDRCTVCWDPPEDDGGCEIQNYILEKCETKRMVWSTYSATVLTPGTTVTRLIEGNEYIFRVRAENKIGTGPPTESKPVIAKTKYDKPGRPDPPEVTKVSKEEMTVVWNPPEYDGGKSITGYFLEKKEKHSTRWVPVNKSAIPERRMKVQNLLPDHEYQFRVKAENEIGIGEPSLPSRPVVAKDPIEPPGPPTNFRVVDTTKHSITLGWGKPVYDGGAPIIGYVVEMRPKIADASPDEGWKRCNAAAQLVRKEFTVTSLDENQEYEFRVCAQNQVGIGRPAELKEAIKPKEILEPPEIDLDASMRKLVIVRAGCPIRLFAIVRGRPAPKVTWRKVGIDNVVRKGQVDLVDTMAFLVIPNSTRDDSGKYSLTLVNPAGEKAVFVNVRVLDTPGPVSDLKVSDVTKTSCHVSWAPPENDGGSQVTHYIVEKREADRKTWSTVTPEVKKTSFHVTNLVPGNEYYFRVTAVNEYGPGVPTDVPKPVLASDPLSEPDPPRKLEVTEMTKNSATLAWLPPLRDGGAKIDGYITSYREEEQPADRWTEYSVVKDLSLVVTGLKEGKKYKFRVAARNAVGVSLPREAEGVYEAKEQLLPPKILMPEQITIKAGKKLRIEAHVYGKPHPTCKWKKGEDEVVTSSHLAVHKADSSSILIIKDVTRKDSGYYSLTAENSSGTDTQKIKVVVMDAPGPPQPPFDISDIDADACSLSWHIPLEDGGSNITNYIVEKCDVSRGDWVTALASVTKTSCRVGKLIPGQEYIFRVRAENRFGISEPLTSPKMVAQFPFGVPSEPKNARVTKVNKDCIFVAWDRPDSDGGSPIIGYLIERKERNSLLWVKANDTLVRSTEYPCAGLVEGLEYSFRIYALNKAGSSPPSKPTEYVTARMPVDPPGKPEVIDVTKSTVSLIWARPKHDGGSKIIGYFVEACKLPGDKWVRCNTAPHQIPQEEYTATGLEEKAQYQFRAIARTAVNISPPSEPSDPVTILAENVPPRIDLSVAMKSLLTVKAGTNVCLDATVFGKPMPTVSWKKDGTLLKPAEGIKMAMQRNLCTLELFSVNRKDSGDYTITAENSSGSKSATIKLKVLDKPGPPASVKINKMYSDRAMLSWEPPLEDGGSEITNYIVDKRETSRPNWAQVSATVPITSCSVEKLIEGHEYQFRICAENKYGVGDPVFTEPAIAKNPYDPPGRCDPPVISNITKDHMTVSWKPPADDGGSPITGYLLEKRETQAVNWTKVNRKPIIERTLKATGLQEGTEYEFRVTAINKAGPGKPSDASKAAYARDPQYPPAPPAFPKVYDTTRSSVSLSWGKPAYDGGSPIIGYLVEVKRADSDNWVRCNLPQNLQKTRFEVTGLMEDTQYQFRVYAVNKIGYSDPSDVPDKHYPKDILIPPEGELDADLRKTLILRAGVTMRLYVPVKGRPPPKITWSKPNVNLRDRIGLDIKSTDFDTFLRCENVNKYDAGKYILTLENSCGKKEYTIVVKVLDTPGPPVNVTVKEISKDSAYVTWEPPIIDGGSPIINYVVQKRDAERKSWSTVTTECSKTSFRVANLEEGKSYFFRVFAENEYGIGDPGETRDAVKASQTPGPVVDLKVRSVSKSSCSIGWKKPHSDGGSRIIGYVVDFLTEENKWQRVMKSLSLQYSAKDLTEGKEYTFRVSAENENGEGTPSEITVVARDDVVAPDLDLKGLPDLCYLAKENSNFRLKIPIKGKPAPSVSWKKGEDPLATDTRVSVESSAVNTTLIVYDCQKSDAGKYTITLKNVAGTKEGTISIKVVGKPGIPTGPIKFDEVTAEAMTLKWAPPKDDGGSEITNYILEKRDSVNNKWVTCASAVQKTTFRVTRLHEGMEYTFRVSAENKYGVGEGLKSEPIVARHPFDVPDAPPPPNIVDVRHDSVSLTWTDPKKTGGSPITGYHLEFKERNSLLWKRANKTPIRMRDFKVTGLTEGLEYEFRVMAINLAGVGKPSLPSEPVVALDPIDPPGKPEVINITRNSVTLIWTEPKYDGGHKLTGYIVEKRDLPSKSWMKANHVNVPECAFTVTDLVEGGKYEFRIRAKNTAGAISAPSESTETIICKDEYEAPTIVLDPTIKDGLTIKAGDTIVLNAISILGKPLPKSSWSKAGKDIRPSDITQITSTPTSSMLTIKYATRKDAGEYTITATNPFGTKVEHVKVTVLDVPGPPGPVEISNVSAEKATLTWTPPLEDGGSPIKSYILEKRETSRLLWTVVSEDIQSCRHVATKLIQGNEYIFRVSAVNHYGKGEPVQSEPVKMVDRFGPPGPPEKPEVSNVTKNTATVSWKRPVDDGGSEITGYHVERREKKSLRWVRAIKTPVSDLRCKVTGLQEGSTYEFRVSAENRAGIGPPSEASDSVLMKDAAYPPGPPSNPHVTDTTKKSASLAWGKPHYDGGLEITGYVVEHQKVGDEAWIKDTTGTALRITQFVVPDLQTKEKYNFRISAINDAGVGEPAVIPDVEIVEREMAPDFELDAELRRTLVVRAGLSIRIFVPIKGRPAPEVTWTKDNINLKNRANIENTESFTLLIIPECNRYDTGKFVMTIENPAGKKSGFVNVRVLDTPGPVLNLRPTDITKDSVTLHWDLPLIDGGSRITNYIVEKREATRKSYSTATTKCHKCTYKVTGLSEGCEYFFRVMAENEYGIGEPTETTEPVKASEAPSPPDSLNIMDITKSTVSLAWPKPKHDGGSKITGYVIEAQRKGSDQWTHITTVKGLECVVRNLTEGEEYTFQVMAVNSAGRSAPRESRPVIVKEQTMLPELDLRGIYQKLVIAKAGDNIKVEIPVLGRPKPTVTWKKGDQILKQTQRVNFETTATSTILNINECVRSDSGPYPLTARNIVGEVGDVITIQVHDIPGPPTGPIKFDEVSSDFVTFSWDPPENDGGVPISNYVVEMRQTDSTTWVELATTVIRTTYKATRLTTGLEYQFRVKAQNRYGVGPGITSACIVANYPFKVPGPPGTPQVTAVTKDSMTISWHEPLSDGGSPILGYHVERKERNGILWQTVSKALVPGNIFKSSGLTDGIAYEFRVIAENMAGKSKPSKPSEPMLALDPIDPPGKPVPLNITRHTVTLKWAKPEYTGGFKITSYIVEKRDLPNGRWLKANFSNILENEFTVSGLTEDAAYEFRVIAKNAAGAISPPSEPSDAITCRDDVEAPKIKVDVKFKDTVILKAGEAFRLEADVSGRPPPTMEWSKDGKELEGTAKLEIKIADFSTNLVNKDSTRRDSGAYTLTATNPGGFAKHIFNVKVLDRPGPPEGPLAVTEVTSEKCVLSWFPPLDDGGAKIDHYIVQKRETSRLAWTNVASEVQVTKLKVTKLLKGNEYIFRVMAVNKYGVGEPLESEPVLAVNPYGPPDPPKNPEVTTITKDSMVVCWGHPDSDGGSEIINYIVERRDKAGQRWIKCNKKTLTDLRYKVSGLTEGHEYEFRIMAENAAGISAPSPTSPFYKACDTVFKPGPPGNPRVLDTSRSSISIAWNKPIYDGGSEITGYMVEIALPEEDEWQIVTPPAGLKATSYTITGLTENQEYKIRIYAMNSEGLGEPALVPGTPKAEDRMLPPEIELDADLRKVVTIRACCTLRLFVPIKGRPAPEVKWARDHGESLDKASIESTSSYTLLIVGNVNRFDSGKYILTVENSSGSKSAFVNVRVLDTPGPPQDLKVKEVTKTSVTLTWDPPLLDGGSKIKNYIVEKRESTRKAYSTVATNCHKTSWKVDQLQEGCSYYFRVLAENEYGIGLPAETAESVKASERPLPPGKITLMDVTRNSVSLSWEKPEHDGGSRILGYIVEMQTKGSDKWATCATVKVTEATITGLIQGEEYSFRVSAQNEKGISDPRQLSVPVIAKDLVIPPAFKLLFNTFTVLAGEDLKVDVPFIGRPTPAVTWHKDNVPLKQTTRVNAESTENNSLLTIKDACREDVGHYVVKLTNSAGEAIETLNVIVLDKPGPPTGPVKMDEVTADSITLSWGPPKYDGGSSINNYIVEKRDTSTTTWQIVSATVARTTIKACRLKTGCEYQFRIAAENRYGKSTYLNSEPTVAQYPFKVPGPPGTPVVTLSSRDSMEVQWNEPISDGGSRVIGYHLERKERNSILWVKLNKTPIPQTKFKTTGLEEGVEYEFRVSAENIVGIGKPSKVSECYVARDPCDPPGRPEAIIVTRNSVTLQWKKPTYDGGSKITGYIVEKKELPEGRWMKASFTNIIDTHFEVTGLVEDHRYEFRVIARNAAGVFSEPSESTGAITARDEVDPPRISMDPKYKDTIVVHAGESFKVDADIYGKPIPTIQWIKGDQELSNTARLEIKSTDFATSLSVKDAVRVDSGNYILKAKNVAGERSVTVNVKVLDRPGPPEGPVVISGVTAEKCTLAWKPPLQDGGSDIINYIVERRETSRLVWTVVDANVQTLSCKVTKLLEGNEYTFRIMAVNKYGVGEPLESEPVVAKNPFVVPDAPKAPEVTTVTKDSMIVVWERPASDGGSEILGYVLEKRDKEGIRWTRCHKRLIGELRLRVTGLIENHDYEFRVSAENAAGLSEPSPPSAYQKACDPIYKPGPPNNPKVIDITRSSVFLSWSKPIYDGGCEIQGYIVEKCDVSVGEWTMCTPPTGINKTNIEVEKLLEKHEYNFRICAINKAGVGEHADVPGPIIVEEKLEAPDIDLDLELRKIINIRAGGSLRLFVPIKGRPTPEVKWGKVDGEIRDAAIIDVTSSFTSLVLDNVNRYDSGKYTLTLENSSGTKSAFVTVRVLDTPSPPVNLKVTEITKDSVSITWEPPLLDGGSKIKNYIVEKREATRKSYAAVVTNCHKNSWKIDQLQEGCSYYFRVTAENEYGIGLPAQTADPIKVAEVPQPPGKITVDDVTRNSVSLSWTKPEHDGGSKIIQYIVEMQAKHSEKWSECARVKSLQAVITNLTQGEEYLFRVVAVNEKGRSDPRSLAVPIVAKDLVIEPDVKPAFSSYSVQVGQDLKIEVPISGRPKPTITWTKDGLPLKQTTRINVTDSLDLTTLSIKETHKDDGGQYGITVANVVGQKTASIEIVTLDKPDPPKGPVKFDDVSAESITLSWNPPLYTGGCQITNYIVQKRDTTTTVWDVVSATVARTTLKVTKLKTGTEYQFRIFAENRYGQSFALESDPIVAQYPYKEPGPPGTPFATAISKDSMVIQWHEPVNNGGSPVIGYHLERKERNSILWTKVNKTIIHDTQFKAQNLEEGIEYEFRVYAENIVGVGKASKNSECYVARDPCDPPGTPEPIMVKRNEITLQWTKPVYDGGSMITGYIVEKRDLPDGRWMKASFTNVIETQFTVSGLTEDQRYEFRVIAKNAAGAISKPSDSTGPITAKDEVELPRISMDPKFRDTIVVNAGETFRLEADVHGKPLPTIEWLRGDKEIEESARCEIKNTDFKALLIVKDAIRIDGGQYILRASNVAGSKSFPVNVKVLDRPGPPEGPVQVTGVTSEKCSLTWSPPLQDGGSDISHYVVEKRETSRLAWTVVASEVVTNSLKVTKLLEGNEYVFRIMAVNKYGVGEPLESAPVLMKNPFVLPGPPKSLEVTNIAKDSMTVCWNRPDSDGGSEIIGYIVEKRDRSGIRWIKCNKRRITDLRLRVTGLTEDHEYEFRVSAENAAGVGEPSPATVYYKACDPVFKPGPPTNAHIVDTTKNSITLAWGKPIYDGGSEILGYVVEICKADEEEWQIVTPQTGLRVTRFEISKLTEHQEYKIRVCALNKVGLGEATSVPGTVKPEDKLEAPELDLDSELRKGIVVRAGGSARIHIPFKGRPTPEITWSREEGEFTDKVQIEKGVNYTQLSIDNCDRNDAGKYILKLENSSGSKSAFVTVKVLDTPGPPQNLAVKEVRKDSAFLVWEPPIIDGGAKVKNYVIDKRESTRKAYANVSSKCSKTSFKVENLTEGAIYYFRVMAENEFGVGVPVETVDAVKAAEPPSPPGKVTLTDVSQTSASLMWEKPEHDGGSRVLGYVVEMQPKGTEKWSIVAESKVCNAVVTGLSSGQEYQFRVKAYNEKGKSDPRVLGVPVIAKDLTIQPSLKLPFNTYSIQAGEDLKIEIPVIGRPRPNISWVKDGEPLKQTTRVNVEETATSTVLHIKEGNKDDFGKYTVTATNSAGTATENLSVIVLEKPGPPVGPVRFDEVSADFVVISWEPPAYTGGCQISNYIVEKRDTTTTTWHMVSATVARTTIKITKLKTGTEYQFRIFAENRYGKSAPLDSKAVIVQYPFKEPGPPGTPFVTSISKDQMLVQWHEPVNDGGTKIIGYHLEQKEKNSILWVKLNKTPIQDTKFKTTGLDEGLEYEFKVSAENIVGIGKPSKVSECFVARDPCDPPGRPEAIVITRNNVTLKWKKPAYDGGSKITGYIVEKKDLPDGRWMKASFTNVLETEFTVSGLVEDQRYEFRVIARNAAGNFSEPSDSSGAITARDEIDAPNASLDPKYKDVIVVHAGETFVLEADIRGKPIPDVVWSKDGKELEETAARMEIKSTIQKTTLVVKDCIRTDGGQYILKLSNVGGTKSIPITVKVLDRPGPPEGPLKVTGVTAEKCYLAWNPPLQDGGANISHYIIEKRETSRLSWTQVSTEVQALNYKVTKLLPGNEYIFRVMAVNKYGIGEPLESGPVTACNPYKPPGPPSTPEVSAITKDSMVVTWARPVDDGGTEIEGYILEKRDKEGVRWTKCNKKTLTDLRLRVTGLTEGHSYEFRVAAENAAGVGEPSEPSVFYRACDALYPPGPPSNPKVTDTSRSSVSLAWSKPIYDGGAPVKGYVVEVKEAAADEWTTCTPPTGLQGKQFTVTKLKENTEYNFRICAINSEGVGEPATLPGSVVAQERIEPPEIELDADLRKVVVLRASATLRLFVTIKGRPEPEVKWEKAEGILTDRAQIEVTSSFTMLVIDNVTRFDSGRYNLTLENNSGSKTAFVNVRVLDSPSAPVNLTIREVKKDSVTLSWEPPLIDGGAKITNYIVEKRETTRKAYATITNNCTKTTFRIENLQEGCSYYFRVLASNEYGIGLPAETTEPVKVSEPPLPPGRVTLVDVTRNTATIKWEKPESDGGSKITGYVVEMQTKGSEKWSTCTQVKTLEATISGLTAGEEYVFRVAAVNEKGRSDPRQLGVPVIARDIEIKPSVELPFHTFNVKAREQLKIDVPFKGRPQATVNWRKDGQTLKETTRVNVSSSKTVTSLSIKEASKEDVGTYELCVSNSAGSITVPITIIVLDRPGPPGPIRIDEVSCDSITISWNPPEYDGGCQISNYIVEKKETTSTTWHIVSQAVARTSIKIVRLTTGSEYQFRVCAENRYGKSSYSESSAVVAEYPFSPPGPPGTPKVVHATKSTMLVTWQVPVNDGGSRVIGYHLEYKERSSILWSKANKILIADTQMKVSGLDEGLMYEYRVYAENIAGIGKCSKSCEPVPARDPCDPPGQPEVTNITRKSVSLKWSKPHYDGGAKITGYIVERRELPDGRWLKCNYTNIQETYFEVTELTEDQRYEFRVFARNAADSVSEPSESTGPIIVKDDVEPPRVMMDVKFRDVIVVKAGEVLKINADIAGRPLPVISWAKDGIEIEERARTEIISTDNHTLLTVKDCIRRDTGQYVLTLKNVAGTRSVAVNCKVLDKPGPPAGPLEINGLTAEKCSLSWGRPQEDGGADIDYYIVEKRETSHLAWTICEGELQMTSCKVTKLLKGNEYIFRVTGVNKYGVGEPLESVAIKALDPFTVPSPPTSLEITSVTKESMTLCWSRPESDGGSEISGYIIERREKNSLRWVRVNKKPVYDLRVKSTGLREGCEYEYRVYAENAAGLSLPSETSPLIRAEDPVFLPSPPSKPKIVDSGKTTITIAWVKPLFDGGAPITGYTVEYKKSDDTDWKTSIQSLRGTEYTISGLTTGAEYVFRVKSVNKVGASDPSDSSDPQIAKEREEEPLFDIDSEMRKTLIVKAGASFTMTVPFRGRPVPNVLWSKPDTDLRTRAYVDTTDSRTSLTIENANRNDSGKYTLTIQNVLSAASLTLVVKVLDTPGPPTNITVQDVTKESAVLSWDVPENDGGAPVKNYHIEKREASKKAWVSVTNNCNRLSYKVTNLQEGAIYYFRVSGENEFGVGIPAETKEGVKITEKPSPPEKLGVTSISKDSVSLTWLKPEHDGGSRIVHYVVEALEKGQKNWVKCAVAKSTHHVVSGLRENSEYFFRVFAENQAGLSDPRELLLPVLIKEQLEPPEIDMKNFPSHTVYVRAGSNLKVDIPISGKPLPKVTLSRDGVPLKATMRFNTEITAENLTINLKESVTADAGRYEITAANSSGTTKAFINIVVLDRPGPPTGPVVISDITEESVTLKWEPPKYDGGSQVTNYILLKRETSTAVWTEVSATVARTMMKVMKLTTGEEYQFRIKAENRFGISDHIDSACVTVKLPYTTPGPPSTPWVTNVTRESITVGWHEPVSNGGSAVVGYHLEMKDRNSILWQKANKLVIRTTHFKVTTISAGLIYEFRVYAENAAGVGKPSHPSEPVLAIDACEPPRNVRITDISKNSVSLSWQQPAFDGGSKITGYIVERRDLPDGRWTKASFTNVTETQFIISGLTQNSQYEFRVFARNAVGSISNPSEVVGPITCIDSYGGPVIDLPLEYTEVVKYRAGTSVKLRAGISGKPAPTIEWYKDDKELQTNALVCVENTTDLASILIKDADRLNSGCYELKLRNAMGSASATIRVQILDKPGPPGGPIEFKTVTAEKITLLWRPPADDGGAKITHYIVEKRETSRVVWSMVSEHLEECIITTTKIIKGNEYIFRVRAVNKYGIGEPLESDSVVAKNAFVTPGPPGIPEVTKITKNSMTVVWSRPIADGGSDISGYFLEKRDKKSLGWFKVLKETIRDTRQKVTGLTENSDYQYRVCAVNAAGQGPFSEPSEFYKAADPIDPPGPPAKIRIADSTKSSITLGWSKPVYDGGSAVTGYVVEIRQGEEEEWTTVSTKGEVRTTEYVVSNLKPGVNYYFRVSAVNCAGQGEPIEMNEPVQAKDILEAPEIDLDVALRTSVIAKAGEDVQVLIPFKGRPPPTVTWRKDEKNLGSDARYSIENTDSSSLLTIPQVTRNDTGKYILTIENGVGEPKSSTVSVKVLDTPAACQKLQVKHVSRGTVTLLWDPPLIDGGSPIINYVIEKRDATKRTWSVVSHKCSSTSFKLIDLSEKTPFFFRVLAENEIGIGEPCETTEPVKAAEVPAPIRDLSMKDSTKTSVILSWTKPDFDGGSVITEYVVERKGKGEQTWSHAGISKTCEIEVSQLKEQSVLEFRVFAKNEKGLSDPVTIGPITVKELIITPEVDLSDIPGAQVTVRIGHNVHLELPYKGKPKPSISWLKDGLPLKESEFVRFSKTENKITLSIKNAKKEHGGKYTVILDNAVCRIAVPITVITLGPPSKPKGPIRFDEIKADSVILSWDVPEDNGGGEITCYSIEKRETSQTNWKMVCSSVARTTFKVPNLVKDAEYQFRVRAENRYGVSQPLVSSIIVAKHQFRIPGPPGKPVIYNVTSDGMSLTWDAPVYDGGSEVTGFHVEKKERNSILWQKVNTSPISGREYRATGLVEGLDYQFRVYAENSAGLSSPSDPSKFTLAVSPVDPPGTPDYIDVTRETITLKWNPPLRDGGSKIVGYSIEKRQGNERWVRCNFTDVSECQYTVTGLSPGDRYEFRIIARNAVGTISPPSQSSGIIMTRDENVPPIVEFGPEYFDGLIIKSGESLRIKALVQGRPVPRVTWFKDGVEIEKRMNMEITDVLGSTSLFVRDATRDHRGVYTVEAKNASGSAKAEIKVKVQDTPGKVVGPIRFTNITGEKMTLWWDAPLNDGCAPITHYIIEKRETSRLAWALIEDKCEAQSYTAIKLINGNEYQFRVSAVNKFGVGRPLDSDPVVAQIQYTVPDAPGIPEPSNITGNSITLTWARPESDGGSEIQQYILERREKKSTRWVKVISKRPISETRFKVTGLTEGNEYEFHVMAENAAGVGPASGISRLIKCREPVNPPGPPTVVKVTDTSKTTVSLEWSKPVFDGGMEIIGYIIEMCKADLGDWHKVNAEACVKTRYTVTDLQAGEEYKFRVSAINGAGKGDSCEVTGTIKAVDRLTAPELDIDANFKQTHVVRAGASIRLFIAYQGRPTPTAVWSKPDSNLSLRADIHTTDSFSTLTVENCNRNDAGKYTLTVENNSGSKSITFTVKVLDTPGPPGPITFKDVTRGSATLMWDAPLLDGGARIHHYVVEKREASRRSWQVISEKCTRQIFKVNDLAEGVPYYFRVSAVNEYGVGEPYEMPEPIVATEQPAPPRRLDVVDTSKSSAVLAWLKPDHDGGSRITGYLLEMRQKGSDFWVEAGHTKQLTFTVERLVEKTEYEFRVKAKNDAGYSEPREAFSSVIIKEPQIEPTADLTGITNQLITCKAGSPFTIDVPISGRPAPKVTWKLEEMRLKETDRVSITTTKDRTTLTVKDSMRGDSGRYFLTLENTAGVKTFSVTVVVIGRPGPVTGPIEVSSVSAESCVLSWGEPKDGGGTEITNYIVEKRESGTTAWQLVNSSVKRTQIKVTHLTKYMEYSFRVSSENRFGVSKPLESAPIIAEHPFVPPSAPTRPEVYHVSANAMSIRWEEPYHDGGSKIIGYWVEKKERNTILWVKENKVPCLECNYKVTGLVEGLEYQFRTYALNAAGVSKASEASRPIMAQNPVDAPGRPEVTDVTRSTVSLIWSAPAYDGGSKVVGYIIERKPVSEVGDGRWLKCNYTIVSDNFFTVTALSEGDTYEFRVLAKNAAGVISKGSESTGPVTCRDEYAPPKAELDARLHGDLVTIRAGSDLVLDAAVGGKPEPKIIWTKGDKELDLCEKVSLQYTGKRATAVIKFCDRSDSGKYTLTVKNASGTKAVSVMVKVLDSPGPCGKLTVSRVTQEKCTLAWSLPQEDGGAEITHYIVERRETSRLNWVIVEGECPTLSYVVTRLIKNNEYIFRVRAVNKYGPGVPVESEPIVARNSFTIPSPPGIPEEVGTGKEHIIIQWTKPESDGGNEISNYLVDKREKKSLRWTRVNKDYVVYDTRLKVTSLMEGCDYQFRVTAVNAAGNSEPSEASNFISCREPSYTPGPPSAPRVVDTTKHSISLAWTKPMYDGGTDIVGYVLEMQEKDTDQWYRVHTNATIRNTEFTVPDLKMGQKYSFRVAAVNVKGMSEYSESIAEIEPVERIEIPDLELADDLKKTVTIRAGASLRLMVSVSGRPPPVITWSKQGIDLASRAIIDTTESYSLLIVDKVNRYDAGKYTIEAENQSGKKSATVLVKVYDTPGPCPSVKVKEVSRDSVTITWEIPTIDGGAPVNNYIVEKREAAMRAFKTVTTKCSKTLYRISGLVEGTMYYFRVLPENIYGIGEPCETSDAVLVSEVPLVPAKLEVVDVTKSTVTLAWEKPLYDGGSRLTGYVLEACKAGTERWMKVVTLKPTVLEHTVTSLNEGEQYLFRIRAQNEKGVSEPRETVTAVTVQDLRVLPTIDLSTMPQKTIHVPAGRPVELVIPIAGRPPPAASWFFAGSKLRESERVTVETHTKVAKLTIRETTIRDTGEYTLELKNVTGTTSETIKVIILDKPGPPTGPIKIDEIDATSITISWEPPELDGGAPLSGYVVEQRDAHRPGWLPVSESVTRSTFKFTRLTEGNEYVFRVAATNRFGIGSYLQSEVIECRSSIRIPGPPETLQIFDVSRDGMTLTWYPPEDDGGSQVTGYIVERKEVRADRWVRVNKVPVTMTRYRSTGLTEGLEYEHRVTAINARGSGKPSRPSKPIVAMDPIAPPGKPQNPRVTDTTRTSVSLAWSVPEDEGGSKVTGYLIEMQKVDQHEWTKCNTTPTKIREYTLTHLPQGAEYRFRVLACNAGGPGEPAEVPGTVKVTEMLEYPDYELDERYQEGIFVRQGGVIRLTIPIKGKPFPICKWTKEGQDISKRAMIATSETHTELVIKEADRGDSGTYDLVLENKCGKKAVYIKVRVIGSPNSPEGPLEYDDIQVRSVRVSWRPPADDGGADILGYILERREVPKAAWYTIDSRVRGTSLVVKGLKENVEYHFRVSAENQFGISKPLKSEEPVTPKTPLNPPEPPSNPPEVLDVTKSSVSLSWSRPKDDGGSRVTGYYIERKETSTDKWVRHNKTQITTTMYTVTGLVPDAEYQFRIIAQNDVGLSETSPASEPVVCKDPFDKPSQPGELEILSISKDSVTLQWEKPECDGGKEILGYWVEYRQSGDSAWKKSNKERIKDKQFTIGGLLEATEYEFRVFAENETGLSRPRRTAMSIKTKLTSGEAPGIRKEMKDVTTKLGEAAQLSCQIVGRPLPDIKWYRFGKELIQSRKYKMSSDGRTHTLTVMTEEQEDEGVYTCIATNEVGEVETSSKLLLQATPQFHPGYPLKEKYYGAVGSTLRLHVMYIGRPVPAMTWFHGQKLLQNSENITIENTEHYTHLVMKNVQRKTHAGKYKVQLSNVFGTVDAILDVEIQDKPDKPTGPIVIEALLKNSAVISWKPPADDGGSWITNYVVEKCEAKEGAEWQLVSSAISVTTCRIVNLTENAGYYFRVSAQNTFGISDPLEVSSVVIIKSPFEKPGAPGKPTITAVTKDSCVVAWKPPASDGGAKIRNYYLEKREKKQNKWISVTTEEIRETVFSVKNLIEGLEYEFRVKCENLGGESEWSEISEPITPKSDVPIQAPHFKEELRNLNVRYQSNATLVCKVTGHPKPIVKWYRQGKEIIADGLKYRIQEFKGGYHQLIIASVTDDDATVYQVRATNQGGSVSGTASLEVEVPAKIHLPKTLEGMGAVHALRGEVVSIKIPFSGKPDPVITWQKGQDLIDNNGHYQVIVTRSFTSLVFPNGVERKDAGFYVVCAKNRFGIDQKTVELDVADVPDPPRGVKVSDVSRDSVNLTWTEPASDGGSKITNYIVEKCATTAERWLRVGQARETRYTVINLFGKTSYQFRVIAENKFGLSKPSEPSEPTITKEDKTRAMNYDEEVDETREVSMTKASHSSTKELYEKYMIAEDLGRGEFGIVHRCVETSSKKTYMAKFVKVKGTDQVLVKKEISILNIARHRNILHLHESFESMEELVMIFEFISGLDIFERINTSAFELNEREIVSYVHQVCEALQFLHSHNIGHFDIRPENIIYQTRRSSTIKIIEFGQARQLKPGDNFRLLFTAPEYYAPEVHQHDVVSTATDMWSLGTLVYVLLSGINPFLAETNQQIIENIMNAEYTFDEEAFKEISIEAMDFVDRLLVKERKSRMTASEALQHPWLKQKIERVSTKVIRTLKHRRYYHTLIKKDLNMVVSAARISCGGAIRSQKGVSVAKVKVASIEIGPVSGQIMHAVGEEGGHVKYVCKIENYDQSTQVTWYFGVRQLENSEKYEITYEDGVAILYVKDITKLDDGTYRCKVVNDYGEDSSYAELFVKGVREVYDYYCRRTMKKIKRRTDTMRLLERPPEFTLPLYNKTAYVGENVRFGVTITVHPEPHVTWYKSGQKIKPGDNDKKYTFESDKGLYQLTINSVTTDDDAEYTVVARNKYGEDSCKAKLTVTLHPPPTDSTLRPMFKRLLANAECQEGQSVCFEIRVSGIPPPTLKWEKDGQPLSLGPNIEIIHEGLDYYALHIRDTLPEDTGYYRVTATNTAGSTSCQAHLQVERLRYKKQEFKSKEEHERHVQKQIDKTLRMAEILSGTESVPLTQVAKEALREAAVLYKPAVSTKTVKGEFRLEIEEKKEERKLRMPYDVPEPRKYKQTTIEEDQRIKQFVPMSDMKWYKKIRDQYEMPGKLDRVVQKRPKRIRLSRWEQFYVMPLPRITDQYRPKWRIPKLSQDDLEIVRPARRRTPSPDYDFYYRPRRRSLGDISDEELLLPIDDYLAMKRTEEERLRLEEELELGFSASPPSRSPPHFELSSLRYSSPQAHVKVEETRKDFRYSTYHIPTKAEASTSYAELRERHAQAAYRQPKQRQRIMAEREDEELLRPVTTTQHLSEYKSELDFMSKEEKSRKKSRRQREVTEITEIEEEYEISKHAQRESSSSASRLLRRRRSLSPTYIELMRPVSELIRSRPQPAEEYEDDTERRSPTPERTRPRSPSPVSSERSLSRFERSARFDIFSRYESMKAALKTQKTSERKYEVLSQQPFTLDHAPRITLRMRSHRVPCGQNTRFILNVQSKPTAEVKWYHNGVELQESSKIHYTNTSGVLTLEILDCHTDDSGTYRAVCTNYKGEASDYATLDVTGGDYTTYASQRRDEEVPRSVFPELTRTEAYAVSSFKKTSEMEASSSVREVKSQMTETRESLSSYEHSASAEMKSAALEEKSLEEKSTTRKIKTTLAARILTKPRSMTVYEGESARFSCDTDGEPVPTVTWLRKGQVLSTSARHQVTTTKYKSTFEISSVQASDEGNYSVVVENSEGKQEAEFTLTIQKARVTEKAVTSPPRVKSPEPRVKSPEAVKSPKRVKSPEPSHPKAVSPTETKPTPTEKVQHLPVSAPPKITQFLKAEASKEIAKLTCVVESSVLRAKEVTWYKDGKKLKENGHFQFHYSADGTYELKINNLTESDQGEYVCEISGEGGTSKTNLQFMGQAFKSIHEKVSKISETKKSDQKTTESTVTRKTEPKAPEPISSKPVIVTGLQDTTVSSDSVAKFAVKATGEPRPTAIWTKDGKAITQGGKYKLSEDKGGFFLEIHKTDTSDSGLYTCTVKNSAGSVSSSCKLTIKAIKDTEAQKVSTQKTSEITPQKKAVVQEEISQKALRSEEIKMSEAKSQEKLALKEEASKVLISEEVKKSAATSLEKSIVHEEITKTSQASEEVRTHAEIKAFSTQMSINEGQRLVLKANIAGATDVKWVLNGVELTNSEEYRYGVSGSDQTLTIKQASHRDEGILTCISKTKEGIVKCQYDLTLSKELSDAPAFISQPRSQNINEGQNVLFTCEISGEPSPEIEWFKNNLPISISSNVSISRSRNVYSLEIRNASVSDSGKYTIKAKNFRGQCSATASLMVLPLVEEPSREVVLRTSGDTSLQGSFSSQSVQMSASKQEASFSSFSSSSASSMTEMKFASMSAQSMSSMQESFVEMSSSSFMGISNMTQLESSTSKMLKAGIRGIPPKIEALPSDISIDEGKVLTVACAFTGEPTPEVTWSCGGRKIHSQEQGRFHIENTDDLTTLIIMDVQKQDGGLYTLSLGNEFGSDSATVNIHIRSI

SEQ ID NO: 7665 - protein, 26926 aa, Homo sapiens
MTTQAPTFTQPLQSVVVLEGSTATFEAHISGFPVPEVSWFRDGQVISTSTLPGVQISFSDGRAKLTIPAVTKANSGRYSLKATNGSGQATSTAELLVKAETAPPNFVQRLQSMTVRQGSQVRLQVRVTGIPTPVVKFYRDGAEIQSSLDFQISQEGDLYSLLIAEAYPEDSGTYSVNATNSVGRATSTAELLVQGEEEVPAKKTKTIVSTAQISESRQTRIEKKIEAHFDARSIATVEMVIDGAAGQQLPHKTPHRIPPKPKSRSPTPPSIAAKAQLARQQSPSPIRHSPSPVRHVRAPTPSPVRSVSPAARISTSPIRSVRSPLLMRKTQASTVATGPEVPPPWKQEGYVASSSEAEMRETTLTTSTQIRTEERWEGRYGVQEQVTISGAAGAAASVSASASYAAEAVATGAKEVKQDADKSAAVATVVAAVDMARVREPVISAVEQTAQRTTTTAVHIQPAQEQVRKEAEKTAVTKVVVAADKAKEQELKSRTKEVITTKQEQMHVTHEQIRKETEKTFVPKVVISAAKAKEQETRISEEITKKQKQVTQEAIMKETRKTVVPKVIVATPKVKEQDLVSRGREGITTKREQVQITQEKMRKEAEKTALSTIAVATAKAKEQETILRTRETMATRQEQIQVTHGKVDVGKKAEAVATVVAAVDQARVREPREPGHLEESYAQQTTLEYGYKERISAAKVAEPPQRPASEPHVVPKAVKPRVIQAPSETHIKTTDQKGMHISSQIKKTTDLTTERLVHVDKRPRTASPHFTVSKISVPKTEHGYEASIAGSAIATLQKELSATSSAQKITKSVKAPTVKPSETRVRAEPTPLPQFPFADTPDTYKSEAGVEVKKEVGVSITGTTVREERFEVLHGREAKVTETARVPAPVEIPVTPPTLVSGLKNVTVIEGESVTLECHISGYPSPTVTWYREDYQIESSIDFQITFQSGIARLMIREAFAEDSGRFTCSAVNEAGTVSTSCYLAVQVSEEFEKETTAVTEKFTTEEKRFVESRDVVMTDTSLTEEQAGPGEPAAPYFITKPVVQKLVEGGSVVFGCQVGGNPKPHVYWKKSGVPLTTGYRYKVSYNKQTGECKLVISMTFADDAGEYTIVVRNKHGETSASASLLEEADYELLMKSQQEMLYQTQVTAFVQEPKVGETAPGFVYSEYEKEYEKEQALIRKKMAKDTVVVRTYVEDQEFHISSFEERLIKEIEYRIIKTTLEELLEEDGEEKMAVDISESEAVESGFDLRIKNYRILEGMGVTFHCKMSGYPLPKIAWYKDGKRIKHGERYQMDFLQDGRASLRIPVVLPEDEGIYTAFASNIKGNAICSGKLYVEPAAPLGAPTYIPTLEPVSRIRSLSPRSVSRSPIRMSPARMSPARMSPARMSPARMSPGRRLEETDESQLERLYKPVFVLKPVSFKCLEGQTARFDLKVVGRPMPETFWFHDGQQIVNDYTHKVVIKEDGTQSLIIVPATPSDSGEWTVVAQNRAGRSSISVILTVEAVEHQVKPMFVEKLKNVNIKEGSQLEMKVRATGNPNPDIVWLKNSDIIVPHKYPKIRIEGTKGEAALKIDSTVSQDSAWYTATAINKAGRDTTRCKVNVEVEFAEPEPERKLIIPRGTYRAKEIAAPELEPLHLRYGQEQWEEGDLYDKEKQQKPFFKKKLTSLRLKRFGPAHFECRLTPIGDPTMVVEWLHDGKPLEAANRLRMINEFGYCSLDYGVAYSRDSGIITCRATNKYGTDHTSATLIVKDEKSLVEESQLPEGRKGLQRIEELERMAHEGALTGVTTDQKEKQKPDIVLYPEPVRVLEGETARFRCRVTGYPQPKVNWYLNGQLIRKSKRFRVRYDGIHYLDIVDCKSYDTGEVKVTAENPEGVIEHKVKLEIQQREDFRSVLRRAPEPRPEFHVHEPGKLQFEVQKVDRPVDTTETKEVVKLKRAERITHEKVPEESEELRSKFKRRTEEGYYEAITAVELKSRKKDESYEELLRKTKDELLHWTKELTEEEKKALAEEGKITIPTFKPDKIELSPSMEAPKIFERIQSQTVGQGSDAHFRVRVVGKPDPECEWYKNGVKIERSDRIYWYWPEDNVCELVIRDVTAEDSASIMVKAINIAGETSSHAFLLVQAKQLITFTQELQDVVAKEKDTMATFECETSEPFVKVKWYKDGMEVHEGDKYRMHSDRKVHFLSILTIDTSDAEDYSCVLVEDENVKTTAKLIVEGAVVEFVKELQDIEVPESYSGELECIVSPENIEGKWYHNDVELKSNGKYTITSRRGRQNLTVKDVTKEDQGEYSFVIDGKKTTCKLKMKPRPIAILQGLSDQKVCEGDIVQLEVKVSLESVEGVWMKDGQEVQPSDRVHIVIDKQSHMLLIEDMTKEDAGNYSFTIPALGLSTSGRVSVYSVDVITPLKDVNVIEGTKAVLECKVSVPDVTSVKWYLNDEQIKPDDRVQAIVKGTKQRLVINRTHASDEGPYKLIVGRVETNCNLSVEKIKIIRGLRDLTCTETQNVVFEVELSHSGIDVLWNFKDKEIKPSSKYKIEAHGKIYKLTVLNMMKDDEGKYTFYAGENITSGKLTVAGGAISKPLTDQTVAESQEAVFECEVANPDSKGEWLRDGKHLPLTNNIRSESDGHKRRLIIAATKLDDIGEYTYKVATSKTSAKLKVEAVKIKKTLKNLTVTETQDAVFTVELTHPNVKGVQWIKNGVVLESNEKYAISVKGTIYSLRIKNCAIVDESVYGFRLGRLGASARLHVETVKIIKKPKDVTALENATVAFEVSVSHDTVPVKWFHKNVEIKPSDKHRLVSERKVHKLMLQNISPSDAGEYTAVVGQLECKAKLFVETLHITKTMKNIEVPETKTASFECEVSHFNVPSMWLKNGVEIEMSEKFKIVVQGKLHQLIIMNTSTEDSAEYTFVCGNDQVSATLTVTPIMITSMLKDINAEEKDTITFEVTVNYEGISYKWLKNGVEIKSTDKCQMRTKKLTHSLNIRNVHFGDAADYTFVAGKATSTATLYVEARHIEFRKHIKDIKVLEKKRAMFECEVSEPDITVQWMKDDQELQITDRIKIQKEKYVHRLLIPSTRMSDAGKYTVVAGGNVSTAKLFVEGRDVRIRSIKKEVQVIEKQRAVVEFEVNEDDVDAHWYKDGIEINFQVQERHKYVVERRIHRMFISETRQSDAGEYTFVAGRNRSSVTLYVNAPEPPQVLQELQPVTVQSGKPARFCAVISGRPQPKISWYKEEQLLSTGFKCKFLHDGQEYTLLLIEAFPEDAAVYTCEAKNDYGVATTSASLSVEVPEVVSPDQEMPVYPPAIITPLQDTVTSEGQPARFQCRVSGTDLKVSWYSKDKKIKPSRFFRMTQFEDTYQLEIAEAYPEDEGTYTFVASNAVGQVSSTANLSLEAPESILHERIEQEIEMEMKEFSSSFLSAEEEGLHSAELQLSKINETLELLSESPVYSTKFDSEKEGTGPIFIKEVSNADISMGDVATLSVTVIGIPKPKIQWFFNGVLLTPSADYKFVFDGDDHSLIILFTKLEDEGEYTCMASNDYGKTICSAYLKINSKGEGHKDTETESAVAKSLEKLGGPCPPHFLKELKPIRCAQGLPAIFEYTVVGEPAPTVTWFKENKQLCTSVYYTIIHNPNGSGTFIVNDPQREDSGLYICKAENMLGESTCAAELLVLLEDTDMTDTPCKAKSTPEAPEDFPQTPLKGPAVEALDSEQEIATFVKDTILKAALITEENQQLSYEHIAKANELSSQLPLGAQELQSILEQDKLTPESTREFLCINGSIHFQPLKEPSPNLQLQIVQSQKTFSKEGILMPEEPETQAVLSDTEKIFPSAMSIEQINSLTVEPLKTLLAEPEGNYPQSSIEPPMHSYLTSVAEEVLSPKEKTVSDTNREQRVTLQKQEAQSALILSQSLAEGHVESLQSPDVMISQVNYEPLVPSEHSCTEGGKILIESANPLENAGQDSAVRIEEGKSLRFPLALEEKQVLLKEEHSDNVVMPPDQIIESKREPVAIKKVQEVQGRDLLSKESLLSGIPEEQRLNLKIQICRALQAAVASEQPGLFSEWLRNIEKVEVEAVNITQEPRHIMCMYLVTSAKSVTEEVTIIIEDVDPQMANLKMELRDALCAIIYEEIDILTAEGPRIQQGAKTSLQEEMDSFSGSQKVEPITEPEVESKYLISPEEVSYFNVQSRVKYLDATPVTKGVASAVVSDEKQDESLKPSEEKEESSSESGTEEVATVKIQEAEGGFIKEDGPMIHTPLVDTVSEEGDIVHLTTSITNAKEVNWYFENKLVPSDEKFKCLQDQNTYTLVIDKVNTEDHQGEYVCEALNDSGKTATSAKLTVVKRAAPVIKRKIEPLEVALGHLAKFTCEIQSAPNVRFQWFKAGREIYESDKCSIRSSKYISSLEILRTQVVDCGEYTCKASNEYGSVSCTATLTVTVPGGEKKVRKLLPERKPEPKEEVVLKSVLRKRPEEEEPKVEPKKLEKVKKPAVPEPPPPKPVEEVEVPTVTKRERKIPEPTKVPEIKPAIPLPAPEPKPKPEAEVKTIKPPPVEPEPTPIAAPVTVPVVGKKAEAKAPKEEAAKPKGPIKGVPKKTPSPIEAERRKLRPGSGGEKPPDEAPFTYQLKAVPLKFVKEIKDIILTESEFVGSSAIFECLVSPSTAITTWMKDGSNIRESPKHRFIADGKDRKLHIIDVQLSDAGEYTCVLRLGNKEKTSTAKLVVEELPVRFVKTLEEEVTVVKGQPLYLSCELNKERDVVWRKDGKIVVEKPGRIVPGVIGLMRALTINDADDTDAGTYTVTVENANNLECSSCVKVVEVIRDWLVKPIRDQHVKPKGTAIFACDIAKDTPNIKWFKGYDEIPAEPNDKTEILRDGNHLYLKIKNAMPEDIAEYAVEIEGKRYPAKLTLGEREVELLKPIEDVTIYEKESASFDAEISEADIPGQWKLKGELLRPSPTCEIKAEGGKRFLTLRKVKLDQAGEVLYQALNAITTAILTVKEIELDFAVPLKDVTVPERRQARFECVLTREANVIWSKGPDIIKSSDKFDIIADGKKHILVINDSQFDDEGVYTAEVEGKKTSARLFVTGIRLKFMSPLEDQTVKEGETATFVCELSHEKMHVVWFKNDAKLHTSRTVLISSEGKTHKLEMKEVTLDDISQIKAQVKELSSTAQLKVLEADPYFTVKLHDKTAVEKDEITLKCEVSKDVPVKWFKDGEEIVPSPKYSIKADGLRRILKIKKADLKDKGEYVCDCGTDKTKANVTVEARLIKVEKPLYGVEVFVGETAHFEIELSEPDVHGQWKLKGQPLTASPDCEIIEDGKKHILILHNCQLGMTGEVSFQAANAKSAANLKVKELPLIFITPLSDVKVFEKDEAKFECEVSREPKTFRWLKGTQEITGDDRFELIKDGTKHSMVIKSAAFEDEAKYMFEAEDKHTSGKLIIEGIRLKFLTPLKDVTAKEKESAVFTVELSHDNIRVKWFKNDQRLHTTRSVSMQDEGKTHSITFKDLSIDDTSQIRVEAMGMSSEAKLTVLEGDPYFTGKLQDYTGVEKDEVILQCEISKADAPVKWFKDGKEIKPSKNAVIKADGKKRMLILKKALKSDIGQYTCDCGTDKTSGKLDIEDREIKLVRPLHSVEVMETETARFETEISEDDIHANWKLKGEALLQTPDCEIKEEGKIHSLVLHNCRLDQTGGVDFQAANVKSSAHLRVKPRVIGLLRPLKDVTVTAGETATFDCELSYEDIPVEWYLKGKKLEPSDKVVPRSEGKVHTLTLRDVKLEDAGEVQLTAKDFKTHANLFVKEPPVEFTKPLEDQTVEEGATAVLECEVSRENAKVKWFKNGTEILKSKKYEIVADGRVRKLVIHDCTPEDIKTYTCDAKDFKTSCNLNVVPPHVEFLRPLTDLQVREKEMARFECELSRENAKVKWFKDGAEIKKGKKYDIISKGAVRILVINKCLLDDEAEYSCEVRTARTSGMLTVLEEEAVFTKNLANIEVSETDTIKLVCEVSKPGAEVIWYKGDEEIIETGRYEILTEGRKRILVIQNAHLEDAGNYNCRLPSSRTDGKVKVHELAAEFISKPQNLEILEGEKAEFVCSISKESFPVQWKRDDKTLESGDKYDVIADGKKRVLVVKDATLQDMGTYVVMVGAARAAAHLTVIEKLRIVVPLKDTRVKEQQEVVFNCEVNTEGAKAKWFRNEEAIFDSSKYIILQKDLVYTLRIRDAHLDDQANYNVSLTNHRGENVKSAANLIVEEEDLRIVEPLKDIETMEKKSVTFWCKVNRLNVTLKWTKNGEEVPFDNRVSYRVDKYKHMLTIKDCGFPDEGEYIVTAGQDKSVAELLIIEAPTEFVEHLEDQTVTEFDDAVFSCQLSREKANVKWYRNGREIKEGKKYKFEKDGSIHRLIIKDCRLDDECEYACGVEDRKSRARLFVEEIPVEIIRPPQDILEAPGADVVFLAELNKDKVEVQWLRNNMVVVQGDKHQMMSEGKIHRLQICDIKPRDQGEYRFIAKDKEARAKLELAAAPKIKTADQDLVVDVGKPLTMVVPYDAYPKAEAEWFKENEPLSTKTIDTTAEQTSFRILEAKKGDKGRYKIVLQNKHGKAEGFINLKVIDVPGPVRNLEVTETFDGEVSLAWEEPLTDGGSKIIGYVVERRDIKRKTWVLATDRAESCEFTVTGLQKGGVEYLFRVSARNRVGTGEPVETDNPVEARSKYDVPGPPLNVTITDVNRFGVSLTWEPPEYDGGAEITNYVIELRDKTSIRWDTAMTVRAEDLSATVTDVVEGQEYSFRVRAQNRIGVGKPSAATPFVKVADPIERPSPPVNLTSSDQTQSSVQLKWEPPLKDGGSPILGYIIERCEEGKDNWIRCNMKLVPELTYKVTGLEKGNKYLYRVSAENKAGVSDPSEILGPLTADDAFVEPTMDLSAFKDGLEVIVPNPITILVPSTGYPRPTATWCFGDKVLETGDRVKMKTLSAYAELVISPSERSDKGIYTLKLENRVKTISGEIDVNVIARPSAPKELKFGDITKDSVHLTWEPPDDDGGSPLTGYVVEKREVSRKTWTKVMDFVTDLEFTVPDLVQGKEYLFKVCARNKCGPGEPAYVDEPVNMSTPATVPDPPENVKWRDRTANSIFLTWDPPKNDGGSRIKGYIVERCPRGSDKWVACGEPVAETKMEVTGLEEGKWYAYRVKALNRQGASKPSRPTEEIQAVDTQEAPEIFLDVKLLAGLTVKAGTKIELPATVTGKPEPKITWTKADMILKQDKRITIENVPKKSTVTIVDSKRSDTGTYIIEAVNVCGRATAVVEVNVLDKPGPPAAFDITDVTNESCLLTWNPPRDDGGSKITNYVVERRATDSEVWHKLSSTVKDTNFKATKLIPNKEYIFRVAAENMYGVGEPVQASPITAKYQFDPPGPPTRLEPSDITKDAVTLTWCEPDDDGGSPITGYWVERLDPDTDKWVRCNKMPVKDTTYRVKGLTNKKKYRFRVLAENLAGPGKPSKSTEPILIKDPIDPPWPPGKPTVKDVGKTSVRLNWTKPEHDGGAKIESYVIEMLKTGTDEWVRVAEGVPTTQHLLPGLMEGQEYSFRVRAVNKAGESEPSEPSDPVLCREKLYPPSPPRWLEVINITKNTADLKWTVPEKDGGSPITNYIVEKRDVRRKGWQTVDTTVKDTKCTVTPLTEGSLYVFRVAAENAIGQSDYTEIEDSVLAKDTFTTPGPPYALAVVDVTKRHVDLKWEPPKNDGGRPIQRYVIEKKERLGTRWVKAGKTAGPDCNFRVTDVIEGTEVQFQVRAENEAGVGHPSEPTEILSIEDPTSPPSPPLDLHVTDAGRKHIAIAWKPPEKNGGSPIIGYHVEMCPVGTEKWMRVNSRPIKDLKFKVEEGVVPDKEYVLRVRAVNAIGVSEPSEISENVVAKDPDCKPTIDLETHDIIVIEGEKLSIPVPFRAVPVPTVSWHKDGKEVKASDRLTMKNDHISAHLEVPKSVRADAGIYTITLENKLGSATASINVKVIGLPGPCKDIKASDITKSSCKLTWEPPEFDGGTPILHYVLERREAGRRTYIPVMSGENKLSWTVKDLIPNGEYFFRVKAVNKVGGGEYIELKNPVIAQDPKQPPDPPVDVEVHNPTAEAMTITWKPPLYDGGSKIMGYIIEKIAKGEERWKRCNEHLVPILTYTAKGLEEGKEYQFRVRAENAAGISEPSRATPPTKAVDPIDAPKVILRTSLEVKRGDEIALDASISGSPYPTITWIKDENVIVPEEIKKRAAPLVRRRKGEVQEEEPFVLPLTQRLSIDNSKKGESQLRVRDSLRPDHGLYMIKVENDHGIAKAPCTVSVLDTPGPPINFVFEDIRKTSVLCKWEPPLDDGGSEIINYTLEKKDKTKPDSEWIVVTSTLRHCKYSVTKLIEGKEYLFRVRAENRFGPGPPCVSKPLVAKDPFGPPDAPDKPIVEDVTSNSMLVKWNEPKDNGSPILGYWLEKREVNSTHWSRVNKSLLNALKANVDGLLEGLTYVFRVCAENAAGPGKFSPPSDPKTAHDPISPPGPPIPRVTDTSSTTIELEWEPPAFNGGGEIVGYFVDKQLVGTNEWSRCTEKMIKVRQYTVKEIREGADYKLRVSAVNAAGEGPPGETQPVTVAEPQEPPAVELDVSVKGGIQIMAGKTLRIPAVVTGRPVPTKVWTKEEGELDKDRVVIDNVGTKSELIIKDALRKDHGRYVITATNSCGSKFAAARVEVFDVPGPVLDLKPVVTNRKMCLLNWSDPEDDGGSEITGFIIERKDAKMHTWRQPIETERSKCDITGLLEGQEYKFRVIAKNKFGCGPPVEIGPILAVDPLGPPTSPERLTYTERTKSTITLDWKEPRSNGGSPIQGYIIEKRRHDKPDFERVNKRLCPTTSFLVENLDEHQMYEFRVKAVNEIGESEPSLPLNVVIQDDEVPPTIKLRLSVRGDTIKVKAGEPVHIPADVTGLPMPKIEWSKNETVIEKPTDALQITKEEVSRSEAKTELSIPKAVREDKGTYTVTASNRLGSVFRNVHVEVYDRPSPPRNLAVTDIKAESCYLTWDAPLDNGGSEITHYVIDKRDASRKKAEWEEVTNTAVEKRYGIWKLIPNGQYEFRVRAVNKYGISDECKSDKVVIQDPYRLPGPPGKPKVLARTKGSMLVSWTPPLDNGGSPITGYWLEKREEGSPYWSRVSRAPITKVGLKGVEFNVPRLLEGVKYQFRAMAINAAGIGPPSEPSDPEVAGDPIFPPGPPSCPEVKDKTKSSISLGWKPPAKDGGSPIKGYIVEMQEEGTTDWKRVNEPDKLITTCECVVPNLKELRKYRFRVKAVNEAGESEPSDTTGEIPATDIQEEPEVFIDIGAQDCLVCKAGSQIRIPAVIKGRPTPKSSWEFDGKAKKAMKDGVHDIPEDAQLETAENSSVIIIPECKRSHTGKYSITAKNKAGQKTANCRVKVMDVPGPPKDLKVSDITRGSCRLSWKMPDDDGGDRIKGYVIEKRTIDGKAWTKVNPDCGSTTFVVPDLLSEQQYFFRVRAENRFGIGPPVETIQRTTARDPIYPPDPPIKLKIGLITKNTVHLSWKPPKNDGGSPVTHYIVECLAWDPTGTKKEAWRQCNKRDVEELQFTVEDLVEGGEYEFRVKAVNAAGVSKPSATVGPCDCQRPDMPPSIDLKEFMEVEEGTNVNIVAKIKGVPFPTLTWFKAPPKKPDNKEPVLYDTHVNKLVVDDTCTLVIPQSRRSDTGLYTITAVNNLGTASKEMRLNVLGRPGPPVGPIKFESVSADQMTLSWFPPKDDGGSKITNYVIEKREANRKTWVHVSSEPKECTYTIPKLLEGHEYVFRIMAQNKYGIGEPLDSEPETARNLFSVPGAPDKPTVSSVTRNSMTVNWEEPEYDGGSPVTGYWLEMKDTTSKRWKRVNRDPIKAMTLGVSYKVTGLIEGSDYQFRVYAINAAGVGPASLPSDPATARDPIAPPGPPFPKVTDWTKSSADLEWSPPLKDGGSKVTGYIVEYKEEGKEEWEKGKDKEVRGTKLVVTGLKEGAFYKFRVSAVNIAGIGEPGEVTDVIEMKDRLVSPDLQLDASVRDRIVVHAGGVIRIIAYVSGKPPPTVTWNMNERTLPQEATIETTAISSSMVIKNCQRSHQGVYSLLAKNEAGERKKTIIVDVLDVPGPVGTPFLAHNLTNESCKLTWFSPEDDGGSPITNYVIEKRESDRRAWTPVTYTVTRQNATVQGLIQGKAYFFRIAAENSIGMGPFVETSEALVIREPITVPERPEDLEVKEVTKNTVTLTWNPPKYDGGSEIINYVLESRLIGTEKFHKVTNDNLLSRKYTVKGLKEGDTYEYRVSAVNIVGQGKPSFCTKPITCKDELAPPTLHLDFRDKLTIRVGEAFALTGRYSGKPKPKVSWFKDEADVLEDDRTHIKTTPATLALEKIKAKRSDSGKYCVVVENSTGSRKGFCQVNVVDRPGPPVGPVSFDEVTKDYMVISWKPPLDDGGSKITNYIIEKKEVGKDVWMPVTSASAKTTCKVSKLLEGKDYIFRIHAENLYGISDPLVSDSMKAKDRFRVPDAPDQPIVTEVTKDSALVTWNKPHDGGKPITNYILEKRETMSKRWARVTKDPIHPYTKFRVPDLLEGCQYEFRVSAENEIGIGDPSPPSKPVFAKDPIAKPSPPVNPEAIDTTCNSVDLTWQPPRHDGGSKILGYIVEYQKVGDEEWRRANHTPESCPETKYKVTGLRDGQTYKFRVLAVNAAGESDPAHVPEPVLVKDRLEPPELILDANMAREQHIKVGDTLRLSAIIKGVPFPKVTWKKEDRDAPTKARIDVTPVGSKLEIRNAAHEDGGIYSLTVENPAGSKTVSVKVLVLDKPGPPRDLEVSEIRKDSCYLTWKEPLDDGGSVITNYVVERRDVASAQWSPLSATSKKKSHFAKHLNEGNQYLFRVAAENQYGRGPFVETPKPIKALDPLHPPGPPKDLHHVDVDKTEVSLVWNKPDRDGGSPITGYLVEYQEEGTQDWIKFKTVTNLECVVTGLQQGKTYRFRVKAENIVGLGLPDTTIPIECQEKLVPPSVELDVKLIEGLVVKAGTTVRFPAIIRGVPVPTAKWTTDGSEIKTDEHYTVETDNFSSVLTIKNCLRRDTGEYQITVSNAAGSKTVAVHLTVLDVPGPPTGPINILDVTPEHMTISWQPPKDDGGSPVINYIVEKQDTRKDTWGVVSSGSSKTKLKIPHLQKGCEYVFRVRAENKIGVGPPLDSTPTVAKHKFSPPSPPGKPVVTDITENAATVSWTLPKSDGGSPITGYYMERREVTGKWVRVNKTPIADLKFRVTGLYEGNTYEFRVFAENLAGLSKPSPSSDPIKACRPIKPPGPPINPKLKDKSRETADLVWTKPLSDGGSPILGYVVECQKPGTAQWNRINKDELIRQCAFRVPGLIEGNEYRFRIKAANIVGEGEPRELAESVIAKDILHPPEVELDVTCRDVITVRVGQTIRILARVKGRPEPDITWTKEGKVLVREKRVDLIQDLPRVELQIKEAVRADHGKYIISAKNSSGHAQGSAIVNVLDRPGPCQNLKVTNVTKENCTISWENPLDNGGSEITNFIVEYRKPNQKGWSIVASDVTKRLIKANLLANNEYYFRVCAENKVGVGPTIETKTPILAINPIDRPGEPENLHIADKGKTFVYLKWRRPDYDGGSPNLSYHVERRLKGSDDWERVHKGSIKETHYMVDRCVENQIYEFRVQTKNEGGESDWVKTEEVVVKEDLQKPVLDLKLSGVLTVKAGDTIRLEAGVRGKPFPEVAWTKDKDATDLTRSPRVKIDTRADSSKFSLTKAKRSDGGKYVVTATNTAGSFVAYATVNVLDKPGPVRNLKIVDVSSDRCTVCWDPPEDDGGCEIQNYILEKCETKRMVWSTYSATVLTPGTTVTRLIEGNEYIFRVRAENKIGTGPPTESKPVIAKTKYDKPGRPDPPEVTKVSKEEMTVVWNPPEYDGGKSITGYFLEKKEKHSTRWVPVNKSAIPERRMKVQNLLPDHEYQFRVKAENEIGIGEPSLPSRPVVAKDPIEPPGPPTNFRVVDTTKHSITLGWGKPVYDGGAPIIGYVVEMRPKIADASPDEGWKRCNAAAQLVRKEFTVTSLDENQEYEFRVCAQNQVGIGRPAELKEAIKPKEILEPPEIDLDASMRKLVIVRAGCPIRLFAIVRGRPAPKVTWRKVGIDNVVRKGQVDLVDTMAFLVIPNSTRDDSGKYSLTLVNPAGEKAVFVNVRVLDTPGPVSDLKVSDVTKTSCHVSWAPPENDGGSQVTHYIVEKREADRKTWSTVTPEVKKTSFHVTNLVPGNEYYFRVTAVNEYGPGVPTDVPKPVLASDPLSEPDPPRKLEVTEMTKNSATLAWLPPLRDGGAKIDGYITSYREEEQPADRWTEYSVVKDLSLVVTGLKEGKKYKFRVAARNAVGVSLPREAEGVYEAKEQLLPPKILMPEQITIKAGKKLRIEAHVYGKPHPTCKWKKGEDEVVTSSHLAVHKADSSSILIIKDVTRKDSGYYSLTAENSSGTDTQKIKVVVMDAPGPPQPPFDISDIDADACSLSWHIPLEDGGSNITNYIVEKCDVSRGDWVTALASVTKTSCRVGKLIPGQEYIFRVRAENRFGISEPLTSPKMVAQFPFGVPSEPKNARVTKVNKDCIFVAWDRPDSDGGSPIIGYLIERKERNSLLWVKANDTLVRSTEYPCAGLVEGLEYSFRIYALNKAGSSPPSKPTEYVTARMPVDPPGKPEVIDVTKSTVSLIWARPKHDGGSKIIGYFVEACKLPGDKWVRCNTAPHQIPQEEYTATGLEEKAQYQFRAIARTAVNISPPSEPSDPVTILAENVPPRIDLSVAMKSLLTVKAGTNVCLDATVFGKPMPTVSWKKDGTLLKPAEGIKMAMQRNLCTLELFSVNRKDSGDYTITAENSSGSKSATIKLKVLDKPGPPASVKINKMYSDRAMLSWEPPLEDGGSEITNYIVDKRETSRPNWAQVSATVPITSCSVEKLIEGHEYQFRICAENKYGVGDPVFTEPAIAKNPYDPPGRCDPPVISNITKDHMTVSWKPPADDGGSPITGYLLEKRETQAVNWTKVNRKPIIERTLKATGLQEGTEYEFRVTAINKAGPGKPSDASKAAYARDPQYPPAPPAFPKVYDTTRSSVSLSWGKPAYDGGSPIIGYLVEVKRADSDNWVRCNLPQNLQKTRFEVTGLMEDTQYQFRVYAVNKIGYSDPSDVPDKHYPKDILIPPEGELDADLRKTLILRAGVTMRLYVPVKGRPPPKITWSKPNVNLRDRIGLDIKSTDFDTFLRCENVNKYDAGKYILTLENSCGKKEYTIVVKVLDTPGPPVNVTVKEISKDSAYVTWEPPIIDGGSPIINYVVQKRDAERKSWSTVTTECSKTSFRVANLEEGKSYFFRVFAENEYGIGDPGETRDAVKASQTPGPVVDLKVRSVSKSSCSIGWKKPHSDGGSRIIGYVVDFLTEENKWQRVMKSLSLQYSAKDLTEGKEYTFRVSAENENGEGTPSEITVVARDDVVAPDLDLKGLPDLCYLAKENSNFRLKIPIKGKPAPSVSWKKGEDPLATDTRVSVESSAVNTTLIVYDCQKSDAGKYTITLKNVAGTKEGTISIKVVGKPGIPTGPIKFDEVTAEAMTLKWAPPKDDGGSEITNYILEKRDSVNNKWVTCASAVQKTTFRVTRLHEGMEYTFRVSAENKYGVGEGLKSEPIVARHPFDVPDAPPPPNIVDVRHDSVSLTWTDPKKTGGSPITGYHLEFKERNSLLWKRANKTPIRMRDFKVTGLTEGLEYEFRVMAINLAGVGKPSLPSEPVVALDPIDPPGKPEVINITRNSVTLIWTEPKYDGGHKLTGYIVEKRDLPSKSWMKANHVNVPECAFTVTDLVEGGKYEFRIRAKNTAGAISAPSESTETIICKDEYEAPTIVLDPTIKDGLTIKAGDTIVLNAISILGKPLPKSSWSKAGKDIRPSDITQITSTPTSSMLTIKYATRKDAGEYTITATNPFGTKVEHVKVTVLDVPGPPGPVEISNVSAEKATLTWTPPLEDGGSPIKSYILEKRETSRLLWTVVSEDIQSCRHVATKLIQGNEYIFRVSAVNHYGKGEPVQSEPVKMVDRFGPPGPPEKPEVSNVTKNTATVSWKRPVDDGGSEITGYHVERREKKSLRWVRAIKTPVSDLRCKVTGLQEGSTYEFRVSAENRAGIGPPSEASDSVLMKDAAYPPGPPSNPHVTDTTKKSASLAWGKPHYDGGLEITGYVVEHQKVGDEAWIKDTTGTALRITQFVVPDLQTKEKYNFRISAINDAGVGEPAVIPDVEIVEREMAPDFELDAELRRTLVVRAGLSIRIFVPIKGRPAPEVTWTKDNINLKNRANIENTESFTLLIIPECNRYDTGKFVMTIENPAGKKSGFVNVRVLDTPGPVLNLRPTDITKDSVTLHWDLPLIDGGSRITNYIVEKREATRKSYSTATTKCHKCTYKVTGLSEGCEYFFRVMAENEYGIGEPTETTEPVKASEAPSPPDSLNIMDITKSTVSLAWPKPKHDGGSKITGYVIEAQRKGSDQWTHITTVKGLECVVRNLTEGEEYTFQVMAVNSAGRSAPRESRPVIVKEQTMLPELDLRGIYQKLVIAKAGDNIKVEIPVLGRPKPTVTWKKGDQILKQTQRVNFETTATSTILNINECVRSDSGPYPLTARNIVGEVGDVITIQVHDIPGPPTGPIKFDEVSSDFVTFSWDPPENDGGVPISNYVVEMRQTDSTTWVELATTVIRTTYKATRLTTGLEYQFRVKAQNRYGVGPGITSACIVANYPFKVPGPPGTPQVTAVTKDSMTISWHEPLSDGGSPILGYHVERKERNGILWQTVSKALVPGNIFKSSGLTDGIAYEFRVIAENMAGKSKPSKPSEPMLALDPIDPPGKPVPLNITRHTVTLKWAKPEYTGGFKITSYIVEKRDLPNGRWLKANFSNILENEFTVSGLTEDAAYEFRVIAKNAAGAISPPSEPSDAITCRDDVEAPKIKVDVKFKDTVILKAGEAFRLEADVSGRPPPTMEWSKDGKELEGTAKLEIKIADFSTNLVNKDSTRRDSGAYTLTATNPGGFAKHIFNVKVLDRPGPPEGPLAVTEVTSEKCVLSWFPPLDDGGAKIDHYIVQKRETSRLAWTNVASEVQVTKLKVTKLLKGNEYIFRVMAVNKYGVGEPLESEPVLAVNPYGPPDPPKNPEVTTITKDSMVVCWGHPDSDGGSEIINYIVERRDKAGQRWIKCNKKTLTDLRYKVSGLTEGHEYEFRIMAENAAGISAPSPTSPFYKACDTVFKPGPPGNPRVLDTSRSSISIAWNKPIYDGGSEITGYMVEIALPEEDEWQIVTPPAGLKATSYTITGLTENQEYKIRIYAMNSEGLGEPALVPGTPKAEDRMLPPEIELDADLRKVVTIRACCTLRLFVPIKGRPAPEVKWARDHGESLDKASIESTSSYTLLIVGNVNRFDSGKYILTVENSSGSKSAFVNVRVLDTPGPPQDLKVKEVTKTSVTLTWDPPLLDGGSKIKNYIVEKRESTRKAYSTVATNCHKTSWKVDQLQEGCSYYFRVLAENEYGIGLPAETAESVKASERPLPPGKITLMDVTRNSVSLSWEKPEHDGGSRILGYIVEMQTKGSDKWATCATVKVTEATITGLIQGEEYSFRVSAQNEKGISDPRQLSVPVIAKDLVIPPAFKLLFNTFTVLAGEDLKVDVPFIGRPTPAVTWHKDNVPLKQTTRVNAESTENNSLLTIKDACREDVGHYVVKLTNSAGEAIETLNVIVLDKPGPPTGPVKMDEVTADSITLSWGPPKYDGGSSINNYIVEKRDTSTTTWQIVSATVARTTIKACRLKTGCEYQFRIAAENRYGKSTYLNSEPTVAQYPFKVPGPPGTPVVTLSSRDSMEVQWNEPISDGGSRVIGYHLERKERNSILWVKLNKTPIPQTKFKTTGLEEGVEYEFRVSAENIVGIGKPSKVSECYVARDPCDPPGRPEAIIVTRNSVTLQWKKPTYDGGSKITGYIVEKKELPEGRWMKASFTNIIDTHFEVTGLVEDHRYEFRVIARNAAGVFSEPSESTGAITARDEVDPPRISMDPKYKDTIVVHAGESFKVDADIYGKPIPTIQWIKGDQELSNTARLEIKSTDFATSLSVKDAVRVDSGNYILKAKNVAGERSVTVNVKVLDRPGPPEGPVVISGVTAEKCTLAWKPPLQDGGSDIINYIVERRETSRLVWTVVDANVQTLSCKVTKLLEGNEYTFRIMAVNKYGVGEPLESEPVVAKNPFVVPDAPKAPEVTTVTKDSMIVVWERPASDGGSEILGYVLEKRDKEGIRWTRCHKRLIGELRLRVTGLIENHDYEFRVSAENAAGLSEPSPPSAYQKACDPIYKPGPPNNPKVIDITRSSVFLSWSKPIYDGGCEIQGYIVEKCDVSVGEWTMCTPPTGINKTNIEVEKLLEKHEYNFRICAINKAGVGEHADVPGPIIVEEKLEAPDIDLDLELRKIINIRAGGSLRLFVPIKGRPTPEVKWGKVDGEIRDAAIIDVTSSFTSLVLDNVNRYDSGKYTLTLENSSGTKSAFVTVRVLDTPSPPVNLKVTEITKDSVSITWEPPLLDGGSKIKNYIVEKREATRKSYAAVVTNCHKNSWKIDQLQEGCSYYFRVTAENEYGIGLPAQTADPIKVAEVPQPPGKITVDDVTRNSVSLSWTKPEHDGGSKIIQYIVEMQAKHSEKWSECARVKSLQAVITNLTQGEEYLFRVVAVNEKGRSDPRSLAVPIVAKDLVIEPDVKPAFSSYSVQVGQDLKIEVPISGRPKPTITWTKDGLPLKQTTRINVTDSLDLTTLSIKETHKDDGGQYGITVANVVGQKTASIEIVTLDKPDPPKGPVKFDDVSAESITLSWNPPLYTGGCQITNYIVQKRDTTTTVWDVVSATVARTTLKVTKLKTGTEYQFRIFAENRYGQSFALESDPIVAQYPYKEPGPPGTPFATAISKDSMVIQWHEPVNNGGSPVIGYHLERKERNSILWTKVNKTIIHDTQFKAQNLEEGIEYEFRVYAENIVGVGKASKNSECYVARDPCDPPGTPEPIMVKRNEITLQWTKPVYDGGSMITGYIVEKRDLPDGRWMKASFTNVIETQFTVSGLTEDQRYEFRVIAKNAAGAISKPSDSTGPITAKDEVELPRISMDPKFRDTIVVNAGETFRLEADVHGKPLPTIEWLRGDKEIEESARCEIKNTDFKALLIVKDAIRIDGGQYILRASNVAGSKSFPVNVKVLDRPGPPEGPVQVTGVTSEKCSLTWSPPLQDGGSDISHYVVEKRETSRLAWTVVASEVVTNSLKVTKLLEGNEYVFRIMAVNKYGVGEPLESAPVLMKNPFVLPGPPKSLEVTNIAKDSMTVCWNRPDSDGGSEIIGYIVEKRDRSGIRWIKCNKRRITDLRLRVTGLTEDHEYEFRVSAENAAGVGEPSPATVYYKACDPVFKPGPPTNAHIVDTTKNSITLAWGKPIYDGGSEILGYVVEICKADEEEWQIVTPQTGLRVTRFEISKLTEHQEYKIRVCALNKVGLGEATSVPGTVKPEDKLEAPELDLDSELRKGIVVRAGGSARIHIPFKGRPTPEITWSREEGEFTDKVQIEKGVNYTQLSIDNCDRNDAGKYILKLENSSGSKSAFVTVKVLDTPGPPQNLAVKEVRKDSAFLVWEPPIIDGGAKVKNYVIDKRESTRKAYANVSSKCSKTSFKVENLTEGAIYYFRVMAENEFGVGVPVETVDAVKAAEPPSPPGKVTLTDVSQTSASLMWEKPEHDGGSRVLGYVVEMQPKGTEKWSIVAESKVCNAVVTGLSSGQEYQFRVKAYNEKGKSDPRVLGVPVIAKDLTIQPSLKLPFNTYSIQAGEDLKIEIPVIGRPRPNISWVKDGEPLKQTTRVNVEETATSTVLHIKEGNKDDFGKYTVTATNSAGTATENLSVIVLEKPGPPVGPVRFDEVSADFVVISWEPPAYTGGCQISNYIVEKRDTTTTTWHMVSATVARTTIKITKLKTGTEYQFRIFAENRYGKSAPLDSKAVIVQYPFKEPGPPGTPFVTSISKDQMLVQWHEPVNDGGTKIIGYHLEQKEKNSILWVKLNKTPIQDTKFKTTGLDEGLEYEFKVSAENIVGIGKPSKVSECFVARDPCDPPGRPEAIVITRNNVTLKWKKPAYDGGSKITGYIVEKKDLPDGRWMKASFTNVLETEFTVSGLVEDQRYEFRVIARNAAGNFSEPSDSSGAITARDEIDAPNASLDPKYKDVIVVHAGETFVLEADIRGKPIPDVVWSKDGKELEETAARMEIKSTIQKTTLVVKDCIRTDGGQYILKLSNVGGTKSIPITVKVLDRPGPPEGPLKVTGVTAEKCYLAWNPPLQDGGANISHYIIEKRETSRLSWTQVSTEVQALNYKVTKLLPGNEYIFRVMAVNKYGIGEPLESGPVTACNPYKPPGPPSTPEVSAITKDSMVVTWARPVDDGGTEIEGYILEKRDKEGVRWTKCNKKTLTDLRLRVTGLTEGHSYEFRVAAENAAGVGEPSEPSVFYRACDALYPPGPPSNPKVTDTSRSSVSLAWSKPIYDGGAPVKGYVVEVKEAAADEWTTCTPPTGLQGKQFTVTKLKENTEYNFRICAINSEGVGEPATLPGSVVAQERIEPPEIELDADLRKVVVLRASATLRLFVTIKGRPEPEVKWEKAEGILTDRAQIEVTSSFTMLVIDNVTRFDSGRYNLTLENNSGSKTAFVNVRVLDSPSAPVNLTIREVKKDSVTLSWEPPLIDGGAKITNYIVEKRETTRKAYATITNNCTKTTFRIENLQEGCSYYFRVLASNEYGIGLPAETTEPVKVSEPPLPPGRVTLVDVTRNTATIKWEKPESDGGSKITGYVVEMQTKGSEKWSTCTQVKTLEATISGLTAGEEYVFRVAAVNEKGRSDPRQLGVPVIARDIEIKPSVELPFHTFNVKAREQLKIDVPFKGRPQATVNWRKDGQTLKETTRVNVSSSKTVTSLSIKEASKEDVGTYELCVSNSAGSITVPITIIVLDRPGPPGPIRIDEVSCDSITISWNPPEYDGGCQISNYIVEKKETTSTTWHIVSQAVARTSIKIVRLTTGSEYQFRVCAENRYGKSSYSESSAVVAEYPFSPPGPPGTPKVVHATKSTMLVTWQVPVNDGGSRVIGYHLEYKERSSILWSKANKILIADTQMKVSGLDEGLMYEYRVYAENIAGIGKCSKSCEPVPARDPCDPPGQPEVTNITRKSVSLKWSKPHYDGGAKITGYIVERRELPDGRWLKCNYTNIQETYFEVTELTEDQRYEFRVFARNAADSVSEPSESTGPIIVKDDVEPPRVMMDVKFRDVIVVKAGEVLKINADIAGRPLPVISWAKDGIEIEERARTEIISTDNHTLLTVKDCIRRDTGQYVLTLKNVAGTRSVAVNCKVLDKPGPPAGPLEINGLTAEKCSLSWGRPQEDGGADIDYYIVEKRETSHLAWTICEGELQMTSCKVTKLLKGNEYIFRVTGVNKYGVGEPLESVAIKALDPFTVPSPPTSLEITSVTKESMTLCWSRPESDGGSEISGYIIERREKNSLRWVRVNKKPVYDLRVKSTGLREGCEYEYRVYAENAAGLSLPSETSPLIRAEDPVFLPSPPSKPKIVDSGKTTITIAWVKPLFDGGAPITGYTVEYKKSDDTDWKTSIQSLRGTEYTISGLTTGAEYVFRVKSVNKVGASDPSDSSDPQIAKEREEEPLFDIDSEMRKTLIVKAGASFTMTVPFRGRPVPNVLWSKPDTDLRTRAYVDTTDSRTSLTIENANRNDSGKYTLTIQNVLSAASLTLVVKVLDTPGPPTNITVQDVTKESAVLSWDVPENDGGAPVKNYHIEKREASKKAWVSVTNNCNRLSYKVTNLQEGAIYYFRVSGENEFGVGIPAETKEGVKITEKPSPPEKLGVTSISKDSVSLTWLKPEHDGGSRIVHYVVEALEKGQKNWVKCAVAKSTHHVVSGLRENSEYFFRVFAENQAGLSDPRELLLPVLIKEQLEPPEIDMKNFPSHTVYVRAGSNLKVDIPISGKPLPKVTLSRDGVPLKATMRFNTEITAENLTINLKESVTADAGRYEITAANSSGTTKAFINIVVLDRPGPPTGPVVISDITEESVTLKWEPPKYDGGSQVTNYILLKRETSTAVWTEVSATVARTMMKVMKLTTGEEYQFRIKAENRFGISDHIDSACVTVKLPYTTPGPPSTPWVTNVTRESITVGWHEPVSNGGSAVVGYHLEMKDRNSILWQKANKLVIRTTHFKVTTISAGLIYEFRVYAENAAGVGKPSHPSEPVLAIDACEPPRNVRITDISKNSVSLSWQQPAFDGGSKITGYIVERRDLPDGRWTKASFTNVTETQFIISGLTQNSQYEFRVFARNAVGSISNPSEVVGPITCIDSYGGPVIDLPLEYTEVVKYRAGTSVKLRAGISGKPAPTIEWYKDDKELQTNALVCVENTTDLASILIKDADRLNSGCYELKLRNAMGSASATIRVQILDKPGPPGGPIEFKTVTAEKITLLWRPPADDGGAKITHYIVEKRETSRVVWSMVSEHLEECIITTTKIIKGNEYIFRVRAVNKYGIGEPLESDSVVAKNAFVTPGPPGIPEVTKITKNSMTVVWSRPIADGGSDISGYFLEKRDKKSLGWFKVLKETIRDTRQKVTGLTENSDYQYRVCAVNAAGQGPFSEPSEFYKAADPIDPPGPPAKIRIADSTKSSITLGWSKPVYDGGSAVTGYVVEIRQGEEEEWTTVSTKGEVRTTEYVVSNLKPGVNYYFRVSAVNCAGQGEPIEMNEPVQAKDILEAPEIDLDVALRTSVIAKAGEDVQVLIPFKGRPPPTVTWRKDEKNLGSDARYSIENTDSSSLLTIPQVTRNDTGKYILTIENGVGEPKSSTVSVKVLDTPAACQKLQVKHVSRGTVTLLWDPPLIDGGSPIINYVIEKRDATKRTWSVVSHKCSSTSFKLIDLSEKTPFFFRVLAENEIGIGEPCETTEPVKAAEVPAPIRDLSMKDSTKTSVILSWTKPDFDGGSVITEYVVERKGKGEQTWSHAGISKTCEIEVSQLKEQSVLEFRVFAKNEKGLSDPVTIGPITVKELIITPEVDLSDIPGAQVTVRIGHNVHLELPYKGKPKPSISWLKDGLPLKESEFVRFSKTENKITLSIKNAKKEHGGKYTVILDNAVCRIAVPITVITLGPPSKPKGPIRFDEIKADSVILSWDVPEDNGGGEITCYSIEKRETSQTNWKMVCSSVARTTFKVPNLVKDAEYQFRVRAENRYGVSQPLVSSIIVAKHQFRIPGPPGKPVIYNVTSDGMSLTWDAPVYDGGSEVTGFHVEKKERNSILWQKVNTSPISGREYRATGLVEGLDYQFRVYAENSAGLSSPSDPSKFTLAVSPVDPPGTPDYIDVTRETITLKWNPPLRDGGSKIVGYSIEKRQGNERWVRCNFTDVSECQYTVTGLSPGDRYEFRIIARNAVGTISPPSQSSGIIMTRDENVPPIVEFGPEYFDGLIIKSGESLRIKALVQGRPVPRVTWFKDGVEIEKRMNMEITDVLGSTSLFVRDATRDHRGVYTVEAKNASGSAKAEIKVKVQDTPGKVVGPIRFTNITGEKMTLWWDAPLNDGCAPITHYIIEKRETSRLAWALIEDKCEAQSYTAIKLINGNEYQFRVSAVNKFGVGRPLDSDPVVAQIQYTVPDAPGIPEPSNITGNSITLTWARPESDGGSEIQQYILERREKKSTRWVKVISKRPISETRFKVTGLTEGNEYEFHVMAENAAGVGPASGISRLIKCREPVNPPGPPTVVKVTDTSKTTVSLEWSKPVFDGGMEIIGYIIEMCKADLGDWHKVNAEACVKTRYTVTDLQAGEEYKFRVSAINGAGKGDSCEVTGTIKAVDRLTAPELDIDANFKQTHVVRAGASIRLFIAYQGRPTPTAVWSKPDSNLSLRADIHTTDSFSTLTVENCNRNDAGKYTLTVENNSGSKSITFTVKVLDTPGPPGPITFKDVTRGSATLMWDAPLLDGGARIHHYVVEKREASRRSWQVISEKCTRQIFKVNDLAEGVPYYFRVSAVNEYGVGEPYEMPEPIVATEQPAPPRRLDVVDTSKSSAVLAWLKPDHDGGSRITGYLLEMRQKGSDFWVEAGHTKQLTFTVERLVEKTEYEFRVKAKNDAGYSEPREAFSSVIIKEPQIEPTADLTGITNQLITCKAGSPFTIDVPISGRPAPKVTWKLEEMRLKETDRVSITTTKDRTTLTVKDSMRGDSGRYFLTLENTAGVKTFSVTVVVIGRPGPVTGPIEVSSVSAESCVLSWGEPKDGGGTEITNYIVEKRESGTTAWQLVNSSVKRTQIKVTHLTKYMEYSFRVSSENRFGVSKPLESAPIIAEHPFVPPSAPTRPEVYHVSANAMSIRWEEPYHDGGSKIIGYWVEKKERNTILWVKENKVPCLECNYKVTGLVEGLEYQFRTYALNAAGVSKASEASRPIMAQNPVDAPGRPEVTDVTRSTVSLIWSAPAYDGGSKVVGYIIERKPVSEVGDGRWLKCNYTIVSDNFFTVTALSEGDTYEFRVLAKNAAGVISKGSESTGPVTCRDEYAPPKAELDARLHGDLVTIRAGSDLVLDAAVGGKPEPKIIWTKGDKELDLCEKVSLQYTGKRATAVIKFCDRSDSGKYTLTVKNASGTKAVSVMVKVLDSPGPCGKLTVSRVTQEKCTLAWSLPQEDGGAEITHYIVERRETSRLNWVIVEGECPTLSYVVTRLIKNNEYIFRVRAVNKYGPGVPVESEPIVARNSFTIPSPPGIPEEVGTGKEHIIIQWTKPESDGGNEISNYLVDKREKKSLRWTRVNKDYVVYDTRLKVTSLMEGCDYQFRVTAVNAAGNSEPSEASNFISCREPSYTPGPPSAPRVVDTTKHSISLAWTKPMYDGGTDIVGYVLEMQEKDTDQWYRVHTNATIRNTEFTVPDLKMGQKYSFRVAAVNVKGMSEYSESIAEIEPVERIEIPDLELADDLKKTVTIRAGASLRLMVSVSGRPPPVITWSKQGIDLASRAIIDTTESYSLLIVDKVNRYDAGKYTIEAENQSGKKSATVLVKVYDTPGPCPSVKVKEVSRDSVTITWEIPTIDGGAPVNNYIVEKREAAMRAFKTVTTKCSKTLYRISGLVEGTMYYFRVLPENIYGIGEPCETSDAVLVSEVPLVPAKLEVVDVTKSTVTLAWEKPLYDGGSRLTGYVLEACKAGTERWMKVVTLKPTVLEHTVTSLNEGEQYLFRIRAQNEKGVSEPRETVTAVTVQDLRVLPTIDLSTMPQKTIHVPAGRPVELVIPIAGRPPPAASWFFAGSKLRESERVTVETHTKVAKLTIRETTIRDTGEYTLELKNVTGTTSETIKVIILDKPGPPTGPIKIDEIDATSITISWEPPELDGGAPLSGYVVEQRDAHRPGWLPVSESVTRSTFKFTRLTEGNEYVFRVAATNRFGIGSYLQSEVIECRSSIRIPGPPETLQIFDVSRDGMTLTWYPPEDDGGSQVTGYIVERKEVRADRWVRVNKVPVTMTRYRSTGLTEGLEYEHRVTAINARGSGKPSRPSKPIVAMDPIAPPGKPQNPRVTDTTRTSVSLAWSVPEDEGGSKVTGYLIEMQKVDQHEWTKCNTTPTKIREYTLTHLPQGAEYRFRVLACNAGGPGEPAEVPGTVKVTEMLEYPDYELDERYQEGIFVRQGGVIRLTIPIKGKPFPICKWTKEGQDISKRAMIATSETHTELVIKEADRGDSGTYDLVLENKCGKKAVYIKVRVIGSPNSPEGPLEYDDIQVRSVRVSWRPPADDGGADILGYILERREVPKAAWYTIDSRVRGTSLVVKGLKENVEYHFRVSAENQFGISKPLKSEEPVTPKTPLNPPEPPSNPPEVLDVTKSSVSLSWSRPKDDGGSRVTGYYIERKETSTDKWVRHNKTQITTTMYTVTGLVPDAEYQFRIIAQNDVGLSETSPASEPVVCKDPFDKPSQPGELEILSISKDSVTLQWEKPECDGGKEILGYWVEYRQSGDSAWKKSNKERIKDKQFTIGGLLEATEYEFRVFAENETGLSRPRRTAMSIKTKLTSGEAPGIRKEMKDVTTKLGEAAQLSCQIVGRPLPDIKWYRFGKELIQSRKYKMSSDGRTHTLTVMTEEQEDEGVYTCIATNEVGEVETSSKLLLQATPQFHPGYPLKEKYYGAVGSTLRLHVMYIGRPVPAMTWFHGQKLLQNSENITIENTEHYTHLVMKNVQRKTHAGKYKVQLSNVFGTVDAILDVEIQDKPDKPTGPIVIEALLKNSAVISWKPPADDGGSWITNYVVEKCEAKEGAEWQLVSSAISVTTCRIVNLTENAGYYFRVSAQNTFGISDPLEVSSVVIIKSPFEKPGAPGKPTITAVTKDSCVVAWKPPASDGGAKIRNYYLEKREKKQNKWISVTTEEIRETVFSVKNLIEGLEYEFRVKCENLGGESEWSEISEPITPKSDVPIQAPHFKEELRNLNVRYQSNATLVCKVTGHPKPIVKWYRQGKEIIADGLKYRIQEFKGGYHQLIIASVTDDDATVYQVRATNQGGSVSGTASLEVEVPAKIHLPKTLEGMGAVHALRGEVVSIKIPFSGKPDPVITWQKGQDLIDNNGHYQVIVTRSFTSLVFPNGVERKDAGFYVVCAKNRFGIDQKTVELDVADVPDPPRGVKVSDVSRDSVNLTWTEPASDGGSKITNYIVEKCATTAERWLRVGQARETRYTVINLFGKTSYQFRVIAENKFGLSKPSEPSEPTITKEDKTRAMNYDEEVDETREVSMTKASHSSTKELYEKYMIAEDLGRGEFGIVHRCVETSSKKTYMAKFVKVKGTDQVLVKKEISILNIARHRNILHLHESFESMEELVMIFEFISGLDIFERINTSAFELNEREIVSYVHQVCEALQFLHSHNIGHFDIRPENIIYQTRRSSTIKIIEFGQARQLKPGDNFRLLFTAPEYYAPEVHQHDVVSTATDMWSLGTLVYVLLSGINPFLAETNQQIIENIMNAEYTFDEEAFKEISIEAMDFVDRLLVKERKSRMTASEALQHPWLKQKIERVSTKVIRTLKHRRYYHTLIKKDLNMVVSAARISCGGAIRSQKGVSVAKVKVASIEIGPVSGQIMHAVGEEGGHVKYVCKIENYDQSTQVTWYFGVRQLENSEKYEITYEDGVAILYVKDITKLDDGTYRCKVVNDYGEDSSYAELFVKGVREVYDYYCRRTMKKIKRRTDTMRLLERPPEFTLPLYNKTAYVGENVRFGVTITVHPEPHVTWYKSGQKIKPGDNDKKYTFESDKGLYQLTINSVTTDDDAEYTVVARNKYGEDSCKAKLTVTLHPPPTDSTLRPMFKRLLANAECQEGQSVCFEIRVSGIPPPTLKWEKDGQPLSLGPNIEIIHEGLDYYALHIRDTLPEDTGYYRVTATNTAGSTSCQAHLQVERLRYKKQEFKSKEEHERHVQKQIDKTLRMAEILSGTESVPLTQVAKEALREAAVLYKPAVSTKTVKGEFRLEIEEKKEERKLRMPYDVPEPRKYKQTTIEEDQRIKQFVPMSDMKWYKKIRDQYEMPGKLDRVVQKRPKRIRLSRWEQFYVMPLPRITDQYRPKWRIPKLSQDDLEIVRPARRRTPSPDYDFYYRPRRRSLGDISDEELLLPIDDYLAMKRTEEERLRLEEELELGFSASPPSRSPPHFELSSLRYSSPQAHVKVEETRKDFRYSTYHIPTKAEASTSYAELRERHAQAAYRQPKQRQRIMAEREDEELLRPVTTTQHLSEYKSELDFMSKEEKSRKKSRRQREVTEITEIEEEYEISKHAQRESSSSASRLLRRRRSLSPTYIELMRPVSELIRSRPQPAEEYEDDTERRSPTPERTRPRSPSPVSSERSLSRFERSARFDIFSRYESMKAALKTQKTSERKYEVLSQQPFTLDHAPRITLRMRSHRVPCGQNTRFILNVQSKPTAEVKWYHNGVELQESSKIHYTNTSGVLTLEILDCHTDDSGTYRAVCTNYKGEASDYATLDVTGGDYTTYASQRRDEEVPRSVFPELTRTEAYAVSSFKKTSEMEASSSVREVKSQMTETRESLSSYEHSASAEMKSAALEEKSLEEKSTTRKIKTTLAARILTKPRSMTVYEGESARFSCDTDGEPVPTVTWLRKGQVLSTSARHQVTTTKYKSTFEISSVQASDEGNYSVVVENSEGKQEAEFTLTIQKARVTEKAVTSPPRVKSPEPRVKSPEAVKSPKRVKSPEPSHPKAVSPTETKPTPTEKVQHLPVSAPPKITQFLKAEASKEIAKLTCVVESSVLRAKEVTWYKDGKKLKENGHFQFHYSADGTYELKINNLTESDQGEYVCEISGEGGTSKTNLQFMGQAFKSIHEKVSKISETKKSDQKTTESTVTRKTEPKAPEPISSKPVIVTGLQDTTVSSDSVAKFAVKATGEPRPTAIWTKDGKAITQGGKYKLSEDKGGFFLEIHKTDTSDSGLYTCTVKNSAGSVSSSCKLTIKAIKDTEAQKVSTQKTSEITPQKKAVVQEEISQKALRSEEIKMSEAKSQEKLALKEEASKVLISEEVKKSAATSLEKSIVHEEITKTSQASEEVRTHAEIKAFSTQMSINEGQRLVLKANIAGATDVKWVLNGVELTNSEEYRYGVSGSDQTLTIKQASHRDEGILTCISKTKEGIVKCQYDLTLSKELSDAPAFISQPRSQNINEGQNVLFTCEISGEPSPEIEWFKNNLPISISSNVSISRSRNVYSLEIRNASVSDSGKYTIKAKNFRGQCSATASLMVLPLVEEPSREVVLRTSGDTSLQGSFSSQSVQMSASKQEASFSSFSSSSASSMTEMKFASMSAQSMSSMQESFVEMSSSSFMGISNMTQLESSTSKMLKAGIRGIPPKIEALPSDISIDEGKVLTVACAFTGEPTPEVTWSCGGRKIHSQEQGRFHIENTDDLTTLIIMDVQKQDGGLYTLSLGNEFGSDSATVNIHIRSI

SEQ ID NO: 7666 - protein, 27118 aa, Homo sapiens
MTTQAPTFTQPLQSVVVLEGSTATFEAHISGFPVPEVSWFRDGQVISTSTLPGVQISFSDGRAKLTIPAVTKANSGRYSLKATNGSGQATSTAELLVKAETAPPNFVQRLQSMTVRQGSQVRLQVRVTGIPTPVVKFYRDGAEIQSSLDFQISQEGDLYSLLIAEAYPEDSGTYSVNATNSVGRATSTAELLVQGEEEVPAKKTKTIVSTAQISESRQTRIEKKIEAHFDARSIATVEMVIDGAAGQQLPHKTPPRIPPKPKSRSPTPPSIAAKAQLARQQSPSPIRHSPSPVRHVRAPTPSPVRSVSPAARISTSPIRSVRSPLLMRKTQASTVATGPEVPPPWKQEGYVASSSEAEMRETTLTTSTQIRTEERWEGRYGVQEQVTISGAAGAAASVSASASYAAEAVATGAKEVKQDADKSAAVATVVAAVDMARVREPVISAVEQTAQRTTTTAVHIQPAQEQVRKEAEKTAVTKVVVAADKAKEQELKSRTKEVITTKQEQMHVTHEQIRKETEKTFVPKVVISAAKAKEQETRISEEITKKQKQVTQEAIMKETRKTVVPKVIVATPKVKEQDLVSRGREGITTKREQVQITQEKMRKEAEKTALSTIAVATAKAKEQETILRTRETMATRQEQIQVTHGKVDVGKKAEAVATVVAAVDQARVREPREPGHLEESYAQQTTLEYGYKERISAAKVAEPPQRPASEPHVVPKAVKPRVIQAPSETHIKTTDQKGMHISSQIKKTTDLTTERLVHVDKRPRTASPHFTVSKISVPKTEHGYEASIAGSAIATLQKELSATSSAQKITKSVKAPTVKPSETRVRAEPTPLPQFPFADTPDTYKSEAGVEVKKEVGVSITGTTVREERFEVLHGREAKVTETARVPAPVEIPVTPPTLVSGLKNVTVIEGESVTLECHISGYPSPTVTWYREDYQIESSIDFQITFQSGIARLMIREAFAEDSGRFTCSAVNEAGTVSTSCYLAVQVSEEFEKETTAVTEKFTTEEKRFVESRDVVMTDTSLTEEQAGPGEPAAPYFITKPVVQKLVEGGSVVFGCQVGGNPKPHVYWKKSGVPLTTGYRYKVSYNKQTGECKLVISMTFADDAGEYTIVVRNKHGETSASASLLEEADYELLMKSQQEMLYQTQVTAFVQEPKVGETAPGFVYSEYEKEYEKEQALIRKKMAKDTVVVRTYVEDQEFHISSFEERLIKEIEYRIIKTTLEELLEEDGEEKMAVDISESEAVESGFDLRIKNYRILEGMGVTFHCKMSGYPLPKIAWYKDGKRIKHGERYQMDFLQDGRASLRIPVVLPEDEGIYTAFASNIKGNAICSGKLYVEPAAPLGAPTYIPTLEPVSRIRSLSPRSVSRSPIRMSPARMSPARMSPARMSPARMSPGRRLEETDESQLERLYKPVFVLKPVSFKCLEGQTARFDLKVVGRPMPETFWFHDGQQIVNDYTHKVVIKEDGTQSLIIVPATPSDSGEWTVVAQNRAGRSSISVILTVEAVEHQVKPMFVEKLKNVNIKEGSRLEMKVRATGNPNPDIVWLKNSDIIVPHKYPKIRIEGTKGEAALKIDSTVSQDSAWYTATAINKAGRDTTRCKVNVEVEFAEPEPERKLIIPRGTYRAKEIAAPELEPLHLRYGQEQWEEGDLYDKEKQQKPFFKKKLTSLRLKRFGPAHFECRLTPIGDPTMVVEWLHDGKPLEAANRLRMINEFGYCSLDYGVAYSRDSGIITCRATNKYGTDHTSATLIVKDEKSLVEESQLPEGRKGLQRIEELERMAHEGALTGVTTDQKEKQKPDIVLYPEPVRVLEGETARFRCRVTGYPQPKVNWYLNGQLIRKSKRFRVRYDGIHYLDIVDCKSYDTGEVKVTAENPEGVIEHKVKLEIQQREDFRSVLRRAPEPRPEFHVHEPGKLQFEVQKVDRPVDTTETKEVVKLKRAERITHEKVPEESEELRSKFKRRTEEGYYEAITAVELKSRKKDESYEELLRKTKDELLHWTKELTEEEKKALAEEGKITIPTFKPDKIELSPSMEAPKIFERIQSQTVGQGSDAHFRVRVVGKPDPECEWYKNGVKIERSDRIYWYWPEDNVCELVIRDVTAEDSASIMVKAINIAGETSSHAFLLVQAKQLITFTQELQDVVAKEKDTMATFECETSEPFVKVKWYKDGMEVHEGDKYRMHSDRKVHFLSILTIDTSDAEDYSCVLVEDENVKTTAKLIVEGAVVEFVKELQDIEVPESYSGELECIVSPENIEGKWYHNDVELKSNGKYTITSRRGRQNLTVKDVTKEDQGEYSFVIDGKKTTCKLKMKPRPIAILQGLSDQKVCEGDIVQLEVKVSLESVEGVWMKDGQEVQPSDRVHIVIDKQSHMLLIEDMTKEDAGNYSFTIPALGLSTSGRVSVYSVDVITPLKDVNVIEGTKAVLECKVSVPDVTSVKWYLNDEQIKPDDRVQAIVKGTKQRLVINRTHASDEGPYKLIVGRVETNCNLSVEKIKIIRGLRDLTCTETQNVVFEVELSHSGIDVLWNFKDKEIKPSSKYKIEAHGKIYKLTVLNMMKDDEGKYTFYAGENITSGKLTVAGGAISKPLTDQTVAESQEAVFECEVANPDSKGEWLRDGKHLPLTNNIRSESDGHKRRLIIAATKLDDIGEYTYKVATSKTSAKLKVEAVKIKKTLKNLTVTETQDAVFTVELTHPNVKGVQWIKNGVVLESNEKYAISVKGTIYSLRIKNCAIVDESVYGFRLGRLGASARLHVETVKIIKKPKDVTALENATVAFEVSVSHDTVPVKWFHKSVEIKPSDKHRLVSERKVHKLMLQNISPSDAGEYTAVVGQLECKAKLFVETLHITKTMKNIEVPETKTASFECEVSHFNVPSMWLKNGVEIEMSEKFKIVVQGKLHQLIIMNTSTEDSAEYTFVCGNDQVSATLTVTPIMITSMLKDINAEEKDTITFEVTVNYEGISYKWLKNGVEIKSTDKCQMRTKKLTHSLNIRNVHFGDAADYTFVAGKATSTATLYVEARHIEFRKHIKDIKVLEKKRAMFECEVSEPDITVQWMKDDQELQITDRIKIQKEKYVHRLLIPSTRMSDAGKYTVVAGGNVSTAKLFVEGRDVRIRSIKKEVQVIEKQRAVVEFEVNEDDVDAHWYKDGIEINFQVQERHKYVVERRIHRMFISETRQSDAGEYTFVAGRNRSSVTLYVNAPEPPQVLQELQPVTVQSGKPARFCAVISGRPQPKISWYKEEQLLSTGFKCKFLHDGQEYTLLLIEAFPEDAAVYTCEAKNDYGVATTSASLSVEVPEVVSPDQEMPVYPPAIITPLQDTVTSEGQPARFQCRVSGTDLKVSWYSKDKKIKPSRFFRMTQFEDTYQLEIAEAYPEDEGTYTFVASNAVGQVSSTANLSLEVQALDRQSSGKDVRESTKSQAVADSSFTKEESKISQKEIKSFQGSSYEYEVQVFESVSQSSIHTAASVQDTQLCHTASLSQIAESTELSKECAKESTGEAPKIFLHLQDVTVKCGDTAQFLCVLKDDSFIDVTWTHEGAKIEESERLKQSQNGNIQFLTICNVQLVDQGLYSCIVHNDCGERTTSAVLSVEGAPESILHERIEQEIEMEMKEFSSSFLSAEEEGLHSAELQLSKINETLELLSESPVYSTKFDSEKEGTGPIFIKEVSNADISMGDVATLSVTVIGIPKPKIQWFFNGVLLTPSADYKFVFDGDDHSLIILFTKLEDEGEYTCMASNDYGKTICSAYLKINSKGEGHKDTETESAVAKSLEKLGGPCPPHFLKELKPIRCAQGLPAIFEYTVVGEPAPTVTWFKENKQLCTSVYYTIIHNPNGSGTFIVNDPQREDSGLYICKAENMLGESTCAAELLVLLEDTDMTDTPCKAKSTPEAPEDFPQTPLKGPAVEALDSEQEIATFVKDTILKAALITEENQQLSYEHIAKANELSSQLPLGAQELQSILEQDKLTPESTREFLCINGSIHFQPLKEPSPNLQLQIVQSQKTFSKEGILMPEEPETQAVLSDTEKIFPSAMSIEQINSLTVEPLKTLLAEPEGNYPQSSIEPPMHSYLTSVAEEVLSPKEKTVSDTNREQRVTLQKQEAQSALILSQSLAEGHVESLQSPDVMISQVNYEPLVPSEHSCTEGGKILIESANPLENAGQDSAVRIEEGKSLRFPLALEEKQVLLKEEHSDNVVMPPDQIIESKREPVAIKKVQEVQGRDLLSKESLLSGIPEEQRLNLKIQICRALQAAVASEQPGLFSEWLRNIEKVEVEAVNITQEPRHIMCMYLVTSAKSVTEEVTIIIEDVDPQMANLKMELRDALCAIIYEEIDILTAEGPRIQQGAKTSLQEEMDSFSGSQKVEPITEPEVESKYLISTEEVSYFNVQSRVKYLDATPVTKGVASAVVSDEKQDESLKPSEEKEESSSESGTEEVATVKIQEAEGGLIKEDGPMIHTPLVDTVSEEGDIVHLTTSITNAKEVNWYFENKLVPSDEKFKCLQDQNTYTLVIDKVNTEDHQGEYVCEALNDSGKTATSAKLTVVKRAAPVIKRKIEPLEVALGHLAKFTCEIQSAPNVRFQWFKAGREIYESDKCSIRSSKYISSLEILRTQVVDCGEYTCKASNEYGSVSCTATLTVTVPGGEKKVRKLLPERKPEPKEEVVLKSVLRKRPEEEEPKVEPKKLEKVKKPAVPEPPPPKPVEEVEVPTVTKRERKIPEPTKVPEIKPAIPLPAPEPKPKPEAEVKTIKPPPVEPEPTPIAAPVTVPVVGKKAEAKAPKEEAAKPKGPIKGVPKKTPSPIEAERRKLRPGSGGEKPPDEAPFTYQLKAVPLKFVKEIKDIILTESEFVGSSAIFECLVSPSTAITTWMKDGSNIRESPKHRFIADGKDRKLHIIDVQLSDAGEYTCVLRLGNKEKTSTAKLVVEELPVRFVKTLEEEVTVVKGQPLYLSCELNKERDVVWRKDGKIVVEKPGRIVPGVIGLMRALTINDADDTDAGTYTVTVENANNLECSSCVKVVEVIRDWLVKPIRDQHVKPKGTAIFACDIAKDTPNIKWFKGYDEIPAEPNDKTEILRDGNHLYLKIKNAMPEDIAEYAVEIEGKRYPAKLTLGEREVELLKPIEDVTIYEKESASFDAEISEADIPGQWKLKGELLRPSPTCEIKAEGGKRFLTLHKVKLDQAGEVLYQALNAITTAILTVKEIELDFAVPLKDVTVPERRQARFECVLTREANVIWSKGPDIIKSSDKFDIIADGKKHILVINDSQFDDEGVYTAEVEGKKTSARLFVTGIRLKFMSPLEDQTVKEGETATFVCELSHEKMHVVWFKNDAKLHTSRTVLISSEGKTHKLEMKEVTLDDISQIKAQVKELSSTAQLKVLEADPYFTVKLHDKTAVEKDEITLKCEVSKDVPVKWFKDGEEIVPSPKYSIKADGLRRILKIKKADLKDKGEYVCDCGTDKTKANVTVEARLIKVEKPLYGVEVFVGETAHFEIELSEPDVHGQWKLKGQPLTASPDCEIIEDGKKHILILHNCQLGMTGEVSFQAANAKSAANLKVKELPLIFITPLSDVKVFEKDEAKFECEVSREPKTFRWLKGTQEITGDDRFELIKDGTKHSMVIKSAAFEDEAKYMFEAEDKHTSGKLIIEGIRLKFLTPLKDVTAKEKESAVFTVELSHDNIRVKWFKNDQRLHTTRSVSMQDEGKTHSITFKDLSIDDTSQIRVEAMGMSSEAKLTVLEGDPYFTGKLQDYTGVEKDEVILQCEISKADAPVKWFKDGKEIKPSKNAVIKADGKKRMLILKKALKSDIGQYTCDCGTDKTSGKLDIEDREIKLVRPLHSVEVMETETARFETEISEDDIHANWKLKGEALLQTPDCEIKEEGKIHSLVLHNCRLDQTGGVDFQAANVKSSAHLRVKPRVIGLLRPLKDVTVTAGETATFDCELSYEDIPVEWYLKGKKLEPSDKVVPRSEGKVHTLTLRDVKLEDAGEVQLTAKDFKTHANLFVKEPPVEFTKPLEDQTVEEGATAVLECEVSRENAKVKWFKNGTEILKSKKYEIVADGRVRKLVIHDCTPEDIKTYTCDAKDFKTSCNLNVVPPHVEFLRPLTDLQVREKEMARFECELSRENAKVKWFKDGAEIKKGKKYDIISKGAVRILVINKCLLDDEAEYSCEVRTARTSGMLTVLEEEAVFTKNLANIEVSETDTIKLVCEVSKPGAEVIWYKGDEEIIETGRYEILTEGRKRILVIQNAHLEDAGNYNCRLPSSRTDGKVKVHELAAEFISKPQNLEILEGEKAEFVCSISKESFPVQWKRDDKTLESGDKYDVIADGKKRVLVVKDATLQDMGTYVVMVGAARAAAHLTVIEKLRIVVPLKDTRVKEQQEVVFNCEVNTEGAKAKWFRNEEAIFDSSKYIILQKDLVYTLRIRDAHLDDQANYNVSLTNHRGENVKSAANLIVEEEDLRIVEPLKDIETMEKKSVTFWCKVNRLNVTLKWTKNGEEVPFDNRVSYRVDKYKHMLTIKDCGFPDEGEYIVTAGQDKSVAELLIIEAPTEFVEHLEDQTVTEFDDAVFSCQLSREKANVKWYRNGREIKEGKKYKFEKDGSIHRLIIKDCRLDDECEYACGVEDRKSRARLFVEEIPVEIIRPPQDILEAPGADVVFLAELNKDKVEVQWLRNNMVVVQGDKHQMMSEGKIHRLQICDIKPRDQGEYRFIAKDKEARAKLELAAAPKIKTADQDLVVDVGKPLTMVVPYDAYPKAEAEWFKENEPLSTKTIDTTAEQTSFRILEAKKGDKGRYKIVLQNKHGKAEGFINLKVIDVPGPVRNLEVTETFDGEVSLAWEEPLTDGGSKIIGYVVERRDIKRKTWVLATDRAESCEFTVTGLQKGGVEYLFRVSARNRVGTGEPVETDNPVEARSKYDVPGPPLNVTITDVNRFGVSLTWEPPEYDGGAEITNYVIELRDKTSIRWDTAMTVRAEDLSATVTDVVEGQEYSFRVRAQNRIGVGKPSAATPFVKVADPIERPSPPVNLTSSDQTQSSVQLKWEPPLKDGGSPILGYIIERCEEGKDNWIRCNMKLVPELTYKVTGLEKGNKYLYRVSAENKAGVSDPSEILGPLTADDAFVEPTMDLSAFKDGLEVIVPNPITILVPSTGYPRPTATWCFGDKVLETGDRVKMKTLSAYAELVISPSERSDKGIYTLKLENRVKTISGEIDVNVIARPSAPKELKFGDITKDSVHLTWEPPDDDGGSPLTGYVVEKREVSRKTWTKVMDFVTDLEFTVPDLVQGKEYLFKVCARNKCGPGEPAYVDEPVNMSTPATVPDPPENVKWRDRTANSIFLTWDPPKNDGGSRIKGYIVERCPRGSDKWVACGEPVAETKMEVTGLEEGKWYAYRVKALNRQGASKPSRPTEEIQAVDTQEAPEIFLDVKLLAGLTVKAGTKIELPATVTGKPEPKITWTKADMILKQDKRITIENVPKKSTVTIVDSKRSDTGTYIIEAVNVCGRATAVVEVNVLDKPGPPAAFDITDVTNESCLLTWNPPRDDGGSKITNYVVERRATDSEVWHKLSSTVKDTNFKATKLIPNKEYIFRVAAENMYGVGEPVQASPITAKYQFDPPGPPTRLEPSDITKDAVTLTWCEPDDDGGSPITGYWVERLDPDTDKWVRCNKMPVKDTTYRVKGLTNKKKYRFRVLAENLAGPGKPSKSTEPILIKDPIDPPWPPGKPTVKDVGKTSVRLNWTKPEHDGGAKIESYVIEMLKTGTDEWVRVAEGVPTTQHLLPGLMEGQEYSFRVRAVNKAGESEPSEPSDPVLCREKLYPPSPPRWLEVINITKNTADLKWTVPEKDGGSPITNYIVEKRDVRRKGWQTVDTTVKDTKCTVTPLTEGSLYVFRVAAENAIGQSDYTEIEDSVLAKDTFTTPGPPYALAVVDVTKRHVDLKWEPPKNDGGRPIQRYVIEKKERLGTRWVKAGKTAGPDCNFRVTDVIEGTEVQFQVRAENEAGVGHPSEPTEILSIEDPTSPPSPPLDLHVTDAGRKHIAIAWKPPEKNGGSPIIGYHVEMCPVGTEKWMRVNSRPIKDLKFKVEEGVVPDKEYVLRVRAVNAIGVSEPSEISENVVAKDPDCKPTIDLETHDIIVIEGEKLSIPVPFRAVPVPTVSWHKDGKEVKASDRLTMKNDHISAHLEVPKSVRADAGIYTITLENKLGSATASINVKVIGLPGPCKDIKASDITKSSCKLTWEPPEFDGGTPILHYVLERREAGRRTYIPVMSGENKLSWTVKDLIPNGEYFFRVKAVNKVGGGEYIELKNPVIAQDPKQPPDPPVDVEVHNPTAEAMTITWKPPLYDGGSKIMGYIIEKIAKGEERWKRCNEHLVPILTYTAKGLEEGKEYQFRVRAENAAGISEPSRATPPTKAVDPIDAPKVILRTSLEVKRGDEIALDASISGSPYPTITWIKDENVIVPEEIKKRAAPLVRRRKGEVQEEEPFVLPLTQRLSIDNSKKGESQLRVRDSLRPDHGLYMIKVENDHGIAKAPCTVSVLDTPGPPINFVFEDIRKTSVLCKWEPPLDDGGSEIINYTLEKKDKTKPDSEWIVVTSTLRHCKYSVTKLIEGKEYLFRVRAENRFGPGPPCVSKPLVAKDPFGPPDAPDKPIVEDVTSNSMLVKWNEPKDNGSPILGYWLEKREVNSTHWSRVNKSLLNALKANVDGLLEGLTYVFRVCAENAAGPGKFSPPSDPKTAHDPISPPGPPIPRVTDTSSTTIELEWEPPAFNGGGEIVGYFVDKQLVGTNEWSRCTEKMIKVRQYTVKEIREGADYKLRVSAVNAAGEGPPGETQPVTVAEPQEPPAVELDVSVKGGIQIMAGKTLRIPAVVTGRPVPTKVWTKEEGELDKDRVVIDNVGTKSELIIKDALRKDHGRYVITATNSCGSKFAAARVEVFDVPGPVLDLKPVVTNRKMCLLNWSDPEDDGGSEITGFIIERKDAKMHTWRQPIETERSKCDITGLLEGQEYKFRVIAKNKFGCGPPVEIGPILAVDPLGPPTSPERLTYTERTKSTITLDWKEPRSNGGSPIQGYIIEKRRHDKPDFERVNKRLCPTTSFLVENLDEHQMYEFRVKAVNEIGESEPSLPLNVVIQDDEVPPTIKLRLSVRGDTIKVKAGEPVHIPADVTGLPMPKIEWSKNETVIEKPTDALQITKEEVSRSEAKTELSIPKAVREDKGTYTVTASNRLGSVFRNVHVEVYDRPSPPRNLAVTDIKAESCYLTWDAPLDNGGSEITHYVIDKRDASRKKAEWEEVTNTAVEKRYGIWKLIPNGQYEFRVRAVNKYGISDECKSDKVVIQDPYRLPGPPGKPKVLARTKGSMLVSWTPPLDNGGSPITGYWLEKREEGSPYWSRVSRAPITKVGLKGVEFNVPRLLEGVKYQFRAMAINAAGIGPPSEPSDPEVAGDPIFPPGPPSCPEVKDKTKSSISLGWKPPAKDGGSPIKGYIVEMQEEGTTDWKRVNEPDKLITTCECVVPNLKELRKYRFRVKAVNEAGESEPSDTTGEIPATDIQEEPEVFIDIGAQDCLVCKAGSQIRIPAVIKGRPTPKSSWEFDGKAKKAMKDGVHDIPEDAQLETAENSSVIIIPECKRSHTGKYSITAKNKAGQKTANCRVKVMDVPGPPKDLKVSDITRGSCRLSWKMPDDDGGDRIKGYVIEKRTIDGKAWTKVNPDCGSTTFVVPDLLSEQQYFFRVRAENRFGIGPPVETIQRTTARDPIYPPDPPIKLKIGLITKNTVHLSWKPPKNDGGSPVTHYIVECLAWDPTGTKKEAWRQCNKRDVEELQFTVEDLVEGGEYEFRVKAVNAAGVSKPSATVGPCDCQRPDMPPSIDLKEFMEVEEGTNVNIVAKIKGVPFPTLTWFKAPPKKPDNKEPVLYDTHVNKLVVDDTCTLVIPQSRRSDTGLYTITAVNNLGTASKEMRLNVLGRPGPPVGPIKFESVSADQMTLSWFPPKDDGGSKITNYVIEKREANRKTWVHVSSEPKECTYTIPKLLEGHEYVFRIMAQNKYGIGEPLDSEPETARNLFSVPGAPDKPTVSSVTRNSMTVNWEEPEYDGGSPVTGYWLEMKDTTSKRWKRVNRDPIKAMTLGVSYKVTGLIEGSDYQFRVYAINAAGVGPASLPSDPATARDPIAPPGPPFPKVTDWTKSSADLEWSPPLKDGGSKVTGYIVEYKEEGKEEWEKGKDKEVRGTKLVVTGLKEGAFYKFRVSAVNIAGIGEPGEVTDVIEMKDRLVSPDLQLDASVRDRIVVHAGGVIRIIAYVSGKPPPTVTWNMNERTLPQEATIETTAISSSMVIKNCQRSHQGVYSLLAKNEAGERKKTIIVDVLDVPGPVGTPFLAHNLTNESCKLTWFSPEDDGGSPITNYVIEKRESDRRAWTPVTYTVTRQNATVQGLIQGKAYFFRIAAENSIGMGPFVETSEALVIREPITVPERPEDLEVKEVTKNTVTLTWNPPKYDGGSEIINYVLESRLIGTEKFHKVTNDNLLSRKYTVKGLKEGDTYEYRVSAVNIVGQGKPSFCTKPITCKDELAPPTLHLDFRDKLTIRVGEAFALTGRYSGKPKPKVSWFKDEADVLEDDRTHIKTTPATLALEKIKAKRSDSGKYCVVVENSTGSRKGFCQVNVVDRPGPPVGPVSFDEVTKDYMVISWKPPLDDGGSKITNYIIEKKEVGKDVWMPVTSASAKTTCKVSKLLEGKDYIFRIHAENLYGISDPLVSDSMKAKDRFRVPDAPDQPIVTEVTKDSALVTWNKPHDGGKPITNYILEKRETMSKRWARVTKDPIHPYTKFRVPDLLEGCQYEFRVSAENEIGIGDPSPPSKPVFAKDPIAKPSPPVNPEAIDTTCNSVDLTWQPPRHDGGSKILGYIVEYQKVGDEEWRRANHTPESCPETKYKVTGLRDGQTYKFRVLAVNAAGESDPAHVPEPVLVKDRLEPPELILDANMAREQHIKVGDTLRLSAIIKGVPFPKVTWKKEDRDAPTKARIDVTPVGSKLEIRNAAHEDGGIYSLTVENPAGSKTVSVKVLVLDKPGPPRDLEVSEIRKDSCYLTWKEPLDDGGSVITNYVVERRDVASAQWSPLSATSKKKSHFAKHLNEGNQYLFRVAAENQYGRGPFVETPKPIKALDPLHPPGPPKDLHHVDVDKTEVSLVWNKPDRDGGSPITGYLVEYQEEGTQDWIKFKTVTNLECVVTGLQQGKTYRFRVKAENIVGLGLPDTTIPIECQEKLVPPSVELDVKLIEGLVVKAGTTVRFPAIIRGVPVPTAKWTTDGSEIKTDEHYTVETDNFSSVLTIKNCLRRDTGEYQITVSNAAGSKTVAVHLTVLDVPGPPTGPINILDVTPEHMTISWQPPKDDGGSPVINYIVEKQDTRKDTWGVVSSGSSKTKLKIPHLQKGCEYVFRVRAENKIGVGPPLDSTPTVAKHKFSPPSPPGKPVVTDITENAATVSWTLPKSDGGSPITGYYMERREVTGKWVRVNKTPIADLKFRVTGLYEGNTYEFRVFAENLAGLSKPSPSSDPIKACRPIKPPGPPINPKLKDKSRETADLVWTKPLSDGGSPILGYVVECQKPGTAQWNRINKDELIRQCAFRVPGLIEGNEYRFRIKAANIVGEGEPRELAESVIAKDILHPPEVELDVTCRDVITVRVGQTIRILARVKGRPEPDITWTKEGKVLVREKRVDLIQDLPRVELQIKEAVRADHGKYIISAKNSSGHAQGSAIVNVLDRPGPCQNLKVTNVTKENCTISWENPLDNGGSEITNFIVEYRKPNQKGWSIVASDVTKRLIKANLLANNEYYFRVCAENKVGVGPTIETKTPILAINPIDRPGEPENLHIADKGKTFVYLKWRRPDYDGGSPNLSYHVERRLKGSDDWERVHKGSIKETHYMVDRCVENQIYEFRVQTKNEGGESDWVKTEEVVVKEDLQKPVLDLKLSGVLTVKAGDTIRLEAGVRGKPFPEVAWTKDKDATDLTRSPRVKIDTRADSSKFSLTKAKRSDGGKYVVTATNTAGSFVAYATVNVLDKPGPVRNLKIVDVSSDRCTVCWDPPEDDGGCEIQNYILEKCETKRMVWSTYSATVLTPGTTVTRLIEGNEYIFRVRAENKIGTGPPTESKPVIAKTKYDKPGRPDPPEVTKVSKEEMTVVWNPPEYDGGKSITGYFLEKKEKHSTRWVPVNKSAIPERRMKVQNLLPDHEYQFRVKAENEIGIGEPSLPSRPVVAKDPIEPPGPPTNFRVVDTTKHSITLGWGKPVYDGGAPIIGYVVEMRPKIADASPDEGWKRCNAAAQLVRKEFTVTSLDENQEYEFRVCAQNQVGIGRPAELKEAIKPKEILEPPEIDLDASMRKLVIVRAGCPIRLFAIVRGRPAPKVTWRKVGIDNVVRKGQVDLVDTMAFLVIPNSTRDDSGKYSLTLVNPAGEKAVFVNVRVLDTPGPVSDLKVSDVTKTSCHVSWAPPENDGGSQVTHYIVEKREADRKTWSTVTPEVKKTSFHVTNLVPGNEYYFRVTAVNEYGPGVPTDVPKPVLASDPLSEPDPPRKLEVTEMTKNSATLAWLPPLRDGGAKIDGYITSYREEEQPADRWTEYSVVKDLSLVVTGLKEGKKYKFRVAARNAVGVSLPREAEGVYEAKEQLLPPKILMPEQITIKAGKKLRIEAHVYGKPHPTCKWKKGEDEVVTSSHLAVHKADSSSILIIKDVTRKDSGYYSLTAENSSGTDTQKIKVVVMDAPGPPQPPFDISDIDADACSLSWHIPLEDGGSNITNYIVEKCDVSRGDWVTALASVTKTSCRVGKLIPGQEYIFRVRAENRFGISEPLTSPKMVAQFPFGVPSEPKNARVTKVNKDCIFVAWDRPDSDGGSPIIGYLIERKERNSLLWVKANDTLVRSTEYPCAGLVEGLEYSFRIYALNKAGSSPPSKPTEYVTARMPVDPPGKPEVIDVTKSTVSLIWARPKHDGGSKIIGYFVEACKLPGDKWVRCNTAPHQIPQEEYTATGLEEKAQYQFRAIARTAVNISPPSEPSDPVTILAENVPPRIDLSVAMKSLLTVKAGTNVCLDATVFGKPMPTVSWKKDGTLLKPAEGIKMAMQRNLCTLELFSVNRKDSGDYTITAENSSGSKSATIKLKVLDKPGPPASVKINKMYSDRAMLSWEPPLEDGGSEITNYIVDKRETSRPNWAQVSATVPITSCSVEKLIEGHEYQFRICAENKYGVGDPVFTEPAIAKNPYDPPGRCDPPVISNITKDHMTVSWKPPADDGGSPITGYLLEKRETQAVNWTKVNRKPIIERTLKATGLQEGTEYEFRVTAINKAGPGKPSDASKAAYARDPQYPPAPPAFPKVYDTTRSSVSLSWGKPAYDGGSPIIGYLVEVKRADSDNWVRCNLPQNLQKTRFEVTGLMEDTQYQFRVYAVNKIGYSDPSDVPDKHYPKDILIPPEGELDADLRKTLILRAGVTMRLYVPVKGRPPPKITWSKPNVNLRDRIGLDIKSTDFDTFLRCENVNKYDAGKYILTLENSCGKKEYTIVVKVLDTPGPPVNVTVKEISKDSAYVTWEPPIIDGGSPIINYVVQKRDAERKSWSTVTTECSKTSFRVANLEEGKSYFFRVFAENEYGIGDPGETRDAVKASQTPGPVVDLKVRSVSKSSCSIGWKKPHSDGGSRIIGYVVDFLTEENKWQRVMKSLSLQYSAKDLTEGKEYTFRVSAENENGEGTPSEITVVARDDVVAPDLDLKGLPDLCYLAKENSNFRLKIPIKGKPAPSVSWKKGEDPLATDTRVSVESSAVNTTLIVYDCQKSDAGKYTITLKNVAGTKEGTISIKVVGKPGIPTGPIKFDEVTAEAMTLKWAPPKDDGGSEITNYILEKRDSVNNKWVTCASAVQKTTFRVTRLHEGMEYTFRVSAENKYGVGEGLKSEPIVARHPFDVPDAPPPPNIVDVRHDSVSLTWTDPKKTGGSPITGYHLEFKERNSLLWKRANKTPIRMRDFKVTGLTEGLEYEFRVMAINLAGVGKPSLPSEPVVALDPIDPPGKPEVINITRNSVTLIWTEPKYDGGHKLTGYIVEKRDLPSKSWMKANHVNVPECAFTVTDLVEGGKYEFRIRAKNTAGAISAPSESTETIICKDEYEAPTIVLDPTIKDGLTIKAGDTIVLNAISILGKPLPKSSWSKAGKDIRPSDITQITSTPTSSMLTIKYATRKDAGEYTITATNPFGTKVEHVKVTVLDVPGPPGPVEISNVSAEKATLTWTPPLEDGGSPIKSYILEKRETSRLLWTVVSEDIQSCRHVATKLIQGNEYIFRVSAVNHYGKGEPVQSEPVKMVDRFGPPGPPEKPEVSNVTKNTATVSWKRPVDDGGSEITGYHVERREKKSLRWVRAIKTPVSDLRCKVTGLQEGSTYEFRVSAENRAGIGPPSEASDSVLMKDAAYPPGPPSNPHVTDTTKKSASLAWGKPHYDGGLEITGYVVEHQKVGDEAWIKDTTGTALRITQFVVPDLQTKEKYNFRISAINDAGVGEPAVIPDVEIVEREMAPDFELDAELRRTLVVRAGLSIRIFVPIKGRPAPEVTWTKDNINLKNRANIENTESFTLLIIPECNRYDTGKFVMTIENPAGKKSGFVNVRVLDTPGPVLNLRPTDITKDSVTLHWDLPLIDGGSRITNYIVEKREATRKSYSTATTKCHKCTYKVTGLSEGCEYFFRVMAENEYGIGEPTETTEPVKASEAPSPPDSLNIMDITKSTVSLAWPKPKHDGGSKITGYVIEAQRKGSDQWTHITTVKGLECVVRNLTEGEEYTFQVMAVNSAGRSAPRESRPVIVKEQTMLPELDLRGIYQKLVIAKAGDNIKVEIPVLGRPKPTVTWKKGDQILKQTQRVNFETTATSTILNINECVRSDSGPYPLTARNIVGEVGDVITIQVHDIPGPPTGPIKFDEVSSDFVTFSWDPPENDGGVPISNYVVEMRQTDSTTWVELATTVIRTTYKATRLTTGLEYQFRVKAQNRYGVGPGITSACIVANYPFKVPGPPGTPQVTAVTKDSMTISWHEPLSDGGSPILGYHVERKERNGILWQTVSKALVPGNIFKSSGLTDGIAYEFRVIAENMAGKSKPSKPSEPMLALDPIDPPGKPVPLNITRHTVTLKWAKPEYTGGFKITSYIVEKRDLPNGRWLKANFSNILENEFTVSGLTEDAAYEFRVIAKNAAGAISPPSEPSDAITCRDDVEAPKIKVDVKFKDTVILKAGEAFRLEADVSGRPPPTMEWSKDGKELEGTAKLEIKIADFSTNLVNKDSTRRDSGAYTLTATNPGGFAKHIFNVKVLDRPGPPEGPLAVTEVTSEKCVLSWFPPLDDGGAKIDHYIVQKRETSRLAWTNVASEVQVTKLKVTKLLKGNEYIFRVMAVNKYGVGEPLESEPVLAVNPYGPPDPPKNPEVTTITKDSMVVCWGHPDSDGGSEIINYIVERRDKAGQRWIKCNKKTLTDLRYKVSGLTEGHEYEFRIMAENAAGISAPSPTSPFYKACDTVFKPGPPGNPRVLDTSRSSISIAWNKPIYDGGSEITGYMVEIALPEEDEWQIVTPPAGLKATSYTITGLTENQEYKIRIYAMNSEGLGEPALVPGTPKAEDRMLPPEIELDADLRKVVTIRACCTLRLFVPIKGRPAPEVKWARDHGESLDKASIESTSSYTLLIVGNVNRFDSGKYILTVENSSGSKSAFVNVRVLDTPGPPQDLKVKEVTKTSVTLTWDPPLLDGGSKIKNYIVEKRESTRKAYSTVATNCHKTSWKVDQLQEGCSYYFRVLAENEYGIGLPAETAESVKASERPLPPGKITLMDVTRNSVSLSWEKPEHDGGSRILGYIVEMQTKGSDKWATCATVKVTEATITGLIQGEEYSFRVSAQNEKGISDPRQLSVPVIAKDLVIPPAFKLLFNTFTVLAGEDLKVDVPFIGRPTPAVTWHKDNVPLKQTTRVNAESTENNSLLTIKDACREDVGHYVVKLTNSAGEAIETLNVIVLDKPGPPTGPVKMDEVTADSITLSWGPPKYDGGSSINNYIVEKRDTSTTTWQIVSATVARTTIKACRLKTGCEYQFRIAAENRYGKSTYLNSEPTVAQYPFKVPGPPGTPVVTLSSRDSMEVQWNEPISDGGSRVIGYHLERKERNSILWVKLNKTPIPQTKFKTTGLEEGVEYEFRVSAENIVGIGKPSKVSECYVARDPCDPPGRPEAIIVTRNSVTLQWKKPTYDGGSKITGYIVEKKELPEGRWMKASFTNIIDTHFEVTGLVEDHRYEFRVIARNAAGVFSEPSESTGAITARDEVDPPRISMDPKYKDTIVVHAGESFKVDADIYGKPIPTIQWIKGDQELSNTARLEIKSTDFATSLSVKDAVRVDSGNYILKAKNVAGERSVTVNVKVLDRPGPPEGPVVISGVTAEKCTLAWKPPLQDGGSDIINYIVERRETSRLVWTVVDANVQTLSCKVTKLLEGNEYTFRIMAVNKYGVGEPLESEPVVAKNPFVVPDAPKAPEVTTVTKDSMIVVWERPASDGGSEILGYVLEKRDKEGIRWTRCHKRLIGELRLRVTGLIENHDYEFRVSAENAAGLSEPSPPSAYQKACDPIYKPGPPNNPKVIDITRSSVFLSWSKPIYDGGCEIQGYIVEKCDVSVGEWTMCTPPTGINKTNIEVEKLLEKHEYNFRICAINKAGVGEHADVPGPIIVEEKLEAPDIDLDLELRKIINIRAGGSLRLFVPIKGRPTPEVKWGKVDGEIRDAAIIDVTSSFTSLVLDNVNRYDSGKYTLTLENSSGTKSAFVTVRVLDTPSPPVNLKVTEITKDSVSITWEPPLLDGGSKIKNYIVEKREATRKSYAAVVTNCHKNSWKIDQLQEGCSYYFRVTAENEYGIGLPAQTADPIKVAEVPQPPGKITVDDVTRNSVSLSWTKPEHDGGSKIIQYIVEMQAKHSEKWSECARVKSLQAVITNLTQGEEYLFRVVAVNEKGRSDPRSLAVPIVAKDLVIEPDVKPAFSSYSVQVGQDLKIEVPISGRPKPTITWTKDGLPLKQTTRINVTDSLDLTTLSIKETHKDDGGQYGITVANVVGQKTASIEIVTLDKPDPPKGPVKFDDVSAESITLSWNPPLYTGGCQITNYIVQKRDTTTTVWDVVSATVARTTLKVTKLKTGTEYQFRIFAENRYGQSFALESDPIVAQYPYKEPGPPGTPFATAISKDSMVIQWHEPVNNGGSPVIGYHLERKERNSILWTKVNKTIIHDTQFKAQNLEEGIEYEFRVYAENIVGVGKASKNSECYVARDPCDPPGTPEPIMVKRNEITLQWTKPVYDGGSMITGYIVEKRDLPDGRWMKASFTNVIETQFTVSGLTEDQRYEFRVIAKNAAGAISKPSDSTGPITAKDEVELPRISMDPKFRDTIVVNAGETFRLEADVHGKPLPTIEWLRGDKEIEESARCEIKNTDFKALLIVKDAIRIDGGQYILRASNVAGSKSFPVNVKVLDRPGPPEGPVQVTGVTSEKCSLTWSPPLQDGGSDISHYVVEKRETSRLAWTVVASEVVTNSLKVTKLLEGNEYVFRIMAVNKYGVGEPLESAPVLMKNPFVLPGPPKSLEVTNIAKDSMTVCWNRPDSDGGSEIIGYIVEKRDRSGIRWIKCNKRRITDLRLRVTGLTEDHEYEFRVSAENAAGVGEPSPATVYYKACDPVFKPGPPTNAHIVDTTKNSITLAWGKPIYDGGSEILGYVVEICKADEEEWQIVTPQTGLRVTRFEISKLTEHQEYKIRVCALNKVGLGEATSVPGTVKPEDKLEAPELDLDSELRKGIVVRAGGSARIHIPFKGRPTPEITWSREEGEFTDKVQIEKGVNYTQLSIDNCDRNDAGKYILKLENSSGSKSAFVTVKVLDTPGPPQNLAVKEVRKDSAFLVWEPPIIDGGAKVKNYVIDKRESTRKAYANVSSKCSKTSFKVENLTEGAIYYFRVMAENEFGVGVPVETVDAVKAAEPPSPPGKVTLTDVSQTSASLMWEKPEHDGGSRVLGYVVEMQPKGTEKWSIVAESKVCNAVVTGLSSGQEYQFRVKAYNEKGKSDPRVLGVPVIAKDLTIQPSLKLPFNTYSIQAGEDLKIEIPVIGRPRPNISWVKDGEPLKQTTRVNVEETATSTVLHIKEGNKDDFGKYTVTATNSAGTATENLSVIVLEKPGPPVGPVRFDEVSADFVVISWEPPAYTGGCQISNYIVEKRDTTTTTWHMVSATVARTTIKITKLKTGTEYQFRIFAENRYGKSAPLDSKAVIVQYPFKEPGPPGTPFVTSISKDQMLVQWHEPVNDGGTKIIGYHLEQKEKNSILWVKLNKTPIQDTKFKTTGLDEGLEYEFKVSAENIVGIGKPSKVSECFVARDPCDPPGRPEAIVITRNNVTLKWKKPAYDGGSKITGYIVEKKDLPDGRWMKASFTNVLETEFTVSGLVEDQRYEFRVIARNAAGNFSEPSDSSGAITARDEIDAPNASLDPKYKDVIVVHAGETFVLEADIRGKPIPDVVWSKDGKELEETAARMEIKSTIQKTTLVVKDCIRTDGGQYILKLSNVGGTKSIPITVKVLDRPGPPEGPLKVTGVTAEKCYLAWNPPLQDGGANISHYIIEKRETSRLSWTQVSTEVQALNYKVTKLLPGNEYIFRVMAVNKYGIGEPLESGPVTACNPYKPPGPPSTPEVSAITKDSMVVTWARPVDDGGTEIEGYILEKRDKEGVRWTKCNKKTLTDLRLRVTGLTEGHSYEFRVAAENAAGVGEPSEPSVFYRACDALYPPGPPSNPKVTDTSRSSVSLAWSKPIYDGGAPVKGYVVEVKEAAADEWTTCTPPTGLQGKQFTVTKLKENTEYNFRICAINSEGVGEPATLPGSVVAQERIEPPEIELDADLRKVVVLRASATLRLFVTIKGRPEPEVKWEKAEGILTDRAQIEVTSSFTMLVIDNVTRFDSGRYNLTLENNSGSKTAFVNVRVLDSPSAPVNLTIREVKKDSVTLSWEPPLIDGGAKITNYIVEKRETTRKAYATITNNCTKTTFRIENLQEGCSYYFRVLASNEYGIGLPAETTEPVKVSEPPLPPGRVTLVDVTRNTATIKWEKPESDGGSKITGYVVEMQTKGSEKWSTCTQVKTLEATISGLTAGEEYVFRVAAVNEKGRSDPRQLGVPVIARDIEIKPSVELPFHTFNVKAREQLKIDVPFKGRPQATVNWRKDGQTLKETTRVNVSSSKTVTSLSIKEASKEDVGTYELCVSNSAGSITVPITIIVLDRPGPPGPIRIDEVSCDSITISWNPPEYDGGCQISNYIVEKKETTSTTWHIVSQAVARTSIKIVRLTTGSEYQFRVCAENRYGKSSYSESSAVVAEYPFSPPGPPGTPKVVHATKSTMLVTWQVPVNDGGSRVIGYHLEYKERSSILWSKANKILIADTQMKVSGLDEGLMYEYRVYAENIAGIGKCSKSCEPVPARDPCDPPGQPEVTNITRKSVSLKWSKPHYDGGAKITGYIVERRELPDGRWLKCNYTNIQETYFEVTELTEDQRYEFRVFARNAADSVSEPSESTGPIIVKDDVEPPRVMMDVKFRDVIVVKAGEVLKINADIAGRPLPVISWAKDGIEIEERARTEIISTDNHTLLTVKDCIRRDTGQYVLTLKNVAGTRSVAVNCKVLDKPGPPAGPLEINGLTAEKCSLSWGRPQEDGGADIDYYIVEKRETSHLAWTICEGELQMTSCKVTKLLKGNEYIFRVTGVNKYGVGEPLESVAIKALDPFTVPSPPTSLEITSVTKESMTLCWSRPESDGGSEISGYIIERREKNSLRWVRVNKKPVYDLRVKSTGLREGCEYEYRVYAENAAGLSLPSETSPLIRAEDPVFLPSPPSKPKIVDSGKTTITIAWVKPLFDGGAPITGYTVEYKKSDDTDWKTSIQSLRGTEYTISGLTTGAEYVFRVKSVNKVGASDPSDSSDPQIAKEREEEPLFDIDSEMRKTLIVKAGASFTMTVPFRGRPVPNVLWSKPDTDLRTRAYVDTTDSRTSLTIENANRNDSGKYTLTIQNVLSAASLTLVVKVLDTPGPPTNITVQDVTKESAVLSWDVPENDGGAPVKNYHIEKREASKKAWVSVTNNCNRLSYKVTNLQEGAIYYFRVSGENEFGVGIPAETKEGVKITEKPSPPEKLGVTSISKDSVSLTWLKPEHDGGSRIVHYVVEALEKGQKNWVKCAVAKSTHHVVSGLRENSEYFFRVFAENQAGLSDPRELLLPVLIKEQLEPPEIDMKNFPSHTVYVRAGSNLKVDIPISGKPLPKVTLSRDGVPLKATMRFNTEITAENLTINLKESVTADAGRYEITAANSSGTTKAFINIVVLDRPGPPTGPVVISDITEESVTLKWEPPKYDGGSQVTNYILLKRETSTAVWTEVSATVARTMMKVMKLTTGEEYQFRIKAENRFGISDHIDSACVTVKLPYTTPGPPSTPWVTNVTRESITVGWHEPVSNGGSAVVGYHLEMKDRNSILWQKANKLVIRTTHFKVTTISAGLIYEFRVYAENAAGVGKPSHPSEPVLAIDACEPPRNVRITDISKNSVSLSWQQPAFDGGSKITGYIVERRDLPDGRWTKASFTNVTETQFIISGLTQNSQYEFRVFARNAVGSISNPSEVVGPITCIDSYGGPVIDLPLEYTEVVKYRAGTSVKLRAGISGKPAPTIEWYKDDKELQTNALVCVENTTDLASILIKDADRLNSGCYELKLRNAMGSASATIRVQILDKPGPPGGPIEFKTVTAEKITLLWRPPADDGGAKITHYIVEKRETSRVVWSMVSEHLEECIITTTKIIKGNEYIFRVRAVNKYGIGEPLESDSVVAKNAFVTPGPPGIPEVTKITKNSMTVVWSRPIADGGSDISGYFLEKRDKKSLGWFKVLKETIRDTRQKVTGLTENSDYQYRVCAVNAAGQGPFSEPSEFYKAADPIDPPGPPAKIRIADSTKSSITLGWSKPVYDGGSAVTGYVVEIRQGEEEEWTTVSTKGEVRTTEYVVSNLKPGVNYYFRVSAVNCAGQGEPIEMNEPVQAKDILEAPEIDLDVALRTSVIAKAGEDVQVLIPFKGRPPPTVTWRKDEKNLGSDARYSIENTDSSSLLTIPQVTRNDTGKYILTIENGVGEPKSSTVSVKVLDTPAACQKLQVKHVSRGTVTLLWDPPLIDGGSPIINYVIEKRDATKRTWSVVSHKCSSTSFKLIDLSEKTPFFFRVLAENEIGIGEPCETTEPVKAAEVPAPIRDLSMKDSTKTSVILSWTKPDFDGGSVITEYVVERKGKGEQTWSHAGISKTCEIEVSQLKEQSVLEFRVFAKNEKGLSDPVTIGPITVKELIITPEVDLSDIPGAQVTVRIGHNVHLELPYKGKPKPSISWLKDGLPLKESEFVRFSKTENKITLSIKNAKKEHGGKYTVILDNAVCRIAVPITVITLGPPSKPKGPIRFDEIKADSVILSWDVPEDNGGGEITCYSIEKRETSQTNWRMVCSSVARTTFKVPNLVKDAEYQFRVRAENRYGVSQPLVSSIIVAKHQFRIPGPPGKPVIYNVTSDGMSLTWDAPVYDGGSEVTGFHVEKKERNSILWQKVNTSPISGREYRATGLVEGLDYQFRVYAENSAGLSSPSDPSKFTLAVSPVDPPGTPDYIDVTRETITLKWNPPLRDGGSKIVGYSIEKRQGNERWVRCNFTDVSECQYTVTGLSPGDRYEFRIIARNAVGTISPPSQSSGIIMTRDENVPPIVEFGPEYFDGLIIKSGESLRIKALVQGRPVPRVTWFKDGVEIEKRMNMEITDVLGSTSLFVRDATRDHRGVYTVEAKNASGSAKAEIKVKVQDTPGKVVGPIRFTNITGEKMTLWWDAPLNDGCAPITHYIIEKRETSRLAWALIEDKCEAQSYTAIKLINGNEYQFRVSAVNKFGVGRPLDSDPVVAQIQYTVPDAPGIPEPSNITGNSITLTWARPESDGGSEIQQYILERREKKSTRWVKVISKRPISETRFKVTGLTEGNEYEFHVMAENAAGVGPASGISRLIKCREPVNPPGPPTVVKVTDTSKTTVSLEWSKPVFDGGMEIIGYIIEMCKADLGDWHKVNAEACVKTRYTVTDLQAGEEYKFRVSAINGAGKGDSCEVTGTIKAVDRLTAPELDIDANFKQTHVVRAGASIRLFIAYQGRPTPTAVWSKPDSNLSLRADIHTTDSFSTLTVENCNRNDAGKYTLTVENNSGSKSITFTVKVLDTPGPPGPITFKDVTRGSATLMWDAPLLDGGARIHHYVVEKREASRRSWQVISEKCTRQIFKVNDLAEGVPYYFRVSAVNEYGVGEPYEMPEPIVATEQPAPPRRLDVVDTSKSSAVLAWLKPDHDGGSRITGYLLEMRQKGSDFWVEAGHTKQLTFTVERLVEKTEYEFRVKAKNDAGYSEPREAFSSVIIKEPQIEPTADLTGITNQLITCKAGSPFTIDVPISGRPAPKVTWKLEEMRLKETDRVSITTTKDRTTLTVKDSMRGDSGRYFLTLENTAGVKTFSVTVVVIGRPGPVTGPIEVSSVSAESCVLSWGEPKDGGGTEITNYIVEKRESGTTAWQLVNSSVKRTQIKVTHLTKYMEYSFRVSSENRFGVSKPLESAPIIAEHPFVPPSAPTRPEVYHVSANAMSIRWEEPYHDGGSKIIGYWVEKKERNTILWVKENKVPCLECNYKVTGLVEGLEYQFRTYALNAAGVSKASEASRPIMAQNPVDAPGRPEVTDVTRSTVSLIWSAPAYDGGSKVVGYIIERKPVSEVGDGRWLKCNYTIVSDNFFTVTALSEGDTYEFRVLAKNAAGVISKGSESTGPVTCRDEYAPPKAELDARLHGDLVTIRAGSDLVLDAAVGGKPEPKIIWTKGDKELDLCEKVSLQYTGKRATAVIKFCDRSDSGKYTLTVKNASGTKAVSVMVKVLDSPGPCGKLTVSRVTQEKCTLAWSLPQEDGGAEITHYIVERRETSRLNWVIVEGECPTLSYVVTRLIKNNEYIFRVRAVNKYGPGVPVESEPIVARNSFTIPSPPGIPEEVGTGKEHIIIQWTKPESDGGNEISNYLVDKREKKSLRWTRVNKDYVVYDTRLKVTSLMEGCDYQFRVTAVNAAGNSEPSEASNFISCREPSYTPGPPSAPRVVDTTKHSISLAWTKPMYDGGTDIVGYVLEMQEKDTDQWYRVHTNATIRNTEFTVPDLKMGQKYSFRVAAVNVKGMSEYSESIAEIEPVERIEIPDLELADDLKKTVTIRAGASLRLMVSVSGRPPPVITWSKQGIDLASRAIIDTTESYSLLIVDKVNRYDAGKYTIEAENQSGKKSATVLVKVYDTPGPCPSVKVKEVSRDSVTITWEIPTIDGGAPVNNYIVEKREAAMRAFKTVTTKCSKTLYRISGLVEGTMYYFRVLPENIYGIGEPCETSDAVLVSEVPLVPAKLEVVDVTKSTVTLAWEKPLYDGGSRLTGYVLEACKAGTERWMKVVTLKPTVLEHTVTSLNEGEQYLFRIRAQNEKGVSEPRETVTAVTVQDLRVLPTIDLSTMPQKTIHVPAGRPVELVIPIAGRPPPAASWFFAGSKLRESERVTVETHTKVAKLTIRETTIRDTGEYTLELKNVTGTTSETIKVIILDKPGPPTGPIKIDEIDATSITISWEPPELDGGAPLSGYVVEQRDAHRPGWLPVSESVTRSTFKFTRLTEGNEYVFRVAATNRFGIGSYLQSEVIECRSSIRIPGPPETLQIFDVSRDGMTLTWYPPEDDGGSQVTGYIVERKEVRADRWVRVNKVPVTMTRYRSTGLTEGLEYEHRVTAINARGSGKPSRPSKPIVAMDPIAPPGKPQNPRVTDTTRTSVSLAWSVPEDEGGSKVTGYLIEMQKVDQHEWTKCNTTPTKIREYTLTHLPQGAEYRFRVLACNAGGPGEPAEVPGTVKVTEMLEYPDYELDERYQEGIFVRQGGVIRLTIPIKGKPFPICKWTKEGQDISKRAMIATSETHTELVIKEADRGDSGTYDLVLENKCGKKAVYIKVRVIGSPNSPEGPLEYDDIQVRSVRVSWRPPADDGGADILGYILERREVPKAAWYTIDSRVRGTSLVVKGLKENVEYHFRVSAENQFGISKPLKSEEPVTPKTPLNPPEPPSNPPEVLDVTKSSVSLSWSRPKDDGGSRVTGYYIERKETSTDKWVRHNKTQITTTMYTVTGLVPDAEYQFRIIAQNDVGLSETSPASEPVVCKDPFDKPSQPGELEILSISKDSVTLQWEKPECDGGKEILGYWVEYRQSGDSAWKKSNKERIKDKQFTIGGLLEATEYEFRVFAENETGLSRPRRTAMSIKTKLTSGEAPGIRKEMKDVTTKLGEAAQLSCQIVGRPLPDIKWYRFGKELIQSRKYKMSSDGRTHTLTVMTEEQEDEGVYTCIATNEVGEVETSSKLLLQATPQFHPGYPLKEKYYGAVGSTLRLHVMYIGRPVPAMTWFHGQKLLQNSENITIENTEHYTHLVMKNVQRKTHAGKYKVQLSNVFGTVDAILDVEIQDKPDKPTGPIVIEALLKNSAVISWKPPADDGGSWITNYVVEKCEAKEGAEWQLVSSAISVTTCRIVNLTENAGYYFRVSAQNTFGISDPLEVSSVVIIKSPFEKPGAPGKPTITAVTKDSCVVAWKPPASDGGAKIRNYYLEKREKKQNKWISVTTEEIRETVFSVKNLIEGLEYEFRVKCENLGGESEWSEISEPITPKSDVPIQAPHFKEELRNLNVRYQSNATLVCKVTGHPKPIVKWYRQGKEIIADGLKYRIQEFKGGYHQLIIASVTDDDATVYQVRATNQGGSVSGTASLEVEVPAKIHLPKTLEGMGAVHALRGEVVSIKIPFSGKPDPVITWQKGQDLIDNNGHYQVIVTRSFTSLVFPNGVERKDAGFYVVCAKNRFGIDQKTVELDVADVPDPPRGVKVSDVSRDSVNLTWTEPASDGGSKITNYIVEKCATTAERWLRVGQARETRYTVINLFGKTSYQFRVIAENKFGLSKPSEPSEPTITKEDKTRAMNYDEEVDETREVSMTKASHSSTKELYEKYMIAEDLGRGEFGIVHRCVETSSKKTYMAKFVKVKGTDQVLVKKEISILNIARHRNILHLHESFESMEELVMIFEFISGLDIFERINTSAFELNEREIVSYVHQVCEALQFLHSHNIGHFDIRPENIIYQTRRSSTIKIIEFGQARQLKPGDNFRLLFTAPEYYAPEVHQHDVVSTATDMWSLGTLVYVLLSGINPFLAETNQQIIENIMNAEYTFDEEAFKEISIEAMDFVDRLLVKERKSRMTASEALQHPWLKQKIERVSTKVIRTLKHRRYYHTLIKKDLNMVVSAARISCGGAIRSQKGVSVAKVKVASIEIGPVSGQIMHAVGEEGGHVKYVCKIENYDQSTQVTWYFGVRQLENSEKYEITYEDGVAILYVKDITKLDDGTYRCKVVNDYGEDSSYAELFVKGVREVYDYYCRRTMKKIKRRTDTMRLLERPPEFTLPLYNKTAYVGENVRFGVTITVHPEPHVTWYKSGQKIKPGDNDKKYTFESDKGLYQLTINSVTTDDDAEYTVVARNKYGEDSCKAKLTVTLHPPPTDSTLRPMFKRLLANAECQEGQSVCFEIRVSGIPPPTLKWEKDGQPLSLGPNIEIIHEGLDYYALHIRDTLPEDTGYYRVTATNTAGSTSCQAHLQVERLRYKKQEFKSKEEHERHVQKQIDKTLRMAEILSGTESVPLTQVAKEALREAAVLYKPAVSTKTVKGEFRLEIEEKKEERKLRMPYDVPEPRKYKQTTIEEDQRIKQFVPMSDMKWYKKIRDQYEMPGKLDRVVQKRPKRIRLSRWEQFYVMPLPRITDQYRPKWRIPKLSQDDLEIVRPARRRTPSPDYDFYYRPRRRSLGDISDEELLLPIDDYLAMKRTEEERLRLEEELELGFSASPPSRSPPHFELSSLRYSSPQAHVKVEETRKDFRYSTYHIPTKAEASTSYAELRERHAQAAYRQPKQRQRIMAEREDEELLRPVTTTQHLSEYKSELDFMSKEEKSRKKSRRQREVTEITEIEEEYEISKHAQRESSSSASRLLRRRRSLSPTYIELMRPVSELIRSRPQPAEEYEDDTERRSPTPERTRPRSPSPVSSERSLSRFERSARFDIFSRYESMKAALKTQKTSERKYEVLSQQPFTLDHAPRITLRMRSHRVPCGQNTRFILNVQSKPTAEVKWYHNGVELQESSKIHYTNTSGVLTLEILDCHTDDSGTYRAVCTNYKGEASDYATLDVTGGDYTTYASQRRDEEVPRSVFPELTRTEAYAVSSFKKTSEMEASSSVREVKSQMTETRESLSSYEHSASAEMKSAALEEKSLEEKSTTRKIKTTLAARILTKPRSMTVYEGESARFSCDTDGEPVPTVTWLRKGQVLSTSARHQVTTTKYKSTFEISSVQASDEGNYSVVVENSEGKQEAEFTLTIQKARVTEKAVTSPPRVKSPEPRVKSPEAVKSPKRVKSPEPSHPKAVSPTETKPTPTEKVQHLPVSAPPKITQFLKAEASKEIAKLTCVVESSVLRAKEVTWYKDGKKLKENGHFQFHYSADGTYELKINNLTESDQGEYVCEISGEGGTSKTNLQFMGQAFKSIHEKVSKISETKKSDQKTTESTVTRKTEPKAPEPISSKPVIVTGLQDTTVSSDSVAKFAVKATGEPRPTAIWTKDGKAITQGGKYKLSEDKGGFFLEIHKTDTSDSGLYTCTVKNSAGSVSSSCKLTIKAIKDTEAQKVSTQKTSEITPQKKAVVQEEISQKALRSEEIKMSEAKSQEKLALKEEASKVLISEEVKKSAATSLEKSIVHEEITKTSQASEEVRTHAEIKAFSTQMSINEGQRLVLKANIAGATDVKWVLNGVELTNSEEYRYGVSGSDQTLTIKQASHRDEGILTCISKTKEGIVKCQYDLTLSKELSDAPAFISQPRSQNINEGQNVLFTCEISGEPSPEIEWFKNNLPISISSNVSISRSRNVYSLEIRNASVSDSGKYTIKAKNFRGQCSATASLMVLPLVEEPSREVVLRTSGDTSLQGSFSSQSVQMSASKQEASFSSFSSSSASSMTEMKFASMSAQSMSSMQESFVEMSSSSFMGISNMTQLESSTSKMLKAGIRGIPPKIEALPSDISIDEGKVLTVACAFTGEPTPEVTWSCGGRKIHSQEQGRFHIENTDDLTTLIIMDVQKQDGGLYTLSLGNEFGSDSATVNIHIRSI

SEQ ID NO: 7667 - protein, 34350 aa, Homo sapiens
MTTQAPTFTQPLQSVVVLEGSTATFEAHISGFPVPEVSWFRDGQVISTSTLPGVQISFSDGRAKLTIPAVTKANSGRYSLKATNGSGQATSTAELLVKAETAPPNFVQRLQSMTVRQGSQVRLQVRVTGIPTPVVKFYRDGAEIQSSLDFQISQEGDLYSLLIAEAYPEDSGTYSVNATNSVGRATSTAELLVQGEEEVPAKKTKTIVSTAQISESRQTRIEKKIEAHFDARSIATVEMVIDGAAGQQLPHKTPPRIPPKPKSRSPTPPSIAAKAQLARQQSPSPIRHSPSPVRHVRAPTPSPVRSVSPAARISTSPIRSVRSPLLMRKTQASTVATGPEVPPPWKQEGYVASSSEAEMRETTLTTSTQIRTEERWEGRYGVQEQVTISGAAGAAASVSASASYAAEAVATGAKEVKQDADKSAAVATVVAAVDMARVREPVISAVEQTAQRTTTTAVHIQPAQEQVRKEAEKTAVTKVVVAADKAKEQELKSRTKEVITTKQEQMHVTHEQIRKETEKTFVPKVVISAAKAKEQETRISEEITKKQKQVTQEAIRQETEITAASMVVVATAKSTKLETVPGAQEETTTQQDQMHLSYEKIMKETRKTVVPKVIVATPKVKEQDLVSRGREGITTKREQVQITQEKMRKEAEKTALSTIAVATAKAKEQETILRTRETMATRQEQIQVTHGKVDVGKKAEAVATVVAAVDQARVREPREPGHLEESYAQQTTLEYGYKERISAAKVAEPPQRPASEPHVVPKAVKPRVIQAPSETHIKTTDQKGMHISSQIKKTTDLTTERLVHVDKRPRTASPHFTVSKISVPKTEHGYEASIAGSAIATLQKELSATSSAQKITKSVKAPTVKPSETRVRAEPTPLPQFPFADTPDTYKSEAGVEVKKEVGVSITGTTVREERFEVLHGREAKVTETARVPAPVEIPVTPPTLVSGLKNVTVIEGESVTLECHISGYPSPTVTWYREDYQIESSIDFQITFQSGIARLMIREAFAEDSGRFTCSAVNEAGTVSTSCYLAVQVSEEFEKETTAVTEKFTTEEKRFVESRDVVMTDTSLTEEQAGPGEPAAPYFITKPVVQKLVEGGSVVFGCQVGGNPKPHVYWKKSGVPLTTGYRYKVSYNKQTGECKLVISMTFADDAGEYTIVVRNKHGETSASASLLEEADYELLMKSQQEMLYQTQVTAFVQEPKVGETAPGFVYSEYEKEYEKEQALIRKKMAKDTVVVRTYVEDQEFHISSFEERLIKEIEYRIIKTTLEELLEEDGEEKMAVDISESEAVESGFDLRIKNYRILEGMGVTFHCKMSGYPLPKIAWYKDGKRIKHGERYQMDFLQDGRASLRIPVVLPEDEGIYTAFASNIKGNAICSGKLYVEPAAPLGAPTYIPTLEPVSRIRSLSPRSVSRSPIRMSPARMSPARMSPARMSPARMSPGRRLEETDESQLERLYKPVFVLKPVSFKCLEGQTARFDLKVVGRPMPETFWFHDGQQIVNDYTHKVVIKEDGTQSLIIVPATPSDSGEWTVVAQNRAGRSSISVILTVEAVEHQVKPMFVEKLKNVNIKEGSRLEMKVRATGNPNPDIVWLKNSDIIVPHKYPKIRIEGTKGEAALKIDSTVSQDSAWYTATAINKAGRDTTRCKVNVEVEFAEPEPERKLIIPRGTYRAKEIAAPELEPLHLRYGQEQWEEGDLYDKEKQQKPFFKKKLTSLRLKRFGPAHFECRLTPIGDPTMVVEWLHDGKPLEAANRLRMINEFGYCSLDYGVAYSRDSGIITCRATNKYGTDHTSATLIVKDEKSLVEESQLPEGRKGLQRIEELERMAHEGALTGVTTDQKEKQKPDIVLYPEPVRVLEGETARFRCRVTGYPQPKVNWYLNGQLIRKSKRFRVRYDGIHYLDIVDCKSYDTGEVKVTAENPEGVIEHKVKLEIQQREDFRSVLRRAPEPRPEFHVHEPGKLQFEVQKVDRPVDTTETKEVVKLKRAERITHEKVPEESEELRSKFKRRTEEGYYEAITAVELKSRKKDESYEELLRKTKDELLHWTKELTEEEKKALAEEGKITIPTFKPDKIELSPSMEAPKIFERIQSQTVGQGSDAHFRVRVVGKPDPECEWYKNGVKIERSDRIYWYWPEDNVCELVIRDVTAEDSASIMVKAINIAGETSSHAFLLVQAKQLITFTQELQDVVAKEKDTMATFECETSEPFVKVKWYKDGMEVHEGDKYRMHSDRKVHFLSILTIDTSDAEDYSCVLVEDENVKTTAKLIVEGAVVEFVKELQDIEVPESYSGELECIVSPENIEGKWYHNDVELKSNGKYTITSRRGRQNLTVKDVTKEDQGEYSFVIDGKKTTCKLKMKPRPIAILQGLSDQKVCEGDIVQLEVKVSLESVEGVWMKDGQEVQPSDRVHIVIDKQSHMLLIEDMTKEDAGNYSFTIPALGLSTSGRVSVYSVDVITPLKDVNVIEGTKAVLECKVSVPDVTSVKWYLNDEQIKPDDRVQAIVKGTKQRLVINRTHASDEGPYKLIVGRVETNCNLSVEKIKIIRGLRDLTCTETQNVVFEVELSHSGIDVLWNFKDKEIKPSSKYKIEAHGKIYKLTVLNMMKDDEGKYTFYAGENITSGKLTVAGGAISKPLTDQTVAESQEAVFECEVANPDSKGEWLRDGKHLPLTNNIRSESDGHKRRLIIAATKLDDIGEYTYKVATSKTSAKLKVEAVKIKKTLKNLTVTETQDAVFTVELTHPNVKGVQWIKNGVVLESNEKYAISVKGTIYSLRIKNCAIVDESVYGFRLGRLGASARLHVETVKIIKKPKDVTALENATVAFEVSVSHDTVPVKWFHKSVEIKPSDKHRLVSERKVHKLMLQNISPSDAGEYTAVVGQLECKAKLFVETLHITKTMKNIEVPETKTASFECEVSHFNVPSMWLKNGVEIEMSEKFKIVVQGKLHQLIIMNTSTEDSAEYTFVCGNDQVSATLTVTPIMITSMLKDINAEEKDTITFEVTVNYEGISYKWLKNGVEIKSTDKCQMRTKKLTHSLNIRNVHFGDAADYTFVAGKATSTATLYVEARHIEFRKHIKDIKVLEKKRAMFECEVSEPDITVQWMKDDQELQITDRIKIQKEKYVHRLLIPSTRMSDAGKYTVVAGGNVSTAKLFVEGRDVRIRSIKKEVQVIEKQRAVVEFEVNEDDVDAHWYKDGIEINFQVQERHKYVVERRIHRMFISETRQSDAGEYTFVAGRNRSSVTLYVNAPEPPQVLQELQPVTVQSGKPARFCAVISGRPQPKISWYKEEQLLSTGFKCKFLHDGQEYTLLLIEAFPEDAAVYTCEAKNDYGVATTSASLSVEVPEVVSPDQEMPVYPPAIITPLQDTVTSEGQPARFQCRVSGTDLKVSWYSKDKKIKPSRFFRMTQFEDTYQLEIAEAYPEDEGTYTFVASNAVGQVSSTANLSLEAPESILHERIEQEIEMEMKEFSSSFLSAEEEGLHSAELQLSKINETLELLSESPVYSTKFDSEKEGTGPIFIKEVSNADISMGDVATLSVTVIGIPKPKIQWFFNGVLLTPSADYKFVFDGDDHSLIILFTKLEDEGEYTCMASNDYGKTICSAYLKINSKGEGHKDTETESAVAKSLEKLGGPCPPHFLKELKPIRCAQGLPAIFEYTVVGEPAPTVTWFKENKQLCTSVYYTIIHNPNGSGTFIVNDPQREDSGLYICKAENMLGESTCAAELLVLLEDTDMTDTPCKAKSTPEAPEDFPQTPLKGPAVEALDSEQEIATFVKDTILKAALITEENQQLSYEHIAKANELSSQLPLGAQELQSILEQDKLTPESTREFLCINGSIHFQPLKEPSPNLQLQIVQSQKTFSKEGILMPEEPETQAVLSDTEKIFPSAMSIEQINSLTVEPLKTLLAEPEGNYPQSSIEPPMHSYLTSVAEEVLSPKEKTVSDTNREQRVTLQKQEAQSALILSQSLAEGHVESLQSPDVMISQVNYEPLVPSEHSCTEGGKILIESANPLENAGQDSAVRIEEGKSLRFPLALEEKQVLLKEEHSDNVVMPPDQIIESKREPVAIKKVQEVQGRDLLSKESLLSGIPEEQRLNLKIQICRALQAAVASEQPGLFSEWLRNIEKVEVEAVNITQEPRHIMCMYLVTSAKSVTEEVTIIIEDVDPQMANLKMELRDALCAIIYEEIDILTAEGPRIQQGAKTSLQEEMDSFSGSQKVEPITEPEVESKYLISTEEVSYFNVQSRVKYLDATPVTKGVASAVVSDEKQDESLKPSEEKEESSSESGTEEVATVKIQEAEGGLIKEDGPMIHTPLVDTVSEEGDIVHLTTSITNAKEVNWYFENKLVPSDEKFKCLQDQNTYTLVIDKVNTEDHQGEYVCEALNDSGKTATSAKLTVVKRAAPVIKRKIEPLEVALGHLAKFTCEIQSAPNVRFQWFKAGREIYESDKCSIRSSKYISSLEILRTQVVDCGEYTCKASNEYGSVSCTATLTVTEAYPPTFLSRPKSLTTFVGKAAKFICTVTGTPVIETIWQKDGAALSPSPNWRISDAENKHILELSNLTIQDRGVYSCKASNKFGADICQAELIIIDKPHFIKELEPVQSAINKKVHLECQVDEDRKVTVTWSKDGQKLPPGKDYKICFEDKIATLEIPLAKLKDSGTYVCTASNEAGSSSCSATVTVREPPSFVKKVDPSYLMLPGESARLHCKLKGSPVIQVTWFKNNKELSESNTVRMYFVNSEAILDITDVKVEDSGSYSCEAVNDVGSDSCSTEIVIKEPPSFIKTLEPADIVRGTNALLQCEVSGTGPFEISWFKDKKQIRSSKKYRLFSQKSLVCLEIFSFNSADVGEYECVVANEVGKCGCMATHLLKEPPTFVKKVDDLIALGGQTVTLQAAVRGSEPISVTWMKGQEVIREDGKIKMSFSNGVAVLIIPDVQISFGGKYTCLAENEAGSQTSVGELIVKEPAKIIERAELIQVTAGDPATLEYTVAGTPELKPKWYKDGRPLVASKKYRISFKNNVAQLKFYSAELHDSGQYTFEISNEVGSSSCETTFTVLDRDIAPFFTKPLRNVDSVVNGTCRLDCKIAGSLPMRVSWFKDGKEIAASDRYRIAFVEGTASLEIIRVDMNDAGNFTCRATNSVGSKDSSGALIVQEPPSFVTKPGSKDVLPGSAVCLKSTFQGSTPLTIRWFKGNKELVSGGSCYITKEALESSLELYLVKTSDSGTYTCKVSNVAGGVECSANLFVKEPATFVEKLEPSQLLKKGDATQLACKVTGTPPIKITWFANDREIKESSKHRMSFVESTAVLRLTDVGIEDSGEYMCEAQNEAGSDHCSSIVIVKESPYFTKEFKPIEVLKEYDVMLLAEVAGTPPFEITWFKDNTILRSGRKYKTFIQDHLVSLQILKFVAADAGEYQCRVTNEVGSSICSARVTLREPPSFIKKIESTSSLRGGTAAFQATLKGSLPITVTWLKDSDEITEDDNIRMTFENNVASLYLSGIEVKHDGKYVCQAKNDAGIQRCSALLSVKEPATITEEAVSIDVTQGDPATLQVKFSGTKEITAKWFKDGQELTLGSKYKISVTDTVSILKIISTEKKDSGEYTFEVQNDVGRSSCKARINVLDLIIPPSFTKKLKKMDSIKGSFIDLECIVAGSHPISIQWFKDDQEISASEKYKFSFHDNTAFLEISQLEGTDSGTYTCSATNKAGHNQCSGHLTVKEPPYFVEKPQSQDVNPNTRVQLKALVGGTAPMTIKWFKDNKELHSGAARSVWKDDTSTSLELFAAKATDSGTYICQLSNDVGTATSKATLFVKEPPQFIKKPSPVLVLRNGQSTTFECQITGTPKIRVSWYLDGNEITAIQKHGISFIDGLATFQISGARVENSGTYVCEARNDAGTASCSIELKVKEPPTFIRELKPVEVVKYSDVELECEVTGTPPFEVTWLKNNREIRSSKKYTLTDRVSVFNLHITKCDPSDTGEYQCIVSNEGGSCSCSTRVALKEPPSFIKKIENTTTVLKSSATFQSTVAGSPPISITWLKDDQILDEDDNVYISFVDSVATLQIRSVDNGHSGRYTCQAKNESGVERCYAFLLVQEPAQIVEKAKSVDVTEKDPMTLECVVAGTPELKVKWLKDGKQIVPSRYFSMSFENNVASFRIQSVMKQDSGQYTFKVENDFGSSSCDAYLRVLDQNIPPSFTKKLTKMDKVLGSSIHMECKVSGSLPISAQWFKDGKEISTSAKYRLVCHERSVSLEVNNLELEDTANYTCKVSNVAGDDACSGILTVKEPPSFLVKPGRQQAIPDSTVEFKAILKGTPPFKIKWFKDDVELVSGPKCFIGLEGSTSFLNLYSVDASKTGQYTCHVTNDVGSDSCTTMLLVTEPPKFVKKLEASKIVKAGDSSRLECKIAGSPEIRVVWFRNEHELPASDKYRMTFIDSVAVIQMNNLSTEDSGDFICEAQNPAGSTSCSTKVIVKEPPVFSSFPPIVETLKNAEVSLECELSGTPPFEVVWYKDKRQLRSSKKYKIASKNFHTSIHILNVDTSDIGEYHCKAQNEVGSDTCVCTVKLKEPPRFVSKLNSLTVVAGEPAELQASIEGAQPIFVQWLKEKEEVIRESENIRITFVENVATLQFAKAEPANAGKYICQIKNDGGMEENMATLMVLEPAVIVEKAGPMTVTVGETCTLECKVAGTPELSVEWYKDGKLLTSSQKHKFSFYNKISSLRILSVERQDAGTYTFQVQNNVGKSSCTAVVDVSDRAVPPSFTRRLKNTGGVLGASCILECKVAGSSPISVAWFHEKTKIVSGAKYQTTFSDNVCTLQLNSLDSSDMGNYTCVAANVAGSDECRAVLTVQEPPSFVKEPEPLEVLPGKNVTFTSVIRGTPPFKVNWFRGARELVKGDRCNIYFEDTVAELELFNIDISQSGEYTCVVSNNAGQASCTTRLFVKEPAAFLKRLSDHSVEPGKSIILESTYTGTLPISVTWKKDGFNITTSEKCNIVTTEKTCILEILNSTKRDAGQYSCEIENEAGRDVCGALVSTLEPPYFVTELEPLEAAVGDSVSLQCQVAGTPEITVSWYKGDTKLRPTPEYRTYFTNNVATLVFNKVNINDSGEYTCKAENSIGTASSKTVFRIQERQLPPSFARQLKDIEQTVGLPVTLTCRLNGSAPIQVCWYRDGVLLRDDENLQTSFVDNVATLKILQTDLSHSGQYSCSASNPLGTASSSARLTAREPKKSPFFDIKPVSIDVIAGESADFECHVTGAQPMRITWSKDNKEIRPGGNYTITCVGNTPHLRILKVGKGDSGQYTCQATNDVGKDMCSAQLSVKEPPKFVKKLEASKVAKQGESIQLECKISGSPEIKVSWFRNDSELHESWKYNMSFINSVALLTINEASAEDSGDYICEAHNGVGDASCSTALTVKAPPVFTQKPSPVGALKGSDVILQCEISGTPPFEVVWVKDRKQVRNSKKFKITSKHFDTSLHILNLEASDVGEYHCKATNEVGSDTCSCSVKFKEPPRFVKKLSDTSTLIGDAVELRAIVEGFQPISVVWLKDRGEVIRESENTRISFIDNIATLQLGSPEASNSGKYICQIKNDAGMRECSAVLTVLEPARIIEKPEPMTVTTGNPFALECVVTGTPELSAKWFKDGRELSADSKHHITFINKVASLKIPCAEMSDKGLYSFEVKNSVGKSNCTVSVHVSDRIVPPSFIRKLKDVNAILGASVVLECRVSGSAPISVGWFQDGNEIVSGPKCQSSFSENVCTLNLSLLEPSDTGIYTCVAANVAGSDECSAVLTVQEPPSFEQTPDSVEVLPGMSLTFTSVIRGTPPFKVKWFKGSRELVPGESCNISLEDFVTELELFEVQPLESGDYSCLVTNDAGSASCTTHLFVKEPATFVKRLADFSVETGSPIVLEATYTGTPPISVSWIKDEYLISQSERCSITMTEKSTILEILESTIEDYAQYSCLIENEAGQDICEALVSVLEPPYFIEPLEHVEAVIGEPATLQCKVDGTPEIRISWYKEHTKLRSAPAYKMQFKNNVASLVINKVDHSDVGEYSCKADNSVGAVASSAVLVIKERKLPPFFARKLKDVHETLGFPVAFECRINGSEPLQVSWYKDGVLLKDDANLQTSFVHNVATLQILQTDQSHIGQYNCSASNPLGTASSSAKLILSEHEVPPFFDLKPVSVDLALGESGTFKCHVTGTAPIKITWAKDNREIRPGGNYKMTLVENTATLTVLKVGKGDAGQYTCYASNIAGKDSCSAHLGVQEPPRFIKKLEPSRIVKQDEFTRYECKIGGSPEIKVLWYKDETEIQESSKFRMSFVDSVAVLEMHNLSVEDSGDYTCEAHNAAGSASSSTSLKVKEPPIFRKKPHPIETLKGADVHLECELQGTPPFHVSWYKDKRELRSGKKYKIMSENFLTSIHILNVDAADIGEYQCKATNDVGSDTCVGSIALKAPPRFVKKLSDISTVVGKEVQLQTTIEGAEPISVVWFKDKGEIVRESDNIWISYSENIATLQFSRVEPANAGKYTCQIKNDAGMQECFATLSVLEPATIVEKPESIKVTTGDTCTLECTVAGTPELSTKWFKDGKELTSDNKYKISFFNKVSGLKIINVAPSDSGVYSFEVQNPVGKDSCTASLQVSDRTVPPSFTRKLKETNGLSGSSVVMECKVYGSPPISVSWFHEGNEISSGRKYQTTLTDNTCALTVNMLEESDSGDYTCIATNMAGSDECSAPLTVREPPSFVQKPDPMDVLTGTNVTFTSIVKGTPPFSVSWFKGSSELVPGDRCNVSLEDSVAELELFDVDTSQSGEYTCIVSNEAGKASCTTHLYIKAPAKFVKRLNDYSIEKGKPLILEGTFTGTPPISVTWKKNGINVTPSQRCNITTTEKSAILEIPSSTVEDAGQYNCYIENASGKDSCSAQILILEPPYFVKQLEPVKVSVGDSASLQCQLAGTPEIGVSWYKGDTKLRPTTTYKMHFRNNVATLVFNQVDINDSGEYICKAENSVGEVSASTFLTVQEQKLPPSFSRQLRDVQETVGLPVVFDCAISGSEPISVSWYKDGKPLKDSPNVQTSFLDNTATLNIFKTDRSLAGQYSCTATNPIGSASSSARLILTEGKNPPFFDIRLAPVDAVVGESADFECHVTGTQPIKVSWAKDSREIRSGGKYQISYLENSAHLTVLKVDKGDSGQYTCYAVNEVGKDSCTAQLNIKERLIPPSFTKRLSETVEETEGNSFKLEGRVAGSQPITVAWYKNNIEIQPTSNCEITFKNNTLVLQVRKAGMNDAGLYTCKVSNDAGSALCTSSIVIKEPKKPPVFDQHLTPVTVSEGEYVQLSCHVQGSEPIRIQWLKAGREIKPSDRCSFSFASGTAVLELRDVAKADSGDYVCKASNVAGSDTTKSKVTIKDKPAVAPATKKAAVDGRLFFVSEPQSIRVVEKTTATFIAKVGGDPIPNVKWTKGKWRQLNQGGRVFIHQKGDEAKLEIRDTTKTDSGLYRCVAFNEHGEIESNVNLQVDERKKQEKIEGDLRAMLKKTPILKKGAGEEEEIDIMELLKNVDPKEYEKYARMYGITDFRGLLQAFELLKQSQEEETHRLEIEEIERSERDEKEFEELVSFIQQRLSQTEPVTLIKDIENQTVLKDNDAVFEIDIKINYPEIKLSWYKGTEKLEPSDKFEISIDGDRHTLRVKNCQLKDQGNYRLVCGPHIASAKLTVIEPAWERHLQDVTLKEGQTCTMTCQFSVPNVKSEWFRNGRILKPQGRHKTEVEHKVHKLTIADVRAEDQGQYTCKYEDLETSAELRIEAEPIQFTKRIQNIVVSEHQSATFECEVSFDDAIVTWYKGPTELTESQKYNFRNDGRCHYMTIHNVTPDDEGVYSVIARLEPRGEARSTAELYLTTKEIKLELKPPDIPDSRVPIPTMPIRAVPPEEIPPVVAPPIPLLLPTPEEKKPPPKRIEVTKKAVKKDAKKVVAKPKEMTPREEIVKKPPPPTTLIPAKAPEIIDVSSKAEEVKIMTITRKKEVQKEKEAVYEKKQAVHKEKRVFIESFEEPYDELEVEPYTEPFEQPYYEEPDEDYEEIKVEAKKEVHEEWEEDFEEGQEYYEREEGYDEGEEEWEEAYQEREVIQVQKEVYEESHERKVPAKVPEKKAPPPPKVIKKPVIEKIEKTSRRMEEEKVQVTKVPEVSKKIVPQKPSRTPVQEEVIEVKVPAVHTKKMVISEEKMFFASHTEEEVSVTVPEVQKEIVTEEKIHVAVSKRVEPPPKVPELPEKPAPEEVAPVPIPKKVEPPAPKVPEVPKKPVPEEKKPVPVPKKEPAAPPKVPEVPKKPVPEEKIPVPVAKKKEAPPAKVPEVQKRVVTEEKITIVTQREESPPPAVPEIPKKKVPEERKPVPRKEEEVPPPPKVPALPKKPVPEEKVAVPVPVAKKAPPPRAEVSKKTVVEEKRFVAEEKLSFAVPQRVEVTRHEVSAEEEWSYSEEEEGVSISVYREEEREEEEEAEVTEYEVMEEPEEYVVEEKLHIISKRVEAEPAEVTERQEKKIVLKPKIPAKIEEPPPAKVPEAPKKIVPEKKVPAPVPKKEKVPPPKVPEEPKKPVPEKKVPPKVIKMEEPLPAKVTERHMQITQEEKVLVAVTKKEAPPKARVPEEPKRAVPEEKVLKLKPKREEEPPAKVTEFRKRVVKEEKVSIEAPKREPQPIKEVTIMEEKERAYTLEEEAVSVQREEEYEEYEEYDYKEFEEYEPTEEYDQYEEYEEREYERYEEHEEYITEPEKPIPVKPVPEEPVPTKPKAPPAKVLKKAVPEEKVPVPIPKKLKPPPPKVPEEPKKVFEEKIRISITKREKEQVTEPAAKVPMKPKRVVAEEKVPVPRKEVAPPVRVPEVPKELEPEEVAFEEEVVTHVEEYLVEEEEEYIHEEEEFITEEEVVPVIPVKVPEVPRKPVPEEKKPVPVPKKKEAPPAKVPEVPKKPEEKVPVLIPKKEKPPPAKVPEVPKKPVPEEKVPVPVPKKVEAPPAKVPEVPKKPVPEKKVPVPAPKKVEAPPAKVPEVPKKLIPEEKKPTPVPKKVEAPPPKVPKKREPVPVPVALPQEEEVLFEEEIVPEEEVLPEEEEVLPEEEEVLPEEEEVLPEEEEIPPEEEEVPPEEEYVPEEEEFVPEEEVLPEVKPKVPVPAPVPEIKKKVTEKKVVIPKKEEAPPAKVPEVPKKVEEKRIILPKEEEVLPVEVTEEPEEEPISEEEIPEEPPSIEEVEEVAPPRVPEVIKKAVPEAPTPVPKKVEAPPAKVSKKIPEEKVPVPVQKKEAPPAKVPEVPKKVPEKKVLVPKKEAVPPAKGRTVLEEKVSVAFRQEVVVKERLELEVVEAEVEEIPEEEEFHEVEEYFEEGEFHEVEEFIKLEQHRVEEEHRVEKVHRVIEVFEAEEVEVFEKPKAPPKGPEISEKIIPPKKPPTKVVPRKEPPAKVPEVPKKIVVEEKVRVPEEPRVPPTKVPDVLPPKEVVPEKKVPVPPAKKPEAPPPKVPEAPKEVVPEKKVPVPPPKKPEVPPTKVPEVPKAAVPEKKVPEAIPPKPESPPPEVPEAPKEVVPEKKVPAAPPKKPEVTPVKVPEAPKEVVPEKKVPVPPPKKPEVPPTKVPEVPKVAVPEKKVPEAIPPKPESPPPEVFEEPEEVALEEPPAEVVEEPEPAAPPQVTVPPKKPVPEKKAPAVVAKKPELPPVKVPEVPKEVVPEKKVPLVVPKKPEAPPAKVPEVPKEVVPEKKVAVPKKPEVPPAKVPEVPKKPVLEEKPAVPVPERAESPPPEVYEEPEEIAPEEEIAPEEEKPVPVAEEEEPEVPPPAVPEEPKKIIPEKKVPVIKKPEAPPPKEPEPEKVIEKPKLKPRPPPPPPAPPKEDVKEKIFQLKAIPKKKVPEKPQVPEKVELTPLKVPGGEKKVRKLLPERKPEPKEEVVLKSVLRKRPEEEEPKVEPKKLEKVKKPAVPEPPPPKPVEEVEVPTVTKRERKIPEPTKVPEIKPAIPLPAPEPKPKPEAEVKTIKPPPVEPEPTPIAAPVTVPVVGKKAEAKAPKEEAAKPKGPIKGVPKKTPSPIEAERRKLRPGSGGEKPPDEAPFTYQLKAVPLKFVKEIKDIILTESEFVGSSAIFECLVSPSTAITTWMKDGSNIRESPKHRFIADGKDRKLHIIDVQLSDAGEYTCVLRLGNKEKTSTAKLVVEELPVRFVKTLEEEVTVVKGQPLYLSCELNKERDVVWRKDGKIVVEKPGRIVPGVIGLMRALTINDADDTDAGTYTVTVENANNLECSSCVKVVEVIRDWLVKPIRDQHVKPKGTAIFACDIAKDTPNIKWFKGYDEIPAEPNDKTEILRDGNHLYLKIKNAMPEDIAEYAVEIEGKRYPAKLTLGEREVELLKPIEDVTIYEKESASFDAEISEADIPGQWKLKGELLRPSPTCEIKAEGGKRFLTLHKVKLDQAGEVLYQALNAITTAILTVKEIELDFAVPLKDVTVPERRQARFECVLTREANVIWSKGPDIIKSSDKFDIIADGKKHILVINDSQFDDEGVYTAEVEGKKTSARLFVTGIRLKFMSPLEDQTVKEGETATFVCELSHEKMHVVWFKNDAKLHTSRTVLISSEGKTHKLEMKEVTLDDISQIKAQVKELSSTAQLKVLEADPYFTVKLHDKTAVEKDEITLKCEVSKDVPVKWFKDGEEIVPSPKYSIKADGLRRILKIKKADLKDKGEYVCDCGTDKTKANVTVEARLIKVEKPLYGVEVFVGETAHFEIELSEPDVHGQWKLKGQPLTASPDCEIIEDGKKHILILHNCQLGMTGEVSFQAANAKSAANLKVKELPLIFITPLSDVKVFEKDEAKFECEVSREPKTFRWLKGTQEITGDDRFELIKDGTKHSMVIKSAAFEDEAKYMFEAEDKHTSGKLIIEGIRLKFLTPLKDVTAKEKESAVFTVELSHDNIRVKWFKNDQRLHTTRSVSMQDEGKTHSITFKDLSIDDTSQIRVEAMGMSSEAKLTVLEGDPYFTGKLQDYTGVEKDEVILQCEISKADAPVKWFKDGKEIKPSKNAVIKADGKKRMLILKKALKSDIGQYTCDCGTDKTSGKLDIEDREIKLVRPLHSVEVMETETARFETEISEDDIHANWKLKGEALLQTPDCEIKEEGKIHSLVLHNCRLDQTGGVDFQAANVKSSAHLRVKPRVIGLLRPLKDVTVTAGETATFDCELSYEDIPVEWYLKGKKLEPSDKVVPRSEGKVHTLTLRDVKLEDAGEVQLTAKDFKTHANLFVKEPPVEFTKPLEDQTVEEGATAVLECEVSRENAKVKWFKNGTEILKSKKYEIVADGRVRKLVIHDCTPEDIKTYTCDAKDFKTSCNLNVVPPHVEFLRPLTDLQVREKEMARFECELSRENAKVKWFKDGAEIKKGKKYDIISKGAVRILVINKCLLDDEAEYSCEVRTARTSGMLTVLEEEAVFTKNLANIEVSETDTIKLVCEVSKPGAEVIWYKGDEEIIETGRYEILTEGRKRILVIQNAHLEDAGNYNCRLPSSRTDGKVKVHELAAEFISKPQNLEILEGEKAEFVCSISKESFPVQWKRDDKTLESGDKYDVIADGKKRVLVVKDATLQDMGTYVVMVGAARAAAHLTVIEKLRIVVPLKDTRVKEQQEVVFNCEVNTEGAKAKWFRNEEAIFDSSKYIILQKDLVYTLRIRDAHLDDQANYNVSLTNHRGENVKSAANLIVEEEDLRIVEPLKDIETMEKKSVTFWCKVNRLNVTLKWTKNGEEVPFDNRVSYRVDKYKHMLTIKDCGFPDEGEYIVTAGQDKSVAELLIIEAPTEFVEHLEDQTVTEFDDAVFSCQLSREKANVKWYRNGREIKEGKKYKFEKDGSIHRLIIKDCRLDDECEYACGVEDRKSRARLFVEEIPVEIIRPPQDILEAPGADVVFLAELNKDKVEVQWLRNNMVVVQGDKHQMMSEGKIHRLQICDIKPRDQGEYRFIAKDKEARAKLELAAAPKIKTADQDLVVDVGKPLTMVVPYDAYPKAEAEWFKENEPLSTKTIDTTAEQTSFRILEAKKGDKGRYKIVLQNKHGKAEGFINLKVIDVPGPVRNLEVTETFDGEVSLAWEEPLTDGGSKIIGYVVERRDIKRKTWVLATDRAESCEFTVTGLQKGGVEYLFRVSARNRVGTGEPVETDNPVEARSKYDVPGPPLNVTITDVNRFGVSLTWEPPEYDGGAEITNYVIELRDKTSIRWDTAMTVRAEDLSATVTDVVEGQEYSFRVRAQNRIGVGKPSAATPFVKVADPIERPSPPVNLTSSDQTQSSVQLKWEPPLKDGGSPILGYIIERCEEGKDNWIRCNMKLVPELTYKVTGLEKGNKYLYRVSAENKAGVSDPSEILGPLTADDAFVEPTMDLSAFKDGLEVIVPNPITILVPSTGYPRPTATWCFGDKVLETGDRVKMKTLSAYAELVISPSERSDKGIYTLKLENRVKTISGEIDVNVIARPSAPKELKFGDITKDSVHLTWEPPDDDGGSPLTGYVVEKREVSRKTWTKVMDFVTDLEFTVPDLVQGKEYLFKVCARNKCGPGEPAYVDEPVNMSTPATVPDPPENVKWRDRTANSIFLTWDPPKNDGGSRIKGYIVERCPRGSDKWVACGEPVAETKMEVTGLEEGKWYAYRVKALNRQGASKPSRPTEEIQAVDTQEAPEIFLDVKLLAGLTVKAGTKIELPATVTGKPEPKITWTKADMILKQDKRITIENVPKKSTVTIVDSKRSDTGTYIIEAVNVCGRATAVVEVNVLDKPGPPAAFDITDVTNESCLLTWNPPRDDGGSKITNYVVERRATDSEVWHKLSSTVKDTNFKATKLIPNKEYIFRVAAENMYGVGEPVQASPITAKYQFDPPGPPTRLEPSDITKDAVTLTWCEPDDDGGSPITGYWVERLDPDTDKWVRCNKMPVKDTTYRVKGLTNKKKYRFRVLAENLAGPGKPSKSTEPILIKDPIDPPWPPGKPTVKDVGKTSVRLNWTKPEHDGGAKIESYVIEMLKTGTDEWVRVAEGVPTTQHLLPGLMEGQEYSFRVRAVNKAGESEPSEPSDPVLCREKLYPPSPPRWLEVINITKNTADLKWTVPEKDGGSPITNYIVEKRDVRRKGWQTVDTTVKDTKCTVTPLTEGSLYVFRVAAENAIGQSDYTEIEDSVLAKDTFTTPGPPYALAVVDVTKRHVDLKWEPPKNDGGRPIQRYVIEKKERLGTRWVKAGKTAGPDCNFRVTDVIEGTEVQFQVRAENEAGVGHPSEPTEILSIEDPTSPPSPPLDLHVTDAGRKHIAIAWKPPEKNGGSPIIGYHVEMCPVGTEKWMRVNSRPIKDLKFKVEEGVVPDKEYVLRVRAVNAIGVSEPSEISENVVAKDPDCKPTIDLETHDIIVIEGEKLSIPVPFRAVPVPTVSWHKDGKEVKASDRLTMKNDHISAHLEVPKSVRADAGIYTITLENKLGSATASINVKVIGLPGPCKDIKASDITKSSCKLTWEPPEFDGGTPILHYVLERREAGRRTYIPVMSGENKLSWTVKDLIPNGEYFFRVKAVNKVGGGEYIELKNPVIAQDPKQPPDPPVDVEVHNPTAEAMTITWKPPLYDGGSKIMGYIIEKIAKGEERWKRCNEHLVPILTYTAKGLEEGKEYQFRVRAENAAGISEPSRATPPTKAVDPIDAPKVILRTSLEVKRGDEIALDASISGSPYPTITWIKDENVIVPEEIKKRAAPLVRRRKGEVQEEEPFVLPLTQRLSIDNSKKGESQLRVRDSLRPDHGLYMIKVENDHGIAKAPCTVSVLDTPGPPINFVFEDIRKTSVLCKWEPPLDDGGSEIINYTLEKKDKTKPDSEWIVVTSTLRHCKYSVTKLIEGKEYLFRVRAENRFGPGPPCVSKPLVAKDPFGPPDAPDKPIVEDVTSNSMLVKWNEPKDNGSPILGYWLEKREVNSTHWSRVNKSLLNALKANVDGLLEGLTYVFRVCAENAAGPGKFSPPSDPKTAHDPISPPGPPIPRVTDTSSTTIELEWEPPAFNGGGEIVGYFVDKQLVGTNEWSRCTEKMIKVRQYTVKEIREGADYKLRVSAVNAAGEGPPGETQPVTVAEPQEPPAVELDVSVKGGIQIMAGKTLRIPAVVTGRPVPTKVWTKEEGELDKDRVVIDNVGTKSELIIKDALRKDHGRYVITATNSCGSKFAAARVEVFDVPGPVLDLKPVVTNRKMCLLNWSDPEDDGGSEITGFIIERKDAKMHTWRQPIETERSKCDITGLLEGQEYKFRVIAKNKFGCGPPVEIGPILAVDPLGPPTSPERLTYTERTKSTITLDWKEPRSNGGSPIQGYIIEKRRHDKPDFERVNKRLCPTTSFLVENLDEHQMYEFRVKAVNEIGESEPSLPLNVVIQDDEVPPTIKLRLSVRGDTIKVKAGEPVHIPADVTGLPMPKIEWSKNETVIEKPTDALQITKEEVSRSEAKTELSIPKAVREDKGTYTVTASNRLGSVFRNVHVEVYDRPSPPRNLAVTDIKAESCYLTWDAPLDNGGSEITHYVIDKRDASRKKAEWEEVTNTAVEKRYGIWKLIPNGQYEFRVRAVNKYGISDECKSDKVVIQDPYRLPGPPGKPKVLARTKGSMLVSWTPPLDNGGSPITGYWLEKREEGSPYWSRVSRAPITKVGLKGVEFNVPRLLEGVKYQFRAMAINAAGIGPPSEPSDPEVAGDPIFPPGPPSCPEVKDKTKSSISLGWKPPAKDGGSPIKGYIVEMQEEGTTDWKRVNEPDKLITTCECVVPNLKELRKYRFRVKAVNEAGESEPSDTTGEIPATDIQEEPEVFIDIGAQDCLVCKAGSQIRIPAVIKGRPTPKSSWEFDGKAKKAMKDGVHDIPEDAQLETAENSSVIIIPECKRSHTGKYSITAKNKAGQKTANCRVKVMDVPGPPKDLKVSDITRGSCRLSWKMPDDDGGDRIKGYVIEKRTIDGKAWTKVNPDCGSTTFVVPDLLSEQQYFFRVRAENRFGIGPPVETIQRTTARDPIYPPDPPIKLKIGLITKNTVHLSWKPPKNDGGSPVTHYIVECLAWDPTGTKKEAWRQCNKRDVEELQFTVEDLVEGGEYEFRVKAVNAAGVSKPSATVGPCDCQRPDMPPSIDLKEFMEVEEGTNVNIVAKIKGVPFPTLTWFKAPPKKPDNKEPVLYDTHVNKLVVDDTCTLVIPQSRRSDTGLYTITAVNNLGTASKEMRLNVLGRPGPPVGPIKFESVSADQMTLSWFPPKDDGGSKITNYVIEKREANRKTWVHVSSEPKECTYTIPKLLEGHEYVFRIMAQNKYGIGEPLDSEPETARNLFSVPGAPDKPTVSSVTRNSMTVNWEEPEYDGGSPVTGYWLEMKDTTSKRWKRVNRDPIKAMTLGVSYKVTGLIEGSDYQFRVYAINAAGVGPASLPSDPATARDPIAPPGPPFPKVTDWTKSSADLEWSPPLKDGGSKVTGYIVEYKEEGKEEWEKGKDKEVRGTKLVVTGLKEGAFYKFRVSAVNIAGIGEPGEVTDVIEMKDRLVSPDLQLDASVRDRIVVHAGGVIRIIAYVSGKPPPTVTWNMNERTLPQEATIETTAISSSMVIKNCQRSHQGVYSLLAKNEAGERKKTIIVDVLDVPGPVGTPFLAHNLTNESCKLTWFSPEDDGGSPITNYVIEKRESDRRAWTPVTYTVTRQNATVQGLIQGKAYFFRIAAENSIGMGPFVETSEALVIREPITVPERPEDLEVKEVTKNTVTLTWNPPKYDGGSEIINYVLESRLIGTEKFHKVTNDNLLSRKYTVKGLKEGDTYEYRVSAVNIVGQGKPSFCTKPITCKDELAPPTLHLDFRDKLTIRVGEAFALTGRYSGKPKPKVSWFKDEADVLEDDRTHIKTTPATLALEKIKAKRSDSGKYCVVVENSTGSRKGFCQVNVVDRPGPPVGPVSFDEVTKDYMVISWKPPLDDGGSKITNYIIEKKEVGKDVWMPVTSASAKTTCKVSKLLEGKDYIFRIHAENLYGISDPLVSDSMKAKDRFRVPDAPDQPIVTEVTKDSALVTWNKPHDGGKPITNYILEKRETMSKRWARVTKDPIHPYTKFRVPDLLEGCQYEFRVSAENEIGIGDPSPPSKPVFAKDPIAKPSPPVNPEAIDTTCNSVDLTWQPPRHDGGSKILGYIVEYQKVGDEEWRRANHTPESCPETKYKVTGLRDGQTYKFRVLAVNAAGESDPAHVPEPVLVKDRLEPPELILDANMAREQHIKVGDTLRLSAIIKGVPFPKVTWKKEDRDAPTKARIDVTPVGSKLEIRNAAHEDGGIYSLTVENPAGSKTVSVKVLVLDKPGPPRDLEVSEIRKDSCYLTWKEPLDDGGSVITNYVVERRDVASAQWSPLSATSKKKSHFAKHLNEGNQYLFRVAAENQYGRGPFVETPKPIKALDPLHPPGPPKDLHHVDVDKTEVSLVWNKPDRDGGSPITGYLVEYQEEGTQDWIKFKTVTNLECVVTGLQQGKTYRFRVKAENIVGLGLPDTTIPIECQEKLVPPSVELDVKLIEGLVVKAGTTVRFPAIIRGVPVPTAKWTTDGSEIKTDEHYTVETDNFSSVLTIKNCLRRDTGEYQITVSNAAGSKTVAVHLTVLDVPGPPTGPINILDVTPEHMTISWQPPKDDGGSPVINYIVEKQDTRKDTWGVVSSGSSKTKLKIPHLQKGCEYVFRVRAENKIGVGPPLDSTPTVAKHKFSPPSPPGKPVVTDITENAATVSWTLPKSDGGSPITGYYMERREVTGKWVRVNKTPIADLKFRVTGLYEGNTYEFRVFAENLAGLSKPSPSSDPIKACRPIKPPGPPINPKLKDKSRETADLVWTKPLSDGGSPILGYVVECQKPGTAQWNRINKDELIRQCAFRVPGLIEGNEYRFRIKAANIVGEGEPRELAESVIAKDILHPPEVELDVTCRDVITVRVGQTIRILARVKGRPEPDITWTKEGKVLVREKRVDLIQDLPRVELQIKEAVRADHGKYIISAKNSSGHAQGSAIVNVLDRPGPCQNLKVTNVTKENCTISWENPLDNGGSEITNFIVEYRKPNQKGWSIVASDVTKRLIKANLLANNEYYFRVCAENKVGVGPTIETKTPILAINPIDRPGEPENLHIADKGKTFVYLKWRRPDYDGGSPNLSYHVERRLKGSDDWERVHKGSIKETHYMVDRCVENQIYEFRVQTKNEGGESDWVKTEEVVVKEDLQKPVLDLKLSGVLTVKAGDTIRLEAGVRGKPFPEVAWTKDKDATDLTRSPRVKIDTRADSSKFSLTKAKRSDGGKYVVTATNTAGSFVAYATVNVLDKPGPVRNLKIVDVSSDRCTVCWDPPEDDGGCEIQNYILEKCETKRMVWSTYSATVLTPGTTVTRLIEGNEYIFRVRAENKIGTGPPTESKPVIAKTKYDKPGRPDPPEVTKVSKEEMTVVWNPPEYDGGKSITGYFLEKKEKHSTRWVPVNKSAIPERRMKVQNLLPDHEYQFRVKAENEIGIGEPSLPSRPVVAKDPIEPPGPPTNFRVVDTTKHSITLGWGKPVYDGGAPIIGYVVEMRPKIADASPDEGWKRCNAAAQLVRKEFTVTSLDENQEYEFRVCAQNQVGIGRPAELKEAIKPKEILEPPEIDLDASMRKLVIVRAGCPIRLFAIVRGRPAPKVTWRKVGIDNVVRKGQVDLVDTMAFLVIPNSTRDDSGKYSLTLVNPAGEKAVFVNVRVLDTPGPVSDLKVSDVTKTSCHVSWAPPENDGGSQVTHYIVEKREADRKTWSTVTPEVKKTSFHVTNLVPGNEYYFRVTAVNEYGPGVPTDVPKPVLASDPLSEPDPPRKLEVTEMTKNSATLAWLPPLRDGGAKIDGYITSYREEEQPADRWTEYSVVKDLSLVVTGLKEGKKYKFRVAARNAVGVSLPREAEGVYEAKEQLLPPKILMPEQITIKAGKKLRIEAHVYGKPHPTCKWKKGEDEVVTSSHLAVHKADSSSILIIKDVTRKDSGYYSLTAENSSGTDTQKIKVVVMDAPGPPQPPFDISDIDADACSLSWHIPLEDGGSNITNYIVEKCDVSRGDWVTALASVTKTSCRVGKLIPGQEYIFRVRAENRFGISEPLTSPKMVAQFPFGVPSEPKNARVTKVNKDCIFVAWDRPDSDGGSPIIGYLIERKERNSLLWVKANDTLVRSTEYPCAGLVEGLEYSFRIYALNKAGSSPPSKPTEYVTARMPVDPPGKPEVIDVTKSTVSLIWARPKHDGGSKIIGYFVEACKLPGDKWVRCNTAPHQIPQEEYTATGLEEKAQYQFRAIARTAVNISPPSEPSDPVTILAENVPPRIDLSVAMKSLLTVKAGTNVCLDATVFGKPMPTVSWKKDGTLLKPAEGIKMAMQRNLCTLELFSVNRKDSGDYTITAENSSGSKSATIKLKVLDKPGPPASVKINKMYSDRAMLSWEPPLEDGGSEITNYIVDKRETSRPNWAQVSATVPITSCSVEKLIEGHEYQFRICAENKYGVGDPVFTEPAIAKNPYDPPGRCDPPVISNITKDHMTVSWKPPADDGGSPITGYLLEKRETQAVNWTKVNRKPIIERTLKATGLQEGTEYEFRVTAINKAGPGKPSDASKAAYARDPQYPPAPPAFPKVYDTTRSSVSLSWGKPAYDGGSPIIGYLVEVKRADSDNWVRCNLPQNLQKTRFEVTGLMEDTQYQFRVYAVNKIGYSDPSDVPDKHYPKDILIPPEGELDADLRKTLILRAGVTMRLYVPVKGRPPPKITWSKPNVNLRDRIGLDIKSTDFDTFLRCENVNKYDAGKYILTLENSCGKKEYTIVVKVLDTPGPPVNVTVKEISKDSAYVTWEPPIIDGGSPIINYVVQKRDAERKSWSTVTTECSKTSFRVANLEEGKSYFFRVFAENEYGIGDPGETRDAVKASQTPGPVVDLKVRSVSKSSCSIGWKKPHSDGGSRIIGYVVDFLTEENKWQRVMKSLSLQYSAKDLTEGKEYTFRVSAENENGEGTPSEITVVARDDVVAPDLDLKGLPDLCYLAKENSNFRLKIPIKGKPAPSVSWKKGEDPLATDTRVSVESSAVNTTLIVYDCQKSDAGKYTITLKNVAGTKEGTISIKVVGKPGIPTGPIKFDEVTAEAMTLKWAPPKDDGGSEITNYILEKRDSVNNKWVTCASAVQKTTFRVTRLHEGMEYTFRVSAENKYGVGEGLKSEPIVARHPFDVPDAPPPPNIVDVRHDSVSLTWTDPKKTGGSPITGYHLEFKERNSLLWKRANKTPIRMRDFKVTGLTEGLEYEFRVMAINLAGVGKPSLPSEPVVALDPIDPPGKPEVINITRNSVTLIWTEPKYDGGHKLTGYIVEKRDLPSKSWMKANHVNVPECAFTVTDLVEGGKYEFRIRAKNTAGAISAPSESTETIICKDEYEAPTIVLDPTIKDGLTIKAGDTIVLNAISILGKPLPKSSWSKAGKDIRPSDITQITSTPTSSMLTIKYATRKDAGEYTITATNPFGTKVEHVKVTVLDVPGPPGPVEISNVSAEKATLTWTPPLEDGGSPIKSYILEKRETSRLLWTVVSEDIQSCRHVATKLIQGNEYIFRVSAVNHYGKGEPVQSEPVKMVDRFGPPGPPEKPEVSNVTKNTATVSWKRPVDDGGSEITGYHVERREKKSLRWVRAIKTPVSDLRCKVTGLQEGSTYEFRVSAENRAGIGPPSEASDSVLMKDAAYPPGPPSNPHVTDTTKKSASLAWGKPHYDGGLEITGYVVEHQKVGDEAWIKDTTGTALRITQFVVPDLQTKEKYNFRISAINDAGVGEPAVIPDVEIVEREMAPDFELDAELRRTLVVRAGLSIRIFVPIKGRPAPEVTWTKDNINLKNRANIENTESFTLLIIPECNRYDTGKFVMTIENPAGKKSGFVNVRVLDTPGPVLNLRPTDITKDSVTLHWDLPLIDGGSRITNYIVEKREATRKSYSTATTKCHKCTYKVTGLSEGCEYFFRVMAENEYGIGEPTETTEPVKASEAPSPPDSLNIMDITKSTVSLAWPKPKHDGGSKITGYVIEAQRKGSDQWTHITTVKGLECVVRNLTEGEEYTFQVMAVNSAGRSAPRESRPVIVKEQTMLPELDLRGIYQKLVIAKAGDNIKVEIPVLGRPKPTVTWKKGDQILKQTQRVNFETTATSTILNINECVRSDSGPYPLTARNIVGEVGDVITIQVHDIPGPPTGPIKFDEVSSDFVTFSWDPPENDGGVPISNYVVEMRQTDSTTWVELATTVIRTTYKATRLTTGLEYQFRVKAQNRYGVGPGITSACIVANYPFKVPGPPGTPQVTAVTKDSMTISWHEPLSDGGSPILGYHVERKERNGILWQTVSKALVPGNIFKSSGLTDGIAYEFRVIAENMAGKSKPSKPSEPMLALDPIDPPGKPVPLNITRHTVTLKWAKPEYTGGFKITSYIVEKRDLPNGRWLKANFSNILENEFTVSGLTEDAAYEFRVIAKNAAGAISPPSEPSDAITCRDDVEAPKIKVDVKFKDTVILKAGEAFRLEADVSGRPPPTMEWSKDGKELEGTAKLEIKIADFSTNLVNKDSTRRDSGAYTLTATNPGGFAKHIFNVKVLDRPGPPEGPLAVTEVTSEKCVLSWFPPLDDGGAKIDHYIVQKRETSRLAWTNVASEVQVTKLKVTKLLKGNEYIFRVMAVNKYGVGEPLESEPVLAVNPYGPPDPPKNPEVTTITKDSMVVCWGHPDSDGGSEIINYIVERRDKAGQRWIKCNKKTLTDLRYKVSGLTEGHEYEFRIMAENAAGISAPSPTSPFYKACDTVFKPGPPGNPRVLDTSRSSISIAWNKPIYDGGSEITGYMVEIALPEEDEWQIVTPPAGLKATSYTITGLTENQEYKIRIYAMNSEGLGEPALVPGTPKAEDRMLPPEIELDADLRKVVTIRACCTLRLFVPIKGRPAPEVKWARDHGESLDKASIESTSSYTLLIVGNVNRFDSGKYILTVENSSGSKSAFVNVRVLDTPGPPQDLKVKEVTKTSVTLTWDPPLLDGGSKIKNYIVEKRESTRKAYSTVATNCHKTSWKVDQLQEGCSYYFRVLAENEYGIGLPAETAESVKASERPLPPGKITLMDVTRNSVSLSWEKPEHDGGSRILGYIVEMQTKGSDKWATCATVKVTEATITGLIQGEEYSFRVSAQNEKGISDPRQLSVPVIAKDLVIPPAFKLLFNTFTVLAGEDLKVDVPFIGRPTPAVTWHKDNVPLKQTTRVNAESTENNSLLTIKDACREDVGHYVVKLTNSAGEAIETLNVIVLDKPGPPTGPVKMDEVTADSITLSWGPPKYDGGSSINNYIVEKRDTSTTTWQIVSATVARTTIKACRLKTGCEYQFRIAAENRYGKSTYLNSEPTVAQYPFKVPGPPGTPVVTLSSRDSMEVQWNEPISDGGSRVIGYHLERKERNSILWVKLNKTPIPQTKFKTTGLEEGVEYEFRVSAENIVGIGKPSKVSECYVARDPCDPPGRPEAIIVTRNSVTLQWKKPTYDGGSKITGYIVEKKELPEGRWMKASFTNIIDTHFEVTGLVEDHRYEFRVIARNAAGVFSEPSESTGAITARDEVDPPRISMDPKYKDTIVVHAGESFKVDADIYGKPIPTIQWIKGDQELSNTARLEIKSTDFATSLSVKDAVRVDSGNYILKAKNVAGERSVTVNVKVLDRPGPPEGPVVISGVTAEKCTLAWKPPLQDGGSDIINYIVERRETSRLVWTVVDANVQTLSCKVTKLLEGNEYTFRIMAVNKYGVGEPLESEPVVAKNPFVVPDAPKAPEVTTVTKDSMIVVWERPASDGGSEILGYVLEKRDKEGIRWTRCHKRLIGELRLRVTGLIENHDYEFRVSAENAAGLSEPSPPSAYQKACDPIYKPGPPNNPKVIDITRSSVFLSWSKPIYDGGCEIQGYIVEKCDVSVGEWTMCTPPTGINKTNIEVEKLLEKHEYNFRICAINKAGVGEHADVPGPIIVEEKLEAPDIDLDLELRKIINIRAGGSLRLFVPIKGRPTPEVKWGKVDGEIRDAAIIDVTSSFTSLVLDNVNRYDSGKYTLTLENSSGTKSAFVTVRVLDTPSPPVNLKVTEITKDSVSITWEPPLLDGGSKIKNYIVEKREATRKSYAAVVTNCHKNSWKIDQLQEGCSYYFRVTAENEYGIGLPAQTADPIKVAEVPQPPGKITVDDVTRNSVSLSWTKPEHDGGSKIIQYIVEMQAKHSEKWSECARVKSLQAVITNLTQGEEYLFRVVAVNEKGRSDPRSLAVPIVAKDLVIEPDVKPAFSSYSVQVGQDLKIEVPISGRPKPTITWTKDGLPLKQTTRINVTDSLDLTTLSIKETHKDDGGQYGITVANVVGQKTASIEIVTLDKPDPPKGPVKFDDVSAESITLSWNPPLYTGGCQITNYIVQKRDTTTTVWDVVSATVARTTLKVTKLKTGTEYQFRIFAENRYGQSFALESDPIVAQYPYKEPGPPGTPFATAISKDSMVIQWHEPVNNGGSPVIGYHLERKERNSILWTKVNKTIIHDTQFKAQNLEEGIEYEFRVYAENIVGVGKASKNSECYVARDPCDPPGTPEPIMVKRNEITLQWTKPVYDGGSMITGYIVEKRDLPDGRWMKASFTNVIETQFTVSGLTEDQRYEFRVIAKNAAGAISKPSDSTGPITAKDEVELPRISMDPKFRDTIVVNAGETFRLEADVHGKPLPTIEWLRGDKEIEESARCEIKNTDFKALLIVKDAIRIDGGQYILRASNVAGSKSFPVNVKVLDRPGPPEGPVQVTGVTSEKCSLTWSPPLQDGGSDISHYVVEKRETSRLAWTVVASEVVTNSLKVTKLLEGNEYVFRIMAVNKYGVGEPLESAPVLMKNPFVLPGPPKSLEVTNIAKDSMTVCWNRPDSDGGSEIIGYIVEKRDRSGIRWIKCNKRRITDLRLRVTGLTEDHEYEFRVSAENAAGVGEPSPATVYYKACDPVFKPGPPTNAHIVDTTKNSITLAWGKPIYDGGSEILGYVVEICKADEEEWQIVTPQTGLRVTRFEISKLTEHQEYKIRVCALNKVGLGEATSVPGTVKPEDKLEAPELDLDSELRKGIVVRAGGSARIHIPFKGRPTPEITWSREEGEFTDKVQIEKGVNYTQLSIDNCDRNDAGKYILKLENSSGSKSAFVTVKVLDTPGPPQNLAVKEVRKDSAFLVWEPPIIDGGAKVKNYVIDKRESTRKAYANVSSKCSKTSFKVENLTEGAIYYFRVMAENEFGVGVPVETVDAVKAAEPPSPPGKVTLTDVSQTSASLMWEKPEHDGGSRVLGYVVEMQPKGTEKWSIVAESKVCNAVVTGLSSGQEYQFRVKAYNEKGKSDPRVLGVPVIAKDLTIQPSLKLPFNTYSIQAGEDLKIEIPVIGRPRPNISWVKDGEPLKQTTRVNVEETATSTVLHIKEGNKDDFGKYTVTATNSAGTATENLSVIVLEKPGPPVGPVRFDEVSADFVVISWEPPAYTGGCQISNYIVEKRDTTTTTWHMVSATVARTTIKITKLKTGTEYQFRIFAENRYGKSAPLDSKAVIVQYPFKEPGPPGTPFVTSISKDQMLVQWHEPVNDGGTKIIGYHLEQKEKNSILWVKLNKTPIQDTKFKTTGLDEGLEYEFKVSAENIVGIGKPSKVSECFVARDPCDPPGRPEAIVITRNNVTLKWKKPAYDGGSKITGYIVEKKDLPDGRWMKASFTNVLETEFTVSGLVEDQRYEFRVIARNAAGNFSEPSDSSGAITARDEIDAPNASLDPKYKDVIVVHAGETFVLEADIRGKPIPDVVWSKDGKELEETAARMEIKSTIQKTTLVVKDCIRTDGGQYILKLSNVGGTKSIPITVKVLDRPGPPEGPLKVTGVTAEKCYLAWNPPLQDGGANISHYIIEKRETSRLSWTQVSTEVQALNYKVTKLLPGNEYIFRVMAVNKYGIGEPLESGPVTACNPYKPPGPPSTPEVSAITKDSMVVTWARPVDDGGTEIEGYILEKRDKEGVRWTKCNKKTLTDLRLRVTGLTEGHSYEFRVAAENAAGVGEPSEPSVFYRACDALYPPGPPSNPKVTDTSRSSVSLAWSKPIYDGGAPVKGYVVEVKEAAADEWTTCTPPTGLQGKQFTVTKLKENTEYNFRICAINSEGVGEPATLPGSVVAQERIEPPEIELDADLRKVVVLRASATLRLFVTIKGRPEPEVKWEKAEGILTDRAQIEVTSSFTMLVIDNVTRFDSGRYNLTLENNSGSKTAFVNVRVLDSPSAPVNLTIREVKKDSVTLSWEPPLIDGGAKITNYIVEKRETTRKAYATITNNCTKTTFRIENLQEGCSYYFRVLASNEYGIGLPAETTEPVKVSEPPLPPGRVTLVDVTRNTATIKWEKPESDGGSKITGYVVEMQTKGSEKWSTCTQVKTLEATISGLTAGEEYVFRVAAVNEKGRSDPRQLGVPVIARDIEIKPSVELPFHTFNVKAREQLKIDVPFKGRPQATVNWRKDGQTLKETTRVNVSSSKTVTSLSIKEASKEDVGTYELCVSNSAGSITVPITIIVLDRPGPPGPIRIDEVSCDSITISWNPPEYDGGCQISNYIVEKKETTSTTWHIVSQAVARTSIKIVRLTTGSEYQFRVCAENRYGKSSYSESSAVVAEYPFSPPGPPGTPKVVHATKSTMLVTWQVPVNDGGSRVIGYHLEYKERSSILWSKANKILIADTQMKVSGLDEGLMYEYRVYAENIAGIGKCSKSCEPVPARDPCDPPGQPEVTNITRKSVSLKWSKPHYDGGAKITGYIVERRELPDGRWLKCNYTNIQETYFEVTELTEDQRYEFRVFARNAADSVSEPSESTGPIIVKDDVEPPRVMMDVKFRDVIVVKAGEVLKINADIAGRPLPVISWAKDGIEIEERARTEIISTDNHTLLTVKDCIRRDTGQYVLTLKNVAGTRSVAVNCKVLDKPGPPAGPLEINGLTAEKCSLSWGRPQEDGGADIDYYIVEKRETSHLAWTICEGELQMTSCKVTKLLKGNEYIFRVTGVNKYGVGEPLESVAIKALDPFTVPSPPTSLEITSVTKESMTLCWSRPESDGGSEISGYIIERREKNSLRWVRVNKKPVYDLRVKSTGLREGCEYEYRVYAENAAGLSLPSETSPLIRAEDPVFLPSPPSKPKIVDSGKTTITIAWVKPLFDGGAPITGYTVEYKKSDDTDWKTSIQSLRGTEYTISGLTTGAEYVFRVKSVNKVGASDPSDSSDPQIAKEREEEPLFDIDSEMRKTLIVKAGASFTMTVPFRGRPVPNVLWSKPDTDLRTRAYVDTTDSRTSLTIENANRNDSGKYTLTIQNVLSAASLTLVVKVLDTPGPPTNITVQDVTKESAVLSWDVPENDGGAPVKNYHIEKREASKKAWVSVTNNCNRLSYKVTNLQEGAIYYFRVSGENEFGVGIPAETKEGVKITEKPSPPEKLGVTSISKDSVSLTWLKPEHDGGSRIVHYVVEALEKGQKNWVKCAVAKSTHHVVSGLRENSEYFFRVFAENQAGLSDPRELLLPVLIKEQLEPPEIDMKNFPSHTVYVRAGSNLKVDIPISGKPLPKVTLSRDGVPLKATMRFNTEITAENLTINLKESVTADAGRYEITAANSSGTTKAFINIVVLDRPGPPTGPVVISDITEESVTLKWEPPKYDGGSQVTNYILLKRETSTAVWTEVSATVARTMMKVMKLTTGEEYQFRIKAENRFGISDHIDSACVTVKLPYTTPGPPSTPWVTNVTRESITVGWHEPVSNGGSAVVGYHLEMKDRNSILWQKANKLVIRTTHFKVTTISAGLIYEFRVYAENAAGVGKPSHPSEPVLAIDACEPPRNVRITDISKNSVSLSWQQPAFDGGSKITGYIVERRDLPDGRWTKASFTNVTETQFIISGLTQNSQYEFRVFARNAVGSISNPSEVVGPITCIDSYGGPVIDLPLEYTEVVKYRAGTSVKLRAGISGKPAPTIEWYKDDKELQTNALVCVENTTDLASILIKDADRLNSGCYELKLRNAMGSASATIRVQILDKPGPPGGPIEFKTVTAEKITLLWRPPADDGGAKITHYIVEKRETSRVVWSMVSEHLEECIITTTKIIKGNEYIFRVRAVNKYGIGEPLESDSVVAKNAFVTPGPPGIPEVTKITKNSMTVVWSRPIADGGSDISGYFLEKRDKKSLGWFKVLKETIRDTRQKVTGLTENSDYQYRVCAVNAAGQGPFSEPSEFYKAADPIDPPGPPAKIRIADSTKSSITLGWSKPVYDGGSAVTGYVVEIRQGEEEEWTTVSTKGEVRTTEYVVSNLKPGVNYYFRVSAVNCAGQGEPIEMNEPVQAKDILEAPEIDLDVALRTSVIAKAGEDVQVLIPFKGRPPPTVTWRKDEKNLGSDARYSIENTDSSSLLTIPQVTRNDTGKYILTIENGVGEPKSSTVSVKVLDTPAACQKLQVKHVSRGTVTLLWDPPLIDGGSPIINYVIEKRDATKRTWSVVSHKCSSTSFKLIDLSEKTPFFFRVLAENEIGIGEPCETTEPVKAAEVPAPIRDLSMKDSTKTSVILSWTKPDFDGGSVITEYVVERKGKGEQTWSHAGISKTCEIEVSQLKEQSVLEFRVFAKNEKGLSDPVTIGPITVKELIITPEVDLSDIPGAQVTVRIGHNVHLELPYKGKPKPSISWLKDGLPLKESEFVRFSKTENKITLSIKNAKKEHGGKYTVILDNAVCRIAVPITVITLGPPSKPKGPIRFDEIKADSVILSWDVPEDNGGGEITCYSIEKRETSQTNWKMVCSSVARTTFKVPNLVKDAEYQFRVRAENRYGVSQPLVSSIIVAKHQFRIPGPPGKPVIYNVTSDGMSLTWDAPVYDGGSEVTGFHVEKKERNSILWQKVNTSPISGREYRATGLVEGLDYQFRVYAENSAGLSSPSDPSKFTLAVSPVDPPGTPDYIDVTRETITLKWNPPLRDGGSKIVGYSIEKRQGNERWVRCNFTDVSECQYTVTGLSPGDRYEFRIIARNAVGTISPPSQSSGIIMTRDENVPPIVEFGPEYFDGLIIKSGESLRIKALVQGRPVPRVTWFKDGVEIEKRMNMEITDVLGSTSLFVRDATRDHRGVYTVEAKNASGSAKAEIKVKVQDTPGKVVGPIRFTNITGEKMTLWWDAPLNDGCAPITHYIIEKRETSRLAWALIEDKCEAQSYTAIKLINGNEYQFRVSAVNKFGVGRPLDSDPVVAQIQYTVPDAPGIPEPSNITGNSITLTWARPESDGGSEIQQYILERREKKSTRWVKVISKRPISETRFKVTGLTEGNEYEFHVMAENAAGVGPASGISRLIKCREPVNPPGPPTVVKVTDTSKTTVSLEWSKPVFDGGMEIIGYIIEMCKADLGDWHKVNAEACVKTRYTVTDLQAGEEYKFRVSAINGAGKGDSCEVTGTIKAVDRLTAPELDIDANFKQTHVVRAGASIRLFIAYQGRPTPTAVWSKPDSNLSLRADIHTTDSFSTLTVENCNRNDAGKYTLTVENNSGSKSITFTVKVLDTPGPPGPITFKDVTRGSATLMWDAPLLDGGARIHHYVVEKREASRRSWQVISEKCTRQIFKVNDLAEGVPYYFRVSAVNEYGVGEPYEMPEPIVATEQPAPPRRLDVVDTSKSSAVLAWLKPDHDGGSRITGYLLEMRQKGSDFWVEAGHTKQLTFTVERLVEKTEYEFRVKAKNDAGYSEPREAFSSVIIKEPQIEPTADLTGITNQLITCKAGSPFTIDVPISGRPAPKVTWKLEEMRLKETDRVSITTTKDRTTLTVKDSMRGDSGRYFLTLENTAGVKTFSVTVVVIGRPGPVTGPIEVSSVSAESCVLSWGEPKDGGGTEITNYIVEKRESGTTAWQLVNSSVKRTQIKVTHLTKYMEYSFRVSSENRFGVSKPLESAPIIAEHPFVPPSAPTRPEVYHVSANAMSIRWEEPYHDGGSKIIGYWVEKKERNTILWVKENKVPCLECNYKVTGLVEGLEYQFRTYALNAAGVSKASEASRPIMAQNPVDAPGRPEVTDVTRSTVSLIWSAPAYDGGSKVVGYIIERKPVSEVGDGRWLKCNYTIVSDNFFTVTALSEGDTYEFRVLAKNAAGVISKGSESTGPVTCRDEYAPPKAELDARLHGDLVTIRAGSDLVLDAAVGGKPEPKIIWTKGDKELDLCEKVSLQYTGKRATAVIKFCDRSDSGKYTLTVKNASGTKAVSVMVKVLDSPGPCGKLTVSRVTQEKCTLAWSLPQEDGGAEITHYIVERRETSRLNWVIVEGECPTLSYVVTRLIKNNEYIFRVRAVNKYGPGVPVESEPIVARNSFTIPSPPGIPEEVGTGKEHIIIQWTKPESDGGNEISNYLVDKREKKSLRWTRVNKDYVVYDTRLKVTSLMEGCDYQFRVTAVNAAGNSEPSEASNFISCREPSYTPGPPSAPRVVDTTKHSISLAWTKPMYDGGTDIVGYVLEMQEKDTDQWYRVHTNATIRNTEFTVPDLKMGQKYSFRVAAVNVKGMSEYSESIAEIEPVERIEIPDLELADDLKKTVTIRAGASLRLMVSVSGRPPPVITWSKQGIDLASRAIIDTTESYSLLIVDKVNRYDAGKYTIEAENQSGKKSATVLVKVYDTPGPCPSVKVKEVSRDSVTITWEIPTIDGGAPVNNYIVEKREAAMRAFKTVTTKCSKTLYRISGLVEGTMYYFRVLPENIYGIGEPCETSDAVLVSEVPLVPAKLEVVDVTKSTVTLAWEKPLYDGGSRLTGYVLEACKAGTERWMKVVTLKPTVLEHTVTSLNEGEQYLFRIRAQNEKGVSEPRETVTAVTVQDLRVLPTIDLSTMPQKTIHVPAGRPVELVIPIAGRPPPAASWFFAGSKLRESERVTVETHTKVAKLTIRETTIRDTGEYTLELKNVTGTTSETIKVIILDKPGPPTGPIKIDEIDATSITISWEPPELDGGAPLSGYVVEQRDAHRPGWLPVSESVTRSTFKFTRLTEGNEYVFRVAATNRFGIGSYLQSEVIECRSSIRIPGPPETLQIFDVSRDGMTLTWYPPEDDGGSQVTGYIVERKEVRADRWVRVNKVPVTMTRYRSTGLTEGLEYEHRVTAINARGSGKPSRPSKPIVAMDPIAPPGKPQNPRVTDTTRTSVSLAWSVPEDEGGSKVTGYLIEMQKVDQHEWTKCNTTPTKIREYTLTHLPQGAEYRFRVLACNAGGPGEPAEVPGTVKVTEMLEYPDYELDERYQEGIFVRQGGVIRLTIPIKGKPFPICKWTKEGQDISKRAMIATSETHTELVIKEADRGDSGTYDLVLENKCGKKAVYIKVRVIGSPNSPEGPLEYDDIQVRSVRVSWRPPADDGGADILGYILERREVPKAAWYTIDSRVRGTSLVVKGLKENVEYHFRVSAENQFGISKPLKSEEPVTPKTPLNPPEPPSNPPEVLDVTKSSVSLSWSRPKDDGGSRVTGYYIERKETSTDKWVRHNKTQITTTMYTVTGLVPDAEYQFRIIAQNDVGLSETSPASEPVVCKDPFDKPSQPGELEILSISKDSVTLQWEKPECDGGKEILGYWVEYRQSGDSAWKKSNKERIKDKQFTIGGLLEATEYEFRVFAENETGLSRPRRTAMSIKTKLTSGEAPGIRKEMKDVTTKLGEAAQLSCQIVGRPLPDIKWYRFGKELIQSRKYKMSSDGRTHTLTVMTEEQEDEGVYTCIATNEVGEVETSSKLLLQATPQFHPGYPLKEKYYGAVGSTLRLHVMYIGRPVPAMTWFHGQKLLQNSENITIENTEHYTHLVMKNVQRKTHAGKYKVQLSNVFGTVDAILDVEIQDKPDKPTGPIVIEALLKNSAVISWKPPADDGGSWITNYVVEKCEAKEGAEWQLVSSAISVTTCRIVNLTENAGYYFRVSAQNTFGISDPLEVSSVVIIKSPFEKPGAPGKPTITAVTKDSCVVAWKPPASDGGAKIRNYYLEKREKKQNKWISVTTEEIRETVFSVKNLIEGLEYEFRVKCENLGGESEWSEISEPITPKSDVPIQAPHFKEELRNLNVRYQSNATLVCKVTGHPKPIVKWYRQGKEIIADGLKYRIQEFKGGYHQLIIASVTDDDATVYQVRATNQGGSVSGTASLEVEVPAKIHLPKTLEGMGAVHALRGEVVSIKIPFSGKPDPVITWQKGQDLIDNNGHYQVIVTRSFTSLVFPNGVERKDAGFYVVCAKNRFGIDQKTVELDVADVPDPPRGVKVSDVSRDSVNLTWTEPASDGGSKITNYIVEKCATTAERWLRVGQARETRYTVINLFGKTSYQFRVIAENKFGLSKPSEPSEPTITKEDKTRAMNYDEEVDETREVSMTKASHSSTKELYEKYMIAEDLGRGEFGIVHRCVETSSKKTYMAKFVKVKGTDQVLVKKEISILNIARHRNILHLHESFESMEELVMIFEFISGLDIFERINTSAFELNEREIVSYVHQVCEALQFLHSHNIGHFDIRPENIIYQTRRSSTIKIIEFGQARQLKPGDNFRLLFTAPEYYAPEVHQHDVVSTATDMWSLGTLVYVLLSGINPFLAETNQQIIENIMNAEYTFDEEAFKEISIEAMDFVDRLLVKERKSRMTASEALQHPWLKQKIERVSTKVIRTLKHRRYYHTLIKKDLNMVVSAARISCGGAIRSQKGVSVAKVKVASIEIGPVSGQIMHAVGEEGGHVKYVCKIENYDQSTQVTWYFGVRQLENSEKYEITYEDGVAILYVKDITKLDDGTYRCKVVNDYGEDSSYAELFVKGVREVYDYYCRRTMKKIKRRTDTMRLLERPPEFTLPLYNKTAYVGENVRFGVTITVHPEPHVTWYKSGQKIKPGDNDKKYTFESDKGLYQLTINSVTTDDDAEYTVVARNKYGEDSCKAKLTVTLHPPPTDSTLRPMFKRLLANAECQEGQSVCFEIRVSGIPPPTLKWEKDGQPLSLGPNIEIIHEGLDYYALHIRDTLPEDTGYYRVTATNTAGSTSCQAHLQVERLRYKKQEFKSKEEHERHVQKQIDKTLRMAEILSGTESVPLTQVAKEALREAAVLYKPAVSTKTVKGEFRLEIEEKKEERKLRMPYDVPEPRKYKQTTIEEDQRIKQFVPMSDMKWYKKIRDQYEMPGKLDRVVQKRPKRIRLSRWEQFYVMPLPRITDQYRPKWRIPKLSQDDLEIVRPARRRTPSPDYDFYYRPRRRSLGDISDEELLLPIDDYLAMKRTEEERLRLEEELELGFSASPPSRSPPHFELSSLRYSSPQAHVKVEETRKDFRYSTYHIPTKAEASTSYAELRERHAQAAYRQPKQRQRIMAEREDEELLRPVTTTQHLSEYKSELDFMSKEEKSRKKSRRQREVTEITEIEEEYEISKHAQRESSSSASRLLRRRRSLSPTYIELMRPVSELIRSRPQPAEEYEDDTERRSPTPERTRPRSPSPVSSERSLSRFERSARFDIFSRYESMKAALKTQKTSERKYEVLSQQPFTLDHAPRITLRMRSHRVPCGQNTRFILNVQSKPTAEVKWYHNGVELQESSKIHYTNTSGVLTLEILDCHTDDSGTYRAVCTNYKGEASDYATLDVTGGDYTTYASQRRDEEVPRSVFPELTRTEAYAVSSFKKTSEMEASSSVREVKSQMTETRESLSSYEHSASAEMKSAALEEKSLEEKSTTRKIKTTLAARILTKPRSMTVYEGESARFSCDTDGEPVPTVTWLRKGQVLSTSARHQVTTTKYKSTFEISSVQASDEGNYSVVVENSEGKQEAEFTLTIQKARVTEKAVTSPPRVKSPEPRVKSPEAVKSPKRVKSPEPSHPKAVSPTETKPTPTEKVQHLPVSAPPKITQFLKAEASKEIAKLTCVVESSVLRAKEVTWYKDGKKLKENGHFQFHYSADGTYELKINNLTESDQGEYVCEISGEGGTSKTNLQFMGQAFKSIHEKVSKISETKKSDQKTTESTVTRKTEPKAPEPISSKPVIVTGLQDTTVSSDSVAKFAVKATGEPRPTAIWTKDGKAITQGGKYKLSEDKGGFFLEIHKTDTSDSGLYTCTVKNSAGSVSSSCKLTIKAIKDTEAQKVSTQKTSEITPQKKAVVQEEISQKALRSEEIKMSEAKSQEKLALKEEASKVLISEEVKKSAATSLEKSIVHEEITKTSQASEEVRTHAEIKAFSTQMSINEGQRLVLKANIAGATDVKWVLNGVELTNSEEYRYGVSGSDQTLTIKQASHRDEGILTCISKTKEGIVKCQYDLTLSKELSDAPAFISQPRSQNINEGQNVLFTCEISGEPSPEIEWFKNNLPISISSNVSISRSRNVYSLEIRNASVSDSGKYTIKAKNFRGQCSATASLMVLPLVEEPSREVVLRTSGDTSLQGSFSSQSVQMSASKQEASFSSFSSSSASSMTEMKFASMSAQSMSSMQESFVEMSSSSFMGISNMTQLESSTSKMLKAGIRGIPPKIEALPSDISIDEGKVLTVACAFTGEPTPEVTWSCGGRKIHSQEQGRFHIENTDDLTTLIIMDVQKQDGGLYTLSLGNEFGSDSATVNIHIRSI

SEQ ID NO: 7668 - protein, 419 aa, Homo sapiens
MKLYQTPLELKLKHSTVHVDELCPLIVPNLGVAVIHDYADWVKEASGDLPEAQIVKHWSLTWTLCEALWGHLKELDSQLNEPREYIQILERRRAFSRWLSCTATPQIEEEVSLTQKNSPVEAVFSYLTGKRISEACSLAQQSGDHRLALLLSQFVGSQSVRELLTMQLVDWHQLQADSFIQDERLRIFALLAGKPVWQLSEKKQINVCSQLDWKRSLAIHLWYLLPPTASISRALSMYEEAFQNTSDSDRYACSPLPSYLEGSGCVIAEEQNSQTPLRDVCFHLLKLYSDRHYDLNQLLEPRSITADPLDYRLSWHLWEVLRALNYTHLSAQCEGVLQVTLASLKVRGSGSGPSLSSCTLTTQAYVRRLFESCLPGTASCWRPLNLGLKRLSLPRSSVYLPNGSTRPKLCEHTWNLTST

SEQ ID NO: 7669 - protein, 417 aa, Homo sapiens
SSAHQSLSQRAHWRRRGSIHQPAPRLQDRASVCMGVTGAHGFPCCGKGSVEVAEMRDDLSQHQIQEEQELEADMLEQKPQLQVDLDLDPDPDPDPELEIGQVPALLESELYPALKLEAELDTEANSNEESDFEEPMQLVCKIESVHSNMGLPTPQTFRPWSLNSNCRSFTEENHVSACHHSISAQTSKHLFWANKLIQASEHSLQRAINMQLNNGSAGQPIRSPLREAIPTNALCSEEQLQIPDAHSAPPTTSSQAPSPLLSSDLPPPIDLTELITFASSLAMASSSRMDLPSLEHMMKAPPQEALEPSTEPLLTTVEEREPENHAETLPEKPREARAPLKSWSQEDKNFAQSYFDFSKPGIKRATIKGQIQLLQPPATSPLLQGSKEDSVPPGKEKENPLLVKIHFKLSAPTIPEK

SEQ ID NO: 7670 - protein, 505 aa, Homo sapiens
MSESKAKKIEIKDVDGQTLSKLIDYIYTAEIEVTEENVQVLLPAASLLQLMDVRQNCCDFLQSQLHPTNCLGIRAFADVHTCTDLLQQANAYAEQHFPEVMLGEEFLSLSLDQVCSLISSDKLTVSSEEKVFEAVISWINYEKETRLEHMAKLMEHVRLPLLPRDYLVQTVEEEALIKNNNTCKDFLIEAMKYHLLPLDQRLLIKNPRTKPRTPVSLPKVMIVVGGQAPKAIRSVECYDFEEDRWDQIAELPSRRCRAGVVFMAGHVYAVGGFNGSLRVRTVDVYDGVKDQWTSIASMQERRSTLGAAVLNDLLYAVGGFDGSTGLASVEAYSYKTNEWFFVAPMNTRRSSVGVGVVEGKLYAVGGYDGASRQCLSTVEQYNPATNEWIYVADMSTRRSGAGVGVLSGQLYATGGHDGPLVRKSVEVYDPGTNTWKQVADMNMCRRNAGVCAVNGLLYVVGGDDGSCNLASVEYYNPVTDKWTLLPTNMSTGRSYAGVAVIHKSL

SEQ ID NO: 7671 - protein, 587 aa, Homo sapiens
MEGESVKLSSQTLIQAGDDEKNQRTITVNPAHMGKAFKVMNELRSKQLLCDVMIVAEDVEIEAHRVVLAACSPYFCAMFTGDMSESKAKKIEIKDVDGQTLSKLIDYIYTAEIEVTEENVQVLLPAASLLQLMDVRQNCCDFLQSQLHPTNCLGIRAFADVHTCTDLLQQANAYAEQHFPEVMLGEEFLSLSLDQVCSLISSDKLTVSSEEKVFEAVISWINYEKETRLEHMAKLMEHVRLPLLPRDYLVQTVEEEALIKNNNTCKDFLIEAMKYHLLPLDQRLLIKNPRTKPRTPVSLPKVMIVVGGQAPKAIRSVECYDFEEDRWDQIAELPSRRCRAGVVFMAGHVYAVGGFNGSLRVRTVDVYDGVKDQWTSIASMQERRSTLGAAVLNDLLYAVGGFDGSTGLASVEAYSYKTNEWFFVAPMNTRRSSVGVGVVEGKLYAVGGYDGASRQCLSTVEQYNPATNEWIYVADMSTRRSGAGVGVLSGQLYATGGHDGPLVRKSVEVYDPGTNTWKQVADMNMCRRNAGVCAVNGLLYVVGGDDGSCNLASVEYYNPVTDKWTLLPTNMSTGRSYAGVAVIHKSL

SEQ ID NO: 7672 - protein, 555 aa, Homo sapiens
MGKAFKVMNELRSKQLLCDVMIVAEDVEIEAHRVVLAACSPYFCAMFTGDMSESKAKKIEIKDVDGQTLSKLIDYIYTAEIEVTEENVQVLLPAASLLQLMDVRQNCCDFLQSQLHPTNCLGIRAFADVHTCTDLLQQANAYAEQHFPEVMLGEEFLSLSLDQVCSLISSDKLTVSSEEKVFEAVISWINYEKETRLEHMAKLMEHVRLPLLPRDYLVQTVEEEALIKNNNTCKDFLIEAMKYHLLPLDQRLLIKNPRTKPRTPVSLPKVMIVVGGQAPKAIRSVECYDFEEDRWDQIAELPSRRCRAGVVFMAGHVYAVGGFNGSLRVRTVDVYDGVKDQWTSIASMQERRSTLGAAVLNDLLYAVGGFDGSTGLASVEAYSYKTNEWFFVAPMNTRRSSVGVGVVEGKLYAVGGYDGASRQCLSTVEQYNPATNEWIYVADMSTRRSGAGVGVLSGQLYATGGHDGPLVRKSVEVYDPGTNTWKQVADMNMCRRNAGVCAVNGLLYVVGGDDGSCNLASVEYYNPVTDKWTLLPTNMSTGRSYAGVAVIHKSL

SEQ ID NO: 7673 - protein, 452 aa, Homo sapiens
MVIIIFFTRTGSPALTKQQQKKGTMALSGNCSRYYPREQGSAVPNSFPEVVELNVGGQVYFTRHSTLISIPHSLLWKMFSPKRDTANDLAKDSKGRFFIDRDGFLFRYILDYLRDRQVVLPDHFPEKGRLKREAEYFQLPDLVKLLTPDEIKQSPDEFCHSDFEDASQGSDTRICPPSSLLPADRKWGFITVGYRGSCTLGREGQADAKFRRVPRILVCGRISLAKEVFGETLNESRDPDRAPERYTSRFYLKFKHLERAFDMLSECGFHMVACNSSVTASFINQYTDDKIWSSYTEYVFYREPSRWSPSHCDCCCKNGKGDKEGESGTSCNDLSTSSCDSQSEASSPQETVICGPVTRQTNIQTLDRPIKKGPVQLIQQSEMRRKSDLLRTLTSGSRESNMSSKKKAVKEKLSIEEELEKCIQDFLKIKIPDRFPERKHPWQSELLRKYHL

SEQ ID NO: 7674 - protein, 2971 aa, Homo sapiens
MAKDVRQFWSNVEKVVQFKQQSRLEEKRKKALDLHLDFIVGQTEKYSDLLSQSLNQPLTSSKAGSSPCLGSSSAASSPPPPASRLDDEDGDFQPQEDEEEDDEETIEVEEQQEGNDAEAQRREIELLRREGELPLEELLRSLPPQLLEGPSSPSQTPSSHDSDTRDGPEEGAEEEPPQVLEIKPPPSAVTQRNKQPWHPDEDDEEFTANEEEAEDEEDTIAAEEQLEGEVDHAMELSELAREGELSMEELLQQYAGAYAPGSGSSEDEDEDEVDANSSDCEPEGPVEAEEPPQEDSSSQSDSVEDRSEDEEDEHSEEEETSGSSASEESESEESEDAQSQSQADEEEEDDDFGVEYLLARDEEQSEADAGSGPPTPGPTTLGPKKEITDIAAAAESLQPKGYTLATTQVKTPIPLLLRGQLREYQHIGLDWLVTMYEKKLNGILADEMGLGKTIQTISLLAHLACEKGNWGPHLIIVPTSVMLNWEMELKRWCPSFKILTYYGAQKERKLKRQGWTKPNAFHVCITSYKLVLQDHQAFRRKNWRYLILDEAQNIKNFKSQRWQSLLNFNSQRRLLLTGTPLQNSLMELWSLMHFLMPHVFQSHREFKEWFSNPLTGMIEGSQEYNEGLVKRLHKVLRPFLLRRVKVDVEKQMPKKYEHVIRCRLSKRQRCLYDDFMAQTTTKETLATGHFMSVINILMQLRKVCNHPNLFDPRPVTSPFITPGICFSTASLVLRATDVHPLQRIDMGRFDLIGLEGRVSRYEADTFLPRHRLSRRVLLEVATAPDPPPRPKPVKMKVNRMLQPVPKQEGRTVVVVNNPRAPLGPVPVRPPPGPELSAQPTPGPVPQVLPASLMVSASPAGPPLIPASRPPGPVLLPPLQPNSGSLPQVLPSPLGVLSGTSRPPTPTLSLKPTPPAPVRLSPAPPPGSSSLLKPLTVPPGYTFPPAAATTTSTTTATATTTAVPAPTPAPQRLILSPDMQARLPSGEVVSIGQLASLAQRPVANAGGSKPLTFQIQGNKLTLTGAQVRQLAVGQPRPLQMPPTMVNNTGVVKIVVRQAPRDGLTPVPPLAPAPRPPSSGLPAVLNPRPTLTPGRLPTPTLGTARAPMPTPTLVRPLLKLVHSPSPEVSASAPGAAPLTISSPLHVPSSLPGPASSPMPIPNSSPLASPVSSTVSVPLSSSLPISVPTTLPAPASAPLTIPISAPLTVSASGPALLTSVTPPLAPVVPAAPGPPSLQPSGASPSASALTLGLATAPSLSSSQTPGHPLLLAPTSSHVPGLNSTVAPACSPVLVPASALASPFPSAPNPAPAQASLLAPASSASQALATPLAPMAAPQTAILAPSPAPPLAPLPVLAPSPGAAPVLASSQTPVPVMAPSSTPGTSLASASPVPAPTPVLAPSSTQTMLPAPVPSPLPSPASTQTLALAPALAPTLGGSSPSQTLSLGTGNPQGPFPTQTLSLTPASSLVPTPAQTLSLAPGPPLGPTQTLSLAPAPPLAPASPVGPAPAHTLTLAPASSSASLLAPASVQTLTLSPAPVPTLGPAAAQTLALAPASTQSPASQASSLVVSASGAAPLPVTMVSRLPVSKDEPDTLTLRSGPPSPPSTATSFGGPRPRRQPPPPPRSPFYLDSLEEKRKRQRSERLERIFQLSEAHGALAPVYGTEVLDFCTLPQPVASPIGPRSPGPSHPTFWTYTEAAHRAVLFPQQRLDQLSEIIERFIFVMPPVEAPPPSLHACHPPPWLAPRQAAFQEQLASELWPRARPLHRIVCNMRTQFPDLRLIQYDCGKLQTLAVLLRQLKAEGHRVLIFTQMTRMLDVLEQFLTYHGHLYLRLDGSTRVEQRQALMERFNADKRIFCFILSTRSGGVGVNLTGADTVVFYDSDWNPTMDAQAQDRCHRIGQTRDVHIYRLISERTVEENILKKANQKRMLGDMAIEGGNFTTAYFKQQTIRELFDMPLEEPSSSSVPSAPEEEEETVASKQTHILEQALCRAEDEEDIRAATQAKAEQVAELAEFNENDGFPAGEGEEAGRPGAEDEEMSRAEQEIAALVEQLTPIERYAMKFLEASLEEVSREELKQAEEQVEAARKDLDQAKEEVFRLPQEEEEGPGAGDESSCGTGGGTHRRSKKAKAPERPGTRVSERLRGARAETQGANHTPVISAHQTRSTTTPPRCSPARERVPRPAPRPRPTPASAPAAIPALVPVPVSAPVPISAPNPITILPVHILPSPPPPSQIPPCSSPACTPPPACTPPPAHTPPPAQTCLVTPSSPLLLGPPSVPISASVTNLPLGLRPEAELCAQALASPESLELASVASSETSSLSLVPPKDLLPVAVEILPVSEKNLSLTPSAPSLTLEAGSIPNGQEQEAPDSAEGTTLTVLPEGEELPLCVSESNGLELPPSAASDEPLQEPLEADRTSEELTEAKTPTSSPEKPQELVTAEVAAPSTSSSATSSPEGPSPARPPRRRTSADVEIRGQGTGRPGQPPGPKVLRKLPGRLVTVVEEKELVQRRRQQRGAASTLVPGVSETSASPGSPSVRSMSGPESSPPIGGPCEAAPSSSLPTPPQQPFIARRHIELGVTGGGSPENGDGALLAITPPAVKRRRGRPPKKNRSPADAGRGVDEAPSSTLKGKTNGADPVPGPETLIVADPVLEPQLIPGPQPLGPQPVHRPNPLLSPVEKRRRGRPPKARDLPIPGTISSAGDGNSESRTQPPPHPSPLTPLPPLLVCPTATVANTVTTVTISTSPPKRKRGRPPKNPPSPRPSQLPVLDRDSTSVLESCGLGRRRQPQGQGESEGSSSDEDGSRPLTRLARLRLEAEGMRGRKSGGSMVVAVIQDDLDLADSGPGGLELTPPVVSLTPKLRSTRLRPGSLVPPLETEKLPRKRAGAPVGGSPGLAKRGRLQPPSPLGPEGSVEESEAEASGEEEEGDGTPRRRPGPRRLVGTTNQGDQRILRSSAPPSLAGPAVSHRGRKAKT

SEQ ID NO: 7675 - protein, 1885 aa, Homo sapiens
CRYCRCRENAEPSRAGWAAAARAATGTRFPSAAAAAMARLADYFIVVGYDHEKPGSGEGLGKIIQRFPQKDWDDTPFPQGIELFCQPGGWQLSRERKQPTFFVVVLTDIDSDRHYCSCLTFYEAEINLQGTKKEEIEGEAKVSGLIQPAEVFAPKSLVLVSRLYYPEIFRACLGLIYTVYVDSLNVSLESLIANLCACLVPAAGGSQKLFSLGAGDRQLIQTPLHDSLPITGTSVALLFQQLGIQNVLSLFCAVLTENKVLFHSASFQRLSDACRALESLMFPLKYSYPYIPILPAQLLEVLSSPTPFIIGVHSVFKTDVHELLDVIIADLDGGTIKIPECIHLSSLPEPLLHQTQSALSLILHPDLEVADHAFPPPRTALSHSKMLDKEVRAVFLRLFAQLFQGYRSCLQLIRIHAEPVIHFHKTAFLGQRGLVENDFLTKVLSGMAFAGFVSERGPPYRSCDLFDELVAFEVERIKVEENNPVKMIKHVRELAEQLFKNENPNPHMAFQKVPRPTEGSHLRVHILPFPEINEARVQELIQENVAKNQNAPPATRIEKKCVVPAGPPVVSIMDKVTTVFNSAQRLEVVRNCISFIFENKILETEKTLPAALRALKGKAARQCLTDELGLHVQQNRAILDHQQFDYIIRMMNCTLQDCSSLEEYNIAAALLPLTSAFYRKLAPGVSQFAYTCVQDHPIWTNQQFWETTFYNAVQEQVRSLYLSAKEDNHAPHLKQKDKLPDDHYQEKTAMDLAAEQLRLWPTLSKSTQQELVQHEESTVFSQAIHFANLMVNLLVPLDTSKNKLLRTSAPGDWESGSNSIVTNSIAGSVAESYDTESGFEDSENTDIANSVVRFITRFIDKVCTESGVTQDHIKSLHCMIPGIVAMHIETLEAVHRESRRLPPIQKPKILRPALLPGEEIVCEGLRVLLDPDGREEATGGLLGGPQLLPAEGALFLTTYRILFRGTPHDQLVGEQTVVRSFPIASITKEKKITMQNQLQQNMQEGLQITSASFQLIKVAFDEEVSPEVVEIFKKQLMKFRYPQSIFSTFAFAAGQTTPQIILPKQKEKNTSFRTFSKTIVKGAKRAGKMTIGRQYLLKKKTGTIVEERVNRPGWNEDDDVSVSDESELPTSTTLKASEKSTMEQLVEKACFRDYQRLGLGTISGSSSRSRPEYFRITASNRMYSLCRSYPGLLVVPQAVQDSSLPRVARCYRHNRLPVVCWKNSRSGTLLLRSGGFHGKGVVGLFKSQNSPQAAPTSSLESSSSIEQEKYLQALLNAVSVHQKLRGNSTLTVRPAFALSPGVWASLRSSTRLISSPTSFIDVGARLAGKDHSASFSNSSYLQNQLLKRQAALYIFGEKSQLRNFKVEFALNCEFVPVEFHEIRQVKASFKKLMRACIPSTIPTDSEVTFLKALGDSEWFPQLHRIMQLAVVVSEVLENGSSVLVCLEEGWDITAQVTSLVQLLSDPFYRTLEGFQMLVEKEWLSFGHKFSQRSSLTLNCQGSGFAPVFLQFLDCVHQVHNQYPTEFEFNLYYLKFLAFHYVSNRFKTFLLDSDYERLEHGTLFDDKGEKHAKKGVCIWECIDRMHKRSPIFFNYLYSPLEIEALKPNVNVSSLKKWDYYIEETLSTGPSYDWMMLTPKHFPSEDSDLAGEAGPRSQRRTVWPCYDDVSCTQPDALTSLFSEIEKLEHKLNQAPEKWQQLWERVTVDLKEEPRTDRSQRHLSRSPGIVSTNLPSYQKRSLLHLPDSSMGEEQNSSISPSNGVERRAATLYSQYTSKNDENRSFEGTLYKRGALLKGWKPRWFVLDVTKHQLRYYDSGEDTSCKGHIDLAEVEMVIPAGPSMGAPKHTSDKAFFDLKTSKRVYNFCAQDGQSAQQWMDKIQSCISDA

SEQ ID NO: 7676 - protein, 1302 aa, Homo sapiens
MELYFGEYQHVQQEYGVHLRLASDDTQKSRSSQNSKAGSYGVSIRVQGIDGHPYIVLNNTERCLAGTSFSENGPPFPPPVINNLPLHSSNGSVPKENSEELQLPENPYAQPSPIRNLKQPLLHEGKNGVLDRKDGSVKPSHLLNFQRHPELLQPYDPEKNELNLQNHQPSESNWLKTLTEEGINNKKPWTCFPKPSNSQPTSPSLEDPAKSGVTAIRLCSSVVIEDPKKQTSVCVNVQSCTKERVGEEALFTSGRPLTAHSPHAHPETKKTRPDVLPFRRQDSAGPVLDGARSRRSSSSSTTPTSANSLYRFLLDDQECAIHADNVNRHENRRYIPFLPGTGRDIDTGSIPGVDQLIEKFDQKPGLQRRGRSGKRNRINTDDRKRSRSVDSAFPFGLQGNSEYLIEFSRNLGKSSEHLLRPSQVCPQRPLSQERRGKQSVGRTFAKLQGAAHGASCAHSRPPQPNIDGKVLETEGSQESTVIRAPSLGAQSKKEEEVKTATATLMLQNRATATSPDSGAKKISVKTFPSASNTQATPDLLKGQQELTQQTNEETAKQILYNYLKEGSTDNDDATKRKVNLVFEKIQTLKSRAAGSAQGNNQACNSTSEVKDLLEQKSKLTIEVAELQRQLQLEVKNQQNIKEERERMRANLEELRSQHNEKVEENSTLQQRLEESEGELRKNLEELFQVKMEREQHQTEIRDLQDQLSEMHDELDSAKRSEDREKGALIEELLQAKQDLQDLLIAKEEQEDLLRKRERELTALKGALKEEVSSHDQEMDKLKEQYDAELQALRESVEEATKNVEVLASRSNTSEQDQAGTEMRVKLLQEENEKLQGRSEELERRVAQLQRQIEDLKGDEAKAKETLKKYEGEIRQLEEALVHARKEEKEAVSARRALENELEAAQGNLSQTTQEQKQLSEKLKEESEQKEQLRRLKNEMENERWHLGKTIEKLQKEMADIVEASRTSTLELQNQLDEYKEKNRRELAEMQRQLKEKTLEAEKSRLTAMKMQDEMRLMEEELRDYQRAQDEALTKRQLLEQTLKDLEYELEAKSHLKDDRSRLVKQMEDKVSQLEMELEEERNNSDLLSERISRSREQMEQLRNELLQERAARQDLECDKISLERQNKDLKSRIIHLEGSYRSSKEGLVVQMEARIAELEDRLESEERDRANLQLSNRRLERKVKELVMQVDDEHLSLTDQKDQLSLRLKAMKRQVEEAEEEIDRLESSKKKLQRELEEQMDMNEHLQGQLNSMKKDLRLKKLPSKVLDDMDDDDDLSTDGGSLYEAPVSYTFSKDSTVASQI

SEQ ID NO: 7677 - protein, 2186 aa, Homo sapiens
MAGERTRRFTRSLLRPGQAAELRHSAASAAAVAVSSRQQQRQEKPRLLEPLDYETVIEELEKTYRNDPLQDLLFFPSDDFSAATVSWDIRTLYSTVPEDAEHKAENLLVKEACKFYSSQWHVVNYKYEQYSGDIRQLPRAEYKPEKLPSHSFEIDHEDADKDEDTTSHSSSKGGGGAGGTGVFKSGWLYKGNFNSTVNNTVTVRSFKKRYFQLTQLPDNSYIMNFYKDEKISKEPKGCIFLDSCTGVVQNNRLRKYAFELKMNDLTYFVLAAETESDMDEWIHTLNRILQISPEGPLQGRRSTELTDLGLDSLDNSVTCECTPEETDSSENNLHADFAKYLTETEDTVKTTRNMERLNLFSLDPDIDTLKLQKKDLLEPESVIKPFEEKAAKRIMIICKALNSNLQGCVTENENDPITNIEPFFVSVALYDLRDSRKISADFHVDLNHAAVRQMLLGASVALENGNIDTITPRQSEEPHIKGLPEEWLKFPKQAVFSVSNPHSEIVLVAKIEKVLMGNIASGAEPYIKNPDSNKYAQKILKSNRQFCSKLGKYRMPFAWAVRSVFKDNQGNVDRDSRFSPLFRQESSKISTEDLVKLVSDYRRADRISKMQTIPGSLDIAVDNVPLEHPNCVTSSFIPVKPFNMMAQTEPTVEVEEFVYDSTKYCRPYRVYKNQIYIYPKHLKYDSQKCFNKARNITVCIEFKNSDEESAKPLKCIYGKPGGPLFTSAAYTAVLHHSQNPDFSDEVKIELPTQLHEKHHILFSFYHVTCDINAKANAKKKEALETSVGYAWLPLMKHDQIASQEYNIPIATSLPPNYLSFQDSASGKHGGSDIKWVDGGKPLFKVSTFVVSTVNTQDPHVNAFFQECQKREKDMSQSPTSNFIRSCKNLLNVEKIHAIMSFLPIILNQLFKVLVQNEEDEITTTVTRVLTDIVAKCHEEQLDHSVQSYIKFVFKTRACKERTVHEELAKNVTGLLKSNDSTTVKHVLKHSWFFFAIILKSMAQHLIDTNKIQLPRPQRFPESYQNELDNLVMVLSDHVIWKYKDALEETRRANHSVARFLKRCFTFMDRGYVFKMVNNYISMFSSGDLKTLCQYKFDFLQEVCQHEHFIPLCLPIRSANIPDPLTPSESTQELHASDMPEYSVTNEFCRKHFLIGILLREVGFALQEDQDVRHLALAVLKNLMAKHSFDDRYREPRKQAQIASLYMPLYGMLLDNMPRIYLKDLYPFTVNTSNQGSRDDLSTNGGFQSQTAIKHANSVDTSFSKDVLNSIAAFSSIAISTVNHADSRASLASLDSNPSTNEKSSEKTDNCEKIPRPLSLIGSTLRFDKLDQAETRSLLMCFLHIMKTISYETLIAYWQRAPSPEVSDFFSILDVCLQNFRYLGKRNIIRKIAAAFKFVQSTQNNGTLKGSNPSCQTSGLLSQWMHSTSSHEGHKQHRSQTLPIIRGKNALSNPKLLQMLDNTMTSNSNEIDIVHHVDTEANIATEVCLTILDLLSLFTQTHQRQLQQCDCQNSLMKRVFDTYMLFFQVNQSATALKHVFASLRLFVCKFPSAFFQGPADLCGSFCYEVLKCCNHRSRSTQTEASALLYFFMRKNFEFNKQKSIVRSHLQLIKAVSQLIADAGIGGSRFQHSLAITNNFANGDKQMKNSNFPAEVKDLTKRIRTVLMATAQMKEHEKDPEMLVDLQYSLANSYASTPELRRTWLESMAKIHARNGDLSEAAMCYIHIAALIAEYLKRKGYWKVEKICTASLLSEDTHPCDSNSLLTTPSGGSMFSMGWPAFLSITPNIKEEGAMKEDSGMQDTPYNENILVEQLYMCVEFLWKSERYELIADVNKPIIAVFEKQRDFKKLSDLYYDIHRSYLKVAEVVNSEKRLFGRYYRVAFYGQGFFEEEEGKEYIYKEPKLTGLSEISQRLLKLYADKFGADNVKIIQDSNKVNPKDLDPKYAYIQVTYVTPFFEEKEIEDRKTDFEMHHNINRFVFETPFTLSGKKHGGVAEQCKRRTILTTSHLFPYVKKRIQVISQSSTELNPIEVAIDEMSKKVSELNQLCTMEEVDMIRLQLKLQGSVSVKVNAGPMAYARAFLEETNAKKYPDNQVKLLKEIFRQFADACGQALDVNERLIKEDQLEYQEELRSHYKDMLSELSTVMNEQITGRDDLSKRGVDQTCTRVISKATPALPTVSISSSAEV

SEQ ID NO: 7678 - protein, 476 aa, Homo sapiens
MAFGKSHRDPYATSVGHLIEKATFAGVQTEDWGQFMHICDIINTTQDAPKDAVKALKKRISKNYNHKEIQLTLSLIDMCVQNCGPSFQSLIVKKEFVKENLVKLLNPRYNLPLDIQNRILNFIKTWSQGFPGGVDVSEVKEVYLDLVKKGVQFPPSEAEAETARQETAQISSNPPTSVPTAPALSSVIAPKNSTVTLVPEQIGKLHSELDMVKMNVRVMSAILMENTPGSENHEDIELLQKLYKTGREMQERIMDLLVVVENEDVTVELIQVNEDLNNAILGYERFTRNQQRILEQNKNQKEATNTTSEPSAPSQDLLDLSPSPRMPRATLGELNTMNNQLSGLNFSLPSSDVTNNLKPSLHPQMNLLALENTEIPPFAQRTSQNLTSSHAYDNFLEHSNSVFLQPVSLQTIAAAPSNQSLPPLPSNHPAMTKSDLQPPNYYEVMEFDPLAPAVTTEAIYEEIDAHQHKGAQNDGD

SEQ ID NO: 7679 - protein, 379 aa, Homo sapiens
MAATEGVGEAAQGGEPGQPAQPPPQPHPPPPQQQHKEEMAAEAGEAVASPMDDGFVSLDSPSYVLYRDRAEWADIDPVPQNDGPNPVVQIIYSDKFRDVYDYFRAVLQRDERSERAFKLTRDAIELNAANYTVWHFRRVLLKSLQKDLHEEMNYITAIIEEQPKNYQVWHHRRVLVEWLRDPSQELEFIADILNQDAKNYHAWQHRQWVIQEFKLWDNELQYVDQLLKEDVRNNSVWNQRYFVISNTTGYNDRAVLEREVQYTLEMIKLVPHNESAWNYLKGILQDRGLSKYPNLLNQLLDLQPSHSSPYLIAFLVDIYEDMLENQCDNKEDILNKALELCEILAKEKDTIRKEYWRYIGRSLQSKHSTENDSPTNVQQ

SEQ ID NO: 7680 - protein, 214 aa, Homo sapiens
MSCTVRDVYDYFRAVLQRDERSERAFKLTRDAIELNAANYTVWHFRRVLLKSLQKDLHEEMNYITAIIEEQPKNYQVWHHRRVLVEWLRDPSQELEFIADILNQDAKNYHAWQHRQWVIQEFKLWDNELQYVDQLLKEDVRNNSVWNQRYFVISNTTGYNDRAVLEREVQLVISFTCSFVTNMFACLPYLRHWGYSRSRSYPMELKEDRVLSGT

SEQ ID NO: 7681 - protein, 584 aa, Homo sapiens
SRSQIQPFFGRKKPLQQRWTSESWTNQNSCPPVVPRLDLGSLVDSDDEDNFSYIPLSTANLPNSSSTLGWVTPCQTPYTQYHLNKLDQNIIPENLPAPTDKCKLKYQQCKTEIKEGYKQYSQRNAENTKSNVTHKQSPRNKIDEKCVQDEEANTDDLTTLDRKAILQQGYADNSCDKQQRARKLDAEIVAAEKKKQIVAEQVMIDHLSRAVISDPEQNLAIEQKESDHILPDSKMTPLRFRKRTLHETKIRTHSTLTENVLSHKLQFDGRIVSRNGRDACRELIGFFFTHDQSLTIYEYRQFGKNRTNVLPFIQKSIYSHQCGRRKGKQYRLGDFYVGATLTFLSSDHLSLPESIKENTLLKLRITNIDQIALDSLKTASMEQEDDIIIQETNDRLVFKAIQDVLKEKLHKRGVRILTGLGKYFQQLDKEGNGLLDKADFKQALKVFHLEVSEKDFESAWLILNDNGNGKVDYGEFKRGIIGEMNEYRKSYVRKAFMKLDFNKSGSVPIINIRKCYCAKKHSQVISGHSTEEEIKSSFLETLKVACSKSDEVSYGEFEDYYEGLSIGIVDDEDFVNILRTPWGI

SEQ ID NO: 7682 - protein, 564 aa, Homo sapiens
MINTGTQMDLEVKGVAATSRSQIQPFFGRKKPLQQRWTSESWTNQNSCPPVVPRLDLGSLVDSDDEDQNIIPENLPAPTDKCKLKYQQCKTEIKEGYKQYSQRNAENTKSNVTHKQSPRNKIDEKCVQDEEANTDDLTTLDRKAILQQGYADNSCDKQQRARKLDAEIVAAEKKKQIVAEQVMIDHLSRAVISDPEQNLAIEQKESDHILPDSKMTPLRFRKRTLHETKIRTHSTLTENVLSHKLQFDGRIVSRNGRDACRELIGFFFTHDQSLTIYEYRQFGKNRTNVLPFIQKSIYSHQCGRRKGKQYRLGDFYVGATLTFLSSDHLSLPESIKENTLLKLRITNIDQIALDSLKTASMEQEDDIIIQETNDRLVFKAIQDVLKEKLHKRGVRILTGLGKYFQQLDKEGNGLLDKADFKQALKVFHLEVSEKDFESAWLILNDNGNGKVDYGEFKRGIIGEMNEYRKSYVRKAFMKLDFNKSGSVPIINIRKCYCAKKHSQVISGHSTEEEIKSSFLETLKVACSKSDEVSYGEFEDYYEGLSIGIVDDEDFVNILRTPWGI

SEQ ID NO: 7683 - protein, 557 aa, Homo sapiens
MGNSFCYTAVYCMINTGTQMDLEVKGVAATSRSQIQPFFGRKKPLQQRWTSESWTNQNSCPPVVPRLDLGSLVDSDDEDNFSYIPLSTANLPNSSSTLGWVTPCQTPYTQYHLNKLDQNIIPENLPAPTDKCKLKYQQCKTEIKEGYKQYSQRNAENTKSNVTHKQSPRNKIDEKCVQDEEANTDDLTTLDRKAILQQGYADNSCDKQQRARKLDAEIVAAEKKKQIVAEQVMIDHLSRAVISDPEQNLAIEQKESDHILPDSKMTPLRFRKRTLHETKIRTHSTLTENVLSHKLQFDGRIVSRNGRDACRELIGFFFTHDQSLTIYEYRQFGKNRTNVLPFIQKSIYSHQCGRRKGKQYRLGDFYVGATLTFLSSDHLSLPESIKENTLLKLRITNIDQIALDSLKTASMEQEDDIIIQETNDRLVFKAIQDVLKEKLHKRGVRILTGLGKYFQQLDKEGNGLLDKADFKQALKVFHLEVSEKDFESAWLILNDNGNGKVDYGEFKRGIIGEMNEYRKSYVRKAFMKLDFNKSGSVPIINIRKCYCAKKHSQVISG

SEQ ID NO: 7684 - protein, 791 aa, Homo sapiens
MSNRQEKYEAQNIVNSTEESDDAFDTVTIPVPSEEPQESDQTEEHESGIEQFSESHAIHVEEQSDQSFSSLEPDNEQLMEEVISPRQVSYTPQHHEKQYAMQRPNDDSLAFLDKIKSVKESLQESVEDSLATVKVVLIPVGQEIVIPFKVDTILKYLKDHFSHLLGIPHSVLQIRYSGKILKNNETLVQHGVKPQEIVQVEIFSTNPDLYPVRRIDGLTDVSQIITVTVQTGLDQYQQVPVEIVKSDFHKPSLGGFRHKVTGVEYHNAGTQTVPKRIPERLSIFCRDTQTVFQKKNLQQTTNTTSTQMTNIGVYVSNMTDKLVTPGKYFSAAEYHAQRLKAVTVIQTYYRQWHAKIFVENLRRQKSLRLEWETQQELRKIREKEEWIKLDYHRRHNPKTNEDFEFLYNALEFWRQEELTRINQSFTGAERKAALCELLEKETQIIASIGRHRYIAYMANQEAAIQAFLDKCSAPKIWRTPNGKTIEMDTQFTIRARELQNIYKCIMLKNISQDERLDVLLTLKHTVKEHECKLTQEILELIDREVDLMMRGVKHHNLEGLRKRIATLFFHYIKTPLFNPEVAKYLKVPQDPLKFYKKIYFCHSCQLYLPSTEFSVSSTSRRIYRCRNCINLQNEAQKRESFLKYKCLLQQLYYTEADYEDDSKIAFLMQLQDIQYLTENIWASQSVLSACDNLSDLVMVRWNKSLEWSPWNCILLTKDEAAAHLKLTSIEEGYERSFIHKIKHKHILAKNYFSQVPVLASFILDDGEIDEIRWKYHSDTTPKIIESQRPPH

SEQ ID NO: 7685 - protein, 317 aa, Homo sapiens
MNLNTSSNTGDTQRLKIASLDVKQILKNETELDITDNLRKKLHWAKKEKLEITTKHNAELASYESQIAKLRSEVEKGEALRQSLEYDLAVARKEAGLGRRAAEERLAEAHRIQEKLCAQNSELQAKTNETEKAFQTSQQKWKEECRRFEHDLEERDNMIQNCNREYDLLMKEKSRLEKTLQEALEKHQREKNEMESHIRETALEEFRLQEEQWEAERRELQFIVQEQDTAVQNMHKKVEKLETEHMDCSDLLRRQTSELEFSTQREERLRKEFEATTLRVRKLEENIEAERAAHLESKFNSEIIQVKCKQIFWPAFS

SEQ ID NO: 7686 - protein, 189 aa, Homo sapiens
MDDDGLPLMGSGDLTKVPTLQQKRTVAFLNQFVVHTVEFLNCFSTVCEEKLADLCLCIQQIETTLNILDTKLSSVSDLDDVTVEVSPLSVTSVTNGAHSEATSEQLQNSTQDSGPQESEGSAGNSLTVAKDPRYARNLKIAQVGVPAMAIKNKIKGLVPDLPERPDAPVPDGESEKIEESSDSESSFSN

SEQ ID NO: 7687 - protein, 240 aa, Homo sapiens
MAEYLASIFGTEKDKVNCSFYFKIGACRHGDRCSRLHNKPTFSQTIALLNIYRNPQNSSQSADGLRCAVSDVEMQEHYDEFFEEVFTEMEEKYGEVEEMNVCDNLGDHLVGNVYVKFRREEDAEKAVIDLNNRWFNGQPIHAELSPVTDFREACCRQYEMGECTRGGFCNFMHLKPISRELRRELYGRRRKKHRSRSRSRERRSRSRDRGRGGGGGGGGGGGGRERDRRRSRDRERSGRF

SEQ ID NO: 7688 - protein, 920 aa, Homo sapiens
MGRSNSRSHSSRSKSRSQSSSRSRSRSHSRKKRYSSRSRSRTYSRSRSRDRMYSRDYRRDYRNNRGMRRPYGYRGRGRGYYQGGGGRYHRGGYRPVWNRRHSRSPRRGRSRSRSPKRRSVSSQRSRSRSRRSYRSSRSPRSSSSRSSSPYSKSPVSKRRGSQEKQTKKAEGEPQEESPLKSKSQEEPKDTFEHDPSESIDEFNKSSATSGDIWPGLSAYDNSPRSPHSPSPIATPPSQSSSCSDAPMLSTVHSAKNTPSQHSHSIQHSPERSGSGSVGNGSSRYSPSQNSPIHHIPSRRSPAKTIAPQNAPRDESRGRSSFYPDGGDQETAKTGKFLKRFTDEESRVFLLDRGNTRDKEASKEKGSEKGRAEGEWEDQEALDYFSDKESGKQKFNDSEGDDTEETEDYRQFRKSVLADQGKSFATASHRNTEEEGLKYKSKVSLKGNRESDGFREEKNYKLKETGYVVERPSTTKDKHKEEDKNSERITVKKETQSPEQVKSEKLKDLFDYSPPLHKNLDAREKSTFREESPLRIKMIASDSHRPEVKLKMAPVPLDDSNRPASLTKDRLLASTLVHSVKKEQEFRSIFDHIKLPQASKSTSESFIQHIVSLVHHVKEQYFKSAAMTLNERFTSYQKATEEHSTRQKSPEIHRRIDISPSTLRKHTRLAGEERVFKEENQKGDKKLRCDSADLRHDIDRRRKERSKERGDSKGSRESSGSRKQEKTPKDYKEYKSYKDDSKHKREQDHSRSSSSSASPSSPSSREEKESKKEREEEFKTHHEMKEYSGFAGVSRPRGTFFRIRGRGRARGVFAGTNTGPNNSNTTFQKRPKEEEWDPEYTPKSKKYFLHDDRDDGVDYWAKRGRGRGTFQRGRGRFNFKKSGSSPKWTHDKYQGDGIVEDEEETMENNEEKKDRRKEEKE

SEQ ID NO: 7689 - protein, 869 aa, Homo sapiens [sequence omitted]

SEQ ID NO: 7690 - protein, 838 aa, Homo sapiens
MTGAEIEPSAQAKPEKKAGEEVIAGPERENDVPLVVRPKVRTQATTGARPKTETKSVPAARPKTEAQAMSGARPKTEVQVMGGARPKTEAQGITGARPKTDARAVGGARSKTDAKAIPGARPKDEAQAWAQSEFGTEAVSQAEGVSQTNAVAWPLATAESGSVTKSKGLSMDRELVNVDAETFPGTQGQKGIQPWFGPGEETNMGSWCYSRPRAREEASNESGFWSADETSTASSFWTGEETSVRSWPREESNTRSRHRAKHQTNPRSRPRSKQEAYVDSWSGSEDEASNPFSFWVGENTNNLFRPRVREEANIRSKLRTNREDCFESESEDEFYKQSWVLPGEEANSRFRHRDKEDPNTALKLRAQKDVDSDRVKQEPRFEEEVIIGSWFWAEKEASLEGGASAICESEPGTEEGAIGGSAYWAEEKSSLGAVAREEAKPESEEEAIFGSWFWDRDEACFDLNPCPVYKVSDRFRDAAEELNASSRPQTWDEVTVEFKPGLFHGVGFRSTSPFGIPEEASEMLEAKPKNLELSPEGEEQESLLQPDQPSPEFTFQYDPSYRSVREIREHLRARESAESESWSCSCIQCELKIGSEEFEEFLLLMDKIRDPFIHEISKIAMGMRSASQFTRDFIRDSGVVSLIETLLNYPSSRVRTSFLENMIHMAPPYPNLNMIETFICQVCEETLAHSVDSLEQLTGIRMLRHLTMTIDYHTLIANYMSGFLSLLTTANARTKFHVLKMLLNLSENPAVAKKLFSAKALSIFVGLFNIEETNDNIQIVIKMFQNISNIIKSGKMSLIDDDFSLEPLISAFREFEELAKQLQAQIDNQNDPEVGQQS

SEQ ID NO: 7691 - protein, 687 aa, Homo sapiens
HIEHVVLNQKNMTLSNRCQVFDRFQDTVSQHVVKVDFLNRIHKKHPPNRRVLQSVKRRSLKVPDAIKSQYQFPPPLIAPAAIRDGELICNGIPEESQMHLLNSEHLATQAEQQEWLCSVVALQCSILKHLSAKQMPSHWDSEQTEKADIKPVIVTDSSVTTSLQTADKTPTPSHYPLSCPSGISTQNSLSCSPPHQSPALEDIGCSSCAEKSKKTPCGTANGPVNTEVKANGPHLYSSPTDSTDPRRLPGANTPLPGLSHRQGWPRPLTPPAAGGLQNHTVGIIVKTENATGPSSCPQRSLVPVPSLPPSIPSSCASIENTSTLQRKTVQSQIGPPLTDSRPLGSPPNATRVLTPPQAAGDGILATTANQRFSSPAPSSDGKVSPGTLSIGSALTVPSFPANSTAMVDLTNSLRAFMDVNGEIEINMLDEKLIKFLALQRIHQLFPSRVQPSPGSVGTHQLASGGHHIEVQRKEVQARAVFYPLLGLGGAVNMCYRTLYIGTGADMDVCLTNYGHCNYVSGKHACIFYDENTKHYELLNYSEHGTTVDNVLYSCDFSEKTPPTPPSSIVAKVQSVIRRRRHQKQDEEPSEEAAMMSSQAQGPQRRPCNCKASSSSLIGGSGAGWEGTALLHHGSYIKLGCLQFVFSITEFATKQPKGDASLLQDGVLAEKLSLKPHQGPVLRSNSVP

SEQ ID NO: 7692 - protein, 704 aa, Homo sapiens
MWEKMETKTIVYDLDTSGGLMEQIQALLAPPKTDEAEKRSRKPEKEPRRSGRATNHDSCDSCKEGGDLLCCDHCPAAFHLQCCNPPLSEEMLPPGEWMCHRCTVRRKKREQKKELGHVNGLVDKSGKRTTSPSSDTDLLDRSASKTELKAIAHARILERRASRPGTPTSSASTETPTSEQNDVDEDIIDVDEEPVAAEPDYVQPQLRRPFELLIAAAMERNPTQFQLPNELTCTTALPGSSKRRRKEETTGKNVKKTQHELDHNGLVPLPVKVCFTCNRSCRVAPLIQCDYCPLLFHMDCLEPPLTAMPLGRWMCPNHIEHVVLNQKNMTLSNRCQVFDRFQDTVSQHVVKVDFLNRIHKKHPPNRRVLQSVKRRSLKVPDAIKSQYQFPPPLIAPAAIRDGELICNGIPEESQMHLLNSEHLATQAEQQEWLCSVVALQCSILKHLSAKQMPSHWDSEQTEKADIKPVIVTDSSVTTSLQTADKTPTPSHYPLSCPSGISTQNSLSCSPPHQSPALEDIGCSSCAEKSKKTPCGTANGPVNTEVKANGPHLYSSPTDSTDPRRLPGANTPLPGLSHRQGWPRPLTPPAAGGLQNHTVGIIVKTENATGPSSCPQRSLVPVPSLPPSIPSSCASIENTSTLQRKTVQSQIGPPLTDSRPLGSPPNATRVLTPPQAAGDGILATTANQRFSSPAPSSGECCSALG

SEQ ID NO: 7693 - protein, 436 aa, Homo sapiens
GNMDSFMAQVKSLAQSLYPCSAQQLNEDLRLHLLLNTSVTCNDGSPAGYYLKESRGSRRWLLFLEGGWYCFNRENCDSRYDTMRRLMSSRDWPRTRTGTGILSSQPEENPYWWNANMVFIPYCSSDVWSGASSKSEKNEYAFMGALNIQEVVRELLGRGLSGAKVLLLAGSSAGGTGVLLNVDLVAEQLEKLGYPAIQVRGLADSGWFLDNKQYRHTDCVDTITCAPTEAIRRGIRYWNGVVPERCRRQFQEGEEWNCFFGYKVYPTLRCPVFVVQWLFDEAQLTVDNVHLTGQPVQEGLRLYIQNLGRELRHTLKDVPASFAPACLSHEIIIRSHWTDVQVKGTSLPRALHCWDRSLHDSHKASKTPLKGCPVHLVDSCPWPHCNPSCPTVRDQFTGQEMNVAQFLMHMGFDMQTVAQPQGLEPSELLGMLSNGS

SEQ ID NO: 7694 - protein, 867 aa, Homo sapiens
MENEKENLFCEPHKRGLMKTPLKESTTANIVLAEIQPDFGPLTTPTKPKEGSQGEPWTPTANLKMLISAVSPEIRNRDQKRGLFDNRSGLPEAKDCIHEHLSGDEFEKSQPSRKEKSLGLLCHKFLARYPNYPNPAVNNDICLDEVAEELNVERRRIYDIVNVLESLHMVSRLAKNRYTWHGRHNLNKTLGTLKSIGEENKYAEQIMMIKKKEYEQEFDFIKSYSIEDHIIKSNTGPNGHPDMCFVELPGVEFRAASVNSRKDKSLRVMSQKFVMLFLVSTPQIVSLEVAAKILIGEDHVEDLDKSKFKTKIRRLYDIANVLSSLDLIKKVHVTEERGRKPAFKWTGPEISPNTSGSSPVIHFTPSDLEVRRSSKENCAKNLFSTRGKPNFTRHPSLIKLVKSIESDRRKINSAPSSPIKTNKAESSQNSAPFPSKMAQLAAICKMQLEEQSSESRQKVKVQLARSGPCKPVAPLDPPVNAEMELTAPSLIQPLGMVPLIPSPLSSAVPLILPQAPSGPSYAIYLQPTQAHQSVTPPQGLSPTVCTTHSSKATGSKDSTDATTEKAANDTSKASASTRPGSLLPAPERQGAKSRTREPAGERGSKRASMLEDSGSKKKFKEDLKGLENVSATLFPSGYLIPLTQCSSLGAESILSGKENSSALSPNHRIYSSPIAGVIPVTSSELTAVNFPSFHVTPLKLMVSPTSVAAVPVGNSPALASSHPVPIQNPSSAIVNFTLQHLGLISPNVQLSASPGSGIVPVSPRIESVNVAPENAGTQQGRATNYDSPVPGQSQPNGQSVAVTGAQQPVPVTPKGSQLVAESFFRTPGGPTKPTSSSCMDFEGANKTSLGTLFVPQRKLEVSTEDVH

SEQ ID NO: 7695 - protein, 736 aa, Homo sapiens
MEALIPVINKLQDVFNTVGADIIQLPQIVVVGTQSSGKSSVLESLVGRDLLPRGTGIVTRRPLILQLVHVTQEDKRKTTGEENGVEAEEWGKFLHTKNKLYTDFDEIRQEIENETERISGNNKGVSPEPIHLKIFSPNVVNLTLVDLPGMTKVPVGDQPKDIELQIRELILRFISNPNSIILAVTAANTDMATSEALKISREVDPDGRRTLAVITKLDLMDAGTDAMDVLMGRVIPVKLGIIGVVNRSQLDINNKKSVTDSIRDEYAFLQKKYPSLANRNGTKYLARTLNRLLMHHIRDCLPELKTRINVLAAQYQSLLNSYGEPVDDKSATLLQLITKFATEYCNTIEGTAKYIETSELCGGARICYIFHETFGRTLESVDPLGGLNTIDILTAIRNATGPRPALFVPEVSFELLVKRQIKRLEEPSLRCVELVHEEMQRIIQHCSNYSTQELLRFPKLHDAIVEVVTCLLRKRLPVTNEMVHNLVAIELAYINTKHPDFADACGLMNNNIEEQRRNRLARELPSAVSRDKSSKVPSALAPASQEPSPAASAEADGKLIQDSRRETKNVASGGGGVGDGVQEPTTGNWRGMLKTSKAEELLAEEKSKPIPIMPASPQKGHAVNLLDVPVPVARKLSAREQRDCEVIERLIKSYFLIVRKNIQDSVPKAVMHFLVNHVKDTLQSELVGQLYKSSLLDDLLTESEDMAQRRKEAADMLKALQGASQIIAEIRETHLW

SEQ ID NO: 7696 - protein, 710 aa, Homo sapiens
MEALIPVINKLQDVFNTVGADIIQLPQIVVVGTQSSGKSSVLESLVGRDLLPRGTGIVTRRPLILQLVHVSQEDKRKTTGEENGVEAEEWGKFLHTKNKLYTDFDEIRQEIENETERISGNNKGVSPEPIHLKIFSPNVVNLTLVDLPGMTKVPVGDQPKDIELQIRELILRFISNPNSIILAVTAANTDMATSEALKISREVDPDGRRTLAVITKLDLMDAGTDAMDVLMGRVIPVKLGIIGVVNRSQLDINNKKSVTDSIRDEYAFLQKKYPSLANRNGTKYLARTLNRLLMHHIRDCLPELKTRINVLAAQYQSLLNSYGEPVDDKSATLLQLITKFATEYCNTIEGTAKYIETSELCGGARICYIFHETFGRTLESVDPLGGLNTIDILTAIRNATGPRPALFVPEVSFELLVKRQIKRLEEPSLRCVELVHEEMQRIIQHCSNYSTQELLRFPKLHDAIVEVVTCLLRKRLPVTNEMVHNLVAIELAYINTKHPDFADACGLMNNNIEEQRRNRLARELPSAVSRDKLIQDSRRETKNVASGGGGVGDGVQEPTTGNWRGMLKTSKAEELLAEEKSKPIPIMPASPQKGHAVNLLDVPVPVARKLSAREQRDCEVIERLIKSYFLIVRKNIQDSVPKAVMHFLVNHVKDTLQSELVGQLYKSSLLDDLLTESEDMAQRRKEAADMLKALQGASQIIAEIRETHLW

SEQ ID NO: 7697 - protein, 699 aa, Homo sapiens
MEALIPVINKLQDVFNTVGADIIQLPQIVVVGTQSSGKSSVLESLVGRDLLPRGTGIVTRRPLILQLVHVTQEDKRKTTGEENGVEAEEWGKFLHTKNKLYTDFDEIRQEIENETERISGNNKGVSPEPIHLKIFSPNVVNLTLVDLPGMTKVPVGDQPKDIELQIRELILRFISNPNSIILAVTAANTDMATSEALKISREVDPDGCRTLAVITKLDLMDAGTDAMDVLMGRVIPVKLGIIGVVNRSQLDINNKKSVTDSIRDEYAFLQKKYPSLANRNGTKYLARTLNRLLMHHIRDCLPELKTRINVLAAQYQSLLNSYGEPVDDKSATLLQLITKFATEYCNTIEGTAKYIETSELCGGARICYIFHETFGRTLESVDPLGGLNTIDILTAIRNATGPRPALFVPEVSFELLVKRQIKRLEEPSLRCVELVHEEMQRIIQHCSNYSTQELLRFPKLHDAIVEVVTCLLRKRLPVTNEMVHNLVAIELAYINTKHPDFADACGLMNNNIEEQRRNRLARELPSAVSRDKVASGGGGVGDGVQEPTTGNWRGMLKTSKAEELLAEEKSKPIPIMPASPQKGHAVNLLDVPVPVARKLSAREQRDCEVIERLIKSYFLIVRKNIQDSVPKAVMHFLVNHVKDTLQSELVGQLYKSSLLDDLLTESEDMAQRRKEAADMLKALQGASQIIAEIRETHLW

SEQ ID NO: 7698 - protein, 560 aa, Homo sapiens
MSEETVPEAASPPPPQGQPYFDRFSEDDPEYMRLRNRAADLRQDFNLMEQKKRVTMILQSPSFREELEGLIQEQMKKGNNSSNIWALRQIADFMASTSHAVFPTSSMNVSMMTPINDLHTADSLNLAKGERLMRCKISSVYRLLDLYGWAQLSDTYVTLRVSKEQDHFLISPKGVSCSEVTASSLIKVNILGEVVEKGSSCFPVDTTGFCLHSAIYAARPDVRCIIHLHTPATAAVSAMKWGLLPVSHNALLVGDMAYYDFNGEMEQEADRINLQKCLGPTCKILVLRNHGVVALGDTVEEAFYKIFHLQAACEIQVSALSSAGGVENLILLEQEKHRPHEVGSVQWAGSTFGPMQKSRLGEHEFEALMRMLDNLGYRTGYTYRHPFVQEKTKHKSEVEIPATVTAFVFEEDGAPVPALRQHAQKQQKEKTRWLNTPNTYLRVNVADEVQRSMGSPRPKTTWMKADEVEKSSSGMPIRIENPNQFVPLYTDPQEVLEMRNKIREQNRQDVKSAGPQSQLLASVIAEKSRSPVEQRLPLTGGETCLPCLRGLVPGAGLQDP

SEQ ID NO: 7699 - protein, 421 aa, Homo sapiens [sequence omitted]

SEQ ID NO: 7700 - protein, 643 aa, Homo sapiens
MSEETVPEAASPPPPQGQPYFDRFSEDDPEYMRLRNRAADLRQDFNLMEQKKRVTMILQSPSFREELEGLIQEQMKKGNNSSNIWALRQIADFMASTSHAVFPTSSMNVSMMTPINDLHTADSLNLAKGERLMRCKISSVYRLLDLYGWAQLSDTYVTLRVSKEQDHFLISPKGVSCSEVTASSLIKVNILGEVVEKGSSCFPVDTTGFCLHSAIYAARPDVRCIIHLHTPATAAVSAMKWGLLPVSHNALLVGDMAYYDFNGEMEQEADRINLQKCLGPTCKILVLRNHGVVALGDTVEEAFYKIFHLQAACEIQVSALSSAGGVENLILLEQEKHRPHEVGSVQWAGSTFGPMQKSRLGEHEFEALMRMLDNLGYRTGYTYRHPFVQEKTKHKSEVEIPATVTAFVFEEDGAPVPALRQHAQKQQKEKTRWLNTPNTYLRVNVADEVQRSMGSPRPKTTWMKADEVEKSSSGMPIRIENPNQFVPLYTDPQEVLEMRNKIREQNRQDVKSAGPQSQLLASVIAEKSRSPSTESQLMSKGDEDTKDDSEETVPNPFSQLTDQELEEYKKEVERKKLELDETGQEREPGSGPAVCEFFSVALHIWSNILERKKLPQKSLAHLQSLHLLLQCRAQRRRQRQRAL

SEQ ID NO: 7701 - protein, 254 aa, Homo sapiens
MSEETVPEAASPPPPQGQPYFDRFSEDDPEYMRLRNRAADLRQDFNLMEQKKRVTMILQSPSFREELEGLIQEQMKKGNNSSNIWALRQIADFMASTSHAVFPTSSMNVSMMTPINDLHTADSLNLAKGERLMRCKISSVYRLLDLYGWAQLSDTYVTLRVSKEQDHFLISPKGVSCSEVTASSLIKEVLEMRNKIREQNRQDVKSAGPQSQLLASVIAEKSRSPVEQRLPLTGGETCLPCLRGLVPGAGLQDP

SEQ ID NO: 7702 - protein, 726 aa, Homo sapiens
MSEETVPEAASPPPPQGQPYFDRFSEDDPEYMRLRNRAADLRQDFNLMEQKKRVTMILQSPSFREELEGLIQEQMKKGNNSSNIWALRQIADFMASTSHAVFPTSSMNVSMMTPINDLHTADSLNLAKGERLMRCKISSVYRLLDLYGWAQLSDTYVTLRVSKEQDHFLISPKGVSCSEVTASSLIKVNILGEVVEKGSSCFPVDTTGFCLHSAIYAARPDVRCIIHLHTPATAAVSAMKWGLLPVSHNALLVGDMAYYDFNGEMEQEADRINLQKCLGPTCKILVLRNHGVVALGDTVEEAFYKIFHLQAACEIQVSALSSAGGVENLILLEQEKHRPHEVGSVQWAGSTFGPMQKSRLGEHEFEALMRMLDNLGYRTGYTYRHPFVQEKTKHKSEVEIPATVTAFVFEEDGAPVPALRQHAQKQQKEKTRWLNTPNTYLRVNVADEVQRSMGSPRPKTTWMKADEVEKSSSGMPIRIENPNQFVPLYTDPQEVLEMRNKIREQNRQDVKSAGPQSQLLASVIAEKSRSPSTESQLMSKGDEDTKDDSEETVPNPFSQLTDQELEEYKKEVERKKLELDGEKETAPEEPGSPAKSAPASPVQSPAKEAETKSPLVSPSKSLEEGTKKTETSKAATTEPETTQPEGVVVNGREEEQTAEEILSKGLSQMTTSADTDVDTSKDKTESVTSGPMSPEGSPSKSPSKKKKKFRTPSFLKKSKKKEKVES

SEQ ID NO: 7703 - protein, 518 aa, Homo sapiens
MEVLQVSFRIVISGEKEGTVGGVCGPRRSSSASPQEQDQDRRKDWGHVELLEVLQARVRQLQAGSVSEVVVNRVDVAWLPECGSGGGSLQPPRKVQMGVKDATPVPCGRWAKRLEKDKRTQQMRMQRLKAKLQMPFQSGEFKALTRRLQEAPGKLSLDVEQAPSAQHSQAQLSGQQQRLLAFFKCCLLTDQLPLAHHLLVVHHGQRQKRKLLTLDMYNAVMLGWARQGAFKELVYVLFMVKDAGLTPDLLSYAAALQCMGRQDQDAGTIERCLEQMSQEGLKLQALFTAVPLSEEDRATVLKAVHKVKPTFSLPLQLPPPVNTSKLLRDVYAKDGRVSYPKLHLPLKTLQCLFEKQLHVELASRMCVVSVEKPTLPSKEVTHARKTLKTLRDQWEKALCRELRETKNRLERQVKQIGGGIQSITYTHNGDISRKPNTRKQKNGFPPNFIHSLDSSHMMLTALHCYRKGLTFVSVHDCYWTHAADVSCHEPGVPGAVCPLAQRAHPAGPVQVPGQAVLL

SEQ ID NO: 7704 - protein, 825 aa, Homo sapiens
MAAGKFASLPRNMPVNHQFPLASSMDLLSSRSPLAEHRPDAYQDVSIHGTLPRKKKGPPPIRSCDDFSHMGTLPHSKSPRQNSPVTQDGIQESPWQDRHGETFTFRDPHLLDPTVEYVKFSKERHIMDRTPEKLKKELEEELLLSSEDLRSHAWYHGRIPRQVSENLVQRDGDFLVRDSLSSPGNFVLTCQWKNLAQHFKINRTVLRLSEAYSRVQYQFEMESFDSIPGLVRCYVGNRRPISQQSGAIIFQPINRTVPLRCLEEHYGTSPGQAREGSLTKGRPDVAKRLSLTMGGVQAREQNLPRGNLLRNKEKSGSQPACLDHMQDRRALSLKAHQSESYLPIGCKLPPQSSGVDTSPCPNSPVFRTGSEPALSPAVVRRVSSDARAGEALRGSDSQLCPKPPPKPCKVPFLKVPSSPSAWLNSEANYCELNPAFATGCGRGAKLPSCAQGSHTELLTAKQNEAPGPRNSGVNYLILDDDDRERPWEPAAAQMEKGQWDKGEFVTPLLETVSSFRPNEFESKFLPPENKPLETAMLKRAKELFTNNDPKVIAQHVLSMDCRVARILGVSEEMRRNMGVSSGLELITLPHGHQLRLDIIERHNTMAIGIAVDILGCTGTLEDRAATLSKIIQVAVELKDSMGDLYSFSALMKALEMPQITRLEKTWTALRHQYTQTAILYEKQLKPFSKLLHEGRESTCVPPNNVSVPLLMPLVTLMERQAVTFEGTDMWEKNDQSCEIMLNHLATARFMAEAADSYRMNAERILAGFQPDEEMNEICKTEFQMRLLWGSKGAQVNQTERYEKFNQILTALSRKLEPPPVKQAEL

SEQ ID NO: 7705 - protein, 579 aa, Homo sapiens
MDLILDGPAVLSFSTQRIPPSVEKLLEHTGTSKDSIDHFIFHQANRMINETIRKKLGLPAEKVPSTLHDFGNTSGASLPVTVTARLHEQLDGARARLLLNGRAMSTPDPFSLAGKRILVTGASSGIGRQIAISCAEQGAELVITGRNPDRLASTYEALQGDGHQSIVADLSNAADLDSLVTAAGVLNGVVHAAGISKLVPFRMVNETHLDEIFASNTFAPILLTKGLLAKKRISPQGSIVFVTSVASHIGPMASAAYAASKAALLGAVRTLGQEVAKQGIRANCIAPGYVRTPLLDGLSQGGANMGSLLELAPLGLGEPEDVAYAAVFYLSDASRWLTRNYFIVDGGKTILVTGASSGLGRQTAITCAQRGARLIITGRDAKRLEETYTRLKKGADHVQMSADLTSPADRERLVTIASSVNGLVHCAGQQKHCPIRQLSEQAMTDMYAINFLAPVMLTQRLLQTGALEPSGSIIFLLSTAAHIGTRGVGPYSAMKAGLTGIIRCLALEQAKRKIRVNGISPSAVATPMWGADQLEAQKTRHPLGLGTPEDVANAAVYLLSDASRWVTGTSLVMDGGAIL

SEQ ID NO: 7706 - protein, 928 aa, Homo sapiens
MPPKTPRKTAATAAAAAAEPPAPPPPPPPEEDPEQDSGPEDLPLVRLEFEETEEPDFTALCQKLKIPDHVRERAWLTWEKVSSVDGVLGGYIQKKKELWGICIFIAAVDLDEMSFTFTELQKNIEISVHKFFNLLKEIDTSTKVDNAMSRLLKKYDVLFALFSKLERTCELIYLTQPSSSISTEINSALVLKVSWITFLLAKGEVLQMEDDLVISFQLMLCVLDYFIKLSPPMLLKEPYKTAVIPINGSPRTPRRGQNRSARIAKQLENDTRIIEVLCKEHECNIDEVKNVYFKNFIPFMNSLGLVTSNGLPEVENLSKRYEEIYLKNKDLDARLFLDHDKTLQTDSIDSFETQRTPRKSNLDEEVNVIPPHTPVRTVMNTIQQLMMILNSASDQPSENLISYFNNCTVNPKESILKRVKDIGYIFKEKFAKAVGQGCVEIGSQRYKLGVRLYYRVMESMLKSEEERLSIQNFSKLLNDNIFHMSLLACALEVVMATYSRSTSQNLDSGTDLSFPWILNVLNLKAFDFYKVIESFIKAEGNLTREMIKHLERCEHRIMESLAWLSDSPLFDLIKQSKDREGPTDHLESACPLNLPLQNNHTAADMYLSPVRSPKKKGSTTRVNSTANAETQATSAFQTQKPLKSTSLSLFYKKVYRLAYLRLNTLCERLLSEHPELEHIIWTLFQHTLQNEYELMRDRHLDQIMMCSMYGICKVKNIDLKFKIIVTAYKDLPHAVQETFKRVLIKEEEYDSIIVFYNSVFMQRLKTNILQYASTRPPTLSPIPHIPRSPYKFPSSPLRIPGGNIYISPLKSPYKISEGLPTPTKMTPRSRILVSIGESFGTSEKFQKINQMVCNSDRVLKRSAEGSNPPKPLKKLRFDIEGSDEADGSKHLPGESKFQQKLAEMTSTRTRMQKQKMNDSMDTSNKEEK

SEQ ID NO: 7707 - protein, 1706 aa, Homo sapiens
MGVPKFYRWISERYPCLSEVVKEHQIPEFDNLYLDMNGIIHQCSHPNDDDVHFRISDDKIFTDIFHYLEVLFRIIKPRKVFFMAVDGVAPRAKMNQQRGRRFRSAKEAEDKIKKAIEKGETLPTEARFDSNCITPGTEFMARLHEHLKYFVNMKISTDKSWQGVTIYFSGHETPGEGEHKIMEFIRSEKAKPDHDPNTRHCLYGLDADLIMLGLTSHEAHFSLLREEVRFGGKKTQRVCAPEETTFHLLHLSLMREYIDYEFSVLKEKITFKYDIERIIDDWILMGFLVGNDFIPHLPHLHINHDALPLLYGTYVTILPELGGYINESGHLNLPRFEKYLVKLSDFDREHFSEVFVDLKWFESKVGNKYLNEAAGVAAEEARNYKEKKKLKGQENSLCWTALDKNEGEMITSKDNLEDETEDDDLFETEFRQYKRTYYMTKMGVDVVSDDFLADQAACYVQAIQWILHYYYHGVQSWSWYYPYHYAPFLSDIHNISTLKIHFELGKPFKPFEQLLAVLPAASKNLLPACYQHLMTNEDSPIIEYYPPDFKTDLNGKQQEWEAVVLIPFIDEKRLLEAMETCNHSLKKEERKRNQHSECLMCWYDRDTEFIYPSPWPEKFPAIERCCTRYKIISLDAWRVDINKNKITRIDQKALYFCGFPTLKHIRHKFFLKKSGVQVFQQSSRGENMMLEILVDAESDELTVENVASSVLGKSVFVNWPHLEEARVVAVSDGETKFYLEEPPGTQKLYSGRTAPPSKVVHLGDKEQSNWAKEVQGISEHYLRRKGIIINETSAVVYAQLLTGRKYQINQNGEVRLEKQWSKQVVPFVYQTIVKDIRAFDSRFSNIKTLDDLFPLRSMVFMLGTPYYGCTGEVQDSGDVITEGRIRVIFSIPCEPNLDALIQNQHKYSIKYNPGYVLASRLGVSGYLVSRFTGSIFIGRGSRRNPHGDHKANVGLNLKFNKKNEEVPGYTKKVGSEWMYSSAAEQLLAEYLERAPELFSYIAKNSQEDVFYEDDIWPGENENGAEKVQEIITWLKGHPVSTLSRSSCDLQILDAAIVEKIEEEVEKCKQRKNNKKVRVTVKPHLLYRPLEQQHGVIPDRDAEFCLFDRVVNVRENFSVPVGLRGTIIGIKGANREADVLFEVLFDEEFPGGLTIRCSPGRGYRLPTSALVNLSHGSRSETGNQKLTAIVKPQPAVHQHSSSSSVSSGHLGALNHSPQSLFVPTQVPTKDDDEFCNIWQSLQGSGKMQYFQPTIQEKGAVLPQEISQVNQHHKSGFNDNSVKYQQRKHDPHRKFKEECKSPKAECWSQKMSNKQPNSGIENFLASLNISKENEVQSSHHGEPPSEEHLSPQSFAMGTRMLKEILKIDGSNTVDHKNEIKQIANEIPVSSNRRDEYGLPSQPKQNKKLASYMNKPHSANEYHNVQSMDNMCWPAPSQIPPVSTPVTELSRICSLVGMPQPDFSFLRMPQTMTVCQVKLSNGLLVHGPQCHSENEAKEKAALFALQQLGSLGMNFPLPSQVFANYPSAVPPGTIPPAFPPPTGWDHYGSNYALGAANIMPSSSHLFGSMPWGPSVPVPGKPFHHTLYSGTMPMAGGIPGGVHNQFIPLQVTKKRVANKKNFENKEAQSSQATPVQTSQPDSSNIVKVSPRESSSASLKSSPIAQPASSFQVETASQGHSISHHKSTPISSSRRKSRKLAVNFGVSKPSE

SEQ ID NO: 7708 - protein, 149 aa, Homo sapiens
MAWRLSDAEPEVRSDAEPEVHSDAEPEVRSDAEPEVCSDTEPEVLSPLTLVNTSGEAQGTVDRVHIGQVIMAICTKLQNKEHVIEALRRAKFKFPGYQKIHVSKKWGFTKFNVDEFEDMVVEEWLIPDDYGVKYIPSHGPLDKWWALYS

SEQ ID NO: 7709 - protein, 1562 aa, Homo sapiens
MVVFINAKIKSLIKLFKKKTVSNLDEESRWTVHYTAPWHQQENVFLPTTRPPCVEDLHRQAKLNLKSVLRECDKLRHDGYRSSQYYSQGPTFAANASPFCDDYQDEDEETDQKCSLSSSEEERFISIRRPKTPASSDFSDLNTQTNWTKSLPLPTPEEKMRQQAQTVQADVVPINITASGTGQDDADGHSVYTPDHYSTLGRFNSCRSAGQRSETRDSSCQTEDVKVVPPSMRRIRAQKGQGIAAQMGHFSGSSGNMSVLSDSAGIVFPSRLDSDAGFHSLPRSGARANIQSLEPRLGALGPAGDMNGTFLYQRGHPQADENLGHLGGASGTGTLLRPKSQELRHFESENIMSPACVVSPHATYSTSIIPNATLSSSSEVIAIPTAQSAGQRESKSSGSSHARIKSRDHLISRHAVKGDPQSPGRHWNEGHATILSQDLDPHSPGEPALLSLCDSAVPLNAPANRENGSQAMPYNCRNNLAFPAHPQDVDGKSESSYSGGGGHSSSEPWEYKSSGNGRASPLKPHLATPGYSTPTSNMSSCSLDQTSNKEDAGSLYSEDHDGYCASVHTDSGHGSGNLCNSSDGFGNPRHSVINVFVGRAQKNQGDRSNYQDKSLSRNISLKKAKKPPLPPSRTDSLRRIPKKSSQCNGQVLNESLIATLQHSLQLSLPGKSGSSPSQSPCSDLEEPWLPRSRSQSTVSAGSSMTSATTPNVYSLCGATPSQSDTSSVKSEYTDPWGYYIDYTGMQEDPGNPAGGCSTSSGVPTGNGPVRHVQEGSRATMPQVPGGSVKPKIMSPEKSHRVISPSSGYSSQSNTPTALTPVPVFLKSVSPANGKGKPKPKVPERKSSLISSVSISSSSTSLSSSTSTEGSGTMKKLDPAVGSPPAPPPPPVPSPPFPCPADRSPFLPPPPPVTDCSQGSPLPHSPVFPPPPPEALIPFCSPPDWCLSPPRPALSPILPDSPVSLPLPPPLLPSSEPPPAPPLDPKFMKDTRPPFTNSGQPESSRGSLRPPSTKEETSRPPMPLITTEALQMVQLRPVRKNSGAEAAQLSERTAQEQRTPVAPQYHLKPSAFLKSRNSTNEMESESQPASVTSSLPTPAKSSSQGDHGSAAERGGPVSRSPGAPSAGEAEARPSPSTTPLPDSSPSRKPPPISKKPKLFLVVPPPQKDFAVEPAENVSEALRAVPSPTTGEEGSVHSREAKESSAAQAGSHATHPGTSVLEGGAAGSMSPSRVEANVPMVQPDVSPAPKQEEPAENSADTGGDGESCLSQQDGAAGVPETNAAGSSSEACDFLKEDGNDEVMTPSRPRTTEDLFAAIHRSKRKVLGRRDSDDDHSRNHSPSPPVTPTGAAPSLASPKQVGSIQRSIRKSSTSSDNFKALLLKKGSRSDTSARMSAAEMLKNTDPRFQRSRSEPSPDAPESPSSCSPSKNRRAQEEWAKNEGLMPRSLSFSGPRYGRSRTPPSAASSRYSMRNRIQSSPMTVISEGEGEAVEPVDSIARGALGAAEGCSLDGLAREEMDEGGLLCGEGPAASLQPQAPGPVDGTASAEGREPSPQCGGSLSEES

SEQ ID NO: 7710 - protein, 151 aa, Homo sapiens
MNRHLCVWLFRHPSLNGYLQCHIQLHSHQFRQIHLDTRLQVFRQNRNCILHLLSKNWSRRYCHQDTKMLWKHKALQKYMENLSKEYQTLEQCLQHIPVNEENRRSLNRRHAELAPLAAIYQEIQETEQAIEELESMCKKTESCSVAQAGMQ

SEQ ID NO: 7711 - protein, 275 aa, Homo sapiens
MAGLQRLASHLPVGVMLPHNTTEAPGPHSAKQDSYEQGDSSQQSLKGHLRNNFQKQLLSNKELILDKVYTHPKWNTQTKARSYSYPHCTGISQQDPESDSQGQGNGLFYSSGPQSWYPKANNQDFIPFTKKRVGVDRAFPLKPMVHRKSCSTGEAGTDGDHNVYPRPPEPREFSSRNFGVRNQGNFSVVGTVLAATQAEKAVANFDRTEWVQIRRLEAAGESLEEEIRRKQILLRGKLKKTEEELRRIQTQKEQAKENENGELQKIILPRSRVKG

SEQ ID NO: 7712 - protein, 1411 aa, Homo sapiens
MLRRILQRTPGRVGSQGSDLDSSATPINTVDVNNESSSEGFICPQCMKSLGSADELFKHYEAVHDAGNDSGHGGESNLALKRDDVTLLRQEVQDLQASLKEEKWYSEELKKELEKYQGLQQQEAKPDGLVTDSSAELQSLEQQLEEAQTENFNIKQMKDLFEQKAAQLATEIADIKSKYDEERSLREAAEQKVTRLTEELNKEATVIQDLKTELLQRPGIEDVAVLKKELVQVQTLMDNMTLERERESEKLKDECKKLQSQYASSEATISQLRSELAKGPQEVAVYVQELQKLKSSVNELTQKNQTLTENLLKKEQDYTKLEEKHNEESVSKKNIQATLHQKDLDCQQLQSRLSASETSLHRIHVELSEKGEATQKLKEELSEVETKYQHLKAEFKQLQQQREEKEQHGLQLQSEINQLHSKLLETERQLGEAHGRLKEQRQLSSEKLMDKEQQVADLQLKLSRLEEQLKEKVTNSTELQHQLDKTKQQHQEQQALQQSTTAKLREAQNDLEQVLRQIGDKDQKIQNLEALLQKSKENISLLEKEREDLYAKIQAGEGETAVLNQLQEKNHTLQEQVTQLTEKLKNQSESHKQAQENLHDQVQEQKAHLRAAQDRVLSLETSVNELNSQLNESKEKVSQLDIQIKAKTELLLSAEAAKTAQRADLQNHLDTAQNALQDKQQELNKITTQLDQVTAKLQDKQEHCSQLESHLKEYKEKYLSLEQKTEELEGQIKKLEADSLEVKASKEQALQDLQQQRQLNTDLELRATELSKQLEMEKEIVSSTRLDLQKKSEALESIKQKLTKQEEEKQILKQDFETLSQETKIQHEELNNRIQTTVTELQKVKMEKEALMTELSTVKDKLSKVSDSLKNSKSEFEKENQKGKAAILDLEKTCKELKHQLQVQMENTLKEQKELKKSLEKEKEASHQLKLELNSMQEQLIQAQNTLKQNEKEEQQLQGNINELKQSSEQKKKQIEALQGELKIAVLQKTELENKLQQQLTQAAQELAAEKEKISVLQNNYEKSQETFKQLQSDFYGRESELLATRQDLKSVEEKLSLAQEDLISNRNQIGNQNKLIQELKTAKATLEQDSAKKEQQLQERCKALQDIQKEKSLKEKELVNEKSKLAEIEEIKCRQEKEITKLNEELKSHKLESIKEITNLKDAKQLLIQQKLELQGKADSLKAAVEQEKRNQQILKDQVKKEEEELKKEFIEKEAKLHSEIKEKEVGMKKHEENEAKLTMQITALNENLGTVKKEWQSSQRRVSELEKQTDDLRGEIAVLEATVQNNQDERRALLERCLKGEGEIEKLQTKVLELQRKLDNTTAAVQELGRENQSLQIKHTQALNRKWAEDNEVQNCMACGKGFSVTVRRHHCRQCGNIFCAECSAKNALTPSSKKPVRVCDACFNDLQG

SEQ ID NO: 7713 - protein, 1153 aa, Homo sapiens [sequence omitted]

SEQ ID NO: 7714 - protein, 1173 aa, Homo sapiens
PAVASFHLTIPEAAIIVSGKMGDTAPPQAPAGGLGGASGAGLLGGGSVTPRVHSAIVERLRARIAVCRQHHLSCEGRYERGRAESSDRERESTLQLLSLVQHGQGARKAGKHTKATATAATTTAPPPPPAAPPAASQAAATAAPPPPPDYHHHHQQHLLNSSNNGGSGGINGEQQPPASTPGDQRNSALIALQGSLKRKQVVNLSPANSKRPNGFVDNSFLDIKRIRVGENLSAGQGGLQINNGQSQIMSGTLPMSQAPLRKTNTLPSHTHSPGNGLFNMGLKEVKKEPGETLSCSKHMDGQMTQENIFPNRYGDDPGEQLMDPELQELFNELTNISVPPMSDLELENMINATIKQDDPFNIDLGQQSQRSTPRPSLPMEKIVIKSEYSPGLTQGPSGSPQLRPPSAGPAFSMANSALSTSSPIPSVPQSQAQPQTGSGASRALPSWQEVSHAQQLKQIAANRQQHARMQQHQQQHQPTNWSALPSSAGPSPGPFGQEKIPSPSFGQQTFSPQSSPMPGVAGGSGQSKVMANYMYKAGPSAQGGHLDVLMQQKPQDLSRSFINNPHPAMEPRQGNTKPLFHFNSDQANQQMPSVLPSQNKPSLLHYTQQQQQQQQQQQQQQQQQQQQQQQQQQQQQQQSSISAQQQQQQQSSISAQQQQQQQQQQQQQQQQQQQQQQQQQQQPSSQPAQSLPSQPLLRSPLPLQQKLLLQQMQNQPIAGMGYQVSQQQRQDQHSVVGQNTGPSPSPNPCSNPNTGSGYMNSQQSLLNQQLMGKKQTLQRQIMEQKQQLLLQQQMLADAEKIAPQDQINRHLSRPPPDYKDQRRNVGNMQPTAQYSGGSSTISLNSNQALANPVSTHTILTPNSSLLSTSHGTRMPSLSTAVQNMGMYGNLPCNQPNTYSVTSGMNQLTQQRNPKQLLANQNNPMMPRPPTLGPSNNNNVATFGAGSVGNSQQLRPNLTHSMASMPPQRTSNVMITSNTTAPNWASQEGTSKQQEALTSAGVRFPTGTPAAYTPNQSLQQAVGSQQFSQRAVAPPNQLTPAVQMRPMNQMSQTLNGQTMGPLRGLNLRPNQLSTQILPNLNQSGTGLNQSRTGINQPPSLTPSNFPSPNQSSRAFQGTDHSSDLAFDFLSQQNDNMGPALNSDADFIDSLLKTEPGNDDWMKDINLDEILGNNS

SEQ ID NO: 7715 - protein, 522 aa, Homo sapiens
MPRKKAAAAAWEEPSSGNGTARAGPRKRGGPAGRKRERPERCSSSSGGGSSGDEDGLELDGAPGGGKRAARPATAGKAGGAAVVITEPEHTKERVKLEGSKCKGQLLIFGATNWDLIGRKEVPKQQAAYRNLGQNLWGPHRYGCLAGVRVRTVVSGSCAAHSLLITTEGKLWSWGRNEKGQLGHGDTKRVEAPRLIEGLSHEVIVSAACGRNHTLALTETGSVFAFGENKMGQLGLGNQTDAVPSPAQIMYNGQPITKMACGAEFSMIMDCKGNLYSFGCPEYGQLGHNSDGKFIARAQRIEYDCELVPRRVAIFIEKTKDGQILPVPNVVVRDVACGANHTLVLDSQKRVFSWGFGGYGRLGHAEQKDEMVPRLVKLFDFPGRGASQIYAGYTCSFAVSEVGGLFFWGATNTSRESTMYPKAVQDLCGWRIRSLACGKSSIIVAADESTISWGPSPTFGELGYGDHKPKSSTAAQEVKTLDGIFSEQVAMGYSHSLVIARDESETEKEKIKKLPEYNPRTL

SEQ ID NO: 7716 - protein, 1584 aa, Homo sapiens
QALEPAGGDEDGARRCRTAACAVSAVAAAQGRSEGCGGVGYAHTLHLLPFAGSSVVLARARRTDRWTSGLVEMATLSLTVNSGDPPLGALLAVEHVKDDVSISVEEGKENILHVSENVIFTDVNSILRYLARVATTAGLYGSNLMEHTEIDHWLEFSATKLSSCDSFTSTINELNHCLSLRTYLVGNSLSLADLCVWATLKGNAAWQEQLKQKKAPVHVKRWFGFLEAQQAFQSVGTKWDVSTTKARVAPEKKQDVGKFVELPGAEMGKVTVRFPPEASGYLHIGHAKAALLNQHYQVNFKGKLIMRFDDTNPEKEKEDFEKVILEDVAMLHIKPDQFTYTSDHFETIMKYAEKLIQEGKAYVDDTPAEQMKAEREQRIDSKHRKNPIEKNLQMWEEMKKGSQFGQSCCLRAKIDMSSNNGCMRDPTLYRCKIQPHPRTGNKYNVYPTYDFACPIVDSIEGVTHALRTTEYHDRDEQFYWIIEALGIRKPYIWEYSRLNLNNTVLSKRKLTWFVNEGLVDGWDDPRFPTVRGVLRRGMTVEGLKQFIAAQGSSRSVVNMEWDKIWAFNKKVIDPVAPRYVALLKKEVIPVNVPEAQEEMKEVAKHPKNPEVGLKPVWYSPKVFIEGADAETFSEGEMVTFINWGNLNITKIHKNADGKIISLDAKLNLENKDYKKTTKVTWLAETTHALPIPVICVTYEHLITKPVLGKDEDFKQYVNKNSKHEELMLGDPCLKDLKKGDIIQLQRRGFFICDQPYEPVSPYSCKEAPCVLIYIPDGHTKEMPTSGSKEKTKVEATKNETSAPFKERPTPSLNNNCTTSEDSLVLYNRVAVQGDVVRELKAKKAPKEDVDAAVKQLLSLKAEYKEKTGQEYKPGNPPAEIGQNISSNSSASILESKSLYDEVAAQGEVVRKLKAEKSPKAKINEAVECLLSLKAQYKEKTGKEYIPGQPPLSQSSDSSPTRNSEPAGLETPEAKVLFDKVASQGEVVRKLKTEKAPKDQVDIAVQELLQLKAQYKSLIGVEYKPVSATGAEDKDKKKKEKENKSEKQNKPQKQNDGQRKDPSKNQGGGLSSSGAGEGQGPKKQTRLGLEAKKEENLADWYSQVITKSEMIEYHDISGCYILRPWAYAIWEAIKDFFDAEIKKLGVENCYFPMFVSQSALEKEKTHVADFAPEVAWVTRSGKTELAEPIAIRPTSETVMYPAYAKWVQSHRDLPIKLNQWCNVVRWEFKHPQPFLRTREFLWQEGHSAFATMEEAAEEVLQILDLYAQVYEELLAIPVVKGRKTEKEKFAGGDYTTTIEAFISASGRAIQGGTSHHLGQNFSKMFEIVFEDPKIPGEKQFAYQNSWGLTTRTIGVMTMVHGDNMGLVLPPRVACVQVVIIPCGITNALSEEDKEALIAKCNDYRRRLLSVNIRVRADLRDNYSPGWKFNHWELKGVPIRLEVGPRDMKSCQFVAVRRDTGEKLTVAENEAETKLQAILEDIQVTLFTRASEDLKTHMVVANTMEDFQKILDSGKIVQIPFCGEIDCEDWIKKTTARDQDLEPGAPSMGAKSLCIPFKPLCELQPGAKCVCGKNPAKYYTLFGRSY

SEQ ID NO: 7717 - protein, 875 aa, Homo sapiens
MGDSDDEYDRRRRDKFRRERSDYDRSRERDERRRGDDWNDREWDRGRERRSRGEYRDYDRNRRERFSPPRHELSPPQKRMRRDWDEHSSDPYHSGYEMPYAGGGGGPTYGPPQPWGHPDVHIMQHHVLPIQARLGSIAEIDLGVPPPVMKTFKEFLLSLDDSVDETEAVKRYNDYKLDFRRQQMQDFFLAHKDEEWFRSKYHPDEVGKRRQEARGALQNRLRVFLSLMETGWFDNLLLDIDKADAIVKMLDAAVIKMEGGTENDLRILEQEEEEEQAGKPGEPSKKEEGRAGAGLGDGERKTNDKDEKKEDGKQAENDSSNDDKTKKSEGDGDKEEKKEDSEKEAKKSSKKRNRKHSGDDSFDEGSVSESESESESGQAEEEKEEAEALKEKEKPKEEEWEKPKDAAGLECKPRPLHKTCSLFMRNIAPNISRAEIISLCKRYPGFMRVALSEPQPERRFFRRGWVTFDRSVNIKEICWNLQNIRLRECELSPGVNRDLTRRVRNINGITQHKQIVRNDIKLAAKLIHTLDDRTQLWASEPGTPPLPTSLPSQNPILKNITDYLIEEVSAEEEELLGSSGGAPPEEPPKEGNPAEINVERDEKLIKVLDKLLLYLRIVHSLDYYNTCEYPNEDEMPNRCGIIHVRGPMPPNRISHGEVLEWQKTFEEKLTPLLSVRESLSEEEAQKMGRKDPEQEVEKFVTSNTQELGKDKWLCPLSGKKFKGPEFVRKHIFNKHAEKIEEVKKEVAFFNNFLTDAKRPALPEIKPAQPPGPAQILPPGLTPGLPYPHQTPQGLMPYGQPRPPILGYGAGAVRPAVPTGGPPYPHAPYGAGRGNYDAFRGQGGYPGKPRNRMVRGDPRAIVEYRDLDAPDDVDFF

SEQ ID NO: 7718 - protein, 796 aa, Homo sapiens
MRRDWDEHSSDPYHSGYEMPYAGGGGGPTYGPPQPWGHPDVHIMQHHVLPIQARLGSIAEIDLGVPPPVMKTFKEFLLSLDDSVDETEAVKRYNDYKLDFRRQQMQDFFLAHKDEEWFRSKYHPDEVGKRRQEARGALQNRLRVFLSLMETGWFDNLLLDIDKADAIVKMLDAAVIKMEGGTENDLRILEQEEEEEQAGKPGEPSKKEEGRAGAGLGDGERKTNDKDEKKEDGKQAENDSSNDDKTKKSEGDGDKEEKKEDSEKEAKKSSKKRNRKHSGDDSFDEGSVSESESESESGQAEEEKEEAEALKEKEKPKEEEWEKPKDAAGLECKPRPLHKTCSLFMRNIAPNISRAEIISLCKRYPGFMRVALSEPQPERRFFRRGWVTFDRSVNIKEICWNLQNIRLRECELSPGVNRDLTRRVRNINGITQHKQIVRNDIKLAAKLIHTLDDRTQLWASEPGTPPLPTSLPSQNPILKNITDYLIEEVSAEEEELLGSSGGAPPEEPPKEGNPAEINVERDEKLIKVLDKLLLYLRIVHSLDYYNTCEYPNEDEMPNRCGIIHVRGPMPPNRISHGEVLEWQKTFEEKLTPLLSVRESLSEEEAQKMGRKDPEQEVEKFVTSNTQELGKDKWLCPLSGKKFKGPEFVRKHIFNKHAEKIEEVKKEVAFFNNFLTDAKRPALPEIKPAQPPGPAQILPPGLTPGLPYPHQTPQGLMPYGQPRPPILGYGAGAVRPAVPTGGPPYPHAPYGAGRGNYDAFRGQGGYPGKPRNRMVRGDPRAIVEYRDLDAPDDVDFF

SEQ ID NO: 7719 - protein, 872 aa, Homo sapiens
MGDSDDEYDRRRRDKFRRERSDYDRSRERDERRRGDDWNDREWDRGRERRSRGEYRDYDRNRRERFSPPRHELSPPQKRMRRDWDEHSSDPYHSGYEMPYAGGGGGPTYGPPQPWGHPDVHIMQHHVLPIQARLGSIAEIDLGVPPPVMKTFKEFLLSLDDSVDETEAVKRYNDYKLDFRRQQMQDFFLAHKDEEWFRSKYHPDEVGKRRQEARGALQNRLRVFLSLMETGWFDNLLLDIDKADAIVKMLDAAVIKMEGGTENDLRILEQEEEEEQAGKPGEPSKKEEGRAGAGLGDGERKTNDKDEKKEDGKQAENDSSNDDKTKKSEGDGDKEEKKEDSEKEAKKSSKKRNRKHSGDDSFDEGSVSESESESESGQAEEEKEEAEEALKEKEKPKEEEWEKPKDAAGLECKPRPLHKTCSLFMRNIAPNISRAEIISLCKRYPGFMRVALSEPQPERRFFRRGWVTFDRSVNIKEICWNLQNIRLRECELSPGVNRDLTRRVRNINGITQHKQIVRNDIKLAAKLIHTLDDRTQLWASEPGTPPLPTSLPSQNPILKNITDYLIEEVSAEEEELLGSSGGAPPEEPPKEGNPAEINVERDEKLIKVLDKLLLYLRIVHSLDYYNTCEYPNEDEMPNRCGIIHVRGPMPPNRISHGEVLEWQKTFEEKLTPLLSVRESLSEEEAQKMGRKDPEQEVEKFVTSNTQELGKDKWLCPLSGKKFKGPEFVRKHIFNKHAEKIEEVKKEVAFFNNFLTDAKRPALPEIKPAQPPGPAQSLTPGLPYPHQTPQGLMPYGQPRPPILGYGAGAVRPAVPTGGPPYPHAPYGAGRGNYDAFRGQGGYPGKPRNRMVRGDPRAIVEYRDLDAPDDVDFF

SEQ ID NO: 7720 - protein, 884 aa, Homo sapiens
MGDSDDEYDRRRRDKFRRERSDYDRSRERDERRRGDDWNDREWDRGRERRSRGEYRDYDRNRRERFSPPRHELSPPQKRMRRDWDEHSSDPYHSGYEMPYAGGGGGPTYGPPQPWGHPDVHIMQHHVLPIQARLGSIAEIDLGVPPPVMKTFKEFLLSLDDSVDETEAVKRYNDYKLDFRRQQMQDFFLAHKDEEWFRSKYHPDEVGKRRQEARGALQNRLRVFLSLMETGWFDNLLLDIDKADAIVKMLDAAVIKMEGGTENDLRILEQEEEEEQAGKPGEPSKKEEGRAGAGLGDGERKTNDKDEKKEDGKQAENDSSNDDKTKKSEGDGDKEEKKEDSEKEAKKSSKKRNRKHSGDDSFDEGSVSESESESESGQAEEEKEEAEEALKEKEKPKEEEWEKPKDAAGLECKPRPLHKTCSLFMRNIAPNISRAEIISLCKRYPGFMRVALSEPQPERRFFRRGWVTFDRSVNIKEICWNLQNIRLRECELSPGVNRDLTRRVRNINGITQHKQIVRNDIKLAAKLIHTLDDRTQLWASEPGTPPLPTSLPSQNPILKNITDYLIEEVSAEEEELLGSSGGAPPEEPPKEGNPAEINVERDEKLIKVLDKLLLYLRIVHSLDYYNTCEYPNEDEMPNRCGIIHVRGPMPPNRISHGEVLEWQKTFEEKLTPLLSVRESLSEEEAQKMGRKDPEQEVEKFVTSNTQELGKDKWLCPLSGKKFKGPEFVRKHIFNKHAEKIEEVKKEVAFFNNFLTDAKRPALPEIKPAQPPGPAQIIHVPVRVVLPPGLTPGLPYPHQTPQGLMPYGQPRPPILGYGAGAVRPAVPTGGPPYPHAPYGAGRGNYDAFRGQGGYPGKPRNRMVRGDPRAIVEYRDLDAPDDVDFF

SEQ ID NO: 7721 - protein, 399 aa, Homo sapiens
VHSSMGAPEIRMSKPLEAEKQGLDSPSEHTDTERNGPDTNHQNPQNKTSPFSVSPTGPSTKIKAEDPSGDSAPAAPLPPQPAQPHLPQAQLMLTGSQLAGDIQQLLQLQQLVLVPGHHLQPPAQFLLPQAQQSQPGLLPTPNLFQLPQQTQGALLTSQPRAGLPTQPPKCLEPPSHPEEPSDLEELEQFARTFKQRRIKLGFTQGDVGLAMGKLYGNDFSQTTISRFEALNLSFKNMCKLKPLLEKWLNDAETMSVDSSLPSPNQLSSPSLGFDGLPGRRRKKRTSIETNVRFALEKSFLANQKPTSEEILLIAEQLHMEKEVIRVWFCNRRQKEKRINPCSAAPMLPSPGKPASYSPHMVTPQGGAGTLPLSQASSSLSTTAQTPALKAATRLSACQA

SEQ ID NO: 7722 - protein, 754 aa, Homo sapiens
MWKLLPAAGPAGGEPYRLLTGVEYVVGRKNCAILIENDQSISRNHAVLTANFSVTNLSQTDEIPVLTLKDNSKYGTFVNEEKMQNGFSRTLKSGDGITFGVFGSKFRIEYEPLVACSSCLDVSGKTALNQAILQLGGFTVNNWTEECTHLVMVSVKVTIKTICALICGRPIVKPEYFTEFLKAVESKKQPPQIESFYPPLDEPSIGSKNVDLSGRQERKQIFKGKTFIFLNAKQHKKLSSAVVFGGGEARLITEENEEEHNFFLAPGTCVVDTGITNSQTLIPDCQKKWIQSIMDMLQRQGLRPIPEAEIGLAVIFMTTKNYCDPQGHPSTGLKTTTPGPSLSQGVSVDEKLMPSAPVNTTTYVADTESEQADTWDLSERPKEIKVSKMEQKFRMLSQDAPTVKESCKTSSNNNSMVSNTLAKMRIPNYQLSPTKLPSINKSKDRASQQQQTNSIRNYFQPSTKKRERDEENQEMSSCKSARIETSCSLLEQTQPATPSLWKNKEQHLSENEPVDTNSDNNLFTDTDLKSIVKNSASKSHAAEKLRSNKKREMDDVAIEDEVLEQLFKDTKPELEIDVKVQKQEEDVNVRKRPRMDIETNDTFSDEAVPESSKISQENEIGKKRELKEDSLWSAKEISNNDKLQDDSEMLPKKLLLTEFRSLVIKNSTSRNPSGINDDYGQLKNFKKFKKVTYPGAGKLPHIIGGSDLIAHHARKNTELEEWLRQEMEVQNQHAKEESLADDLFRYNPYLKRRR

SEQ ID NO: 7723 - protein, 902 aa, Homo sapiens
FPMGDSGSRRSTLVSRLPIFRRSINRRHDSLPSSPSSSNTVGVHSSSPSSTNSSSGSTGKRRSIFRTPSISFHHKKGSEPKQEPTNQNLSISNGAQPGHSNMQKLSLEEHIKTRGRHSVGFSSSRNKKITRSLTEDFEREKEHSTNKNVFINCLSSGKSEGDDSGFTEDQTRRSVKQSTRKLLPKSFSSHYKFSKPVLQSQSISLVQQSEFSLEVTQYQEREPVLVRASPSCSVDVTERAGSSLQSPLLSADLTTAQTPSEFLALTEDSVSEMDAFSKSGSMASHCDNFGHNDSTSQMSLNSAAVTKTTTELTGTVPCAIMSPGKYRLEGQCSTESNSLPETSAANQKEVLLQIAELPATSVSHSESNLPADSEREENIGLQNGETMLGTNSPRKLGFYEQHKAIAEHVKGIHPISDSKIIPTSGDHHIFNKTSHGYEANPAKVLASSLSPFREGRFIERRLRSSSEGTAGSSRMILKPKDGNIEEVNSLRKQRAGSSSSKMNSLDVLNNLGSCELDEDDLMLDLEFLEEQSLHPSVCREDSYHSVVSCAAVVLTPMEPMIEMKKREEPEFPEPSKQNLSLKLTKDVDQEARCSHISRMPNSPSADWPLQGVEENGGIDSLPFRLMLQDCTAVKTLLLKMKRVLQESADMSPASSTTSLPVSPLTEEPVPFKDIMKDECSMLKLQLKEKDELISQLQEELGKVRHLQKAFASRVDKSTQTELLCYDGLNLKRLETVQGGREATYRNRIVSQNLSTRDRKAIHTPTEDRFRYSAADQTSPYKNKTCQLPSLCLSNFLKDKELAEVIKHSRGTYETLTSDVTQNLRATVGQSSLKPTAKTEGLSTFLEKPKDQVATARQHSTFTGRFGQPPRGPISLHMYSRKNVFLHHNLHSTELQTLGQQDG

SEQ ID NO: 7724 - protein, 872 aa, Homo sapiens
MGKKIKKEVEPPPKDVFDPLMIESKKAATVVLMLNSPEEEILAKACEAIYKFALKGEENKTTLLELGAVEPLTKLLTHEDKIVRRNATMIFGILASNNDVKKLLRELDVMNSVIAQLAPEEEVVIHEFASLCLANMSAEYTSKVQIFEHGGLEPLIRLLSSPDPDVKKNSMECIYNLVQDFQCRAKLQELNAIPPILDLLKSEYPVIQLLALKTLGVIANDKESRTMLRDNQGLDHLIKILETKELNDLHIEALAVIANCLEDMDTMVQIQQTGGLKKLLSFAENSTIPDIQKNAAKAITKAAYDPENRKLFHEQEVEKCLVALLGSENDGTKIAASQAISAMCENSGSKDFFNNQGIPQLIQLLKSDNEEVREAAALALANLTTCNPANANAAAEADGIDPLINLLSSKRDGAIANAATVLTNMAMQEPLRLNIQNHDIMHAIISPLRSANTVVQSKAALAVTATACDVEARTELRNSGGLEPLVELLRSKNDEVRKHASWAVMVCAGDELTANELCRLGALDILEEVNVSGTRKNKFSEAAYNKLLNNNLSLKYSQTGYLSSSNIINDGFYDYGRINPGTKLLPLKELCLQEPSDLRAVLLINSKSYVSPPSSMEDKSDVGYGQSISSSSSLRRSSKEKNKKNSYHFSAGFGSPIEDKSEPASGRNTVLSKSATKEKGWRKSKGKKEEEKVKEEEEVMVVPKFVGEGSSDKEWCPPSDPDFSMYVYEVTKSILPITNIKEQIEDLAKYVAEKMGGKIPKEKLPDFSWELHISELKFQLKSNVIPIGHVKKGIFYHRALLFKALADRIGIGCSLVRGEYGRAWNEVMLQNDSRKGVIGGLPAPEMYVIDLMFHPGGLMKLRSREADLYRFI

SEQ ID NO: 7725 - protein, 116 aa, Homo sapiens
MASASSSQRGRSGSGNFGGGRGGGFSGNDNFGIGGNFSGLGGFGGSRGGGGYGGSGDGCNGFGNDGSNFGGGGSYNDFGNYNNESSNFGPMKGGNFGGRSSGPCGNGGLYFAKPRF

SEQ ID NO: 7726 - protein, 114 aa, Homo sapiens
MASASSSQRGRSGSGNFGGGRGGGFSGNDNFGIGGNFSGLGGFGGSRGGGGYGGSGDGCNGFGNDGSNFGGGGSYNDFGNYNNESSNFGPMKGGNFGGRSSGPCGNGGLYFAKP

SEQ ID NO: 7727 - protein, 721 aa, Homo sapiens
MEEELKCPVCGSLFREPIILPCSHNVCLPCARTIAVQTPDGGSAAGGLGGGAGGGGDHADKLSLYSETDSGYGSYTPSLKSPNGVRVLPMVPAPPGSSAAAARGAACSSLSSSSSSITCPQCHRSASLDHRGLRGFQRNRLLEAIVQRYQQGRGAVPGTSAAAAVAICQLCDRTPPEPAATLCEQCDVLYCSACQLKCHPSRGPFAKHRLGAPSGGGGCKSPGGAGAGATGGSTARKFPTCPEHEMENYSMYCVSCRTPVCYLCLEEGRHAKHEVKPLGAMWKQHKAQLSQALNGVSDKAKEAKEFLVQLKNILQQIQENGLDYEACLVAQCDALVDALTRQKAKLLTKVTKEREHKLKMVWDQINHCTLKLRQSTGLMEYCLEVIKENDPSGFLQISDALIKRVQVSQEQWVKGALEPKVSAEFDLTLDSEPLLQAIHQLDFIQMKCRVPPVPLLQLEKCCTRNNSVTLAWRMPPFTHSPVDGYILELDDGAGGQFREVYVGKETLCTIDGLHFNSTYNARVKAFNSSGVGPYSKTVVLQTSDVAWFTFDPNSGHRDIILSNDNQTATCSSYDDRVVLGTAAFSKGVHYWELHVDRYDNHPDPAFGVARASVVKDMMLGKDDKAWAMYVDNNRSWFMHCNSHTNRTEGGVCKGATVGVLLDLNKHTLTFFINGQQQGPTAFSHVDGVFMPALSLNRNVQVTLHTGLEVPTNLGRPKLSGN

SEQ ID NO: 7728 - protein, 727 aa, Homo sapiens
MEEELKCPVCGSLFREPIILPCSHNVCLPCARTIAVQTPDGEQHLPQPLLLSRGSGLQAGAAAAASLEHDAAAGPACGGAGGSAAGGLGGGAGGGGDHADKLSLYSETDSGYGSYTPSLKSPNGVRVLPMVPAPPGSSAAAARGAACSSLSSSSSSITCPQCHRSASLDHRGLRGFQRNRLLEAIVQRYQQGRGAVPGTSAAAAVAICQLCDRTPPEPAATLCEQCDVLYCSACQLKCHPSRGPFAKHRLGAPSGGGGCKSPGGAGAGATGGSTARKFPTCPEHEMENYSMYCVSCRTPVCYLCLEEGRHAKHEVKPLGAMWKQHKAQLSQALNGVSDKAKEAKEFLVQLKNILQQIQFSDSCGGLPVLPLMRQLLRGVFPLQMVWDQINHCTLKLRQSTGLMEYCLEVIKENDPSGFLQISDALIKRVQVSQEQWVKGALEPKVSAEFDLTLDSEPLLQAIHQLDFIQMKCRVPPVPLLQLEKCCTRNNSVTLAWRMPPFTHSPVDGYILELDDGAGGQFREVYVGKETLCTIDGLHFNSTYNARVKAFNSSGVGPYSKTVVLQTSDVAWFTFDPNSGHRDIILSNDNQTATCSSYDDRVVLGTAAFSKGVHYWELHVDRYDNHPDPAFGVARASVVKDMMLGKDDKAWAMYVDNNRSWFMHCNSHTNRTEGGVCKGATVGVLLDLNKHTLTFFINGQQQGPTAFSHVDGVFMPALSLNRNVQVHT

SEQ ID NO: 7729 - protein, 729 aa, Homo sapiens
MEEELKCPVCGSLFREPIILPCSHNVCLPCARTIAVQTPDGEQHLPQPLLLSRGSGLQAGAAAAASLEHDAAAGPACGGAGGSAAGGLGGGAGGGGDHADKLSLYSETDSGYGSYTPSLKSPNGVRVLPMVPAPPGSSAAAARGAACSSLSSSSSSITCPQCHRSASLDHRGLRGFQRNRLLEAIVQRYQQGRGAVPGTSAAAAVAICQLCDRTPPEPAATLCEQCDVLYCSACQLKCHPSRGPFAKHRLSPGGAGAGATGGSTARKFPTCPEHEMENYSMYCVSCRTPVCYLCLEEGRHAKHEVKPLGAMWKQHKAQLSQALNGVSDKAKEAKEFLVQLKNILQQIQENGLDYEACLVAQCDALVDALTRQKAKLLTKVTKEREHKLKMVWDQINHCTLKLRQSTGLMEYCLEVIKENDPSGFLQISDALIKRVQVSQEQWVKGALEPKVSAEFDLTLDSEPLLQAIHQLDFIQMKCRVPPVPLLQLEKCCTRNNSVTLAWRMPPFTHSPVDGYILELDDGAGGQFREVYVGKETLCTIDGLHFNSTYNARVKAFNSSGVGPYSKTVVLQTSDVAWFTFDPNSGHRDIILSNDNQTATCSSYDDRVVLGTAAFSKGVHYWELHVDRYDNHPDPAFGVARASVVKDMMLGKDDKAWAMYVDNNRSWFMHCNSHTNRTEGGVCKGATVGVLLDLNKHTLTFFINGQQQGPTAFSHVDGVFMPALSLNRNV

SEQ ID NO: 7730 - protein, 342 aa, Homo sapiens
MVSIPEYYEGKNVLLTGATGFLGKVLLEKLLRSCPKVNSVYVLVRQKAGQTPQERVEEVLSGKLFDRLRDENPDFREKIIAINSELTQPKLALSEEDKEVIIDSTNIIFHCAATVRFNENLRDAVQLNVIATRQLILLAQQMKNLEVFMHVSTAYAYCNRKHIDEVVYPPPVDPKKLIDSLEWMDDGLVNDITPKLIGDRPNTYIYTKALAEYVVQQEGAKLNVAIVRPSIVGASWKEPFPGWIDNFNGPSGLFIAAGKGILRTIRASNNALADLVPVDVVVNMSLAAAWYSGVNRPRNIMVYNCTTGSTNPFHWGEVGMILPVFLNVRINLKEPKKKKKKK

SEQ ID NO: 7731 - protein, 380 aa, Homo sapiens
DPETMNHSERFVFIAEWYDPNASLLRRYELLFYPGDGSVEMHDVKNHRTFLKRTKYDNLHLEDLFIGNKVNVFSRQLVLIDYGDQYTARQLGSRKEKTLALIKPDAISKAGEIIEIINKAGFTITKLKMMMLSRKEALDFHVDHQSRPFFNELIQFITTGPIIAMEILRDDAICEWKRLLGPANSGVARTDASESIRALFGTDGIRNAAHGPDSFASAAREMELFFPSSGGCGPANTAKFTNCTCCIVKPHAVSEGLLGKILMAIRDAGFEISAMQMFNMDRVNVEEFYEVYKGVVTEYHDMVTEMYSGPCVAMEIQQNNATKTFREFCGPADPEIARHLRPGTLRAIFGKTKIQNAVHCTDLPEDGLLEVQYFFKILDN

SEQ ID NO: 7732 - protein, 340 aa, Homo sapiens
MHDVKNHRTFLKRTKYDNLHLEDLFIGNKVNVFSRQLVLIDYGDQYTARQLGSRKEKTLALIKPDAISKAGEIIEIINKAGFTITKLKMMMLSRKEALDFHVDHQSRPFFNELIQFITTGPIIAMEILRDDAICEWKRLLGPANSGVARTDASESIRALFGTDGIRNAAHGPDSFASAAREMELFFPSSGGCGPANTAKFTNCTCCIVKPHAVSEGLLGKILMAIRDAGFEISAMQMFNMDRVNVEEFYEVYKGVVTEYHDMVTEMYSGPCVAMEIQQNNATKTFREFCGPADPEIARHLRPGTLRAIFGKTKIQNAVHCTDLPEDGLLEVQYFFKILDN

SEQ ID NO: 7733 - protein, 104 aa, Homo sapiens
MSIRLTQKSYKASTSIPGTFSRCSYARGPGAHIGSLSFSRVGSSRFQGTLGRGHGGASSITRAMVNQSLLNPLNLEVDPNIQAVCTQEKKQIKTLSKFASFIDK

SEQ ID NO: 7734 - protein, 2847 aa, Homo sapiens
CWCLGVSTMPITQDNAVLHLPLLYQWLQNSLQEGGDGPEQRLCQAAIQKLQEYIQLNFAVDESTVPPDHSPPEMEICTVYLTKELGDTETVGLSFGNIPVFGDYGEKRRGGKKRKTHQGPVLDVGCIWVTELRKNSPAGKSGKVRLRDEILSLNGQLMVGVDVSGASYLAEQCWNGGFIYLIMLRRFKHKAHSTYNGNSSNSSEPGETPTLELGDRTAKKGKRTRKFGVISRPPANKAPEESKGSAGCEVSSDPSTELENGPDPELGNGHVFQLENGPDSLKEVAGPHLERSEVDRGTEHRIPKTDAPLTTSNDKRRFSKGGKTDFQSSDCLAREEVGRIWKMELLKESDGLGIQVSGGRGSKRSPHAIVVTQVKEGGAAHRDGRLSLGDELLVINGHLLVGLSHEEAVAILRSATGMVQLVVASKENSAEDLLRLTSKSLPDLTSSVEDVSSWTDNEDQEADGEEDEGTSSSVQRAMPGTDEPQDVCGAEESKGNLESPKQGSNKIKLKSRLSGGVHRLESVEEYNELMVRNGDPRIRMLEVSRDGRKHSLPQLLDSSSASQEYHIVKKSTRSLSTTQVESPWRLIRPSVISIIGLYKEKGKGLGFSIAGGRDCIRGQMGIFVKTIFPNGSAAEDGRLKEGDEILDVNGIPIKGLTFQEAIHTFKQIRSGLFVLTVRTKLVSPSLTPCSTPTHMSRSASPNFNTSGGASAGGSDEGSSSSLGRKTPGPKDRIVMEVTLNKEPRVGLGIGACCLALENSPPGIYIHSLAPGSVAKMESNLSRGDQILEVNSVNVRHAALSKVHAILSKCPPGPVRLVIGRHPNPKVSEQEMDEVIARSTYQESKEANSSPGLGTPLKSPSLAKKDSLISESELSQYFAHDVPGPLSDFMVAGSEDEDHPGSGCSTSEEGSLPPSTSTHKEPGKPRANSLVTLGSHRASGLFHKQVTVARQASLPGSPQALRNPLLRQRKVGCYDANDASDEEEFDREGDCISLPGALPGPIRPLSEDDPRRVSISSSKGMDVHNQEERPRKTLVSKAISAPLLGSSVDLEESIPEGMVDAASYAANLTDSAEAPKGSPGSWWKKELSGSSSAPKLEYTVRTDTQSPTNTGSPSSPQQKSEGLGSRHRPVARVSPHCKRSEAEAKPSGSQTVNLTGRANDPCDLDSRVQATSVKVTVAGFQPGGAVEKESLGKLTTGDACVSTSCELASALSHLDASHLTENLPKAASELGQQPMTELDSSSDLISSPGKKGAAHPDPSKTSVDTGQVSRPENPSQPASPRVAKCKARSPVRLPHEGSPSPGEKAAAPPDYSKTRSASETSTPHNTRRVAALRGAGPGAEGMTPAGAVLPGDPLTSQEQRQGAPGNHSKALEMTGIHAPESSQEPSLLEGADSVSSRAPQASLSMLPSTDNTKEACGHVSGHCCPGGSRESPVTDIDSFIKELDASAARSPSSQTGDSGSQEGSAQGHPPAGAGGGSSCRAEPVPGGQTSSPRRAWAAGAPAYPQWASQPSVLDSINPDKHFTVNKNFLSNYSRNFSSFHEDSTSLSGLGDSTEPSLSSMYGDAEDSSSDPESLTEAPRASARDGWSPPRSRVSLHKEDPSESEEEQIEICSTRGCPNPPSSPAHLPTQAAICPASAKVLSLKYSTPRESVASPREKAACLPGSYTSGPDSSQPSSLLEMSSQEHETHADISTSQNHRPSCAEETTEVTSASSAMENSPLSKVARHFHSPPIILSSPNMVNGLEHDLLDDETLNQYETSINAAASLSSFSVDVPKNGESVLENLHISESQDLDDLLQKPKMIARRPIMAWFKEINKHNQGTHLRSKTEKEQPLMPARSPDSKIQMVSSSQKKGVTVPHSPPQPKTNLENKDLSKKSPAEMLLTNGQKAKCGPKLKRLSLKGKAKVNSEAPAANAVKAGGTDHRKPLISPQTSHKTLSKAVSQRLHVADHEDPDRNTTAAPRSPQCVLESKPPLATSGPLKPSVSDTSIRTFVSPLTSPKPVPEQGMWSRFHMAVLSEPDRGCPTTPKSPKCRAEGRAPRADSGPVSPAASRNGMSVAGNRQSEPRLASHVAADTAQPRPTGEKGGNIMASDRLERTNQLKIVEISAEAVSETVCGNKPAESDRRGGCLAQGNCQEKSEIRLYRQVAESSTSHPSSLPSHASQAEQEMSRSFSMAKLASSSSSLQTAIRKAEYSQGKSSLMSDSRGVPRNSIPGGPSGEDHLYFTPRPATRTYSMPAQFSSHFGREGHPPHSLGRSRDSQVPVTSSVVPEAKASRGGLPSLANGQGIYSVKPLLDTSRNLPATDEGDIISVQETSCLVTDKIKVTRRHYCYEQNWPHESTSFFSVKQRIKSFENLANADRPVAKSGASPFLSVSSKPPIGRRSSGSIVSGSLGHPGDAAARLLRRSLSSCSENQSEAGTLLPQMAKSPSIMTLTISRQNPPETSSKGSDSELKKSLGPLGIPTPTMTLASPVKRNKSSVRHTQPSPVSRSKLQELRALSMPDLDKLCSEDYSAGPSAVLFKTELEITPRRSPGPPAGGVSCPEKGGNRACPGGSGPKTSAAETPSSASDTGEAAQDLPFRRSWSVNLDQLLVSAGDQQRLQSVLSSVGSKSTILTLIQEAKAQSENEEDVCFIVLNRKEGSGLGFSVAGGTDVEPKSITVHRVFSQGAASQEGTMNRGDFLLSVNGASLAGLAHGNVLKVLHQAQLHKDALVVIKKGMDQPRPSARQEPPTANGKGLLSRKTIPLEPGIGRSVAVHDALCVEVLKTSAGLGLSLDGGKSSVTGDGPLVIKRVYKGGAAEQAGIIEAGDEILAINGKPLVGLMHFDAWNIMKSVPEGPVQLLIRKHRNSS

SEQ ID NO: 7735 - protein, 2641 aa, Homo sapiens [sequence omitted]

SEQ ID NO: 7736 - protein, 862 aa, Homo sapiens
MAEQRFCVDYAKRGTAGCKKCKEKIVKGVCRIGKVVPNPFSESGGDMKEWYHIKCMFEKLERARATTKKIEDLTELEGWEELEDNEKEQITQHIADLSSKAAGTPKKKAVVQAKLTTTGQVTSPVKGASFVTSTNPRKFSGFSAKPNNSGEAPSSPTPKRSLSSSKCDPRHKDCLLREFRKLCAMVADNPSYNTKTQIIQDFLRKGSAGDGFHGDVYLTVKLLLPGVIKTVYNLNDKQIVKLFSRIFNCNPDDMARDLEQGDVSETIRVFFEQSKSFPPAAKSLLTIQEVDEFLLRLSKLTKEDEQQQALQDIASRCTANDLKCIIRLIKHDLKMNSGAKHVLDALDPNAYEAFKASRNLQDVVERVLHNAQEVEKEPGQRRALSVQASLMTPVQPMLAEACKSVEYAMKKCPNGMFSEIKYDGERVQVHKNGDHFSYFSRSLKPVLPHKVAHFKDYIPQAFPGGHSMILDSEVLLIDNKTGKPLPFGTLGVHKKAAFQDANVCLFVFDCIYFNDVSLMDRPLCERRKFLHDNMVEIPNRIMFSEMKRVTKALDLADMITRVIQEGLEGLVLKDVKGTYEPGKRHWLKVKKDYLNEGAMADTADLVVLGAFYGQGSKGGMMSIFLMGCYDPGSQKWCTVTKCAGGHDDATLARLQNELDMVKISKDPSKIPSWLKVNKIYYPDFIVPDPKKAAVWEITGAEFSKSEAHTADGISIRFPRCTRIRDDKDWKSATNLPQLKELYQLSKEKADFTVVAGDEGSSTTGGSSEENKGPSGSAVSRKAPSKPSASTKKAEGKLSNSNSKDGNMQTAKPSAMKVGEKLATKSSPVKVGEKRKAADETLCQTKRRPASEQRGRTVPAGRR

SEQ ID NO: 7737 - protein, 299 aa, Homo sapiens
MSLAFKIFFPQTLRALSRKELCLFRKHHWRDVRQFSQWSETDLLHGHPLFLRRKPVLSFQGSHLRSRATYLVFLPGLHVGLCSGPCEMAEQRFCVDYAKRGTAGCKKCKEKIVKGVCRIGKVVPNPFSESGGDMKEWYHIKCMFEKLERARATTKKIEDLTELEGWEELEDNEKEQITQHIADLSSKAAGTPKKKAVVQAKLTTTGQVTSPVKGASFVTSTNPRKFSGFSAKPNNSGEAPSSPTPKRSLSSSKCDPRHKDCLLREFRKLCAMVADNPSYNTKTQIIQDFLRKGSAGGVA

SEQ ID NO: 7738 - protein, 922 aa, Homo sapiens
MAEQRFCVDYAKRGTAGCKKCKEKIVKGVCRIGKVVPNPFSESGGDMKEWYHIKCMFEKLERARATTKKIEDLTELEGWEELEDNEKEQITQHIADLSSKAAGTPKKKAVVQAKLTTTGQVTSPVKGASFVTSTNPRKFSGFSAKPNNSGEAPSSPTPKRSLSSSKCDPRHKDCLLREFRKLCAMVADNPSYNTKTQIIQDFLRKGSAGDGFHGDVYLTVKLLLPGVIKTVYNLNDKQIVKLFSRIFNCNPDDMARDLEQGDVSETIRVFFEQSKSFPPAAKSLLTIQEVDEFLLRLSKLTKEDEQQQALQDIASRCTANDLKCIIRLIKHDLKMNSGAKHVLDALDPNAYEAFKASRNLQDVVERVLHNAQEVEKEPGQRRALSVQASLMTPVQPMLAEACKSVEYAMKKCPNGMFSEIKYDGERVQVHKNGDHFSYFSRSLKPVLPHKVAHFKDYIPQAFPGGHSMILDSEVLLIDNKTGKPLPFGTLGVHKKAAFQDANVCLFVFDCIYFNDVSLMDRPLCERRKFLHDNMVEIPNRIMFSEMKRVTKALDLADMITRVIQEGLEGLVLKDVKGTYEPGKRHWLKVKKDYLNEGAMADTADLVVLGAFYGQGSKGGMMSIFLMGCYDPGSQKWCTVTKCAGGHDDATLARLQNELDMVKISKDPSKIPSWLKVNKIYYPDFIVPDPKKAAVWEITGAEFSKSEAHTADGISIRFPRCTRIRDDKDWKSATNLPQLKELYQLSKEKADFTVVAGDEGSSTTGGSSEENKGPSGSAVSRKAPSKPSASTKKAEGKLSNSNSKDGNMQTAKPSAMKVGEKLATKSSPVKVGEKRKAADETLCQTKVLLDIFTGVRLYLPPSTPDFSRLRRYFVAFDGDLVQEFDMTSATHVLGSRDKNPAAQQVSPEWIWACIRKRRLVAPC

SEQ ID NO: 7739 - protein, 1154 aa, Homo sapiens
MSDAAEAPREATGENGETEMKEEEEPNPNYKEVEDPQQESKDDTIAWRESQEEERKTGEEEGEEEEKEEEGKEDKKIVMEETEEKAGEVQEKEASGIQEETTVEPQEVTASMIRLETQITDSQSITSGIFPKTQRGSKSKLSLQLEDAETDELLRDLSTQIEFLDLDQISPEEQQISSPERQPSGELEEKTDRMPQDELGQERRDLEPENREEGQERRVSDIQSKAGISRESLVSSTTEDILFQKDKSTPVYPLTMTWSFGWNSSLPVYYIREERQRVLLYVCAHTAIIYNVFRNNQYHLQGHANIISCLCVSEDRRWIATADKGPDCLVIIWDSFTGIPVHTIFDSCPEGNGIMAMAMTHDAKYLATISDAEVQKVCIWKWTLAVETPACTLELPTEYGVQNYVTFNPTNNKELVSNSKTRAIYYAWYEERDTLAHSAPLLTEKTFNKLVGKFSQSIFHLNLTQILSATMEGKLVVWDIHRPPSSASTFLGFPYIKPCKLVHLQKEGITVLTTIDSYIVTGDIKGNIKFYDHTLSIVNWYSHLKLGAIRTLSFSKTPATPPTEKSNYPPDCTLKGDLFVLRNFIIGTSDAAVYHLTTDGTKLEKLFVEPKDAICAISCHPYQPLIAIGSICGMIKVWNYENKQYLFSRVFEKGFGVQSLTYNPEGALLGAGFTEGTVYILDAMSLENESPEPFKYSRTSVTHISFSHDSQYMATADRSFTVAVYMLVVRNGQRVWEYLARLRSHRKSIRSLLFGVYLDSNEPRLLSLGTDRLLIEYDLLRSYKDHLEVLDIHHTDQGCYPTCMVWYPPLTRELFLLICNSGYKVKLFNATTKMCRKTLLGPAYGSPIEQTQVLPVRSMAELQKRYLVFINRDKLGLQILPVDGNPHKTSAIVCHPNGVAGMAVSYDGCYAFTAGGHDRSVVQWKITLSVLEAAVSLGGEDLTPFYGLLSGGREGKFYRELEDYFYYSQLRSQGIDTMETRKVSEHICLSELPFVMRAIGFYPSEEKIDDIFNEIKFGEYVDTGKLIDKINLPDFLKVYLNHKPPFGNTMSGIHKSFEVLGYTNSKGKKAIRREDFLRLLVTKGEHMTEEEMLDCFASLFGLNPEGWKSEPATCSVKGSEICLEEELPDEITAEIFATEILGLTISEDSGQDGQ

SEQ ID NO: 7740 - protein, 297 aa, Homo sapiens
MEETEEKAGEVQEKEASGIQEETTVEPQEVTASMIRLETQITDSQSITSGIFPKTQRGSKSKLSLQLEDAETDELLRDLSTQIEFLDLDQISPEEQQISSPERQPSGELEEKTDRIPQDELGQERRDLEPENREEGQERRVSDIQSKAGISRESLVSSTTEDILFQKDKSTPVYPLTMTWSFGWNSSLPVYYIREERQRVLLYVCAHTAIIYNVFRNNQYHLQVCRDFLPTGGGVVFNVRVVFCFVSQGLTSFYHCRIFPLSLELKASLSLETHGIVYCLSVSNQNQLTKQQLILIL

SEQ ID NO: 7741 - protein, 134 aa, Homo sapiens
MTRDQNGTWEMESNENFEGYMKALDIDFATRKIAVRLTQTKVIDQDGDNFKTKTTSTFRNYDVDFTVGVEFDEYTKSLDNRHVKALVTWEGDVLVCVQKGEKENRGWKQWIEGDKLYLELTCGDQVCRQVFKKK

SEQ ID NO: 7742 - protein, 766 aa, Homo sapiens
MTNGTLEPAAEWSVLLGVHSQDGPLDGAHTRAVAAIVVPANYSQVELGADLALLRLASPASLGPAVWPVCLPRASHRFVHGTACWATGWGDVQEADPLPLPWVLQEVELRLLGEATCQCLYSQPGPFNLTLQILPGMLCAGYPEGRRDTCQGDSGGPLVCEEGGRWFQAGITSFGFGCGRRNRPGVFTAVATYEAWIREQVMGSEPGPAFPTQPQKTQSDPQEPREENCTIALPECGKAPRPGAWPWEAQVMVPGSRPCHGALVSESWVLAPASCFLDPNSSDSPPRDLDAWRVLLPSRPRAERVARLVQHENASWDNASDLALLQLRTPVNLSAASRPVCLPHPEHYFLPGSRCRLARWGRGEPALGPGALLEAELLGGWWCHCLYGRQGAAVPLPGDPPHALCPAYQEKEEVGSCWNDSRWSLLCQEEGTWFLAGIRDFPSGCLRPRAFFPLQTHGPWISHVTRGAYLEDQLAWDWGPDGEETETQTCPPHTEHGACGLRLEAAPVGVLWPWLAEVHVAGDRVCTGILLAPGWVLAATHCVLRPGSTTVPYIEVYLGRAGASSLPQGHQVSRLVISIRLPQHLGLRPPLALLELSSRVEPSPSALPICLHPAGIPPGASCWVLGWKEPQDRVPVAAAVSILTQRICDCLYQGILPPGTLCVLYAEGQENRCEMTSAPPLLCQMTEGSWILVGMAVQGSRELFAAIGPEEAWISQTVGEANLLPPSGSPHWPTGGSNLCPPELAKASGSPHAVYFLLLLTLLIQS

SEQ ID NO: 7743 - protein, 696 aa, Homo sapiens
MTDPMMDFFDDANLFGETLEGLSDDAFVQPGPVSLVDELNLGAEFEPLHIDSLNHVQGTPTHQKMTDFEQLNQFDSIKFHHVNQSFGSPAEHVLSPHSQFNCSPIHPQNQPNGLFPDVSDGSPMWGHQTATTISNQNGSPFHQQGHSHSMHQNKSFVAHHDFALFQANEQQTQCTSLRSQQNRNNLNPGQNSLSQSKNFMNVSGPHRVNVNHPPQMTNASNSQQSISMQQFSQTSNPSAHFHKCSSHQEGNFNGPSPNMTSCSVSNSQQFSSHYSFSSNHISPNSLLQSSAVLASNHTNQTLSDFTGSNSFSPHRGIKQESTQHILNPNTSLNSNNFQILHSSHPQGNYSNSKLSPVHMNFPDPVDSGTQMGHFNDHVETNGFSSLEENLLHQVESQTEPFTGLDPEDLLQEGLLPHFDESTFGQDNSSHILDHDLDRQFTSHLVTRPSDMAQTQLQSQARSWHSSFSNHQHLHDRNHLCLQRQPPSSKKSDGSGTYTKLQNTQVRVMSEKKQRKKVESESKQEKANRIISEAIAKAKERGERNIPRVMSPENFPTASVEGKEEKKGRRMKSKPKDKDSKKTKTCSKLKEKTKIGKLIITLGKKQKRKNESSDEISDAEQMPQHTLKDQDSQKRRSNRQIKRKKYAEDIEGKQSEEEVKGSMKIKKNSAPLPGEQPLQLFVVSIFGIMTAKHFKPT

SEQ ID NO: 7744 - protein, 297 aa, Homo sapiens
  VARIANT 270: Xaa = Any Amino Acid
MDTGSKNKVSLDICIHQNTAWNSERVMLEPGPTAKILWHCAVEETEPQPATGCASFPAEAQLLGYFSGAAVRQSGGQGSDALPWGRAAYGGRKQRQWRHSEVLDGGSSEEYQGGKRHDQKSPSLVPPPLEVSKLTKQMFDAKNMLAACDPCHGCYLMAAPIVGGCMSMREVDEQTYNIQNKYSSYFAHWIPHNVERAACDIPPLELKMSVTFISNNTAIQELFRFRCILEQFTAKFRCKAFLSWYSGKGMHDVEFAEVESNMNNLVSEYXQYQDTIQRRRESLRSGPRKRWLRPFCY

SEQ ID NO: 7745 - protein, 525 aa, Homo sapiens
MSWHPQYRSSKFRHVFGKPASKENCYDSVPITRSVHDNHFCAVNPHFIAVVTECAGGGAFLVIPLHQTGKLDPHYPKVCGHRGNVLDVKWNPFDDFEIASCSEDATIKIWSIPKQLLTRNLTAYRKELVGHARRVGLVEWHPTAANILFSAGYDYKVMIWNLDTKESVITSPMSTISCHQDVILSMSFNTNGSLLATTCKDRKIRVIDPRAGTVLQEASYKGHRASKVLFLGNLKKLMSTGTSRWNNRQVALWDQDNLSVPLMEEDLDGSSGVLFPFYDADTSMLYVVGKGDGNIRYYEVSADKPHLSYLTEYRSYNPQKGIGVMPKRGLDVSSCEIFRFYKLITTKSLIEPISMIVPRQSESYQEDIYPPTAGAQPSLTAQEWLSGMNRDPILVSLRPGSELLRPHPLPAERPIFNSMAPASPRLLNQTEKLAAEDGWRSSSLLEEKMPRWAAEHRLEEKKTWLTNGFDVFECPPPKTENELLQMFYRQQEEIRRLRELLTQREVQAKQLELEIKNLRMGSEQL

SEQ ID NO: 7746 - protein, 525 aa, Homo sapiens
MSWHPQYRSSKFRHVFGKPASKENCYDSVPITRSVHDNHFCAVNPHFIAVVTECAGGGAFLVIPLHQTGKLDPHYPKVCGHRGNVLDVKWNPFDDFEIASCSEDATIKIWSIPKQLLTRNLTAYRKELVGHARRVGLVEWHPTAANILFSAGYDYKVMIWNLDTKESVITSPMSTISCHQDVILSMSFNTNGSLLATTCKDRKIRVIDPRAGTVLQEASYKGHRASKVLFLGNLKKLMSTGTSRWNNRQVALWDQDNLSVPLMEEDLDGSSGVLFPFYDADTSMLYVVGKGDGNIRYYEVSADKPHLSYLTEYRSYNPQKGIGVMPKRGLDVSSCEIFRFYKLITTKSLIEPISMIVPRRSESYQEDIYPPTAGAQPSLTAQEWLSGMNRDPILVSLRPGSELLRPHPLPAERPIFNSMAPASPRLLNQTEKLAAEDGWRSSSLLEEKMPRWAAEHRLEEKKTWLTNGFDVFECPPPKTENELLQMFYRQQEEIRRLRELLTQREVQAKQLELEIKNLRMGSEQL

SEQ ID NO: 7747 - protein, 322 aa, Homo sapiens
MSSLGGGSQDAGGSSSSSTNGSGGSGSSGPKAGAADKSAVVAAAAPASVADDTPPPERRNKSGIISEPLNKSLRRSRPLSHYSSFGSSGGSGGGSMMGGESADKATAAAAAASLLANGHDLAAAMAVDKSNPTSKHKSGAVASLLSKAERATELAAEGQLTLQQFAQSTEMLKRVVQEHLPLMSEAGAGLPDMEAVAGAEALNGQSDFPYLGAFPINPGLFIMTPAGVFLAESALHMAGLAEYPMQGELASAISSGKKKRKRCGMCAPCRRRINCEQCSSCRNRKTGHQICKFRKCEELKKKPSAALEKVMLPTGAAFRWFQ

SEQ ID NO: 7748 - protein, 199 aa, Homo sapiens
MVLLHMKWGDKSQFLLQVPGSTKPEELMVQVGQVYNGWLNVQRLCLEMEELAQHDIFLSPNMQGLTNDQIEELKLKKEWGEKCMHTHTHHRLSTEDHKSPTQTSGNSQMSSHFYINDVNFTRKMLLMFFEVSAHESYWGHINIMLILALKLHNPKSPPKISPPSIAGYSLHEKSCWSTIALVRLSGAVIDQQDFSCTES

SEQ ID NO: 7749 - protein, 317 aa, Homo sapiens
MYNMMETELKPPGPQQTSGGGGGNSTAAAAGGNQKNSPDRVKRPMNAFMVWSRGQRRKMAQENPKMHNSEISKRLGAEWKLLSETEKRPFIDEAKRLRALHMKEHPDYKYRPRRKTKTLMKKDKYTLPGGLLAPGGNSMASGVGVGAGLGAGVNQRMDSYAHMNGWSNGSYSMMQDQLGYPQHPGLNAHGAAQMQPMHRYDVSALQYNSMTSSQTYMNGSPTYSMSYSQQGTPGMALGSMGSVVKSEASSSPPVVTSSSHSRAPCQAGDLRDMISMYLPGAEVPEPAAPSRLHMSQHYQSGPVPGTAINGTLPLSHM

SEQ ID NO: 7750 - protein, 669 aa, Homo sapiens
MKIFVGNVDGADTTPEELAALFAPYGTVMSCAVMKQFAFVHMRENAGALRAIEALHGHELRPGRALVVEMSRPRPLNTWKIFVGNVSAACTSQELRSLFERRGRVIECDVVKDYAFVHMEKEADAKAAIAQLNGKEVKGKRINVELSTKGQKKGPGLAVQSGDKTKKPGAGDTAFPGTGGFSATFDYQQAFGNSTGGFDGQARQPTPPFFGRDRSPLRRSPPRASYVAPLTAQPATYRAQPSVSLGAAYRAQPSASLGVGYRTQPMTAQAASYRAQPSVSLGAPYRGQLASPSSQSAAASSLGPYGGAQPSASALSSYGGQAAAASSLNSYGAQGSSLASYGNQPSSYGAQAASSYGVRAAASSYNTQGAASSLGSYGAQAASYGAQSAASSLAYGAQAASYNAQPSASYNAQSAPYAAQQAASYSSQPAAYVAQPATAAAYASQPAAYAAQATTPMAGSYGAQPVVQTQLNSYGAQASMGLSGSYGAQSAAAATGSYGAAAAYGAQPSATLAAPYRTQSSASLAASYAAQQHPQAAASYRGQPGNAYDGAGQPSAAYLSMSQGAVANANSTPPPYERTRLSPPRASYDDPYKKAVAMSKRYGSDRRLAELSDYRRLSESQLSFRRSPTKSSLDYRRLPDAHSDYARYSGSYNDYLRAAQMHSGYQRRM

SEQ ID NO: 7751 - protein, 1073 aa, Homo sapiens
MTDQENNNNISSNPFAALFGSLADAKQFAAIQKEQLKQQSDELPASPDDSDNSVSESLDEFDYSVAEISRSFRSQQEICEQLNINHMIQRIFLITLDNSDPSLKSGNGIPSRCVYLEEMAVELEDQDWLDMSNVEQALFARLLLQDPGNHLINMTSSTTLNLSADRDAGERHIFCYLYSCFQRAKEEITKVPENLLPFAVQCRNLTVSNTRTVLLTLEIYVDQNIHEQLVDLMLEAIQGAREYMNKIYFEDVTEFLEEVIEALILDEEVRTFPEVMIPVFDILLGRIKDLELCQILLYAYLDILLYFTRQKDMAKVFVEYIQPKDPTNGQMYQKTLLGVILSISCLLKTPGVVENHGYFLNPSRSSPQEIKVQEANIHQFMAQFHEKIYQMLKNLLQLSPETKHCILSWLGNCLHANAGRTKIWANQMPEIFFQMYASDAFFLNLGAALLKLCQPFCKPRSSRLLTFNPTYCALKELNDEERKIKNVHMRGLDKETCLIPAVQEPKFPQNYNLVTENLALTEYTLYLGFHRLHDQMVKINQNLHRLQVAWRDAQQSSSPAADNLREQFERLMTIYLSTKTAMTEPQMLQNCLNLQVSMAVLLVQLAIGNEGSQPIELTFPLPDGYSSLAYVPEFFADNLGDFLIFLRRFADDILETSADSLEHVLHFITIFTGSIERMKNPHLRAKLAEVLEAVMPHLDQTPNPLVSSVFHRKRVFCNFQYAPQLAEALIKVFVDIEFTGDPHQFEQKFNYRRPMYPILRYMWGTDTYRESIKDLADYASKNLEAMNPPLFLRFLNLLMNDAIFLLDEAIQYLSKIKIQQIEKDRGEWDSLTPEARREKEAGLQMFGQLARFHNIMSNETIGTLAFLTSEIKSLFVHPFLAERIISMLNYFLQHLVGPKMGALKVKDFSEFDFKPQQLVSDICTIYLNLGDEENFCATVPKDGRSYSPTLFAQTVRVLKKINKPGNMIMAFSNLAERIKSLADLQQQEEETYADACDEFLDPIMSTLMCDPVVLPSSRVTVDRSTIARHLLSDQTDPFNRSPLTMDQIRPNTELKEKIQRWLAERKQQKEQLE

SEQ ID NO: 7752 - protein, 2868 aa, Homo sapiens
MQKSLTDLEIQLSRITEYGYDGFLKWLNCLFHSNITSDLKAFTDKFGFDVLILFSSYLSEEQQPRRQIAVYSENMELCSQICCELEECQNPCLELEPFDCGCDEILVYQQEDPSVTCDQVVLVVKEVINRRCPEMVSNSRTSSTEAVAGSAPLSQGSSGIMELYGSDIEPQPSSVNFIENPPDLNDSNQAQVDANVDLVSPDSGLATIRSSRSSKESSVFLSDDSPVGEGAGPHHTLLPGLDSYSPIPEGAVAEEHAWSGEHGEHFDLFNFDPAPMASGQSQQSSHSADYSPADDFFPNSDLSEGQLPAGPEGLDGMGTNMSNYSSSSLLSGAGKDSLVEHDEEFVQRQDSPRDNSERNLSLTDFVGDESPSPERLKNTGKRIPPTPMNSLVESSPSTEEPASLYTEDMTQKATDTGHMGPPQTHARCSSWWGGLEIDSKNIADAWSSSEQESVFQSPESWKEHKPSSIDRRASDSVFQPKSLEFTKSGPWESEFGQPELGSNDIQDKNEESLPFQNLPMEKSPLPNTSPQGTNHLIEDFASLWHSGRSPTAMPEPWGNPTDDGEPAAVAPFPAWSAFGKEDHDEALKNTWNLHPTSSKTPSVRDPNEWAMAKSGFAFSSSELLDNSPSEINNEAAPEIWGKKNNDSRDHIFAPGNPSSDLDHTWTNSKPPKEDQNGLVDPKTRGKVYEKVDSWNLFEENMKKGGSDVLVPWEDSFLSYKCSDYSASNLGEDSVPSPLDTNYSTSDSYTSPTFAGDEKETEHKPFAKEEGFESKDGNSTAEETDIPPQSLQQSSRNRISSGPGNLDMWASPHTDNSSEINTTHNLDENELKTEHTDGKNISMEDDVGESSQSSYDDPSMMQLYNETNRQLTLLHSSTNSRQTAPDSLDLWNRVILEDTQSTATISDMDNDLDWDDCSGGAAIPSDGQTEGYMAEGSEPETRFTVRQLEPWGLEYQEANQVDWELPASDEHTKDSAPSEHHTLNEKSGQLIANSIWDSVMRDKDMSSFMLPGSSHITDSEQRELPPEIPSHSANVKDTHSPDAPAASGTSESEALISHLDKQDTERETLQSDAASLATRLENPGYFPHPDPWKGHGDGQSESEKEAQGATDRGHLDEEEVIASGVENASGISEKGQSDQELSSLVASEHQEICIKSGKISSLAVTFSPQTEEPEEVLEYEEGSYNLDSRDVQTGMSADNLQPKDTHEKHLMSQRNSGETTETSDGMNFTKYVSVPEKDLEKTEECNFLEPENVGGGPPHRVPRSLDFGDVPIDSDVHVSSTCSEITKNLDVKGSENSLPGAGSSGNFDRDTISSEYTHSSASSPELNDSSVALSSWGQQPSSGYQEENQGNWSEQNHQESELITTDGQVEIVTKVKDLEKNRINEFEKSFDRKTPTFLEIWNDSVDGDSFSSLSSPETGKYSEHSGTHQESNLIASYQEKNEHDISATVQPEDARVISTSSGSDDDSVGGEESIEEEIQVANCHVAEDESRAWDSLNESNKFLVTADPKSENIYDYLDSSEPAENENKSNPFCDNQQSSPDPWTFSPLTETEMQITAVEKEKRSSPETGTTGDVAWQISPKASFPKNEDNSQLEMLGFSADSTEWWKASPQEGRLIESPFERELSDSSGVLEINSSVHQNASPWGVPVQGDIEPVETHYTNPFSDNHQSPFLEGNGKNSHEQLWNIQPRQPDPDADKFSQLVKLDQIKEKDSREQTFVSAAGDELTPETPTQEQCQDTMLPVCDHPDTAFTHAEENSCVTSNVSTNEGQETNQWEQEKSYLGEMTNSSIATENFPAVSSPTQLIMKPGSEWDGSTPSEDSRGTFVPDILHGNFQEGGQLASAAPDLWIDAKKPFSLKADGENPDILTHCEHDSNSQASDSPDICHDSEAKQETEKHLSACMGPEVESSELCLTEPEIDEEPIYEPGREFVPSNAELDSENATVLPPIGYQADIKGSSQPASHKGSPEPSEINGDNSTGLQVSEKGASPDMAPILEPVDRRIPRIENVATSIFVTHQEPTPEGDGSWISDSFSPESQPGARALFDGDPHLSTENPALVPDALLASDTCLDISEAAFDHSFSDASGLNTSTGTIDDMSKLTLSEGHPETPVDGDLGKQDICSSEASWGDFEYDVMGQNIDEDLLREPEHFLYGGDPPLEEDSLKQSLAPYTPPFDLSYLTEPAQSAETIEEAGSPEDESLGCRAAEIVLSALPDRRSEGNQAETKNRLPGSQLAVLHIREDPESVYLPVGAGSNILSPSNVDWEVETDNSDLPAGGDIGPPNGASKEISELEEEKTIPTKEPEQIKSEYKEERCTEKNEDRHALHMDYILVNREENSHSKPETCEERESIAELELYVGSKETGLQGTQLASFPDTCQPASLNERKGLSAEKMSSKSDTRSSFESPAQDQSWMFLGHSEVGDPSLDARDSGPGWSGKTVEPFSELGLGEGPQLQILEEMKPLESLALEEASGPVSQSQKSKSRGRAGPDAVTLQAVTHDNEWEMLSPQPVQKNMIPDTEMEEETEFLELGTRISRPNGLLSEDVGMDIPFEEGVLSPSAADMRPEPPNSLDLNDTHPRRIKLTAPNINLSLDQSEGSILSDDNLDSPDEIDINVDELDTPDEADSFEYTGHEDPTANKDSGQESESIPEYTAEEEREDNRLWRTVVIGEQEQRIDMKVIEPYRRVISHGGSRARYYGDGLNAIIVFAACFLPDSSRADYHYVMENLFLYVISTLELMVAEDYMIVYLNGATPRRRMPGLGWMKKCYQMIDRRLRKNLKSFIIVHPSWFIRTILAVTRPFISSKFSSKIKYVNSLSELSGLIPMDCIHIPESIIKLDEELREASEAAKTSCLYNDPEMSSMEKDIDLKLKEKP

SEQ ID NO: 7753 - protein, 1007 aa, Homo sapiens
MSHFPDRGSENGTPMDVKAGVRVMQVSPDGQHLASGDRSGNLRQVGPGSVQCTPPSSSSGSQGSGQKPWPWHLLLPIGNEGLIHELHFMDELVKVEAHDAEVLCLEYSKPETGLTLLASASRDRLIHVLNVEKNYNLEQTLDDHSSSITAIKFAGNRDIQMISCGADKSIYFRSAQQGSDGLHFVRTHHVAEKTTLYDMDIDITQKYVAVACQDRNVRVYNTVNGKQKKCYKGSQGDEGSLLKVHVDPSGTFLATSCSDKSISVIDFYSGECIAKMFGHSGGCASLLGMPPHPPTPSDSEGKCSLSALFAEIITSMKFTYDCHHLITVSGDSCVFIWHLGPEITNCMKQHLLEIDHRQQQQHTNDKKRSGHPRSWQPLPVHQRDESLPGPHGVMLGTQSSLPANQRQAATVGKAAGDDDVADGLAFHAKRSYQPHGRWAERAGQEPLKTILDAQDLDCYFTPMKPESLENSILDSLEPQSLASLLSEQKESSEASELILYSLEAEVTVTGTDSQYCRKEVEAGPGDQQGDSYLRVSSDSPKDQSPPEGPTEDELSLPEGPSVPSSSLPQTPEQEKFLRHHFETLTESPCRALGDVEASEAEDHFFNPRLSISTQFLSSLQKASRFTHTFPPRATQCLVKSPEVKLMDRGGSQPRAGTGYASPDRTHSVPSASVTAPCLTSLASCVPASSVLPTDRNLPTPTSAPTPGLAQGVHAPSTCSYMEATASSRARISRSISLGDSEGPIVATLAQPLRRPSSVGELASLGQELQAITTATTPSLDSEGQEPALRSWGNHEARANLRLTLSSACDGLLQPPVDTQPGVTVPAVSFPAPSPVEESALRLHGSAFRPSLPAPESPGLPAHPSNPQLPEARPGIPGGTASLLEPTSGWGTSCTGCRPPSKKPSTFTVCWSPVARWTPGSSRHGLSWSPPSCGSTASWRLNAWWGLVWPQPRLCPAQDPRPHRRCTPWPAQTCRPCWNTTRSCWCRPCGGRHGGTEGAAPPPQPCCF

SEQ ID NO: 7754 - protein, 1534 aa, Homo sapiens
TNVPSSPKKSSSDFYSRELIFRMSVNISTAGKGVDPNTVDTYDSGDDWEIGVGNLIIDLDADLEKDRQKFEMNNSTTTTSSSNSKDCGGPASSGAGATAALADGLKFASVQASAPQGNSHKETSKSKVKRSKTSKDANKSLPSAALYGIPEISSTGKRQEVQGRPGEATGMNSALGQSVSSGGSGNPNSNSTSTSTSAATAGAGSCGKSKEEKPGKSQSSRGAKRDKDAGKSRKDKHDLLQGHQNGSGSQAPSGGHLYGFGAKSNGGGASPFHCGGTGSGSVAAAGEVSKSAPDSGLMGNSMLVKKEEEEEESHRRIKKLKTEKVDPLFTVPAPPPPISSSLTPQILPSYFSPSSSNIAAPVEQLLVRTRSVGVNTCEVGVVTEPECLGPCEPGTSVNLEGIVWHETEEGVLVVNVTWRNKTYVGTLLDCTKHDWAPPRFCESPTSDLEMRGGRGRGKRARSAAAAPGSEASFTESRGLQNKNRGGANGKGRRGSLNASGRRTPPNCAAEDIKASPSSTNKRKNKPPMELDLNSSSEDNKPGKRVRTNSRSTPTTPQGKPETTFLDQGCSSPVLIDCPHPNCNKKYKHINGLRYHQAHAHLDPENKLEFEPDSEDKISDCEEGLSNVALECSEPSTSVSAYDQLKAPASPGAGNPPGTPKGKRELMSNGPGSIIGAKAGKNSGKKKGLNNELNNLPVISNMTAALDSCSAADGSLAAEMPKLEAEGLIDKKNLGDKEKGKKANNCKTDKNLSKLKSARPIAPAPAPTPPQLIAIPTATFTTTTTGTIPGLPSLTTTVVQATPKSPPLKPIQPKPTIMGEPITVNPALVSLKDKKKKEKRKLKDKEGKETGSPKMDAKLGKLEDSKGASKDLPGHFLKDHLNKNEGLANGLSESQESRMASIKAEADKVYTFTDNAPSPSIGSASRLECSTLVNGQAPMAPLHVLTQNGAESSAAKTSSPAYSDISDAADDGGSDSRSEGMRSKASSPSDIISSKDSVVKGHSSTTAQSSQLKESHSPYYHSYDPYYSPSYMHPGQVGAPAAGNSGSTQGMKIKKESEEDAEKKDKAEQLDSKKVDHNSASLQPQHQSVITQRHPALAQSLYYGQYAYGLYMDQKSLMATSPAYRQQYEKYYEDQRLAEQKMAQTGRGDCERKSELPLKELGKEETKQKNMPSATISKAPSTPEPNKNHSKLGPSVPNKTEETGKSQLLSNHQQQLQADSFKAKQMENHQLIKEAVEMKSVMDSMKQTGVDPTSRFKQDPDSRTWHHYVYQPKYLDQQKSEELDREKKLKEDSPRKTPNKESGVPSLPVSLTSIKEEPKEAKHPDSQSMEESKLKNDDRKTPVNWKDSRGTRVAVSSPMSQHQSYIQYLHAYPYPQMYDPSHPAYRAVSPVLMHSYPGAYLSPGFHYPVYGKMSGREETEKVNTSPSVNTKTTTESKALDLLQQHANQYRSKSPAPVEKATAEREREAERERDRHSPFGQRHLHTHHHTHVGMGYPLIPGQYDPFQGLTSAALVASQQVAAQASASGMFPGQRRE

SEQ ID NO: 7755 - protein, 146 aa, Homo sapiens
GRVGGRVGGRVGGTLTRTSDSEVPDVESREDLIKNHYMARIVELTSQLQLADSKSVHFYAECRALSKRLALAEKSKEALTEEMKLASQNISRLQDELTTTKRSYEDQLSMMSDHLCSMNETLSKQREEIDTLKMSSKGNSKKNKSR

SEQ ID NO: 7756 - protein, 798 aa, Homo sapiens
PVPGSVSGFGGGRQAEPPGRPGLYGAGEAMASAELQGKYQKLAQEYSKLRAQNQVLKKGVVDEQANSAALKEQLKMKDQSLRKLQQEMDSLTFRNLQLAKRVELLQDELALSEPRGKKNKKSGESSSQLSQEQKSVFDEDLQKKIEENERLHIQFFEADEQHKHVEAELRSRLATLETEAAQHQAVVDGLTRKYMETIEKLQNDKAKLEVKSQTLEKEAKECRLRTEECQLQLKTLHEDLSGRLEESLSIINEKVPFNDTKYSQYNALNVPLHNRRHQLKMRDIAGQALAFVQDLVTALLNFHTYTEQRIQIFPVDSAIDTISPLNQKFSQYLHENASYVRPLEEGMLHLFESITEDTVTVLETTVKLKTFSEHLTSYICFLRKILPYQLKSLEEECESSLCTSALRARNLELSQDMKKMTAVFEKLQTYIALLALPSTEPDGLLRTNYSSVLTNVGAALHGFHDVMKDISKHYSQKAAIEHELPTATQKLITTNDCILSSVVALTNGAGKIASFFSNNLDYFIASLSYGPKAASGFISPLSAECMLQYKKKAAAYMKSLRKPLLESVPYEEALANRRILLSSTESREGLAQQVQQSLEKISKLEQEKEHWMLEAQLAKIKLEKENQRIADKLKNTGSAQLVGLAQENAAVSNTAGQDEATAKAVLEPIQSTSLVPDVESREDLIKNHYMARIVELTSQLQLADSKSVHFYAECRALSKRLALAEKSKEALTEEMKLASQNISRLQDELTTTKRSYEDQLSMMSDHLCSMNETLSKQREEIDTLKMSSKGNSKKNKSR

SEQ ID NO: 7757 - protein, 447 aa, Homo sapiens
VPTKKNFSILARNLNTIQVEEMSACNISIQGPSIYNKEPKNIINPHEKVQMKSICANSPIKAQQDQLQVKNNIKASLHNVKSSLPLFNTKSSTSVGQLQSPTLNSPICMQKQGKNEHLAFNTKSKASTVGSELVLVSTTVPTVHHVSDLEMSSTLDCLPVLADWEDVVLLPASQPEENVDCTVPISDSDLEISFNSGERLMVLKELEMSSHENFGDIEETPQKSETSKSIVYKSPHTTIYNVKEAKDPGSDISAFKLPEHKSSTFNRVNANMSHPLVLGKHPLLSGGTKRNPCSPQAFPPAKKQPFTIHEEKPTSSDCSPVRSSSWRRLPSILTSTVNLQEPWKSGKMTPPLCKCGRRSKRLVVSNNGPNHGKVFYCCPIGKYQENRKCCGYFKWEQTLQKERANSMVPSHSTGGLTFSSPETSHICDRNLSISTKNSLRLRPSMRN

SEQ ID NO: 7758 - protein, 264 aa, Homo sapiens [sequence omitted]

SEQ ID NO: 7759 - protein, 308 aa, Homo sapiens
MRSFLQQDVNKTKSRLNVLNGLANNMDDLKINTDITGAKEELLDDNNFISDKESGVHKPKDCQTSFQKNNTLTLPEELSKDKSENALSGGQSSLFIHAGAPTVSSENFILPKGAAVNGPVSHSSLTKTSNMNKGSVSLTTGQPVDQPTTESCSTLKVAADLQLSTPQKASQHQVLFLLSDVAHAKNPTHSNKKLPTSASVGCDIQNSVGSNIKSDGTLINQVEVGEDGEDLLVKDDCVNTVTGISSGTDGFRSENDTNWDPQKEFIQFLMTNEETVDKAPPHSKIGLEKKKKAKNGCKQDNSLYRGLL

SEQ ID NO: 7760 - protein, 526 aa, Homo sapiens
MDVRFYPPPAQPAAAPDAPCLGPSPCLDPYYCNKFDGENMYMSMTEPSQDYVPASQSYPGPSLESEDFNIPPITPPSLPDHSLVHLNEVESGYHSLCHPMNHNGLLPFHPQNMDLPEITVSNMLGQDGTLLSNSISVMPDIRNPEGTQYSSHPQMAAMRPRGQPADIRQQPGMMPHGQLTTINQSQLSAQLGLNMGGSNVPHNSPSPPGSKSATPSPSSSVHEDEGDDTSKINGGEKRPASDMGKKPKTPKKKKKKDPNEPQKPVSAYALFFRDTQAAIKGQNPNATFGEVSKIVASMWDGLGEEQKQVYKKKTEAAKKEYLKQLAAYRASLVSKSYSEPVDVKTSQPPQLINSKPSVFHGPSQAHSALYLSSHYHQQPGMNPHLTAMHPSLPRNIAPKPNNQMPVTVSIANMAVSPPPPLQISPPLHQHLNMQQHQPLTMQQPLGNQLPMQVQSALHSPTMQQGFTLQPDYQTIINPTSTAAQVVTQAMEYVRSGCRNPPPQPVDWNNDYCSSGGMQRDKALYLT

SEQ ID NO: 7761 - protein, 407 aa, Homo sapiens
MGKENIPGDFLCISLVNSSVQLRYNLGDRTIILETLQKVTINGSTWHIIKAGRVGAEGYLDLDGINVTEKASTKMSSLDTNTDFYIGGVSSLNLVNPMAIENEPVGFQGCIRQVIINNQELQLTEFGAKGGSNVGDCDGTACGYNTCRNGGECTVNGTTFSCRCLPDWAGNTCNQSVSCLNNLCLHQSLCIPDQSFSYSCLCTLGWVGRYCENKTSFSTAKFMGNSYIKYIDPNYRMRNLQFTTISLNFSTTKTEGLIVWMGIAQNEENDFLAIGLHNQTLKIAVNLGERISVPMSYNNGTFCCNKWHHVVVIQNQTLIKAYINNSLILSEDIDPHKNFVALNYDGICYLGGFEYGRKVNIVTQEIFKTNFVGKIKDVVFFQEPKNIELIKLEGYNVYDGDEQNEVT

SEQ ID NO: 7762 - protein, 1091 aa, Homo sapiens
MAKRKEENFSSPKNAKRPRQEELEDFDKDGDEDECKGTTLTAAEVGIIESIHLKNFMCHSMLGPFKFGSNVNFVVGNNGSGKSAVLTALIVGLGGRAVATNRGSSLKGFVKDGQNSADISITLRNRGDDAFKASVYGNSILIQQHISIDGSRSYKLKSATGSVVSTRKEELIAILDHFNIQVDNPVSVLTQEMSKQFLQSKNEGDKYKFFMKATQLEQMKEDYSYIMETKERTKEQIHQGEERLTELKRQCVEKEERFQSIAGLSTMKTNLESLKHEMAWAVVNEIEKQLNAIRDNIKIGEDRAARLDRKMEEQQVRLNEAEQKYKDIQDKLEKISEETNARAPECMALKADVVAKKRAYNEAEVLYNRSLNEYKALKKDDEQLCKRIEELKKSTDQSLEPERLERQKKISWLKERVKAFQNQENSVNQEIEQFQQAIEKDKEEHGKIKREELDVKHALSYNQRQLKELKDSKTDRLKRFGPNVPALLEAIDDAYRQGHFTYKPVGPLGACIHLRDPELALAIESCLKGLLQAYCCHNHADERVLQALMKRFYLPGTSRPPIIVSEFRNEIYDVRHRAAYHPDFPTVLTALEIDNAVVANSLIDMRGIETVLLIKNNSVARAVMQSQKPPKNCREAFTADGDQVFAGRYYSSENTRPKFLSRDVDSEISDLENEVENKTAQILNLQQHLSALEKDIKHNEELLKRCQLHYKELKMKIRKNISEIRELENIEEHQSVDIATLEDEAQENKSKMKMVEEHMEQQKENMEHLKSLKIEAENKYDAIKFKINQLSELADPLKDELNLADSEVDNQKRGKRHYEEKQKEHLDTLNKKKRELDMKEKELEEKMSQARQICPERIEVEKSASILDKEINRLRQKIQAEHASHGDREEIMRQYQEARETYLDLDSKVRTLKKFIKLLGEIMEHRFKTYQQFRRCLTLRCKLYFDNLLSQRAYCGKMNFDHKNETLSISVQPGEGNKAAFNDMRALSGGERSFSTVCFILSLWSIAESPFRCLDEFDVYMDMVNRRIAMDLILKMADSQRFRQFILLTPQSMSSLPSSKLIRILRMSDPERGQTTLPFRPVTQEEDDDQR

SEQ ID NO: 7763 - protein, 1091 aa, Homo sapiens [sequence omitted]

SEQ ID NO: 7764 - protein, 132 aa, Homo sapiens
MQTTDLEQTSPPVNQAPNQTKLEVKAPPRWLVLLLGQHSPPFPQPPISPVSLKKPEPCPICTSSVGLSGALGSKERVRSPAPFLPPTLFLTNSWTVPAMRLRTGAMLGCVRDTDHGGQRDTEGDCSATRELT

SEQ ID NO: 7765 - protein, 140 aa, Homo sapiens
MQRLNIGYVINVTTHLPLYHYEKGLFNYKRLPATDSNKQNLRQYFEEAFEFIEEAHQCGKGLLIHCQAGVSRSATIVIAYLMKHTRMTMTDAYKFVKGKRPIISPNLNFMGQLLEFEEDLNNGVTPRILTPKLMGVETVV

SEQ ID NO: 7766 - protein, 482 aa, Homo sapiens
MPPSPLDDRVVVALSRPVRPQDLNLCLDSSYLGSANPGSNSHPPVIATTVVSLKAANLTYMPSSSGSARSLNCGCSSASCCTVATYDKDNQAQTQAIAAGTTTTAIGTSTTCPANQMVNNNENTGSLSPSSGVGSPVSGTPKQLASIKIIYPNDLAKKMTKCSKSHLPSQGPVIIDCRPFMEYNKSHIQGAVHINCADKISRRRLQQGKITVLDLISCREGKDSFKRIFSKEIIVYDENTNEPSRVMPSQPLHIVLESLKREGKEPLVLKGGLSSFKQNHENLCDNSLQLQECREVGGGASAASSLLPQPIPTTPDIENAELTPILPFLFLGNEQDAQDLDTMQRLNIGYVINVTTHLPLYHYEKGLFNYKRLPATDSNKQNLRQYFEEAFEFIEEAHQCGKGLLIHCQAGVSRSATIVIAYLMKHTRMTMTDAYKFVKGKRPIISPNLNFMGQLLEFEEDLNNGVTPRILTPKLMGVETVV

SEQ ID NO: 7767 - protein, 557 aa, Homo sapiens
MDSDEGYNYEFDEDEECSEEDSGAEEEEDEDDDEPDDDTLDLGEVELVEPGLGVGGERDGLLCGETGGGGGSALGPGGGGGGGGGGGGGGPGHEQEEDYRYEVLTAEQILQHMVECIREVNEVIQNPATITRILLSHFNWDKEKLMERYFDGNLEKLFAECHVINPSKKSRTRQMNTRSSAQDMPCQICYLNYPNSYFTGLECGHKFCMQCWSEYLTTKIMEEGMGQTISCPAHGCDILVDDNTVMRLITDSKVKLKYQHLITNSFVECNRLLKWCPAPDCHHVVKVQYPDAKPVRCKCGRQFCFNCGENWHDPVKCKWLKKWIKKCDDDSETSNWIAANTKECPKCHVTIEKDGGCNHMVCRNQNCKAEFCWVCLGPWEPHGSAWYNCNRYNEDDAKAARDAQERSRAALQRYLFYCNRYMNHMQSLRFEHKLYAQVKQKMEEMQQHNMSWIEVQFLKKAVDVLCQCRATLMYTYVFAFYLKKNNQSIIFENNQADLENATEVLSGYLERDISQDSLQDIKQKVQDKYRYCESRRRVLLQHVHEGYEKDLWEYIED

SEQ ID NO: 7768 - protein, 356 aa, Homo sapiens
MTLVLSMNRFCEPIVSEGAAEIAGYQTLWEADSYGGPSPPGPAQAPLQGDRGAGPPLAGSHYRGISNPITTSKITYFKRKYVEEEDFHPPLSSCSHKTISIFEERAHILYMSLEKLKFIDDPEVYLRRSVLINNLMKRIHGEIIMQNNWCFPACSFNGTSAQEWFMAQDCPYRKRPRMAKEECEKFHACCFYQECGGHYLNLPLSVNANVGSASTAASSPSASSSSSSSSSSPPLPLPSCSRQVDFDVGSASIYKSDGQIPANEIFVTNVRSLGVQEKAKLNDEKANDDTNRDGGPLSHEPVGNDLAFECKGQFYDYFETGYNERNNVNESWKKSLRKKEASPPSNKLCCSKGSKI

SEQ ID NO: 7769 - protein, 251 aa, Homo sapiens
MQKSTNSDTSVETLNSTRQGTGAVQMRIKNANSHHDRLSQSKSMILTDVGKVTEPISRHRRNHSQHILKDVIPPLEQLMVEKEGYLQKAKIADGGKKLRKNWSTSWIVLSSRRIEFYKESKQQALSNMKTGHKPESVDLCGAHIEWAKEKSSRKNVFQITTVSGNEFLLQSDIDFIILDWFHAIKNAIDRLPKDSSCPSRNLELFKIQRSSSTELLSHYDSDIKEQKPEHRKSFNVQTASQCFRYKRQKSS

SEQ ID NO: 7770 - protein, 475 aa, Homo sapiens
MQKSTNSDTSVETLNSTRQGTGAVQMRIKNANSHHDRLSQSKSMILTDVGKVTEPISRHRRNHSQHILKDVIPPLEQLMVEKEGYLQKAKIADGGKKLRKNWSTSWIVLSSRRIEFYKESKQQALSNMKTGHKPESVDLCGAHIEWAKEKSSRKNVFQITTVSGNEFLLQSDIDFIILDWFHAIKNAIDRLPKDSSCPSRNLELFKIQRSSSTELLSHYDSDIKEQKPEHRKSLMFRLHHSASDTSDKNRVKSRLKKFITRRPSLKTLQEKGLIKDQIFGSHLHKVCERENSTVPWFVKQCIEAVEKRGLDVDAIYRVSGNLQTIQKLRFIVNQEEKLNLDDSQWEDIHVVTGALKMFFRELPEPLFPYSFFEQFVEAIKKQDNNTRIEAVKSLVQKLPPPNRDTMKVLFGHLTKIVAKASKNLMSTQSLGIVFGPTLLRAENETGNMAIHMVYQNQIAELMLSEYSKIFGSEED

SEQ ID NO: 7771 - protein, 2024 aa, Homo sapiens
MATGGGPFEDGMNDQDLPNWSNENVDDRLNNMDWGAQQKKANRSSEKNKKKFGVESDKRVTNDISPESSPGVGRRRTKTPHTFPHSRYMSQMSVPEQAELEKLKQRINFSDLDQRSIGSDSQGRATAANNKRQLSENRKPFNFLPMQINTNKSKDASTSPPNRETIGSAQCKELFASALSNDLLQNCQVSEEDGRGEPAMESSQIVSRLVQIRDYITKASSMREDLVEKNERSANVERLTHLIDHLKEQEKSYMKFLKKILARDPQQEPMEEIENLKKQHDLLKRMLQQQEQLRGALQGRQAALLALQHKADEAIAVMDDSVVAETAGSLSGVSITSELNEELNDLIQRFHNQLRDSQPPAVPDNRRQAESLSLTREVSQSRKPSASERLPDEKVELFSKMRVLQEKKQKMDKLLGELHTLRDQHLNNSSSSPQRSVDQRSTSAPSACLGLAPVVNGESNSLTSSVPYPTASLVSQNESENEGHLNPSEKLQKLNEVRKRLNELRELVHYYEQTSDMMTDAVNENRKDEETEESEYDSEHENSEPVTNIRNPQVASTWNEVNSHSNAQCVSNNRDGRTVNSNCEINNRSAANIRALNVPPSLDCRYNREGEQEIHVAQGEDDEEEEEEAEEEGVSGASLSSHRSSLVDEHPEDAEFEQKINRLMAAKQKLRQLQDLVAMVQDDDAAQGVISASASNLDDFYPAEEDTKQNSNNTRGNANKTQKDTGVNEKAREKFYEAKLQQQQRELKQLQEERKKLIDIHEKIQALQTACPDLQLSAASVGNCPTKKYMPAVTSTPTVNQHETSTSKSVFEPEDSSIVDNELWSEMRRHEMLREELRQRRKQLEALMAEHQRRQGLAETASPVAVSLRSDGSENLCTPQQSRTEKTMATWGGSTQCALDEEGDEDGYLSEGIVRTDEEEEEEQDASSNDNFSVCPSNSVNHNSYNRKETKNTWKNNCPFSADENYRPLAKTRQQNISMQRQENLRWVSELSYVEEKEQWQEQIQLKKQLDFSVSICQTLMQDQQTLSCLLQTLLTGPYSVMPSNVASPQVHFIMHQLNQCYTQLTWQQNNVQRLKQMLNELMRQRNQHPEKPGGKERGSSASHPPSPSLFCPFSFPTQPVNLFNIPGFTNFSSFAPGMNFSPLFPSNFGDFSQNISTPSEQQQPLARILSGKTEYMAFPKPFESSSSIGAEKPRNKKLPEEEVESSRTPWLYEQEGEVEKPFIKTGFSVSVEKSTSSNRKNQLDTNGRRRQFDEESLESFSSMPDPVDPTTVTKTFKTRKASAQASLASKDKTPKSKSKKRNSTQLKSRVKNIRYESASMSSTCEPCKSRNRHSAQTEEPLQAKVFSRKNHEQLEKIIKCNRSTEISSETGSDFSMFEALQDTIYSEVATLISQNESRPHFLIELFHELQLLNTDYLRQRALYALQDIVSRHISESHEKGENVKSVNSGTWIASNSELTPSESLATTDDETFEKNFERETHKISEQNDADNASVLSVSSNFEPFATDDLGNTVIHLDQALARMREYERMKTEAESNSNMRCTCRIIEDGDGAGAGTTVNNLEETPVIENRSSQQPVSEVSTIPCPRIDTQQLDRQIKAIMKEVIPFLKEHMDEVCSSQLLTSVRRMVLTLTQQNDESKEFVKFFHKQLGSILQDSLAKFAGRKLKDCGEDLLVEISEVLFNELAFFKLMQDLDNNSITVKQRCKRKIEATGVIQSCAKEAKRILEDHGSPAGEIDDEDKDKDETETVKQTQTSEVYDGPKNVRSDISDQEEDEESEGCPVSINLSKAETQALTNYGSGEDENEDEEMEEFEEGPVDVQTSLQANTEATEENEHDEQVLQRDFKKTAESKNVHWNEKPLVKMTKNNCPVKPSYLNILEDEQPLNSAAHKESPPTVDSTQQPNPLPLRLPEMEPLVPRVKEVKSAQETPESSLAGSPDTESPVLVNDYEAESGNISQKSDEEDFVKVEDLPLKLTIYSEADLRKKMVEEEQKNHLSGEMCEMQTEELAGNSETLKEPETVGAQSI

SEQ ID NO: 7772 - protein, 530 aa, Homo sapiens
MATGGGPFEDGMNDQDLPNWSNENVDDRLNNMDWGAQQKKANRSSEKNKKKFGVESDKRVTNDISPESSPGVGRRRTKTPHTFPHSRYMSQMSVPEQAELEKLKQRINFSDLDQRSIGSDSQGRATAANNKRQLSENRKPFNFLPMQINTNKSKDASTSPPNRETIGSAQCKELFASALSNDLLQNCQVSEEDGRGEPAMESSQIVSRLVQIRDYITKASSMREDLVEKNERSANVERLTHLIDHLKEQEKSYMKFLKKILARENEEEDVRTIDSAVGSGSVAESTSLNIDVQSEASDTTARDPQQEPMEEIENLKKQHDLLKRMLQQQEQLRALQGRQAALLALQHKAEQAIAVMDDSVVAETAGSLSGVSITSELNEELNDLIQRFHNQLRDSQPPAVPDNRRQAESLSLTREVSQSRKPSASERLPDEKVELFSKMRVLQEKKQKMDKLLGELHTLRDQHLNNSSSSPQRSVDQRSTSAPSASVGLAPVVNGESNSLTSSVPYPTASLVSQNESENEGHLNPSEKLQ

SEQ ID NO: 7773 - protein, 305 aa, Homo sapiens
MSVDPACPQSLPCFEASDCKESSPMPVICGPEENYPSLQMSSAEMPHTETVSPLPSSMDLLIQDSPDSSTSPKGKQPTSAENSVAKKEDKVPVKKQKTRTVFSSTQLCVLNDRFQRQKYLSLQQMQELSNILNLSYKQVKTWFQNQRMKSKRWQKNNWPKNSNGVTQKASAPTYPSLYSSYHQGCLVNPTGNLPMWSNQTWNNSTWSNQTQNIQSWSNHSWNTQTWCTQSWNNQAWNSPFYNCGEESLQSCMQFQPNSPASDLEAALEAAGEGLNVIQQTTRYFSTPQTMDLFLNYSMNMQPEDV

SEQ ID NO: 7774 - protein, 232 aa, Homo sapiens
MDLPIQDSHDSSTSPKGKQPTTAEKSATKKEDKVPVKKQKTRTVFSSTQLCVLNDRFQRQKYLSLQQMQELSNILNLSYKQVKTWFQNQRMKSKRWQKNNWLKNSNGVTQGCLVNPTGNLPMWSNQTWNNSTWSNQTQNIQSWSNHSWNTQTWCTQSWNNQAWNSPFYNCGEESLQSCMQFQPNSPASDLQAALEAAGEGLNVIQQTTRYFNTPQTMDLFLNYSMNMQPEDV

SEQ ID NO: 7775 - protein, 305 aa, Homo sapiens
MSVDPACPQSLPCFEESDCKESSPMPVICGPEENYPSLQMSSAEMPHTETVSPLPSSMDLLIQDSPDSSTSPKGKQPTSAENSVAKKEDKVPVKKQKTRTVFSSTQLCVLNDRFQRQKYLSLQQMQELSNILNLSYKQVKTWFQNQRMKSKRWQKNNWPKNSNGVTQKASAPTYPSLYSSYHQGCLVNPTGNLPMWSNQTWNNSTWSNQTQNIQSWSNHSWNTQTWCTQSWNNQAWNSPFYNCGEESLQSCMHFQPNSPASDLEAALEAAGEGLNVIQQTTRYFSTPQTMDLFLNYSMNMQPEDV

SEQ ID NO: 7776 - protein, 1127 aa, Homo sapiens
MNLLIVKAVQMHYFFLLLEEVTSREVAQISGKCNILEFSVLKDRMSRVCIVVLEEVEDESPAFISKLPQENKSLHSPPSGNVLPSLVQAIFNGDPDEVRALIFKKEDVNFQDNEKRTPLHAAAYLGDAEIIELLILSGARVNAKDSKWLTPLHRAVASCSEEAVQVLLKHSADVNARDKNWQTPLHIAAANKAVKCAEALVPLLSNVNVSDRAGRTALHHAAFSGHGEMVKLLLSRGANINAFDKKDRRAIHWAAYMGHIEVVKLLVSHGAEVTCKDKKSYTPLHAAASSGMISVVKYLLDLGVDMNEPNAYGNTPLHVACYNGQDVVVNELIDCGAIVNQKNEKGFTPLHFAAASTHGALCLELLVGNGADVNMKSKDGKTPLHMTALHGRFSRSQTIIQSGAVIDCEDKNGNTPLHIAARYGHELLINTLITSGADTAKRGIHGMFPLHLAALSGFSDCCRKLLSSGFDIDTPDDFGRTCLHAAAAGGNLECLNLLLNTGADFNKKDKFGRSPLHYAAANCNYQCLFALVGSGASVNDLDERGCTPLHYAATSDTDGKCLEYLLRNDANPGIRDKQGYNAVHYSAAYGHRLCLQLIASETPLDVLMETSGTDMLSDSDNRATISPLHLAAYHGHHQALEVLVQSLLDLDVRNSSGRTPLDLAAFKGHVECVDVLINQGASILVKDYILKRTPIHAAATNGHSECLRLLIGNAEPQNAVDIQDGNGQTPLMLSVLNGHTDCVYSLLNKGANVDAKDKWGRTALHRGAVTGHEECVDALLQHGAKCLLRDSRGRTPIHLSAACGHIGVLGALLQSAASMDANPATADNHGYTALHWACYNGHETCVELLLEQEVFQKTEGNAFSPLHCAVINDNEGAAEMLIDTLGASIVNATDSKGRTPLHAAAFTDHVECLQLLLSHNAQVNSVDSTGKTPLMMAAENGQTNTVEMLVSSASAELTLQDNSKNTALHLACSKGHETSALLILEKITDRNLINATNAALQTPLHVAARNGLTMVVQELLGKGASVLAVDENGYTPALACAPNKDVADCLALILATMMPVSSSSPLSSLTFNAINRYTNTSKTVSFEALPIMRNEPSSYCSFNNIGGEQEYLYTDVDELNDSDSETY

SEQ ID NO: 7777 - protein, 394 aa, Homo sapiens
MPSNSSASISKLRESLTPDGSKWSTSLMQTLGNHSRGEQDSSLDMKDFRPLRKWSSLSKLTAPDNCGQGGTVCREESRNGLEKIGKAKALTSQLRTIGPSCLHDSMEMLRLEDKEINKKRSSTLDCKYKFESCSKEDFRASSSTLRRQTVDMTYSALPESKPIMTSSEAFEPPKYLMLGQQAVGGVPIQPSVRTQMWLTEQLRTNPLEGRNTEDSYSLAPWQQQQIEDFRQGSETPMQVLTGSSRQSYSPGYQDFSKWESMLKIKEGLLRQKEIVIDRQKQQITHLHERIRDNELRAQHAMLGHYVNCEDSYVASLQPQYENTSLQTPFSEESVSHSQQGEFEQKLASTEKEVLQLNEFLKQRLSLFSEEKKKLEEKVGFSNKVELGQQHFLSI

SEQ ID NO: 7778 - protein, 1385 aa, Homo sapiens
EQLRRHQGKNLASEDPKKKRAQKPSHMRRNIRKLLREDQLQPVTKAAQQEELERRKRLEQQRKDYAAPIPTVPLEFLPEEIALRASDGPQLPPRVLAQEVICLDSSSGSEDEKSSRDEVIELSSGEEDTLHIVDSSESVSEDDEEEEKGGTHVNDVLNQRDALGRVLVNLNHPPEEENVFLAPQLARAVKPHQIGGIRFLYDNLVESLERFKTSSGFGCILAHSMGLGKTLQVISFIDVLFRHTPVKTVLAIVPVNTLQNWLAEFNMWLPPPEALPADNKPEEVQPRFFKVHILNDEHKTMASRAKVMADWVSEGGVLLMGYEMYRLLTLKKSFATGRPKKTKKRSHPVIIDLDEEDRQQEFRREFEKALCRPGPDVVICDEGHRIKNCQASTSQALKNIRSRRRVVLTGYPLQNNLIEYWCMVDFVRPDFLGTRQEFSNMFERPILNGQCIDSTPQDVRLMRYRSHVLHSLLEGFVQRRGHTVLKIHLPAKEENVILVRLSKIQRDLYTQFMDRFRDCGSSGWLGLNPLKAFCVCCKIWNHPDVLYEALQKESLANEQDLDVEELGSAGTSARCPPQGTKGKGEDSTLASSMGEATNSKFLQGVGFNPFQERGNNIVTYEWAKDLLTNYQTGVLENSPKMVLLFHLIEESVKLGDKILVFSQSLSTLALIEEFLGKREVPCPPGTEGQGAQKWVRNISYFRLDGSTPAFERERLINQFNDPSNLTTWLFLLSTRAGCLGVNLIGANRVVVFDASWNPCHDAQAVCRVYRYGQKKPCYIYRLVADYTLEKKIYDRQISKQGMSDRVVDDLNPMLNFTRKEVENLLHFVEKEPAPQVSLNVKGIKESVLQLACLKYPHLITKEPFEHESLLLNRKDHKLTKAEKKAAKKSYEEDKRTSVPYTRPSYAQYYPASDQSLTSIPAFSQRNWQPTLKGDEKPVASVRPVQSTPIPMMPRHVPLGGSVSSASSTNPSMNFPINYLQRAGVLVQKVVTTTDIVIPGLNSSTDVQARINAGESIHIIRGTKGTYIRTSDGRIFAVRATGKPKVPEDGRMAASGSQGPSCESTSNGRHSASSPKAPDPEGLARPVSPDSPEIISELQQYADVAAARESRQSSPSTNAALPGPPAQLMDSSAVPGTALGTEPRLGGHCLNSSLLVTGQPCGDRHPVLDLRGHKRKLATPPAAQESSRRRSRKGHLPAPVQPYEHGYPVSGGFAMPPVSLNHNLTTPFTSQAGENSLFMGSTPSYYQLSNLLADARLVFPVTTDPLVPAGPVSSSSTATSVTASNPSFMLNPSVPGILPSYSLPFSQPLLSEPRMFAPFPSPVLPSNLSRGMSIYPGYMSPHAGYPAGGLLRSQVPPFDSHEVAEVGFSSNDDEDKDDDVIEVTGK

SEQ ID NO: 7779 - protein, 1084 aa, Homo sapiens
MSSQSHPDGLSGRDQPVELLNPARVNHMPSTVDVATALPLQVAPSAVPMDLRLDHQFSLPVAEPALREQQLQQELLALKQKQQIQRQILIAEFQRQHEQLSRQHEAQLHEHIKQQQEMLAMKHQQELLEHQRKLERHRQEQELEKQHREQKLQQLKNKEKGKESAVASTEVKMKLQEFVLNKKKALAHRNLNHCISSDPRYWYGKTQHSSLDQSSPPQSGVSTSYNHPVLGMYDAKDDFPLRKTASEPNLKLRSRLKQKVAERRSSPLLRRKDGPVVTALKKRPLDVTDSACSSAPGSGPSSPNNSSGSVSAENGIAPAVPSIPAETSLAHRLVAREGSAAPLPLYTSPSLPNITLGLPATGPSAGTAGQQDTERLTLPALQQRLSLFPGTHLTPYLSTSPLERDGGAAHSPLLQHMVLLEQPPAQAPLVTGLGALPLHAQSLVGADRVSPSIHKLRQHRPLGRTQSAPLPQNAQALQHLVIQQQHQQFLEKHKQQFQQQQLQMNKIIPKPSEPARQPESHPEETEEELREHQALLDEPYLDRLPGQKEAHAQAGVQVKQEPIESDEEEAEPPREVEPGQRQPSEQELLFRQQALLLEQQRIHQLRNYQASMEAAGIPVSFGGHRPLSRAQSSPASATFPVSVQEPPTKPRFTTGLVYDTLMLKHQCTCGSSSSHPEHAGRIQSIWSRLQETGLRGKCECIRGRKATLEELQTVHSEAHTLLYGTNPLNRQKLDSKKLLGSLASVFVRLPCGGVGVDSDTIWNEVHSAGAARLAVGCVVELVFKVATGELKNGFAVVRPPGHHAEESTPMGFCYFNSVAVAAKLLQQRLSVSKILIVDWDVHHGNGTQQAFYSDPSVLYMSLHRYDDGNFFPGSGAPDEVGTGPGVGFNVNMAFTGGLDPPMGDAEYLAAFRTVVMPIASEFAPDVVLVSSGFDAVEGHPTPLGGYNLSARCFGYLTKQLMGLAGGRIVLALEGGHDLTAICDASEACVSALLGNELDPLPEKVLQQRPNANAVRSMEKVMEIHSKYWRCLQRTTSTAGRSLIEAQTCENEEAETVTAMASLSVGVKPAEKRPDEEPMEEEPPL

SEQ ID NO: 7780 - protein, 897 aa, Homo sapiens
RLYTEAWDKDKTTVHIMPDTPEVLLAKQNKVNYSEKLYKLALEESKKEGYDLRLDAIPIQAAKASRDIASDYKYKEGYRKQLGHHIGARNIKDDPKMMWSIHVAKIQSDREYKKEFEKWKTKFSSPVDMLGVVLAKKCQILVSDIDYKHPLHEWTCLPDQNDVIQARKAYDLQSDAIYKSDLEWLRGIGWVPIGSVEVEKVKRAGEILSDRKYRQPADQLKFTCITDTPEIVLAKNNALTMSKHLYTEAWDADKTSIHVMPDTPDILLAKSNSANISQKLYTKGWDESKMKDYDLRADAISIKSAKASRDIASDYLYKTAYEKQKGHYIGCRSAKEDPKLVWAANVLKMQNDRLYKKAYNDHKAKISIPVDMVSISAAKEGQALASDVDYRHYLHHWSCFPDQNDVIQARKAYDLQSDNLYKSDLEWLKGIGWLPEGSVEVMRVKNAQNLLNERLYRIKPEALKFTSIVDTPEVIQAKINAVQISEKLYQEAWNKDKSNITIPSDTPEMLQAHINALQISNVSGTNMKCKSLYGQYLLSRKSGFGKITLLFSVHIYQYLYKTAYEKQKGHYIGCRSAKEDPKLVWAANVLKMQNDRLYKKAYNDHKAKISIPVDMVSISAAKEGQALASDVDYRHYLHRWSCFPDQNDVIQARKAYDLQSDALYKADLEWLRGIGWMPQGSPEVLRVKNAQNIFCDSVYRTPVVNLKYTSIVDTPEVVLAKSNAENISIPKYREVWDKDKTSIHIMPDTPEINLARANALNVSNYLYKEGWERQKATGYILPPDAVPFVHAHHCNDVQSELKYKAEHVKQKGHYVGVPTMRDDPKLVWFEHAGQIQNERLYKEDYHKTKAKINIPADMVSVLAAKQGQTLVSDIDYRNYLHQWMCHPDQNDVIQARK

SEQ ID NO: 7781 - protein, 739 aa, Homo sapiens
MASVLGSGRGSGGLSSQLKCKSKRRRRRRSKRKDKVSILSTFLAPFKHLSPGITNTEDDDTLSTSSAEVKENRNVGNLAARPPPSGDRARGGAPGAKRKRPLEEGNGGHLCKLQLVWKKLSWSVAPKNALVQLHELRPGLQYRTVSQTGPVHAPVFAVAVEVNGLTFEGTGPTKKKAKMRAAELALRSFVQFPNACQAHLAMGGGPGPGTDFTSDQADFPDTLFQEFEPPAPRPGLAGGRPGDAALLSAAYGRRRLLCRALDLVGPTPATPAAPGERNPVVLLNRLRAGLRYVCLAEPAERRARSFVMAVSVDGRTFEGSGRSKKLARGQAAQAALQELFDIQMPGHAPGRARRTPMPQEFADSISQLVTQKFREVTTDLTPMHARHKALAGIVMTKGLDARQAQVVALSSGTKCISGEHLSDQGLVVNDCHAEVVARRAFLHFLYTQLELHLSKRREDSERSIFVRLKEGGYRLRENILFHLYVSTSPCGDARLHSPYEITTDLHSSKHLVRKFRGHLRTKIESGEGTVPVRGPSAVQTWDGVLLGEQLITMSCTDKIARWNVLGLQGALLSHFVEPVYLQSIVVGSLHHTGHLARVMSHRMEGVGQLPASYRHNRPLLSGVSDAEARQPGKSPPFSMNWVVGSADLEIINATTGRRSCGGPSRLCKHVLSARWARLYGRLSTRTPSPGDTPSMYCEAKLGAHTYQSVKQQLFKAFQKAGLGTWVRKPPEQQQFLLTL

SEQ ID NO: 7782 - protein, 134 aa, Homo sapiens [sequence omitted]

SEQ ID NO: 7783 - protein, 3144 aa, Homo sapiens
MATLEKLMKAFESLKSFQQQQQQQQQQQQQQQQQQQQQQQPPPPPPPPPPPQLPQPPPQAQPLLPQPQPPPPPPPPPPGPAVAEEPLHRPKKELSATKKDRVNHCLTICENIVAQSVRNSPEFQKLLGIAMELFLLCSDDAESDVRMVADECLNKVIKALMDSNLPRLQLELYKEIKKNGAPRSLRAALWRFAELAHLVRPQKCRPYLVNLLPCLTRTSKRPEESVQETLAAAVPKIMASFGNFANDNEIKVLLKAFIANLKSSSPTIRRTAAGSAVSICQHSRRTQYFYSWLLNVLLGLLVPVEDEHSTLLILGVLLTLRYLVPLLQQQVKDTSLKGSFGVTRKEMEVSPSAEQLVQVYELTLHHTQHQDHNVVTGALELLQQLFRTPPPELLQTLTAVGGIGQLTAAKEESGGRSRSGSIVELIAGGGSSCSPVLSRKQKGKVLLGEEEALEDDSESRSDVSSSALTASVKDEISGELAASSGVSTPGSAGHDIITEQPRSQHTLQADSVDLASCDLTSSATDGDEEDILSHSSSQVSAVPSDPAMDLNDGTQASSPISDSSQTTTEGPDSAVTPSDSSEIVLDGTDNQYLGLQIGQPQDEDEEATGILPDEASEAFRNSSMALQQAHLLKNMSHCRQPSDSSVDKFVLRDEATEPGDQENKPCRIKGDIGQSTDDDSAPLVHCVRLLSASFLLTGGKNVLVPDRDVRVSVKALALSCVGAAVALHPESFFSKLYKVPLDTTEYPEEQYVSDILNYIDHGDPQVRGATAILCGTLICSILSRSRFHVGDWMGTIRTLTGNTFSLADCIPLLRKTLKDESSVTCKLACTAVRNCVMSLCSSSYSELGLQLIIDVLTLRNSSYWLVRTELLETLAEIDFRLVSFLEAKAENLHRGAHHYTGLLKLQERVLNNVVIHLLGDEDPRVRHVAAASLIRLVPKLFYKCDQGQADPVVAVARDQSSVYLKLLMHETQPPSHFSVSTITRIYRGYNLLPSITDVTMENNLSRVIAAVSHELITSTTRALTFGCCEALCLLSTAFPVCIWSLGWHCGVPPLSASDESRKSCTVGMATMILTLLSSAWFPLDLSAHQDALILAGNLLAASAPKSLRSSWASEEEANPAATKQEEVWPALGDRALVPMVEQLFSHLLKVINICAHVLDDVAPGPAIKAALPSLTNPPSLSPIRRKGKEKEPGEQASVPLSPKKGSEASAASRQSDTSGPVTTSKSSSLGSFYHLPSYLKLHDVLKATHANYKVTLDLQNSTEKFGGFLRSALDVLSQILELATLQDIGKCVEEILGYLKSCFSREPMMATVCVQQLLKTLFGTNLASQFDGLSSNPSKSQGRAQRLGSSSVRPGLYHYCFMAPYTHFTQALADASLRNMVQAEQENDTSGWFDVLQKVSTQLKTNLTSVTKNRADKNAIHNHIRLFEPLVIKALKQYTTTTCVQLQKQVLDLLAQLVQLRVNYCLLDSDQVFIGFVLKQFEYIEVGQFRESEAIIPNIFFFLVLLSYERYHSKQIIGIPKIIQLCDGIMASGRKAVTHAIPALQPIVHDLFVLRGTNKADAGKELETQKEVVVSMLLRLIQYHQVLEMFILVLQQCHKENEDKWKRLSRQIADIILPMLAKQQMHIDSHEALGVLNTLFEILAPSSLRPVDMLLRSMFVTPNTMASVSTVQLWISGILAILRVLISQSTEDIVLSRIQELSFSPYLISCTVINRLRDGDSTSTLEEHSEGKQIKNLPEETFSRFLLQLVGILLEDIVTKQLKVEMSEQQHTFYCQELGTLLMCLIHIFKSGMFRRITAAATRLFRSDGCGGSFYTLDSLNLRARSMITTHPALVLLWCQILLLVNHTDYRWWAEVQQTPKRHSLSSTKLLSPQMSGEEEDSDLAAKLGMCNREIVRRGALILFCDYVCQNLHDSEHLTWLIVNHIQDLISLSHEPPVQDFISAVHRNSAASGLFIQAIQSRCENLSTPTMLKKTLQCLEGIHLSQSGAVLTLYVDRLLCTPFRVLARMVDILACRRVEMLLAANLQSSMAQLPMEELNRIQEYLQSSGLAQRHQRLYSLLDRFRLSTMQDSLSPSPPVSSHPLDGDGHVSLETVSPDKDWYVHLVKSQCWTRSDSALLEGAELVNRIPAEDMNAFMMNSEFNLSLLAPCLSLGMSEISGGQKSALFEAAREVTLARVSGTVQQLPAVHHVFQPELPAEPAAYWSKLNDLFGDAALYQSLPTLARALAQYLVVVSKLPSHLHLPPEKEKDIVKFVVATLEALSWHLIHEQIPLSLDLQAGLDCCCLALQLPGLWSVVSSTEFVTHACSLIYCVHFILEAVAVQPGEQLLSPERRTNTPKAISEEEEEVDPNTQNPKYITAACEMVAEMVESLQSVLALGHKRNSGVPAFLTPLLRNIIISLARLPLVNSYTRVPPLVWKLGWSPKPGGDFGTAFPEIPVEFLQEKEVFKEFIYRINTLGWTSRTQFEETWATLLGVLVTQPLVMEQEESPPEEDTERTQINVLAVQAITSLVLSAMTVPVAGNPAVSCLEQQPRNKPLKALDTRFGRKLSIIRGIVEQEIQAMVSKRENIATHHLYQAWDPVPSLSPATTGALISHEKLLLQINPERELGSMSYKLGQVSIHSVWLGNSITPLREEEWDEEEEEEADAPAPSSPPTSPVNSRKHRAGVDIHSCSQFLLELYSRWILPSSSARRTPAILISEVVRSLLVVSDLFTERNQFELMYVTLTELRRVHPSEDEILAQYLVPATCKAAAVLGMDKAVAEPVSRLLESTLRSSHLPSRVGALHGVLYVLECDLLDDTAKQLIPVISDYLLSNLKGIAHCVNIHSQQHVLVMCATAFYLIENYPLDVGPEFSASIIQMCGVMLSGSEESTPSIIYHCALRGLERLLLSEQLSRLDAESLVKLSVDRVNVHSPHRAMAALGLMLTCMYTGKEKVSPGRTSDPNPAAPDSESVIVAMERVSVLFDRIRKGFPCEARVVARILPQFLDDFFPPQDIMNKVIGEFLSNQQPYPQFMATVVYKVFQTLHSTGQSSMVRDWVMLSLSNFTQRAPVAMATWSLSCFFVSASTSPWVAAILPHVISRMGKLEQVDVNLFCLVATDFYRHQIEEELDRRAFQSVLEVVAAPGSPYHRLLTCLRNVHKVTTC

SEQ ID NO: 7784 - protein, 1202 aa, Homo sapiens
QLEKDKKQLEKENKRLRQQAEIKDTTLEENNVKIGNLEKENKTLSKEIGIYKESCVRLKELEKENKELVKRATIDIKTLVTLREDLVSEKLKTQQMNNDLEKLTHELEKIGLNKERLLHDEQSTDDSRYKLLESKLESTLKKSLEIKEEKIAALEARLEESTNYNQQLRQELKTVKKNYEALKQRQDEERMVQSSPPISGEDNKWERESQETTRELLKVKDRLIEVERNNATLQAEKQALKTQLKQLETQNNNLQTQILALQRQTVSLQEQNTTLQTQNAKLQVENSTLNSQSTSLMNQNAQLLIQQSSLENENESVIKEREDLKSLYDSLIKDHEKLELLHERQASEYESLISKHGTLKSAHKNLEVEHRDLEDRYNQLLKQKGQLEDLEKMLKVEQEKMLLENKNHETVAAEYKKLCGENDRLNHTYSQLLKETEVLQTDHKNLKSLLNNSKLEQTRLEAEFSKLKEQYQQLDITSTKLNNQCELLSQLKGNLEEENRHLLDQIQTLMLQNRTLLEQNMESKDLFHVEQRQYIDKLNELRRQKEKLEEKIMDQYKFYDPSPPRRRGNWITLKMRKLIKSKKDINRERQKSLTLTPTRSDSSEGFLQLPHQDSQDSSSVGSNSLEDGQTLGTKKSSMVALKRLPFLRNRPKDKDKMKACYRRSMSMNDLVQSMVLAGQWTGSTENLEVPDDISTGKRRKELGAMAFSTTAINFSTVNSSAGFRSKQLVNNKDTTSFEDISPQGVSDDSSTGSRVHASRPASLDSGRTSTSNSNNNASLHEVKAGAVNNQSRPQSHSSGEFSLLHDHEAWSSSGSSPIQYLKRQTRSSPVLQHKIPETLESRHHKIKTGSPGSEVVTLQQFLEESNKLTSVQIKSSSQENLLDEVMKSLSVSSDFLGKDKPVSCGLARSVSGKTPGDFYDRRTTKPEFLRPGPRKTEDTYFISSAGKPTPGTQGKIKLVKESSLSRQSKDSNPYATLPRASSVISTAEGTTRRTSIHDFLTKDSRLPISVDSPPAAADSNTTAASSEYHLHQWSSHILDIPTHTIGSCAQNDLAIDMPEPLYAQARNSRTGRSHFLNQTFATIRMPSDAFGMLAKDSIGPFTVAHSSQPFLSLNTELVSNISGLPPRPVIRITDQASASLDKPAQKENEQFSDHQNPSNSNLQFSINSNNLVTSACLYPDDTEAALLVSEDNQTVWYEYGCI

SEQ ID NO: 7785 - protein, 802 aa, Homo sapiens
HASADAWVEVERNNATLQAEKQALKTQLKQLETQNNNLQAQILALQRQTVSLQEQNTTLQTQNAKLQVENSTLNSQSTSLMNQNAQLLIQQSSLENENESVIKEREDLKSLYDSLIKDHEKLELLHERQASEYESLISKHGTLKSAHKNLEVEHRDLEDRYNQLLKQKGQLEDLEKMLKVEQEKMLLENKNHETVAAEYKKLCGENDRLNHTYSQLLKETEVLQTDHKNLKSLLNNSKLEQTRLEAEFSKLKEQYQQLDITSTKLNNQCELLSQLKGNLEEENRHLLDQIQTLMLQNRTLLEQNMESKDLFHVEQRQYIDKLNELRRQKEKLEEKIMDQYKFYDPSPPRRRGNWITLKMRKLIKSKKDINRERQKSLTLTPTRSDSSEGFLQLPHQDSQDSSSVGSNSLEDGQTLGTKKSSTMNDLVQSMVLAGQWTGSTENLEVPDDISTGKRRKELGAMAFSTTAINFSTVNSSAGFRSKQLVNNKDTTSFEDISPQGVSDDSSTGSRVHASRPASLDSGRTSTSNSNNNASLHEVKAGAVNNQSRPQSHSSGEFSLLHDHEAWSSSGSSPIQYLKRQTRSSPVLQHKISETLESRHHKIKTGSPGSEVVTLQQFLEESNKLTSVQIKSSSQENLLDEVMKSLSVSSDFLGKDKPVSCGLARSVSGKTPGDFYDRRTTKPEFLRPGPRKTEDTYFISSAGKPTPGTQGKIKLVKESSLSRQSKDSNPYATLPRASSVISTAEGTTRRTSIHDFLTKDSRLPISVDSPPAAADSNTTAASNVDKVQESRNSKSRSREQQSS

SEQ ID NO: 7786 - protein, 4687 aa, Homo sapiens
MVAGMLMPRDQLRAIYEVLFREGVMVAKKDRRPRSLHPHVPGVTNLQVMRAMASLRARGLVRETFAWCHFYWYLTNEGIAHLRQYLHLPPEIVPASLQRVRRPVAMVMPARRTPHVQAVQGPLGSPPKRGPLPTEEQRVYRRKELEEVSPETPVVPATTQRTLARPGPEPAPATDERDRVQKKTFTKWVNKHLIKAQRHISDLYEDLRDGHNLISLLEVLSGDSLPREKGRMRFHKLQNVQIALDYLRHRQVKLVNIRNDDIADGNPKLTLGLIWTIILHFQISDIQVSGQSEDMTAKEKLLLWSQRMVEGYQGLRCDNFTSSWRDGRLFNAIIHRHKPLLIDMNKVYRQTNLENLDQAFSVAERDLGVTRLLDPEDVDVPQPDEKSIITYVSSLYDAMPRVPDVQDGVRANELQLRWQEYRELVLLLLQWMRHHTAAFEERRFPSSFEEIEILWSQFLKFKEMELPAKEADKNRSKGIYQSLEGAVQAGQLKVPPGYHPLDVEKEWGKLHVAILEREKQLRSEFERLECLQRIVTKLQMEAGLCEEQLNQADALLQSDVRLLAAGKVPQRAGEVERDLDKADSMIRLLFNDVQTLKDGRHPQGEQMYRRVYRLHERLVAIRTEYNLRLKAGVAAPATQVAQVTLQSVQRRPELEDSTLRYLQDLLAWVEENQHRVDGAEWGVDLPSVEAQLGSHRGLHQSIEEFRAKIERARSDEGQLSPATRGAYRDCLGRLDLQYAKLLNSSKARLRSLESLHSFVAAATKELMWLNEKEEEEVGFDWSDRNTNMTAKKESYSALMRELELKEKKIKELQNAGDRLLREDHPARPTVESFQAALQTQWSWMLQLCCCIEAHLKENAAYFQFFSDVREAEGQLQKLQEALRRKYSCDRSATVTRLEDLLQDAQDEKEQLNEYKGHLSGLAKRAKAVVQLKPRHPAHPMRGRLPLLAVCDYKQVEVTVHKGDECQLVGPAQPSHWKVLSSSGSEAAVPSVCFLVPPPNQEAQEAVTRLEAQHQALVTLWHQLHVDMKSLLAWQSLRRDVQLIRSWSLATFRTLKPEEQRQALHSLELHYQAFLRDSQDAGGFGPEDRLMAEREYGSCSHHYQQLLQSLEQGAQEESRCQRCISELKDIRLQLEACETRTVHRLRLPLDKEPARECAQRIAEQQAGAKAQAEVEGLGKGVARLSAEAEKVLALPEPSPAAPTLRSELELTLGKLEQVRSLSAIYLEKLKTISLVIRGTQGAEEVLRAHEEQLKEAQAVPATLPELEATKASLKKLRAQAEAQQPTFDALRDELRGAQEVGERLQQRHGERDVEVERWRERVAQLLERWQAVLAQTDVRQRELEQLGRQLRYYRESADPLGAWLQDARRRQEQIQAMPLADSQAVREQLRQEQALLEEIERHGEKVEECQRFAKQYINAIKDYELQLVTYKAQLEPVASPAKKPKVQSGSESVIQEYVDLRTHYSELTTLTSQYIKFISETLRRMEEEERLAEQQRAEERERLAEVEAALEKQRQLAEAHAQAKAQAEREAKELQQRMQEEVVRREEAAVDAQQQKRSIQEELQQLRQSSEAEIQAKARQAEAAERSRLRIEEEIRVVRLQLEATERQRGGAEGELQALRARAEEAEAQKRQAQEEAERLRRQVQDESQRKRQAEVELASRVKAEAEAAREKQRALQALEELRLQAEEAERRLRQAEVERARQVQVALETAQRSAEAELQSKRASFAEKTAQLERSLQEEHVAVAQLREEAERRAQQQAEAERAREEAERELERWQLKANEALRLRLQAEEVAQQKSLAQAEAEKQKEEAEREARRRGKAEEQAVRQRELAEQELEKQRQLAEGTAQQRLAAEQELIRLRAETEQGEQQRQLLEEELARLQREAAAATQKRQELEAELAKVRAEMEVLLASKARAEEESRSTSEKSKQRLEAEAGRFRELAEEAARLRALAEEAKRQRQLAEEDAARQRAEAERVLAEKLAAIGEATRLKTEAEIALKEKEAENERLRRLAEDEAFQRRRLEEQAAQHKADIEERLAQLRKASDSELERQKGLVEDTLRQRRQVEEEILALKASFEKAAAGKAELELELGRIRSNAEDTLRSKEQAELEAARQRQLAAEEERRRREAEERVQKSLAAEEEAARQRKAALEEVERLKAKVEEARRLRERAEQESARQLQLAQEAAQKRLQAEEKAHAFAVQQKEQELQQTLQQEQSVLDQLRGEAEAARRAAEEAEEARVQAEREAAQSRRQVEEAERLKQSAEEQAQARAQAQAAAEKLRKEAEQEAARRAQAEQAALRQKQAADAEMEKHKKFAEQTLRQKAQVEQELTTLRLQLEETDHQKNLLDEELQRLKAEATEAARQRSQVEEELFSVRVQMEELSKLKARIEAENRALILRDKDNTQRFLQEEAEKMKQVAEEAARLSVAAQEAARLRQLAEEDLAQQRALAEKMLKEKMQAVQEATRLKAEAELLQQQKELAQEQARRLQEDKEQMAQQLAEETQGFQRTLEAERQRQLEMSAEAERLKLRVAEMSRAQARAEEDAQRFRKQAEEIGEKLHRTELATQEKVTLVQTLEIQRQQSDHDAERLREAIAELEREKEKLQQEAKLLQLKSEEMQTVQQEQLLQETQALQQSFLSEKDSLLQRERFIEQEKAKLEQLFQDEVAKAQQLREEQQRQQQQMEQERQRLVASMEEARRRQHEAEEGVRRKQEELQQLEQQRRQQEELLAEENQRLREQLQLLEEQHRAALAHSEEVTASQVAATKTLPNGRDALDGPAAEAEPEHSFDGLRRKVSAQRLQEAGILSAEELQRLAQGHTTVDELARREDVRHYLQGRSSIAGLLLKATNEKLSVYAALQRQLLSPGTALILLEAQAASGFLLDPVRNRRLTVNEAVKEGVVGPELHHKLLSAERAVTGYKDPYTGQQISLFQAMQKGLIVREHGIRLLEAQIATGGVIDPVHSHRVPVDVAYRRGYFDEEMNRVLADPSDDTKGFFDPNTHENLTYLQLLERCVEDPETGLCLLPLTDKAAKGGELVYTDSEARDVFEKATVSAPFGKFQGKTVTIWEIINSEYFTAEQRRDLLRQFRTGRITVEKIIKIIITVVEEQEQKGRLCFEGLRSLVPAAELLESRVIDRELYQQLQRGERSVRDVAEVDTVRRALRGANVIAGVWLEEAGQKLSIYNALKKDLLPSDMAVALLEAQAGTGHIIDPATSARLTVDEAVRAGLVGPEFHEKLLSAEKAVTGYRDPYTGQSVSLFQALKKGLIPREQGLRLLDAQLSTGGIVDPSKSHRVPLDVACARGCLDEETSRALSAPRADAKAYSDPSTGEPATYGELQQRCRPDQLTGLSLLPLSEKAARARQEELYSELQARETFEKTPVEVPVGGFKGRTVTVWELISSEYFTAEQRQELLRQFRTGKVTVEKVIKILITIVEEVETLRQERLSFSGLRAPVPASELLASGVLSRAQFEQLKDGKTTVKDLSELGSVRTLLQGSGCLAGIYLEDTKEKVSIYEAMRRGLLRATTAALLLEAQAATGFLVDPVRNQRLYVHEAVKAGVVGPELHEQLLSAEKAVTGYRDPYSGSTISLFQAMQKGLVLRQHGIRLLEAQIATGGIIDPVHSHRVPVDVAYQRGYFSEEMNRVLADPSDDTKGFFDPNTHENLTYRQLLERCVEDPETGLRLLPLKGAEKAEVVETTQVYTEEETRRAFEETQIDIPGGGSHGGSTMSLWEVMQSDLIPEEQRAQLMADFQAGRVTKERMIIIIIEIIEKTEIIRQQGLASYDYVRRRLTAEDLFEARIISLETYNLLREGTRSLREALEAESAWCYLYGTGSVAGVYLPGSRQTLSIYQALKKGLLSAEVARLLLEAQAATGFLLDPVKGERLTVDEAVRKGLVGPELHDRLLSAERAVTGYRDPYTEQTISLFQAMKKELIPTEEALRLLDAQLATGGIVDPRLGFHLPLEVAYQRGYLNKDTHDQLSEPSEVRSYVDPSTDERLSYTQLLRRCRRDDGTGQLLLPLSDARKLTFRGLRKQITMEELVRSQVMDEATALQLREGLTSIEEVTKNLQKFLEGTSCIAGVFVDATKERLSVYQAMKKGIIRPGTAFELLEAQAATGYVIDPIKGLKLTVEEAVRMGIVGPEFKDKLLSAERAVTGYKDPYSGKLISLFQAMKKGLILKDHGIRLLEAQIATGGIIDPEESHRLPVEVAYKRGLFDEEMNEILTDPSDDTKGFFDPNTEENLTYLQLMERCITDPQTGLCLLPLKEKKRERKTSSKSSVRKRRVVIVDPETGKEMSVYEAYRKGLIDHQTYLELSEQECEWEEITISSSDGVVKSMIIDRRSGRQYDIDDAIAKNLIDRSALDQYRAGTLSITEFADMLSGNAGGFRSRSSSVGSSSSYPISPAVSRTQLASWSDPTEETGPVAGILDTETLEKVSITEAMHRNLVDNITGQRLLEAQACTGGIIDPSTGERFPVTDAVNKGLVDKIMVDRINLAQKAFCGFEDPRTKTKMSAAQALKKGWLYYEAGQRFLEVQYLTGGLIEPDTPGRVPLDEALQRGTVDARTAQKLRDVGAYSKYLTCPKTKLKISYKDALDRSMVEEGTGLRLLEAAAQSTKGYYSPYSVSGSGSTAGSRTGSRTGSRAGSRRGSFDATGSGFSMTFSSSSYSSSGYGRRYASGSSASLGGPESAVA

SEQ ID NO: 7787 - protein, 4574 aa, Homo sapiens
MSGEDAEVRAVSEDVSNGSSGSPSPGDTLPWNLGKTQRSRRSGGGAGSNGSVLDPAERAVIRIADERDRVQKKTSTKWVNKHLIKAQRHISDLYEDLRDGHNLISLLEVLSGDSLPREKGRMRFHKLQNVQIALDYLRHRQVKLVNIRNDDIADGNPKLTLGLIWTIILHFQISDIQVSGQSEDMTAKEKLLLWSQRMVEGYQGLRCDNFTSSWRDGRLFNAIIHRHKPLLIDMNKVYRQTNLENLDQAFSVAERDLGVTRLLDPEDVDVPQPDEKSIITYVSSLYDAMPRVPDVQDGVRANELQLRWQEYRELVLLLLQWMRHHTAAFEERRFPSSFEEIEILWSQFLKFKEMELPAKEADKNRSKGIYQSLEGAVQAGQLKVPPGYHPLDVEKEWGKLHVAILEREKQLRSEFERLECLQRIVTKLQMEAGLCEEQLHQADALLQSDIRLLAAGKVPQRAGEVERDLDKADSMIRLLFNDVQTLKDGRHPQGEQMYRRVYRLHERLVAIRTEYNLRLKAGVAAPATQVAQVTLQSVQRRPELEDSTLRYLQDLLAWVEENQHRVDGAEWGVDLPSVEAQLGSHRGLHQSIEEFQAKIERARSDEGQLSPATRGAYRDCLGRLDLQYAKLLNSSKARLRSLESLHSFVAAATKELMWLNEKEEEEVGFDWSDRNTNMTAKKESYSALMRELELKEKKIKELQNAGDRLLREDHPARPTVESFQAALQTQWSWMLQLCCCIEAHLKENAAYFQFFSDVREAEGQLQKLQEALRRKNSCDRSATVTRLEDLLQDAQDEKEQLNEYKGHLSGLAKRAKAVVQLKPRHPAHPMRGRLPLLAVCDYKQVEVTVHKGDECQLVGPAQPSHWKVLSSSGSEAAVPSVCFLVPPPNQEVQEAVTRLEAQHQALVTLWHQLHVDMKSLLAWQSLRRDVQLIRSWSLATFRTLKPEEQRQALHSLELHYQAFLRDSQDAGGFGPEDRLMAEREYGSCSHHYQQLLQSLEQGAQEESRCQRCISELKDIRLQLEACETRTVHRLRLPLDKEPARECAQRIAEQQKAQAEVEGLGKGVARLSAEAEKVLALPEPSPAAPTLRSELELTLGKLEQVRSLSAIYLEKLKTISLVIRGTQGAEEVLRAHEEQLKEAQAVPATLPELEATKASLKKLRAQAEAQQPTFDALRDELRGAQEVGERLQQRHGERDVEVERWRERVAQLLERWQAVLAQTDVRQRELEQLGRQLRYYRESADPLGAWLQDARRRQEQIQAMPLADSQAVREQLRQEQALLEEIERHGEKVEECQRFAKQYINAIKDYELQLVTYKAQLEPVASPAKKPKVQSGSESVIQEYVDLRTHYSELTTLTSQYIKFISETLRRMEEEERLAEQQRAEERERLAEVEAALEKQRQLAEAHAQAKAQAEREAKELQQRIQEEVVRREEAAVDAQQQKRSIQEELQQLRQSSEAEIQAKARQAEAAERSRLRIEEEIRVVRLQLEATERQRGGAEGELQALRARAEEAEAQKRQAQEEAERLRRQVQDESQRKRQAEVELASRVKAEAEAAREKQRALQALEELRLQAEEAERWLCQAEVERARQVQVALETAQRSAEAELQSKRASFAEKTAQLERSLQEEHVAVAQLREEAERRAQQQAEAERAREEAERQLERWQLKANEALRLRLQAEEVLQQKSLAQAEAEKQKEEAEREARRRGKAEEQAVRQRELAEQELEKQRQLAEGTAQQRLAAEQELIRLRAETEQGEQQRQLLEEELARLQREAAAATQKRQELEAELAKVRAEMEVLLASKAKAEEESRSTSEKSKQRLEAEAGRFRELAEEAARLRALAEEAKRQRQLAEEDAARQRAEAERVLAEKLAAIGEATRLKTEAEIALKEKEAENERLRRLAEDEAFQRRRLEEQAAQHKADIEERLAQLRKASDSELERQKGLVEDTLRQRRQVEEEILALKASFEKAAAGKAELELELGRIRSNAEDTLRSKEQAELEAARQRQLAAEEERRRREAEERVQKSLAAEEEAARQRKAALEEVERLKAKVEEARSLRERAEQESARQLQLAQEAAQKRLQAEEKAHAFAVQQKEQELQQTLQQEQSVLDRLRGEAEAARRAAEEAEEARVQAEREAAQSRRQVEEAERLKQSAEEQAQARAQAQAAAEKLRKEAEQEAARRAQAEQAALRQKQAADAEMEKHKKFAEQTLRQKAQVEQELTTLRLQLEETDHQKNLLDEELQRLKAEATEAARQRSQVEEELFSVRVQMEELSKLKARIEAENRALILRDKDNTQRFLQEEAEKMKQVAEEAARLSVAAQEAARLRQLAEEDLAQQRALAEKMLKEKMQAVQEATRLKAEAELLQQQKELAQEQARRLQEDKEQMAQQLAEETQGFQRTLEAERQRQLEMSAEAERLKLRVAEMSRAQARAEEDAQRFRKQAEEIGEKLHRTELATQEKVTLVQTLEIQRQQSDHDAERLREAIAELEREKEKLQQEAKLLQLKSEEMQTVQQEQLLQETQALQQSFLSEKDSLLQRERFIEQEKAKLEQLFQDEVAKAQQLREEQQRQQQQMEQERQRLVASMEEARRRQHEAEEGVRRKQEELQQLEQQRRQQEELLAEENQRLREQLQLLEEQHRAALAHSEEVTASQVAATKTLPNGRDALDGPAAEAEPEHSFDGLRRKVSAQRLQEAGILSAEELQRLAQGHTTVDELARREDVRHYLQGRSSIAGLLLKATNEKLSVYAALQRQLLSPGTALILLEAQAASGFLLDPVRNRRLTVNEAVKEGVVGPELHHKLLSAERAVTGYKDPYTGQQISLFQAMQKGLIVREHGIRLLEAQIATGGVIDPVHSHRVPVDVAYRRGYFDEEMNRVLADPSDDTKGFFDPNTHENLTYLQLLERCVEDPETGLCLLPLTDKAAKGGELVYTDSEARDVFEKATVSAPFGKFQGKTVTIWEIINSEYFTAEQRRDLLRQFRTGRITVEKIIKIIITVVEEQEQKGRLCFEGLRSLVPAAELLESRVIDRELYQQLQRGERSVRDVAEVDTVRRALRGANVIAGVWLEEAGQKLSIYNALKKDLLPSDMAVALLEAQAGTGHIIDPATSARLTVDEAVRAGLVGPEFHEKLLSAEKAVTGYRDPYTGQSVSLFQALKKGLIPREQGLRLLDAQLSTGGIVDPSKSHRVPLDVACARGCLDEETSRALSEPRADAKAYSDPSTGEPATYGELQQRCRPDQLTGLSLLPLSEKAARARQEEFYSELQARETFEKTPVEVPVGGFKGRTVTVWELISSEYFTAEQRQELFRQFRTGKVTVEKVIKILITIVEEVETLRQERLSFSGLRSPVPASELLASGVLSRAQFEQLKDGKTTVKDLSELGSVRTLLQGSGCLAGIYLEDTKEKVSIYEAMRRGLLRATTAALLLEAQAGTGFLVDPVRNQRLYVHEAVKAGVVGPELHEQLLSAEKAVTGYRDPYSGRTISLFQAMKKGLVLREHGIRLLEAQIATGGIIDPVNSHRVPVDVAYQRGYFSEEMNRVLADPSDDTKGFFDPNTHENLTYRQLLERCVEDPETGLRLLPLKGAEKVEVVETTQVYTEEETRRAFEETQIDIPGGGSHGGSTMSLWEVMQSDLIPEEQRAQLMADFQAGRVTKERMIIIIIEIIEKTEIIRQQGLASYDYVRRRLTGEDLFEARIISLETYNLLREGTKSLREALEGESAWFYLYGTGSVAGVYLPGSRQTLSIYQALKKGLLSAEVARLLLEAQAATGFLLDPVKGERLTVDEAVRKGLVGPELHDRLLSAERAVTGYRDPYTEKTISLFQAMKKELIPTEEALRLLDAQLATGGIVDPRLGFHLPLEVAYQRGYLNKDTHDQLSEPSEVRSYVDPSTDERLSYTQLLKRCRRDDGSGQLLLPLSDARKLTFRGLRKQITMEELVRSQVMDEATALQLREGLTSIEEVTKNLQKFLEGTSCIAGVFVDATKERLSVYQAMKKGIIRPGTAFELLEAQAATGYVIDPIKGLKLTVEEAVRMGIVGPEFKDKLLSAERAVTGYKDPYSGKLISLFQAMKKGLILKDHGIRLLEAQIATGGIIDPEESHRLPVEVAYKRGLFDEEMNEILTDPSDDTKGFFDPNTEENLTYLQLMERCITDPQTGLCLLPLKEKKRERKTSSKSSVRKRRVVIVDPETGKEMSVYEAYRKGLIDHQTYLELSEQECEWEEITISSSDGVVKSMIIDRRSGRQYDIDDAIAKNLIDRSALDQYRAGTLSITEFADMLSGNAGGFRSRSSSVGSSSSYPISPAVSRTQLASWSDPTEETGPVAGILDTETLEKVSITEAMHRNLVDNITGQRLLEAQACTGGIIDPSTGERLPVTDAVNKGLVDKIMVDRINLAQKAFCGFEDPRTKTKMSAAQALKKGWLYYEAGQRFLEVQYLTGGLIEPDTPGRVPLDEALQRGTVDARTAQKLRDVGAYSKYLTCPKTKLKISYKDALDRSMVEEGTGLRLLEAAAQSTKGYYSPYSVSGSGSTAGSRTGSRTGSRAGSRRGSFDATGSGFSMTFSSSSYSSSGYGRRYASGSSASLGGPESAVA

SEQ ID NO: 7788 - protein, 4684 aa, Homo sapiens [sequence omitted]

SEQ ID NO: 7789 - protein, 4570 aa, Homo sapiens
MSGEDAEVRAVSEDVSNGSSGSPSPGDTLPWNLGKTQRSRRSGGGAGSNGSVLDPAERAVIRIADERDRVQKKTSTKWVNKHLIKAQRHISDLYEDLRDGHNLISLLEVLSGDSLPREKGRMRFHKLQNVQIALDYLRHRQVKLVNIRNDDIADGNPKLTLGLIWTIILHFQISDIQVSGQSEDMTAKEKLLLWSQRMVEGYQGLRCDNFTSSWRDGRLFNAIIHRHKPLLIDMNKVYRQTNLENLDQAFSVAERDLGVTRLLDPEDVDVPQPDEKSIITYVSSLYDAMPRVPDVQDGELQLRWQEYRELVLLLLQWMRHHTAAFEERRFPSSFEEIEILWSQFLKFKEMELPAKEADKNRSKGIYQSLEGAVQAGQLKVPPGYHPLDVEKEWGKLHVAILEREKQLRSEFERLECLQRIVTKLQMEAGLCEEQLHQADALLQSDIRLLAAGKVPQRAGEVERDLDKADSMIRLLFNDVQTLKDGRHPQGEQMYRRVYRLHERLVAIRTEYNLRLKAGVAAPATQVAQVTLQSVQRRPELEDSTLRYLQDLLAWVEENQHRVDGAEWGVDLPSVEAQLGSHRGLHQSIEEFQAKIERARSDEGQLSPATRGAYRDCLGRLDLQYAKLLNSSKARLRSLESLHSFVAAATKELMWLNEKEEEEVGFDWSDRNTNMTAKKESYSALMRELELKEKKIKELQNAGDRLLREDHPARPTVESFQAALQTQWSWMLQLCCCIEAHLKENAAYFQFFSDVREAEGQLQKLQEALRRKNSCDRSATVTRLEDLLQDAQDEKEQLNEYKGHLSGLAKRAKAVVQLKPRHPAHPMRGRLPLLAVCDYKQVEVTVHKGDECQLVGPAQPSHWKVLSSSGSEAAVPSVCFLVPPPNQEVQEAVTRLEAQHQALVTLWHQLHVDMKSLLAWQSLRRDVQLIRSWSLATFRTLKPEEQRQALHSLELHYQAFLRDSQDAGGFGPEDRLMAEREYGSCSHHYQQLLQSLEQGAQEESRCQRCISELKDIRLQLEACETRTVHRLRLPLDKEPARECAQRIAEQQKAQAEVEGLGKGVARLSAEAEKVLALPEPSPAAPTLRSELELTLGKLEQVRSLSAIYLEKLKTISLVIRGTQGAEEVLRAHEEQLKEAQAVPATLPELEATKASLKKLRAQAEAQQPTFDALRDELRGAQEVGERLQQRHGERDVEVERWRERVAQLLERWQAVLAQTDVRQRELEQLGRQLRYYRESADPLGAWLQDARRRQEQIQAMPLADSQAVREQLRQEQALLEEIERHGEKVEECQRFAKQYINAIKDYELQLVTYKAQLEPVASPAKKPKVQSGSESVIQEYVDLRTHYSELTTLTSQYIKFISETLRRMEEEERLAEQQRAEERERLAEVEAALEKQRQLAEAHAQAKAQAEREAKELQQRIQEEVVRREEAAVDAQQQKRSIQEELQQLRQSSEAEIQAKARQAEAAERSRLRIEEEIRVVRLQLEATERQRGGAEGELQALRARAEEAEAQKRQAQEEAERLRRQVQDESQRKRQAEVELASRVKAEAEAAREKQRALQALEELRLQAEEAERWLCQAEVERARQVQVALETAQRSAEAELQSKRASFAEKTAQLERSLQEEHVAVAQLREEAERRAQQQAEAERAREEAERQLERWQLKANEALRLRLQAEEVLQQKSLAQAEAEKQKEEAEREARRRGKAEEQAVRQRELAEQELEKQRQLAEGTAQQRLAAEQELIRLRAETEQGEQQRQLLEEELARLQREAAAATQKRQELEAELAKVRAEMEVLLASKAKAEEESRSTSEKSKQRLEAEAGRFRELAEEAARLRALAEEAKRQRQLAEEDAARQRAEAERVLAEKLAAIGEATRLKTEAEIALKEKEAENERLRRLAEDEAFQRRRLEEQAAQHKADIEERLAQLRKASDSELERQKGLVEDTLRQRRQVEEEILALKASFEKAAAGKAELELELGRIRSNAEDTLRSKEQAELEAARQRQLAAEEERRRREAEERVQKSLAAEEEAARQRKAALEEVERLKAKVEEARSLRERAEQESARQLQLAQEAAQKRLQAEEKAHAFAVQQKEQELQQTLQQEQSVLDRLRGEAEAARRAAEEAEEARVQAEREAAQSRRQVEEAERLKQSAEEQAQARAQAQAAAEKLRKEAEQEAARRAQAEQAALRQKQAADAEMEKHKKFAEQTLRQKAQVEQELTTLRLQLEETDHQKNLLDEELQRLKAEATEAARQRSQVEEELFSVRVQMEELSKLKARIEAENRALILRDKDNTQRFLQEEAEKMKQVAEEAARLSVAAQEAARLRQLAEEDLAQQRALAEKMLKEKMQAVQEATRLKAEAELLQQQKELAQEQARRLQEDKEQMAQQLAEETQGFQRTLEAERQRQLEMSAEAERLKLRVAEMSRAQARAEEDAQRFRKQAEEIGEKLHRTELATQEKVTLVQTLEIQRQQSDHDAERLREAIAELEREKEKLQQEAKLLQLKSEEMQTVQQEQLLQETQALQQSFLSEKDSLLQRERFIEQEKAKLEQLFQDEVAKAQQLREEQQRQQQQMEQERQRLVASMEEARRRQHEAEEGVRRKQEELQQLEQQRRQQEELLAEENQRLREQLQLLEEQHRAALAHSEEVTASQVAATKTLPNGRDALDGPAAEAEPEHSFDGLRRKVSAQRLQEAGILSAEELQRLAQGHTTVDELARREDVRHYLQGRSSIAGLLLKATNEKLSVYAALQRQLLSPGTALILLEAQAASGFLLDPVRNRRLTVNEAVKEGVVGPELHHKLLSAERAVTGYKDPYTGQQISLFQAMQKGLIVREHGIRLLEAQIATGGVIDPVHSHRVPVDVAYRRGYFDEEMNRVLADPSDDTKGFFDPNTHENLTYLQLLERCVEDPETGLCLLPLTDKAAKGGELVYTDSEARDVFEKATVSAPFGKFQGKTVTIWEIINSEYFTAEQRRDLLRQFRTGRITVEKIIKIIITVVEEQEQKGRLCFEGLRSLVPAAELLESRVIDRELYQQLQRGERSVRDVAEVDTVRRALRGANVIAGVWLEEAGQKLSIYNALKKDLLPSDMAVALLEAQAGTGHIIDPATSARLTVDEAVRAGLVGPEFHEKLLSAEKAVTGYRDPYTGQSVSLFQALKKGLIPREQGLRLLDAQLSTGGIVDPSKSHRVPLDVACARGCLDEETSRALSEPRADAKAYSDPSTGEPATYGELQQRCRPDQLTGLSLLPLSEKAARARQEEFYSELQARETFEKTPVEVPVGGFKGRTVTVWELISSEYFTAEQRQELFRQFRTGKVTVEKVIKILITIVEEVETLRQERLSFSGLRSPVPASELLASGVLSRAQFEQLKDGKTTVKDLSELGSVRTLLQGSGCLAGIYLEDTKEKVSIYEAMRRGLLRATTAALLLEAQAGTGFLVDPVRNQRLYVHEAVKAGVVGPELHEQLLSAEKAVTGYRDPYSGRTISLFQAMKKGLVLREHGIRLLEAQIATGGIIDPVNSHRVPVDVAYQRGYFSEEMNRVLADPSDDTKGFFDPNTHENLTYRQLLERCVEDPETGLRLLPLKGAEKVEVVETTQVYTEEETRRAFEETQIDIPGGGSHGGSTMSLWEVMQSDLIPEEQRAQLMADFQAGRVTKERMIIIIIEIIEKTEIIRQQGLASYDYVRRRLTGEDLFEARIISLETYNLLREGTKSLREALEGESAWFYLYGTGSVAGVYLPGSRQTLSIYQALKKGLLSAEVARLLLEAQAATGFLLDPVKGERLTVDEAVRKGLVGPELHDRLLSAERAVTGYRDPYTEKTISLFQAMKKELIPTEEALRLLDAQLATGGIVDPRLGFHLPLEVAYQRGYLNKDTHDQLSEPSEVRSYVDPSTDERLSYTQLLKRCRRDDGSGQLLLPLSDARKLTFRGLRKQITMEELVRSQVMDEATALQLREGLTSIEEVTKNLQKFLEGTSCIAGVFVDATKERLSVYQAMKKGIIRPGTAFELLEAQAATGYVIDPIKGLKLTVEEAVRMGIVGPEFKDKLLSAERAVTGYKDPYSGKLISLFQAMKKGLILKDHGIRLLEAQIATGGIIDPEESHRLPVEVAYKRGLFDEEMNEILTDPSDDTKGFFDPNTEENLTYLQLMERCITDPQTGLCLLPLKEKKRERKTSSKSSVRKRRVVIVDPETGKEMSVYEAYRKGLIDHQTYLELSEQECEWEEITISSSDGVVKSMIIDRRSGRQYDIDDAIAKNLIDRSALDQYRAGTLSITEFADMLSGNAGGFRSRSSSVGSSSSYPISPAVSRTQLASWSDPTEETGPVAGILDTETLEKVSITEAMHRNLVDNITGQRLLEAQACTGGIIDPSTGERLPVTDAVNKGLVDKIMVDRINLAQKAFCGFEDPRTKTKMSAAQALKKGWLYYEAGQRFLEVQYLTGGLIEPDTPGRVPLDEALQRGTVDARTAQKLRDVGAYSKYLTCPKTKLKISYKDALDRSMVEEGTGLRLLEAAAQSTKGYYSPYSVSGSGSTAGSRTGSRTGSRAGSRRGSFDATGSGFSMTFSSSSYSSSGYGRRYASGSSASLGGPESAVA

SEQ ID NO: 7790 - protein, 586 aa, Homo sapiens
MATATPVPPRMGSRAGGPTTPLSPTRLSRLQEKEELRELNDRLAVYIDKVRSLETENSALQLQVTEREEVRGRELTGLKALYETELADARRALDDTARERAKLQIELGKCKAEHDQLLLNYAKKESDLNGAQIKLREYEAALNSKDAALATALGDKKSLEGDLEDLKDQIAQLEASLAAAKKQLADETLLKVDLENRCQSLTEDLEFRKSMYEEEINETRRKHETRLVEVDSGRQIEYEYKLAQALHEMREQHDAQVRLYKEELEQTYHAKLENARLSSEMNTSTVNSAREELMESRMRIESLSSQLSNLQKESRACLERIQELEDLLAKEKDNSRRMLTDKEREMAEIRDQMQQQLNDYEQLLDVKLALDMEISAYRKLLEGEEERLKLSPSPSSRVTVSRASSSRSVRTTRGKRKRVDVEESEASSSVSISHSASATGNVCIEEIDVDGKFIRLKNTSEQDQPMGGWEMIRKIGDTSVSYKYTSRYVLKAGQTVTIWAANAGVTASPPTDLIWKNQNSWGTGEDVKVILKNSQGEEVAQRSTVFKTTIPEEEEEEEEAAGVVVEEELFHQQGTPRASNRSCAIM

SEQ ID NO: 7791 - protein, 527 aa, Homo sapiens
VLVISVAFQYTRLFIFSPFQKKRPQASEINQLANLCQIPLEICLPKTLLTGEEQEMNNSQGRVTFEDVTVNFTQGEWQRLNPEQRNLYRDVMLENYSNLVSVGQGETTKPDVILRLEQGKEPWLEEEEVLGSGRAEKNGDIGGQIWKPKDVKESLAREVPSINKETLTTQKGVECDGSKKILPLGIDDVSSLQHYVQNNSHDDNGYRKLVGNNPSKFVGQQLKCNACRKLFSSKSRLQSHLRRHACQKPFECHSCGRAFGEKWKLDKHQKTHAEERPYKCENCGNAYKQKSNLFQHQKMHTKEKPYQCKTCGKAFSWKSSCINHEKIHNAKKSYQCNECEKSFRQNSTLIQHKKVHTGQKPFQCTDCGKAFIYKSDLVKHQRIHTGEKPYKCSICEKAFSQKSNVIDHEKIHTGKRAYECDLCGNTFIQKKNLIQHKKIHTGEKPYECNRCGKAFFQKSNLHSHQKTHSGERTYRCSECGKTFIRKLNLSLHKKTHTGQKPYGCSECGKAFADRSYLVRHQKRIHSR

SEQ ID NO: 7792 - protein, 164 aa, Homo sapiens
MNNSLDYLAYPVIVSNHRQSTTFRKKLDFGHYVSHKNRIQIAKPTVDTKPPVAHTNHILKLSKLQGEQKKINKIEYENKQLCQKIANAHRGPAKVDCWNEYFSKSLNRETRNRELVRITMENQGILKRLVDRKPHYDRRASEIDWQNSRRYIRNTTRYLLSQNE

SEQ ID NO: 7793 - protein, 763 aa, Homo sapiens
MEKEEESEHHLQRAISAQQVFREKKESMVIPVPEAESNVNYYNRLYKGEFKQPKQFIHIQPFNLDNEQPDYDMDSEDETLLNRLNRKMEIKPLQFEIMIDRLEKASSNQLVTLQEAKLLLNEDDYLIKAVYDYWVRKRKNCRGPSLIPQIKQEKRDGSTNNDPYVAFRRRTEKMQTRKNRKNDEASYEKMLKLRREFSRAITILEMIKRREKTKRELLHLTLEVVEKRYHLGDYGGEILNEVKISRSEKELYATPATLHNGNHHKVQECKTKHPHHLSLKEEASDVVRQKKKYPKKPKAEALITSQQPTPETLPVINKSDIKQYDFHSSDEDEFPQVLSPVSEPEEENDPDGPCAFRRRAGCQYYAPRLDQANHSCENSELADLDKLRYRHCLTTLTVPRRCIGFARRRIGRGGRVIMDRISTEHDPVLKQIDPEMLNSFSSSSQTIDFSSNFSRTNASSKHCENRLSLSEILSNIRSCRLQCFQPRLLNLQDSDSEECTSRKPGQTVNNKRVSAASVALLNTSKNGISVTGGITEEQFQTHQQQLVQMQRQQLAQLQQKQQSQHSSQQTHPKAQGSSTSDCMSKTLDSASAHFAASAVVSAPVPSRSEVAKEQNTGHNNINGVVQPSGTSKTLYSTNMALSSSPGISAVQLVRTVGHTTTNHLIPALCTSSPQTLPMNNSCLTNAVHLNNVSVVSPVNVHINTRTSAPSPTALKLATVAASMDRVPKVTPSSAISSIARENHEPERLGLNGIAETTVAMEVT

SEQ ID NO: 7794 - protein, 1799 aa, Homo sapiens
ENFHCDLNSDQFKGFLRAHTPSVAASSQARSAVFSVTYPSSDIYLVVKIEKVLQQGEIGDCAEPYTVIKESDGGKSKEKIEKLKLQAESFCQRLGKYRMPFAWAPISLSSFFNVSTLEREVTDVDSVVGRSSVGERRTLAQSRRLSERALSLEENGVGSNFKTSTLSVSSFFKQEGDRLSDEDLFKFLADYKRSSSLQRRVKSIPGLLRLEISTAPEIINCCLTPEMLPVKPFPENRTRPHKEILEFPTREVYVPHTVYRNLLYVYPQRLNFVNKLASARNITIKIQFMCGEDASNAMPVIFGKSSGPEFLQEVYTAVTYHNKSPDFYEEVKIKLPAKLTVNHHLLFTFYHISCQQKQGASVETLLGYSWLPILLNERLQTGSYCLPVALEKLPPNYSMHSAEKVPLQNPPIKWAEGHKGVFNIEVQAVSSVHTQDNHLEKFFTLCHSLESQVTFPIRVLDQKISEMALEHELKLSIICLNSSRLEPLVLFLHLVLDKLFQLSVQPMVIAGQTANFSQFAFESVVAIANSLHNSKDLSKDQHGRNCLLASYVHYVFRLPEVQRDVPKSGAPTALLDPRSYHTYGRTSAAAVSSKLLQARVMSSSNPDLAGTHSAADEEVKNIMSSKIADRNCSRMSYYCSGSSDAPSSPAAPRPASKKHFHEELALQMVVSTGMVRETVFKYAWFFFELLVKSMAQHVHNMDKRDSFRRTRFSDRFMDDITTIVNVVTSEIAALLVKPQKENEQAEKMNISLAFFLYDLLSLMDRGFVFNLIRHYCSQLSAKLSNLPTLISMRLEFLRILCSHEHYLNLNLFFMNADTAPTSPCPSISSQNSSSCSSFQDQKIASMFDLTSEYRQQHFLTGLLFTELAAALDAEGEGISKVQRKAVSAIHSLLSSHDLDPRCVKPEVKVKIAALYLPLVGIILDALPQLCDFTVADTRRYRTSGSDEEQEGAGAINQNVALAIAGNNFNLKTSGIVLSSLPYKQYNMLNADTTRNLMICFLWIMKNADQSLIRKWIADLPSTQLNRILDLLFICVLCFEYKGKQSSDKVSTQVLQKSRDVKARLEEALLRGEGARGEMMRRRAPGNDRFPGLNENLRWKKEQTHWRQANEKLDKTKAELDQEALISGNLATEAHLIILDMQENIIQASSALDCKDSLLGGVLRVLVNSLNCDQSTTYLTHCFATLRALIAKFGDLLFEEEVEQCFDLCHQVLHHCSSSMDVTRSQACATLYLLMRFSFGATSNFARVKMQVTMSLASLVGRAPDFNEEHLRRSLRTILAYSEEDTAMQMTPFPTQVEELLCNLNSILYDTVKMREFQEDPEMLMDLMYRIAKSYQASPDLRLTWLQNMAEKHTKKKCYTEAAMCLVHAAALVAEYLSMLEDHSYLPVGSVSFQNISSNVLEESVVSEDTLSPDEDGVCAGQYFTESGLVGLLEQAAELFSTGGLYETVNEVYKLVIPILEAHREFRKLTLTHSKLQRAFDSIVNKDHKRMFGTYFRVGFFGSKFGDLDEQEFVYKEPAITKLPEISHRLEAFYGQCFGAEFVEVIKDSTPVDKTKLDPNKAYIQITFVEPYFDEYEMKDRVTYFEKNFNLRRFMYTTPFTLEGRPRGELHEQYRRNTVLTTMHAFPYIKTRISVIQKEEFVLTPIEVAIEDMKKKTLQLAVAINQEPPDAKMLQMVLQGSVGATVNQGPLEVAQVFLAEIPADPKLYRHHNKLRLCFKEFIMRCGEAVEKNKRLITADQREYQQELKKNYNKLKENLRPMIERKIPELYKPIFRVESQKRDSFHRSSFRKCETQLSQGS

SEQ ID NO: 7795 - protein, 376 aa, Homo sapiens
MKHFKKEKSEAENHIRTLKAESLEEKNMAKIHRGQLEKLKSQCDRLTEELTQNENENKKLKLKYQCLKDQLEEREKHISIEEEHLRRMEEARLQLKDQLLCLETEQESILGVIGKEIDAACKTFSKDSVEKLKVFSSGPDIHYDPHRWLAESKTKLQWLCEELKERENREKNLRHQLMLCRQQLRNLTENKESELQCLFQQIERQEQLLDEIHREKRDLLEETQRKDEEMGSLQDRVIALETSTQVALDHLESVAEKLSLLEDFKDFRDSCSSSERTDGRYSKYRVRRNSLQHHQDDTKYRTKSFKGDRTFLEGSHTRGLDHSSSWQDHSRFLSSPRFSYVNSFTKRTVAPDSASNKEDATMNGTSSQPKKEEYGS

SEQ ID NO: 7796 - protein, 2092 aa, Homo sapiens
MSQPPLLPASAETRKFTRALSKPGTAAELRQSVSEVVRGSVLLAKPKLIEPLDYENVIVQKKTQILNDCLREMLLFPYDDFQTAILRRQGRYICSTVPAKAEEEAQSLFVTECIKTYNSDWHLVNYKYEDYSGEFRQLPNKVVKLDKLPVHVYEVDEEVDKDEDAASLGSQKGGITKHGWLYKGNMNSAISVTMRSFKRRFFHLIQLGDGSYNLNFYKDEKISKEPKGSIFLDSCMGVVQNNKVRRFAFELKMQDKSSYLLAADSEVEMEEWITILNKILQLNFEAAMQEKRNGDSHEDDEQSKLEGSGSGLDSYLPELAKSAREAEIKLKSESRVKLFYLDPDAQKLDFSSAEPEVKSFEEKFGKRILVKCNDLSFNLQCCVAENEEGPTTNVEPFFVTLSLFDIKYNRKISADFHVDLNHFSVRQMLATTSPALMNGSGQSPSVLKGILHEAAMQYPKQGIFSVTCPHPDIFLVARIEKVLQGSITHCAEPYMKSSDSSKVAQKVLKNAKQACQRLGQYRMPFAWAARTLFKDASGNLDKNARFSAIYRQDSNKLSNDDMLKLLADFRKPEKMAKLPVILGNLDITIDNVSSDFPNYVNSSYIPTKQFETCSKTPITFEVEEFVPCIPKHTQPYTIYTNHLYVYPKYLKYDSQKSFAKARNIAICIEFKDSDEEDSQPLKCIYGRPGGPVFTRSAFAAVLHHHQNPEFYDEIKIELPTQLHEKHHLLLTFFHVSCDNSSKGSTKKRDVVETQVGYSWLPLLKDGRVVTSEQHIPVSANLPSGYLGYQELGMGRHYGPEIKWVDGGKPLLKISTHLVSTVYTQDQHLHNFFQYCQKTESGAQALGNELVKYLKSLHAMEGHVMIAFLPTILNQLFRVLTRATQEEVAVNVTRVIIHVVAQCHEEGLESHLRSYVKYAYKAEPYVASEYKTVHEELTKSMTTILKPSADFLTSNKLLKYSWFFFDVLIKSMAQHLIENSKVKLLRNQRFPASYHHAVETVVNMLMPHITQKFRDNPEASKNANHSLAVFIKRCFTFMDRGFVFKQINNYISCFAPGDPKTLFEYKFEFLRVVCNHEHYIPLNLPMPFGKGRIQRYQDLQLDYSLTDEFCRNHFLVGLLLREVGTALQEFREVRLIAISVLKNLLIKHSFDDRYASRSHQARIATLYLPLFGLLIENVQRINVRDVSPFPVNAGMTVKDESLALPAVNPLVTPQKGSTLDNSLHKDLLGAISGIASPYTTSTPNINSVRNADSRGSLISTDSGNSLPERNSEKSNSLDKHQQSSTLGNSVVRCDKLDQSEIKSLLMCFLYILKSMSDDALFTYWNKASTSELMDFFTISEVCLHQFQYMGKRYIARNQEGLGPIVHDRKSQTLPVSRNRTGMMHARLQQLGSLDNSLTFNHSYGHSDADVLHQSLLEANIATEVCLTALDTLSLFTLAFKNQLLADHGHNPLMKKVFDVYLCFLQKHQSETALKNVFTALRSLIYKFPSTFYEGRADMCAALCYEILKCCNSKLSSIRTEASQLLYFLMRNNFDYTGKKSFVRTHLQVIISVSQLIADVVGIGGTRFQQSLSIINNCANSDRLIKHTSFSSDVKDLTKRIRTVLMATAQMKEHENDPEMLVDLQYSLAKSYASTPELRKTWLDSMARIHVKNGDLSEAAMCYVHVTALVAEYLTRKEAVQWEPPLLPHSHSACLRRSRGGVFRQGCTAFRVITPNIDEEASMMEDVGMQDVHFNEDVLMELLEQCADGLWKAERYELIADIYKLIIPIYEKRRDFERLAHLYDTLHRAYSKVTEVMHSGRRLLGTYFRVAFFGQAAQYQFTDSETDVEGFFEDEDGKEYIYKEPKLTPLSEISQRLLKLYSDKFGSENVKMIQDSGKVNPKDLDSKYAYIQVTHVIPFFDEKELQERKTEFERSHNIRRFMFEMPFTQTGKRQGGVEEQCKRRTILTAIHCFPYVKKRIPVMYQHHTDLNPIEVAIDEMSKKVAELRQLCSSAEVDMIKLQLKLQGSVSVQVNAGPLAYARAFLDDTNTKRYPDNKVKLLKEVFRQFVEACGQALAVNERLIKEDQLEYQEEMKANYREMAKELSEIMHEQLG

SEQ ID NO: 7797 - protein, 2093 aa, Homo sapiens
MSQPPLLPASAETRKFTRALSKPGTAAELRQSVSEVVRGSVLLAKPKLIEPLDYENVIVQKKTQILNDCLREMLLFPYDDFQTAILRRQGRYICSTVPAKAEEEAQSLFVTECIKTYNSDWHLVNYKYEDYSGEFRQLPNKVVKLDKLPVHVYEVDEEVDKDEDAASLGSQKGGITKHGWLYKGNMNSAISVTMRSFKRRFFHLIQLGDGSYNLNFYKDEKISKEPKGSIFLDSCMGVVQNNKVRRFAFELKMQDKSSYLLAADSEVEMEEWITILNKILQLNFEAAMQEKRNGDSHEDDEQSKLEGSGSGLDSYLPELAKSAREAEIKLKSESRVKLFYLDPDAQKLDFSSAEPEVKSFEEKFGKRILVKCNDLSFNLQCCVAENEEGPTTNVEPFFVTLSLFDIKYNRKISADFHVDLNHFSVRQMLATTSPALMNGSGQSPSVLKGILHEAAMQYPKQGIFSVTCPHPDIFLVARIEKVLQGSITHCAEPYMKSSDSSKVAQKVLKNAKQACQRLGQYRMPFAWAARTLFKDASGNLDKNARFSAIYRQDSNKLSNDDMLKLLADFRKPEKMAKLPVILGNLDITIDNVSSDFPNYVNSSYIPTKQFETCSKTPITFEVEEFVPCIPKHTQPYTIYTNHLYVYPKYLKYDSQKSFAKARNIAICIEFKDSDEEDSQPLKCIYGRPGGPVFTRSAFAAVLHHHQNPEFYDEIKIELPTQLHEKHHLLLTFFHVSCDNSSKGSTKKRDVVETQVGYSWLPLLKDGRVVTSEQHIPVSANLPSGYLGYQELGMGRHYGPEIKWVDGGKPLLKISTHLVSTVYTQDQHLHNFFQYCQKTESGAQALGNELVKYLKSLHAMEGHVMIAFLPTILNQLFRVLTRATQEEVAVNVTRVIIHVVAQCHEEGLESHLRSYVKYAYKAEPYVASEYKTVHEELTKSMTTILKPSADFLTSNKLLKYSWFFFDVLIKSMAQHLIENSKVKLLRNQRFPASYHHAVETVVNMLMPHITQKFRDNPEASKNANHSLAVFIKRCFTFMDRGFVFKQINNYISCFAPGDPKTLFEYKFEFLRVVCNHEHYIPLNLPMPFGKGRIQRYQDLQLDYSLTDEFCRNHFLVGLLLREVGTALQEFREVRLIAISVLKNLLIKHSFDDRYASRSHQARIATLYLPLFGLLIENVQRINVRDVSPFPVNAGMTVKDESLALPAVNPLVTPQKGSTLDNSLHKDLLGAISGIASPYTTSTPNINSVRNADSRGSLISTDSGNSLPERNSEKSNSLDKHQQSSTLGNSVVRCDKLDQSEIKSLLMCFLYILKSMSDDALFTYWNKASTSELMDFFTISEVCLHQFQYMGKRYIARTGMMHARLQQLGSLDNSLTFNHSYGHSDADVLHQSLLEANIATEVCLTALDTLSLFTLAFKNQLLADHGHNPLMKKVFDVYLCFLQKHQSETALKNVFTALRSLIYKFPSTFYEGRADMCAALCYEILKCCNSKLSSIRTEASQLLYFLMRNNFDYTGKKSFVRTHLQVIISVSQLIADVVGIGGTRFQQSLSIINNCANSDRLIKHTSFSSDVKDLTKRIRTVLMATAQMKEHENDPEMLVDLQYSLAKSYASTPELRKTWLDSMARIHVKNGDLSEAAMCYVHVTALVAEYLTRKEAVQWEPPLLPHSHSACLRRSRGGVFRQGCTAFRVITPNIDEEASMMEDVGMQDVHFNEDVLMELLEQCADGLWKAERYELIADIYKLIIPIYEKRRDFERLAHLYDTLHRAYSKVTEVMHSGRRLLGTYFRVAFFGQGFFEDEDGKEYIYKEPKLTPLSEISQRLLKLYSDKFGSENVKMIQDSGKVNPKDLDSKYAYIQVTHVIPFFDEKELQERKTEFERSHNIRRFMFEMPFTQTGKRQGGVEEQCKRRTILTAIHCFPYVKKRIPVMYQHHTDLNPIEVAIDEMSKKVAELRQLCSSAEVDMIKLQLKLQGSVSVQVNAGPLAYARAFLDDTNTKRYPDNKVKLLKEVFRQFVEACGQALAVNERLIKEDQLEYQEEMKANYREMAKELSEIMHEQICPLEEKTSVLPNSLHIFNAISGTPTSTMVHGMTSSSSVV

SEQ ID NO: 7798 - protein, 2069 aa, Homo sapiens
MSQPPLLPASAETRKFTRALSKPGTAAELRQSVSEVVRGSVLLAKPKLIEPLDYENVIVQKKTQILNDCLREMLLFPYDDFQTAILRRQGRYICSTVPAKAEEEAQSLFVTECIKTYNSDWHLVNYKYEDYSGEFRQLPNKVVKLDKLPVHVYEVDEEVDKDEDAASLGSQKGGITKHGWLYKGNMNSAISVTMRSFKRRFFHLIQLGDGSYNLNFYKDEKISKEPKGSIFLDSCMGVVQNNKVRRFAFELKMQDKSSYLLAADSEVEMEEWITILNKILQLNFEAAMQEKRNGDSHEDDEQSKLEGSGSGLDSYLPELAKSAREAEIKLKSESRVKLFYLDPDAQKLDFSSAEPEVKSFEEKFGKRILVKCNDLSFNLQCCVAENEEGPTTNVEPFFVTLSLFDIKYNRKISADFHVDLNHFSVRQMLATTSPALMNGSGQSPSVLKGILHEAAMQYPKQGIFSVTCPHPDIFLVARIEKVLQGSITHCAEPYMKSSDSSKVAQKVLKNAKQACQRLGQYRMPFAWAARTLFKDASGNLDKNARFSAIYRQDSNKLSNDDMLKLLADFRKPEKMAKLPVILGNLDITIDNVSSDFPNYVNSSYIPTKQFETCSKTPITFEVEEFVPCIPKHTQPYTIYTNHLYVYPKYLKYDSQKSFAKARNIAICIEFKDSDEEDSQPLKCIYGRPGGPVFTRSAFAAVLHHHQNPEFYDEIKIELPTQLHEKHHLLLTFFHVSCDNSSKGSTKKRDVVETQVGYSWLPLLKDGRVVTSEQHIPVSANLPSGYLGYQELGMGRHYGPEIKWVDGGKPLLKISTHLVSTVYTQDQHLHNFFQYCQKTESGAQALGNELVKYLKSLHAMEGHVMIAFLPTILNQLFRVLTRATQEEVAVNVTRVIIHVVAQCHEEGLESHLRSYVKYAYKAEPYVASEYKTVHEELTKSMTTILKPSADFLTSNKLLKYSWFFFDVLIKSMAQHLIENSKVKLLRNQRFPASYHHAVETVVNMLMPHITQKFRDNPEASKNANHSLAVFIKRCFTFMDRGFVFKQINNYISCFAPGDPKTLFEYKFEFLRVVCNHEHYIPLNLPMPFGKGRIQRYQDLQLDYSLTDEFCRNHFLVGLLLREVGTALQEFREVRLIAISVLKNLLIKHSFDDRYASRSHQARIATLYLPLFGLLIENVQRINVRDVSPFPVNAGMTVKDESLALPAVNPLVTPQKGSTLDNSLHKDLLGAISGIASPYTTSTPNINSVRNADSRGSLISTDSGNSLPERNSEKSNSLDKHQQSSTLGNSVVRCDKLDQSEIKSLLMCFLYILKSMSDDALFTYWNKASTSELMDFFTISEVCLHQFQYMGKRYIARTGMMHARLQQLGSLDNSLTFNHSYGHSDADVLHQSLLEANIATEVCLTALDTLSLFTLAFKNQLLADHGHNPLMKKVFDVYLCFLQKHQSETALKNVFTALRSLIYKFPSTFYEGRADMCAALCYEILKCCNSKLSSIRTEASQLLYFLMRNNFDYTGKKSFVRTHLQVIISVSQLIADVVGIGGTRFQQSLSIINNCANSDRLIKHTSFSSDVKDLTKRIRTVLMATAQMKEHENDPEMLVDLQYSLAKSYASTPELRKTWLDSMARIHVKNGDLSEAAMCYVHVTALVAEYLTRKEAVQWEPPLLPHSHSACLRRSRGGVFRQGCTAFRVITPNIDEEASMMEDVGMQDVHFNEDVLMELLEQCADGLWKAERYELIADIYKLIIPIYEKRRDFERLAHLYDTLHRAYSKVTEVMHSGRRLLGTYFRVAFFGQAAQYQFTDSETDVEGFFEDEDGKEYIYKEPKLTPLSEISQRLLKLYSDKFGSENVKMIQDSGKVNPKDLDSKYAYIQVTHVIPFFDEKELQERKTEFERSHNIRRFMFEMPFTQTGKRQGGVEEQCKRRTILTAIHCFPYVKKRIPVMYQHHTDLNPIEVAIDEMSKKVAELRQLCSSAEVDMIKLQLKLQGSVSVQVNAGPLAYARAFLDDTNTKRYPDNKVKLLKEVFRQFVEACGQALAVNERLIKEDQLEYQEEMKANYREMAKELSEIMHEQLG

SEQ ID NO: 7799 - protein, 2061 aa, Homo sapiens
MSQPPLLPASAETRKFTRALSKPGTAAELRQSVSEVVRGSVLLAKPKLIEPLDYENVIVQKKTQILNDCLREMLLFPYDDFQTAILRRQGRYICSTVPAKAEEEAQSLFVTECIKTYNSDWHLVNYKYEDYSGEFRQLPNKVVKLDKLPVHVYEVDEEVDKDEDAASLGSQKGGITKHGWLYKGNMNSAISVTMRSFKRRFFHLIQLGDGSYNLNFYKDEKISKEPKGSIFLDSCMGVVQNNKVRRFAFELKMQDKSSYLLAADSEVEMEEWITILNKILQLNFEAAMQEKRNGDSHEDDEQSKLEGSGSGLDSYLPELAKSAREAEIKLKSESRVKLFYLDPDAQKLDFSSAEPEVKSFEEKFGKRILVKCNDLSFNLQCCVAENEEGPTTNVEPFFVTLSLFDIKYNRKISADFHVDLNHFSVRQMLATTSPALMNGSGQSPSVLKGILHEAAMQYPKQGIFSVTCPHPDIFLVARIEKVLQGSITHCAEPYMKSSDSSKVAQKVLKNAKQACQRLGQYRMPFAWAARTLFKDASGNLDKNARFSAIYRQDSNKLSNDDMLKLLADFRKPEKMAKLPVILGNLDITIDNVSSDFPNYVNSSYIPTKQFETCSKTPITFEVEEFVPCIPKHTQPYTIYTNHLYVYPKYLKYDSQKSFAKARNIAICIEFKDSDEEDSQPLKCIYGRPGGPVFTRSAFAAVLHHHQNPEFYDEIKIELPTQLHEKHHLLLTFFHVSCDNSSKGSTKKRDVVETQVGYSWLPLLKDGRVVTSEQHIPVSANLPSGYLGYQELGMGRHYGPEIKWVDGGKPLLKISTHLVSTVYTQDQHLHNFFQYCQKTESGAQALGNELVKYLKSLHAMEGHVMIAFLPTILNQLFRVLTRATQEEVAVNVTRVIIHVVAQCHEEGLESHLRSYVKYAYKAEPYVASEYKTVHEELTKSMTTILKPSADFLTSNKLLKYSWFFFDVLIKSMAQHLIENSKVKLLRNQRFPASYHHAVETVVNMLMPHITQKFRDNPEASKNANHSLAVFIKRCFTFMDRGFVFKQINNYISCFAPGDPKTLFEYKFEFLRVVCNHEHYIPLNLPMPFGKGRIQRYQDLQLDYSLTDEFCRNHFLVGLLLREVGTALQEFREVRLIAISVLKNLLIKHSFDDRYASRSHQARIATLYLPLFGLLIENVQRINVRDVSPFPVNAGMTVKDESLALPAVNPLVTPQKGSTLDNSLHKDLLGAISGIASPYTTSTPNINSVRNADSRGSLISTDSGNSLPERNSEKSNSLDKHQQSSTLGNSVVRCDKLDQSEIKSLLMCFLYILKSMSDDALFTYWNKASTSELMDFFTISEVCLHQFQYMGKRYIASVRKISSVLGISVDNGYGHSDADVLHQSLLEANIATEVCLTALDTLSLFTLAFKNQLLADHGHNPLMKKVFDVYLCFLQKHQSETALKNVFTALRSLIYKFPSTFYEGRADMCAALCYEILKCCNSKLSSIRTEASQLLYFLMRNNFDYTGKKSFVRTHLQVIISVSQLIADVVGIGGTRFQQSLSIINNCANSDRLIKHTSFSSDVKDLTKRIRTVLMATAQMKEHENDPEMLVDLQYSLAKSYASTPELRKTWLDSMARIHVKNGDLSEAAMCYVHVTALVAEYLTRKEAVQWEPPLLPHSHSACLRRSRGGVFRQGCTAFRVITPNIDEEASMMEDVGMQDVHFNEDVLMELLEQCADGLWKAERYELIADIYKLIIPIYEKRRDFERLAHLYDTLHRAYSKVTEVMHSGRRLLGTYFRVAFFGQAAQYQFTDSETDVEGFFEDEDGKEYIYKEPKLTPLSEISQRLLKLYSDKFGSENVKMIQDSGKVNPKDLDSKYAYIQVTHVIPFFDEKELQERKTEFERSHNIRRFMFEMPFTQTGKRQGGVEEQCKRRTILTAIHCFPYVKKRIPVMYQHHTDLNPIEVAIDEMSKKVAELRQLCSSAEVDMIKLQLKLQGSVSVQVNAGPLAYARAFLDDTNTKRYPDNKVKLLKEVFRQFVEACGQALAVNERLIKEDQLEYQEEMKANYREMAKELSEIMHEQLG

SEQ ID NO: 7800 - protein, 655 aa, Homo sapiens
MAEAPQVVEIDPDFEPLPRPRSCTWPLPRPEFSQSNSATSSPAPSGSAAANPDAAAGLPSASAAAVSADFMSNLSLLEESEDFPQAPGSVAAAVAAAAAAAATGGLCGDFQGPEAGCLHPAPPQPPPPGPVSQHPPVPPAAAGPLAGQPRKSSSSRRNAWGNLSYADLITKAIESSAEKRLTLSQIYEWMVKSVPYFKDKGDSNSSAGWKNSIRHNLSLHSKFIRVQNEGTGKSSWWMLNPEGGKSGKSPRRRAASMDNNSKFAKSRSRAAKKKASLQSGQEGAGDSPGSQFSKWPASPGSHSNDDFDNWSTFRPRTSSNASTISGRLSPIMTEQDDLGEGDVHSMVYPPSAAKMASTLPSLSEISNPENMENLLDNLNLLSSPTSLTVSTQSSPGTMMQQTPCYSFAPPNTSLNSPSPNYQKYTYGQSSMSPLPQMPIQTLQDNKSSYGGMSQYNCAPGLLKELLTSDSPPHNDIMTPVDPGVAQPNSRVLGQNVMMGPNSVMSTYGSQASHNKMMNPSSHTHPGHAQQTSAVNGRPLPHTVSTMPHTSGMNRLTQVKTPVQVPLPHPMQMSALGGYSSVSSCNGYGRMGLLHQEKLPSDLDGMFIERLDCDMESIIRNDLMDGDTLDFNFDNVLPNQSFPHSVKTTTHSWVSG

SEQ ID NO: 7801 - protein, 414 aa, Homo sapiens
MSEYIRVTEDENDEPIEIPSEDDGTVLLSTVTAQFPGACGLRYRNPVSQCMRGVRLVEGILHAPDAGWGNLVYVVNYPKDNKRKMDETDASSAVKVKRAVQKTSDLIVLGLPWKTTEQDLKEYFSTFGEVLMVQVKKDLKTGHSKGFGFVRFTEYETQVKVMSQRHMIDGRWCDCKLPNSKQSQDEPLRSRKVFVGRCTEDMTEDELREFFSQYGDVMDVFIPKPFRAFAFVTFADDQIAQSLCGEDLIIKGISVHISNAEPKHNSNRQLERSGRFGGNPGGFGNQGGFGNSRGGGAGLGNNQGSNMGGGMNFGAFSINPAMMAAAQAALQSSWGMMGMLASQQNQSGPSGNNQNQGNMQREPNQAFGSGNNSYSGSNSGAAIGWGSASNAGSGSGFNGGFGSSMDSKSSGWGM

SEQ ID NO: 7802 - protein, 1078 aa, Homo sapiens
PPGPERSRLGLGVSLHQRSCPKCIAVFTRVSEPRIQFPASRILPSSNTSKDFDPVSGQSNYGGSQGSGQTLNRPPVASNPVTPSLHSGPAPRMPLPASQNPATTPMPSSSFLPEANLPPPLNWQYNYPSTASQTNHCPRASSQPTVSGNTSLTTNHQYVSSGYPSLQNSFIKSGPSVPPLVNPPLPTTFQPGAPHGPPPAGGPPPVRALTPLTSSYRDVPQPLFNSAVNQEGITSNTNNGSMVVHSSYDEIEGGGLLATPQLTNKNPKMSRSVGYSYPSLPPGYQNTTPPGATGVPPSSLNYPSGPQAFTQTPLGANHLTTSMSGLSLQPEGLRVVNLLQERNMLPSTPLKPPVPNLHEDIQKLNCNPELFRCTLTSIPQTQALLNKAKLPLGLLLHPFKDLVQLPVVTSSTIVRCRSCRTYINPFVSFLDQRRWKCNLCYRVNDVPEEFLYNPLTRVYGEPHRRPEVQNATIEFMAPSEYMLRPPQPPVYLFVFDVSHNAVETGYLNSVCQSLLDNLDLLPGNTRTKIGFITFDSTIHFYGLQESLSQPQMLIVSDIEDVFIPMPENLLVNLNESKELVQDLLKTLPQMFTKTLETQSALGPALQAAFKLMSPTGGRMSVFQTQLPTLGVGALKPREEPNHRSSAKDIHMTPSTDFYKKLALDCSGQQVAVDLFLLSGQYSDLASLGCISRYSAGSVYYYPSYHHQHNPVQVQKLQKELQRYLTRKIGFEAVMRIRCTKGLSIHTFHGNFFVRSTDLLSLPNVNPDAGYAVQMSVEESLTDTQLVSFQSALLYTSSKGERRIRVHTLCLPVVSTLNDVFLGADVQAISGLLANMAVDRSMTASLSDARDALVNAVIDSLSAYRSSVLSNQQPGLMVPFSLRLFPLFVLALLKQKSFQTGTNARLDERIFAMCQVKNQPLVYLMLTTHPSLYRVDNLSDEGALNISDRTIPQPPILQLSVEKLSRDGAFLMDAGSVLMLWVGKNCTQNFLSQVLGVQNYASIPQPMTDLPELDTPESARIIAFISWLREQRPFFPILYVIRDESPMKANFLQNMIEDRTESALSYYEFLLHIQQQVNK

SEQ ID NO: 7803 - protein, 399 aa, Homo sapiens
VDEKVIILVHYLLYKYQMKEPITKADMLRNVTQMSKSQFPVILSRASEHLELIFGLDLKEVEPNKHIYVLVNKLDLGCDAKLSDETGVPKTGLLMTVLGIIFTNGNCVAEEEVWKVFNTMGLYDGIEHFMFGEPRKLLTKDLVKENYLEYQQVPNSDPPRYQFLWGPRAHAETSKMKVLEFLAKVNDTAPSEFSNWSKGKDPERTGVKGVPLVRPVFRTEGPRKVPPLRNPHGPQRATCTTTTAAAVSYVRSNESTNNQTEERPRSSQALAANEHMTRSPLDEKVFILVHYLLYKYQMKELIIKAAMLKDIVQIPRRYFSEIWGKFHHLEMVFGLDLKEMDPDRHIYFLINTLVPTYDAKLSDDRRVPRTGLLMTILGVIFTNGNCATEEQIWQVLNVM

SEQ ID NO: 7804 - protein, 347 aa, Homo sapiens
MPRGQESKLRAREKRRQARGGLEDLIDALDILEEEEESPPSASACLKDVSQSSLDGASNNPHGLQEARSTSTSATAASHTRHPEGVNDQMEERPICTQDLEATDSFPRGPVDEKVIILVHYLLYKYQMKEPITKADMLRNVTQMSKSQFPVILSRASEHLELILGLDLKEVEPNKHIYVLVNKLDLGCDAKLSDETGVPKTGLLMTVLGIIFTNGNCVAEEEVWKVFNTMGLYDGIEHFMFGEPRKLLTKDLVKENYLEYQQVPNSDPPRYQFLWGPRAHAETSKMKVLEFLAKVNDTAPSEFSNWYTEALQDEEERARARVAAKARVSATAGARSKVKSSKSSQLQ

SEQ ID NO: 7805 - protein, 860 aa, Homo sapiens [sequence omitted]

SEQ ID NO: 7806 - protein, 626 aa, Homo sapiens
MCEVLDIHNIDEQPRPLTDSHRVKFTKEIKGLKVEVTHCGTMRRKYRVCNVTRRPASHQTFPLQLENGQTVERTVAQYFREKYTLQLKYPHLPCLQVGQEQKHTYLPLEVCNIVAGQRCIKKLTDNQTSTMIKATARSAPDRQEEISRLVRSANYETDPFVQEFQFKVRDEMAHVTGRVLPAPMLQYGGRNRTVATPSHGVWDMRGKQFHTGVEIKMWAIACFATQRQCREEILKGFTDQLRKISKDAGMPIQGQPCFCKYAQGADSVEPMFRHLKNTYSGLQLIIVILPGKTPVYAEVKRVGDTLLGMATQCVQVKNVIKTSPQTLSNLCLKINVKLGGINNILVPHQRPSVFQQPVIFLGADVTHPPAGDGKKPSIAAVVGSMDAHPSRYCATVRVQRPRQEIIQDLASMVRELLIQFYKSTRFKPTRIIFYRDGVSEGQFRQVLYYELLAIREACISLEKDYQPGITYIVVQKRHHTRLFCADRTERVGRSGNIPAGTTVDTDITHPYEFDFYLCSHAGIQGTSRPSHYHVLWDDNCFTADELQLLTYQLCHTYVRCTRSVSIPAPAYYAHLVAFRARYHLVDKEHDSAEGSHVSGQSNGRDPQALAKAVQIHQDTLRTMYFA

SEQ ID NO: 7807 - protein, 2095 aa, Homo sapiens
MADADILSETFQLLIDSAKDFSKRLWGLVPFGLYLPAPPLYCPQPAILSEEDGDDLLLKAEKNNRQKVSGILQRVLLLFRAAQCSFPVAQWYILQLRWARKVMQKIRMKGSLPSLSPFPQSLLNYCKGGIAFFRPGAAGDHKLDEVSIRAIGCFRELCALCWMLHVRDKLSYSCRQYQKARENVKGEKDLEVEFDSCMIEHCLSAVEWAYRMLPFSRFFNMEELIQDIILSLIGELPPIRKVAEIFVKAFPYPEDVRVPLRDKYHSLHQRLRHCVVKGPQTEEMMSVVMHSIQKVRVKALKRVRRNIGSFEVNIWEPIEEEKPDEAPGVDRYSLGTSLSRSTLTELGDSVVHSDADTFSEALSVEEKSRINIYQRNAPNHMELTSIHKPTDKRKMCNQKENPTKKEDHEKLSQNTLPVIGVWEFERDDDEYIKFLDLFLSYILERDLPYSRDADIPFLTSFSGKLREHELNSLLFDVHTTLKRHQSKTKSQNVFRAGSCFVVAPESYESEKSSSLNDEYGMHLENQKLSSSVLVNQGIKPFLQYPSNEVNKNEGMSGLFGLKQRSIYKIQDDTREKCLIQRSSNHIFWTPKSIKTRRCIFKAIQCNDINPQEDLPLALNTFGSIGRLLEWMIRWSNRRLLCDSGITESSSEYSPVIRVKTSTAAILTSLWLLEQPYFATYKAKNAIIKMVENRDTGCQIGPNIERESKSDAGGSVAVATPGGTEERNGQNKSCQNILKMPTEAKNPDIKEINDDIISITHNTKKEFIDIDENLLEVEAFTEEEMDMHISDYEEDIEESVGGFRSPSLAICMMTLPQQLEEEFTEEVQCQREEPLETIMEEKSTEQKGMIEAFSHPGHTTPQSMQVDTSSEISSAQISTYKEKSSSVPLLISNGVNVASQPPAPTPQKTQRNEFTAQLPDCSESVRQMLQDEMFKLVQLQQINFMSLMQIVGSSFANLPDTQQLVQQSQSVHLGESQESNLRGCGDVEDSNKNLKERFFIKPQSMGENAREPRKNSPHCHEGTIPSGQNSTGNVQNVPHGSIPLCQLNGQPRKKGPIPSSQNLPSTSFYPAPAGNTHLYLLSTPSVVQKAPRLIPHAKTFSPGDGFPLLQFKSKQEFQPLFLHTGSIPQVPFRPLPQPREAWGLSDSFQPALPQRAAQTTPASHLNVSQYNTEARKKEVEQKTWAETVITEIPNHVNLDQYVGQENLTPQQDSSVFIKPEKLFDVKPGTLEISPHHSFGLPLLYLPLKPPNMFPSTSRASITVPSTPIQPIAEERKYPRLSLLHSHLSPENRCKKTQLIPLENLIAFKQSQQKLTHNLFEQGDAGHLQLLKVKIEPPEVRQGKDSKKRQRRRAEKELQEKRCEKLRRKPNVTFRPENSIINNDDSEIIKKPKEQQEHCGSHPLDDFDVPFEMLQDDNTSAGLHFMASVKKKAIGSQDASTNTDPEHEPLTAPQLLVPDVYLNLKLSSEMSEKPWSPSIPHTVTNLVGHTYINVIDIEANDLLQELPVREEPSNDNVIKQQSDHLAVPSSAELHYMAASVTNAVPPHNFKSQGLPKPEFRFKGQSTKSDSAEDYLLWKRLQGVSAACPAPSSAAHQLEHLSAKLQKIDEQLLAIQNIAENIEQDFPKPEMLDLHCDKIGPVDHIEFSSGPEFKKTLASKTISISEEVRFLTHMDEEDQSDKKETSEPEFSITENYSGQKTCVFPTADSAVSLSSSSDQNTTSPGMNSSDELCESVSVHPLQMTGLTDIADIIDDLIIKDGVSSEELGLTEQAMGTSRIQHYSGRHSQRTDKERREIQAWMKRKRKERMAKYLNELAEKRGQEHDPFCPRSNPLYMTSREIRLRQKMKHEKDRLLLSEHYSRRISQAYGLMNELLSESVQLPTLPQKPLPNKPSPTQSSSCQHCPSPRGENQHGHSFLINRPGKVKYMSKPSYIHKRKSFGQPQGSPWPHGTATFTIQKKAGGAKAAVRKATQSPVTFQKGSNAPCHSLQHTKKHGSAGLAPQTKQVCVEYEREETVVSPWTIPSEIHKILHESHNSLLQDLSPTEEEEPEHPFGVGGVDSVSESTGSILSKLDWNAIEDMVASVEDQGLSVHWALDL

SEQ ID NO: 7808 - protein, 919 aa, Homo sapiens
MASATAAAARRGLGRALPLLWRGYQTERGVYGYRPRKPESREPQGALERPPVDHGLARLVTVYCEHGHKAAKINPLFTGQALLENVPEIQALVQTLQGPFHTAGLLNMGKEEASLEEVLVYLNQIYCGQISIETSQLQSQDEKDWFAKRFEELQKETFTTEERKHLSKLMLESQEFDHFLATKFSTVKRYGGEGAESMMGFFHELLKMSAYSGITDVIIGMPHRGRLNLLTGLLQFPPELMFRKMRGLSEFPENFSATGDVLSHLTSSVDLYFGAHHPLHVTMLPNPSHLEAVNPVAVGKTRGRQQSRQDGDYSPDNSAQPGDRVICLQVHGDASFCGQGIVPETFTLSNLPHFRIGGSVHLIVNNQLGYTTPAERGRSSLYCSDIGKLVGCAIIHVNGDSPEEVVRATRLAFEYQRQFRKDVIIDLLCYRQWGHNELDEPFYTNPIMYKIIRARKSIPDTYAEHLIAGGLMTQEEVSEIKSSYYAKLNDHLNNMAHYRPPALNLQAHWQGLAQPEAQITTWSTGVPLDLLRFVGMKSVEVPRELQMHSHLLKTHVQSRMEKMMDGIKLDWATAEALALGSLLAQGFNVRLSGQDVGRGTFSQRHAIVVCQETDDTYIPLNHMDPNQKGFLEVSNSPLSEEAVLGFEYGMSIESPKLLPLWEAQFGDFFNGAQIIFDTFISGGEAKWLLQSGIVILLPHGYDGAGPDHSSCRIERFLQMCDSAEEGVDGDTVNMFVVHPTTPAQYFHLLRRQMVRNFRKPLIVASPKMLLRLPAAVSTLQEMAPGTTFNPVIGDSSVDPKKVKTLVFCSGKHFYSLVKQRESLGAKKHDFAIIRVEELCPFPLDSLQQEMSKYKHVKDHIWSQEEPQNMGPWSFVSPRFEKQLACKLRLVGRPPLPVPAVGIGTVHLHQHEDILAKTFA

SEQ ID NO: 7809 - protein, 179 aa, Homo sapiens
MASLMGFSGGCYCRVSGTDYYCSALEMLNLSSYPIWVSLFRGSPRRAASCQYPLSLQHPSSSSPTWTQDPEPTEGMERTSRAPQVGGPIPWGQAHLRTSLELQGCESQPHTALTPAPLSQTLRLLSSFAIRCSILGKLGWERLHKTSLLPLTLAPPISGSRPGDATSSVCPAVSFYVGE

SEQ ID NO: 7810 - protein, 224 aa, Homo sapiens
MTSEVIEDEKQFYSKAKTYWKQIPPTVDGMLGGYGHISSSIDINSSRKFLQRFLREGPNKTGTSCALDCGAGIGRITKRLLLPLFREVDMVDITEDFLVQAKTYLGEEGKRVRNYFCCGLQDFTPEPDSYDVIWIQWVIGHLTDQHLAEFLRRCKGSLRPNGIIVIKDNMAQEGVILDDVDSSVCRDLDVVRRIICSAGLSLLAEERQENLPDEIYHVYSFALR

SEQ ID NO: 7811 - protein, 405 aa, Homo sapiens
MFVQEEKIFAGKVLRLHICASDGAEWLEEATEDTSVEKLKERCLKHCAHGSLEDPKSITHHKLIHAASERVLSDARTILEENIQDQDVLLLIKKRAPSPLPKMADVSAEEKKKQDQKAPDKEAILRATANLPSYNMDRAAVQTNMRDFQTELRKILVSLIEVAQKLLALNPDAVELFKKANAMLDEDEDERVDEAALRQLTEMGFPENRATKALQLNHMSVPQAMEWLIEHAEDPTIDTPLPGQAPPEAEGATAAASEAAAGASATDEEARDELTEIFKKIRRKREFRADARAVISLMEMGFDEKEVIDALRVNNNQQNAACEWLLGDRKPSPEELDKGIDPDSPLFQAILDNPVVQLGLTNPKTLLAFEDMLENPLNSTQWMNDPETGPVMLQISRIFQTLNRT

SEQ ID NO: 7812 - protein, 517 aa, Homo sapiens
MSLGSELFRDVAIVFSQEEWQWLAPAQRDLYRDVMLETYSNLVSLGLAVSKPDVISFLEQGKEPWMVERVVSGGLCPVLESRYDTKELFPKQHVYEVESPQWEIMESLTSYGLECSSFQDDWECRNQFDRQQGNPDRHFHQMIIRHEEMPTFDQHASLTFYQKIHTREKPFGYNKCRKDFWQKELLINHQGIYTNEKPYKCKECGKAFKYGSRLIQHENIHSGKKPYECKECGKAFNSGSNFIQHQRVHTGEKPYECKDCEKAFSRSSQLIEHQRTHTGEKPYQCKECGKAFNRISHLKVHYRIHTGEKPYACKECGKTFSHRSQLIQHQTVHTGRKLYECKECGKAFNQGSTLIRHQRIHTGEKPYECKVCGKAFRVSSQLKQHQRIHTGEKPYQCKVCGRAFKRVSHLTVHYRIHTGEKPYECKECGKAFSHCSQLIHHQVIHTEKKPYEYKECEKTLSHDSTTVQPQRMHNRETHVNIINVEKPSISSYPLLIIREFMLASNHMNGSNGESPLA

SEQ ID NO: 7813 - protein, 729 aa, Homo sapiens
MNKGWLELESDPGLFTLLVEDFGVKGVQVEEIYDLQSKCQGPVYGFIFLFKWIEERRSRRKVSTLVDDTSVIDDDIVNNMFFAHQLIPNSCATHALLSVLLNCSSVDLGPTLSRMKDFTKGFSPESKGYAIGNAPELAKAHNSHARPEPRHLPEKQNGLSAVRTMEAFHFVSYVPITGRLFELDGLKVYPIDHGPWGEDEEWTDKARRVIMERIGLATAGEPYHDIRFNLMAVVPDRRIKYEARLHVLKVNRQTVLEALQQLIRVTQPELIQTHKSQESQLPEESKSASNKSPLVLEANRAPAASEGNHTDGAEEAAGSCAQAPSHSPPNKPKLVVKPPGSSLNGVHPNPTPIVQRLPAFLDNHNYAKSPMQEEEDLAAGVGRSRVPVRPPQQYSDDEDDYEDDEEDDVQNTNSALRYKGKGTGKPGALSGSADGQLSVLQPNTINVLAEKLKESQKDLSIPLSIKTSSGAGSPAVAVPTHSQPSPTPSNESTDTASEIGSAFNSPLRSPIRSANPTRPSSPVTSHISKVLFGEDDSLLRVDCIRYNRAVRDLGPVISTGLLHLAEDGVLSPLALTEGGKGSSPSIRPIQGSQGSSSPVEKEVVEATDSREKTGMVRPGEPLSGEKYSPKELLALLKCVEAEIANYEACLKEEVEKRKKFKIDDQRRTHNYDEFICTFISMLAQEGMLANLVEQNISVRRRQGVSIGRLHKQRKPDRRKRSRPYKAKRQ

SEQ ID NO: 7814 - protein, 1490 aa, Homo sapiens
MPNSERHGGKKDGSGGASGTLQPSSGGGSSNSRERHRLVSKHKRHKSKHSKDMGLVTPEAASLGTVIKPLVEYDDISSDSDTFSDDMAFKLDRRENDERRGSDRSDRLHKHRHHQHRRSRDLLKAKQTEKEKSQEVSSKSGSMKDRISGSSKRSNEETDDYGKAQVAKSSSKESRSSKLHKEKTRKERELKSGHKDRSKSHRKRETPKSYKTVDSPKRRSRSPHRKWSDSSKQDDSPSGASYGQDYDLSPSRSHTSSNYDSYKKSPGSTSRRQSVSPPYKEPSAYQSSTRSPSPYSRRQRSVSPYSRRRSSSYERSGSYSGRSPSPYGRRRSSSPFLSKRSLSRSPLPSRKSMKSRSRSPAYSRHSSSHSKKKRSSSRSRHSSISPVRLPLNSSLGAELSRKKKERAAAAAAAKMDGKESKGSPVFLPRKENSSVEAKDSGLESKKLPRSVKLEKSAPDTELVNVTHLNTEVKNSSDTGKVKLDENSEKHLVKDLKAQGTRDSKPIALKEEIVTPKETETSEKETPPPLPTIASPPPPLPTTTPPPQTPPLPPLPPIPALPQQPPLPPSQPAFSQVPASSTSTLPPSTHSKTSAVSSQANSQPPVQVSVKTQVSVTAAIPHLKTSTLPPLPLPPLLPGGDDMDSPKETLPSKPVKKEKEQRTRHLLTDLPLPPELPGGDLSPPDSPEPKAITPPQQPYKKRPKICCPRYGERRQTESDWGKRCVDKFDIIGIIGEGTYGQVYKARDKDTGELVALKKVRLDNEKEGFPITAIREIKILRQLIHRSVVNMKEIVTDKQDALDFKKDKGAFYLVFEYMDHDLMGLLESGLVHFSEDHIKSFMKQLMEGLEYCHKKNFLHRDIKCSNILLNNSGQIKLADFGLARLYNSEESRPYTNKVITLWYRPPELLLGEERYTPAIDVWSCGCILGELFTKKPIFQANLELAQLELISRLCGSPCPAVWPDVIKLPYFNTMKPKKQYRRRLREEFSFIPSAALDLLDHMLTLDPSKRCTAEQTLQSDFLKDVELSKMAPPDLPHWQDCHELWSKKRRRQRQSGVVVEEPPPSKTSRKETTSGTSTEPVKNSSPAPPQPAPGKVESGAGDAIGLADITQQLNQSELAVLLNLLQSQTDLSIPQMAQLLNIHSNPEMQQQLEALNQSISALTEATSQQQDSETMAPEESLKEAPSAPVILPSAEQMTLEASSTPADMQNILAVLLSQLMKTQEPAGSLEENNSDKNSGPQGPRRTPTMPQEEAAACPPHILPPEKRPPEPPGPPPPPPPPPLVEGDLSSAPQELNPAVTAALLQLLSQPEAEPPGHLPHEHQALRPMEYSTRPRPNRTYGNTDGPETGFSAIDTDERNSGPALTESLVQTLVKNRTFSGSLSHLGESSSYQGTGSVQFPGDQDLRFARVPLALHPVVGQPFLKAEGSSNSVVHAETKLQNYGELGPGTTGASSSGAGLHWGGPTQSSAYGKLYRGPTRVPPRGGRGRGVPY

SEQ ID NO: 7815 - protein, 2677 aa, Homo sapiens
MSTCCWCTPGGASTIDFLKRYASNTPSGEFQTADEDLCYCLECVAEYHKARDELPFLHEVLWELETLRLINHFEKSMKAEIGDDDELYIVDNNGEMPLFDITGQDFENKLRVPLLEILKYPYLLLHERVNELCVEALCRMEQANCSFQVFDKHPGIYLFLVHPNEMVRRWAILTARNLGKVDRDDYYDLQEVLLCLFKVIELGLLESPDIYTSSVLEKGKLILLPSHMYDTTNYKSYWLGICMLLTILEEQAMDSLLLGSDKQNDFMQSILHTMEREADDDSVDPFWPALHCFMVILDRLGSKVWGQLMDPIVAFQTIINNASYNREIRHIRNSSVRTKLEPESYLDDMVTCSQIVYNYNPEKTKKDSGWRTAICPDYCPNMYEEMETLASVLQSDIGQDMRVHNSTFLWFIPFVQSLMDLKDLGVAYIAQVVNHLYSEVKEVLNQTDAVCDKVTEFFLLILVSVIELHRNKKCLHLLWVSSQQWVEAVVKCAKLPTTAFTRSSEKSSGNCSKGTAMISSLSLHSMPSNSVQLAYVQLIRSLLKEGYQLGQQSLCKRFWDKLNLFLRGNLSLGWQLTSQETHELQSCLKQIIRNIKFKAPPCNTFVDLTSACKISPASYNKEESEQMGKTSRKDMHCLEASSPTFSKEPMKVQDSVSIKADNTIEGDNNEQNYIKDVKLEDHLLAGSCLKQSSKNIFTERAEDQIKISTRKQKSVKEISSYTPKDCTSRNGPERGCDRGIIVSTRLLTDSSTDALEKVSTSNEDFSLKDDALAKTSKRKTKVQKDEICAKLSHVIKKQHRKSTLVDNTINLDENLTVSNIESFYSRKDTGVQKGDGFIHNLSLDPSGVLDDKNGEQKSQNNVLPKEKQLKNEELVIFSFHENNCKIQEFHVDGKELIPFTEMTNASEKKSSPFKDLMTVPESRDEEMSNSTSVIYSNLTREQAPDISPKSDTLTDSQIDRDLHKLSLLAQASVITFPSDSPQNSSQLQRKVKEDKRCFTANQNNVGDTSRGQVIIISDSDDDDDERILSLEKLTKQDKICLEREHPEQHVSTVNSKEEKNPVKEEKTETLFQFEESDSQCFEFESSSEVFSVWQDHPDDNNSVQDGEKKCLAPIANTTNGQGCTDYVSEVVKKGAEGIEEHTRPRSISVEEFCEIEVKKPKRKRSEKPMAEDPVRPSSSVRNEGQSDTNKRELVGNDFKSIDRRTSTPNSRIQRATTVSQKKSSKLCTCTEPIRKVPVSKTPKKTHSDAKKRQNRSSNYLSCRTTPAIVPPKKFRQCPEPTSTAEKLGLKKGPRKAYELSQRSLDYVAQLRDHGKTVGVVDTRKKTKLISPQNLSVRNNKKLLTSQELQMQRQIRPKSQKNRRRLSDCESTDVKRAGSHTAQNSDVFVPESDRSDYNCTGGTEVLANSNRKQLIKCMPSEPETIKAKHGSPATDDACPLNQCDSVVLNGTVPTNEVIVSTSEDPLGGGDPTARHIEMAALKEGEPDSSSDAEEDNLFLTQNDPEDMDLCSQMENDNYKLIELIHGKDTVEVEEDSVSRPQLESLSGTKCKYKDCLETTKNQGEYCPKHSEVKAADEDVFRKPGLPPPASKPLRPTTKIFSSKSTSRIAGLSKSLETSSALSPSLKNKSKGIQSILKVPQPVPLIAQKPVGEMKNSCNVLHPQSPNNSNRQGCKVPFGESKYFPSSSPVNILLSSQSVSDTFVKEVLKWKYEMFLNFGQCGPPASLCQSISRPVPVRFHNYGDYFNVFFPLMVLNTFETVAQEWLNSPNRENFYQLQVRKFPADYIKYWEFAVYLEECELAKQLYPKENDLVFLAPERINEEKKDTKRNDIQDLHEYHSGYVHKFRRTSVMRNGKTECYLSIQTQENFPANLNELVNCIVISSLVTTQRKLKAMSLLGSRNQLARAVLNPNPMDFCTKDLLTTTSERIIAYLRDFNEDQKKAIETAYAMVKHSPSVAKICLIHGPPGTGKSKTIVGLLYRLLTENQRKGHSDENSNAKIKQNRVLVCAPSNAAVDELMKKIILEFKEKCKDKKNPLGNCGDINLVRLGPEKSINSEVLKFSLDSQVNHRMKKELPSHVQAMHKRKEFLDYQLDELSRQRALCRGGREIQRQELDENISKVSKERQELASKIKEVQGRPQKTQSIIILESHIICCTLSTSGGLLLESAFRGQGGVPFSCVIVDEAGQSCEIETLTPLIHRCNKLILVGDPKQLPPTVISMKAQEYGYDQSMMARFCRLLEENVEHNMISRLPILQLTVQYRMHPDICLFPSNYVYNRNLKTNRQTEAIRCSSDWPFQPYLVFDVGDGSERRDNDSYINVQEIKLVMEIIKLIKDKRKDVSFRNIGIITHYKAQKTMIQKDLDKEFDRKGPAEVDTVDAFQGRQKDCVIVTCVRANSIQGSIGFLASLQRLNVTITRAKYSLFILGHLRTLMENQHWNQLIQDAQKRGAIIKTCDKNYRHDAVKILKLKPVLQRSLTHPPTIAPEGSRPQGGLPSSKLDSGFAKTSVAASLYHTPSDSKEITLTVTSKDPERPPVHDQLQDPRLLKRMGIEVKGGIFLWDPQPSSPQHPGATPPTGEPGFPVVHQDLSHIQQPAAVVAALSSHKPPVRGEPPAASPEASTCQSKCDDPEEELCHRREARAFSEGEQEKCGSETHHTRRNSRWDKRTLEQEDSSSKKRKLL

SEQ ID NO: 7816 - protein, 749 aa, Homo sapiens
MSFIDPYQHIIVEHQYSHKFTVVVLRATKVTKGAFGDMLDTPDPYVELFISTTPDSRKRTRHFNNDINPVWNETFEFILDPNQENVLEITLMDANYVMDETLGTATFTVSSMKVGEKKEVPFIFNQVTEMVLEMSLEVCSCPDLRFSMALCDQEKTFRQQRKEHIRESMKKLLGPKNSEGLHSARDVPVVAILGSGGGFRAMVGFSGVMKALYESGILDCATYVAGLSGSTWYMSTLYSHPDFPEKGPEEINEELMKNVSHNPLLLLTPQKVKRYVESLWKKKSSGQPVTFTDIFGMLIGETLIHNRMNTTLSSLKEKVNTAQCPLPLFTCLHVKPDVSELMFADWVEFSPYEIGMAKYGTFMAPDLFGSKFFMGTVVKKYEENPLHFLMGVWGSAFSILFNRVLGVSGSQSRGSTMEEELENITTKHIVSNDSSDSDDESHEPKGTENEDAGSDYQSDNQASWIHRMIMALVSDSALFNTREGRAGKVHNFMLGLNLNTSYPLSPLSDFATQDSFDDDELDAAVADPDEFERIYEPLDVKSKKIHVVDSGLTFNLPYPLILRPQRGVDLIISFDFSARPSDSSPPFKELLLAEKWAKMNKLPFPKIDPYVFDREGLKECYVFKPKNPDMEKDCPTIIHFVLANINFRKYKAPGVPRETEEEKEIADFDIFDDPESPFSTFNFQYPNQAFKRLHDLMHFNTLNNIDVIKEAMVESIEYRRQNPSRCSVSLSNVEARRFFNKEFLSKPKA

SEQ ID NO: 7817 - protein, 1258 aa, Homo sapiens
MITSELPVLQDSTNETTAHSDAGSELEETEVKGKRKRGRPGRPPSTNKKPRKSPGEKSRIEAGIRGAGRGRANGHPQQNGEGEPVTLFEVVKLGKSAMQSVVDDWIESYKQDRDIALLDLINFFIQCSGCRGTVRIEMFRNMQNAEIIRKMTEEFDEDSGDYPLTMPGPQWKKFRSNFCEFIGVLIRQCQYSIIYDEYMMDTVISLLTGLSDSQVRAFRHTSTLAAMKLMTALVNVALNLSIHQDNTQRQYEAERNKMIGKRANERLELLLQKRKELQENQDEIENMMNSIFKGIFVHRYRDAIAEIRAICIEEIGVWMKMYSDAFLNDSYLKYVGWTLHDRQGEVRLKCLKALQSLYTNRELFPKLELFTNRFKDRIVSMTLDKEYDVAVEAIRLVTLILHGSEEALSNEDCENVYHLVYSAHRPVAVAAGEFLHKKLFSRHDPQAEEALAKRRGRNSPNGNLIRMLVLFFLESELHEHAAYLVDSLWESSQELLKDWECMTELLLEEPVQGEEAMSDRQESALIELMVCTIRQAAEAHPPVGRGTGKRVLTAKERKTQIDDRNKLTEHFIITLPMLLSKYSADAEKVANLLQIPQYFDLEIYSTGRMEKHLDALLKQIKFVVEKHVESDVLEACSKTYSILCNEEYTIQNRVDIARSQLIDEFVDRFNHSVEDLLQEGEEADDDDIYNVLSTLKRLTSFQNAHDLTKWDLFGNCYRLLKTGIEHGAMPEQIVVQALQCSHYSILWQLVKITDGSPSKEDLLVLRKTVKSFLAVCQQCLSNVNTPVKEQAFMLLCDLLMIFSHQLMTGGREGLQPLVFNPDTGLQSELLSFVMDHVFIDQDEENQSMEGDEEDEANKIEALHKRRNLLAAFSKLIIYDIVDMHAAADIFKHYMKYYNDYGDIIKETLSKTRQIDKIQCAKTLILSLQQLFNELVQEQGPNLDRTSAHVSGIKELARRFALTFGLDQIKTREAVATLHKDGIEFAFKYQNQKGQEYPPPNLAFLEVLSEFSSKLLRQDKKTVHSYLEKFLTEQMMERREDVWLPLISYRNSLVTGGEDDRMSVNSGSSSSKTSSVRNKKGRPPLHKKRVEDESLDNTWLNRTDTMIQTPGPLPAPQLTSTVLRENSRPMGDQIQEPESEHGSEPDFLHNPQMQISWLGQPKLEDLNRKDRTGMNYMKVRTGVRHAVRGLMEEDAEPIFEDVMMSSRSQLEDMNEEFEDTMVIDLPPSRNRRERAELRPDFFDSAAIIEDDSGFGMPMF

SEQ ID NO: 7818 - protein, 1231 aa, Homo sapiens
MIAAPEIPTDFNLLQESETHFSSDTDFEDIEGKNQKQGKGKTCKKGKKGPAEKGKGGNGGGKPPSGPNRMNGHHQQNGVENMMLFEVVKMGKSAMQSVVDDWIESYKHDRDIALLDLINFFIQCSGCKGVVTAEMFRHMQNSEIIRKMTEEFDEDSGDYPLTMAGPQWKKFKSSFCEFIGVLVRQCQYSIIYDEYMMDTVISLLTGLSDSQVRAFRHTSTLAAMKLMTALVNVALNLSINMDNTQRQYEAERNKMIGKRANERLELLLQKRKELQENQDEIENMMNAIFKGVFVHRYRDAIAEIRAICIEEIGIWMKMYSDAFLNDSYLKYVGWTMHDKQGEVRLKCLTALQGLYYNKELNSKLELFTSRFKDRIVSMTLDKEYDVAVQAIKLLTLVLQSSEEVLTAEDCENVYHLVYSAHRPVAVAAGEFLYKKLFSRRDPEEDGMMKRRGRQGPNANLVKTLVFFFLESELHEHAAYLVDSMWDCATELLKDWECMNSLLLEEPLSGEEALTDRQESALIEIMLCTIRQAAECHPPVGRGTGKRVLTAKEKKTQLDDRTKITELFAVALPQLLAKYSVDAEKVTNLLQLPQYFDLEIYTTGRLEKHLDALLRQIRNIVEKHTDTDVLEACSKTYHALCNEEFTIFNRVDISRSQLIDELADKFNRLLEDFLQEGEEPDEDDAYQVLSTLKRITAFHNAHDLSKWDLFACNYKLLKTGIENGDMPEQIVIHALQCTHYVILWQLAKITESSSTKEDLLRLKKQMRVFCQICQHYLTNVNTTVKEQAFTILCDILMIFSHQIMSGGRDMLEPLVYTPDSSLQSELLSFILDHVFIEQDDDNNSADGQQEDEASKIEALHKRRNLLAAFCKLIVYTVVEMNTAADIFKQYMKYYNDYGDIIKETMSKTRQIDKIQCAKTLILSLQQLFNEMIQENGYNFDRSSSTFSGIKELARRFALTFGLDQLKTREAIAMLHKDGIEFAFKEPNPQGESHPPLNLAFLDILSEFSSKLLRQDKRTVYVYLEKFMTFQMSLRREDVWLPLMSYRNSLLAGGDDDTMSVISGISSRGSTVRSKKSKPSTGKRKVVEGMQLSLTEESSSSDSMWLSREQTLHTPVMMQTPQLTSTIMREPKRLRPEDSFMSVYPMQTEHHQTPLDYNRRGTSLMEDDEEPIVEDVMMSSEGRIEDLNEGMDFDTMDIDLPPSKNRRERTELKPDFFDPASIMDESVLGVSMF

SEQ ID NO: 7819 - protein, 273 aa, Homo sapiens
MKRQGASSERKRARIPSGKAGAANGFLMEVCVDSVESAVNAERGGADRIELCSGLSEGGTTPSMGVLQVVKQSVQIPVFVMIRPRGGDFLYSDREIEVMKADIRLAKLYGADGLVFGALTEDGHIDKELCMSLMAICRPLPVTFHRAFDMVHDPMAALETLLTLGFERVLTSGCDSSALEGLPLIKRLIEQAKGRIVVMPGGGITDRNLQRILEGSGATEFHCSARSTRDSGMKFRNSSVAMGASLSCSEYSLKVTDVTKVRTLNAIAKNILV

SEQ ID NO: 7820 - protein, 651 aa, Homo sapiens
MARVCRRQQCSVERRGFRQELDSWRHKLIHCVGGDGGGGSWSCHSPRVRLTEPSGVSWPRGAAAALPQRAAVAGELILDARVGVSRFPLCGGRRDHKGLTHIFNPPPKRFESILEGLFGPALLKDLSLFKDCEPESISDWTFDENCLFCCLRRDKVKGHLVGLDEPASGAGQEALLKQEQAKIIRFERQAEEFLNAVFYRKDSPWVSDPNIPLVAREIMQRMIQQFAAEYTSKNSSTQDPSQPNSTKNQSLPKASPVTTSPTAATTQNPVLSKLLMADQDSPLDLTVRKSQSEPSEQDGVLDLSTKKSPCAGSTSLSHSPGCSSTQGNGRPGRPSQYRPDGLRSGDGVPPRSLQDGTREGFGHSTSLKVPLARSLQISEELLSRNQLSTAASLGPSGLQNHGQHLILSREASWAKPHYEFNLSRMKFRGNGALSNISDLPFLAENSAFPKMALQAKQDGKKDVSHSSPVDLKIPQVRGMDLSWESRTGDQYSYSSLVMGSQTESALSKKLRAILPKQSRKSMLDAGPDSWGSDAEQSTSGQPYPTSDQEGDPGSKQPRKKRGRYRQYNSEILEEAISVVMSGKMSVSKAQSIYGIPHSTLEYKVKERLGTLKNPPKKKMKLMRSEGPDVSVKIELDPQGEAAQSANESKNE

SEQ ID NO: 7821 - protein, 433 aa, Homo sapiens
MQRMIQQFAAEYTSKNSSTQDPSQPNSTKNQSLPKASPVTTSPTAATTQNPVLSKLLMADQDSPLDLTVRKSQSEPSEQDGVLDLSTKKSPCAGSTSLSHSPGCSSTQGNGRPGRPSQYRPDGLRSGDGVPPRSLQDGTREGFGHSTSLKVPLARSLQISEELLSRNQLSTAASLGPSGLQNHGQHLILSREASWAKPHYEFNLSRMKFRGNGALSNISDLPFLAENSAFPKMALQAKQDGKKDVSHSSPVDLKIPQVRGMDLSWESRTGDQYSYSSLVMGSQTESALSKKLRAILPKQSRKSMLDAGPDSWGSDAEQSTPGQPYPTSDQEGDPGSKQPRKKRGRYRQYNSEILEEAISVVMSGKMSVSKAQSIYGIPHSTLEYKVKERLGTLKNPPKKKMKLMRSEGPDVSVKIELDPQGEAAQSANESKNE

SEQ ID NO: 7822 - protein, 426 aa, Homo sapiens
MCLGSVQWRIRKELDATQRGQGPPEDSAGQIAELSHDMIMEITTLRAQLTDLEEVNLNLKKQIRKEVQEEYEALVRALFETCLHIKEKLDDNQLNLIQKVCELIGEVRTEGIDNMKDLKKKWCSASPDEGMKENPAKEQLWALEQDNCSLANLVCKVRSLGRWRLAVQQACFQAQLSRTEKESIQSKKEYLRIKLMAEREVGLFRQQVLALRQALARAQADSARMWKQQDSQAQLLKELEHRVTQEALTQQQLHFMKTSRMEKLLEDVGQKEQQLQLLSKEAERASKLGQLQQKKMKRDLHQMRSRLAQERSVKLDALQRAEELQGQLHDAQRSAVPMGSSGDLISQAQYSPTSASTSSRYSQQRFLKTNLKGSKITRWIQRPQTVPIKHKKRTDDVFLPNMAENVQLTAFQVQTAPSRFPFRADW

SEQ ID NO: 7823 - protein, 781 aa, Homo sapiens
MDSFDLALLQEWDLESLWGEDILNQRNDSLVVEFQSSASRCRSVYEPDRNALRRKERERRNQETQQDDGTFNSSYSLFSEPYKTNKGDELSNRIQNTLGNYDEMKDFLTDRSNQSHLVGVPKPGVPQTPVNKIDEHFVADSRAQNQPSSICSTTTSTPAAVPVQQSKRGTMGWQKAGHPPSDGQQRATQQGSLRTLLGDGVGRQQPRAKQVCNVEVGLQTQERPPAMAAKHSSSGHCVQNFPPSLASKPSLVQQKPTAYVRPMDGQDQAPDESPKLKSSSETSVHCTSYRGVPASKPEPARAKAKLSKFSIPKQGEESRSGETNSCVEEIIREMTWLPPLSAIQAPGKVEPTKFPFPNKDSQLVSSGHNNPKKGDAEPESPDNGTSNTSMLEDDLKLSSDEEENEQQAAQRTALRALSDSAVVQQPNCRTSVPSSKGSSSSSSSGSSSSSSDSESSSGSDSETESSSSESEGSKPPHFSSPEAEPASSNKWQLDKWLNKVNPHKPPILIQNESHGSESNQYYNPVKEDVQDCGKVPDVCQPSLREKEIKSTCKEEQRPRTANKAPGSKGVKQKSPPAAVAVAVSAAAPPPAVPCAPAENAPAPARRSAGKKPTRRTERTSAGDGANCHRPEEPAAADALGTSVVVPPEPTKTRPCGNNRASHRKELRSSVTCEKRRTRGLSRIVPKSKEFIETESSSSSSSSDSDLESEQEEYPLSKAQTVAASASSGNDQRLKEAAANGGSGPRAPVGSINARTTSDIAKELEEQFYTLVPLAGTNFSPL

SEQ ID NO: 7824 - protein, 4502 aa, Homo sapiens
MMKLYIDNAAPDKLKGLCIFFVRCRNDVAINVKTIQEEALFTVLDASKGLLNGIRDMLANIFLPAVLATNNWGALNQSKQGESEKHIFTETINRYLSFLDGARISIEGTVKLKTIDNVNFSKLHTFEEVTAAASNSETVHQLEEVLMVWYKQIEQVLIESEQMRKEAGDSGPLTELEHWKRMSAKFNYIIEQIKGPSCKAVINVLNVAHSKLLKNWRDLDARITDTANESKDNVRYLYTLEKVCQPLYNHDLVSMAHGIQNLINAIRMIHGVSRYYNTSERMTSLFIKVTNQMVTACKAYITDGGLNHVWDQETPVVLKKIQDCIFLFKEYQASFHKTRKLISESSGEKSFEVSEMYIFGKFEAFCKRLEKITEMITVVQTYSTLSNSTIEGIDIMAIKFRNIYQGVKKKQYDILDPRRTEFDTDFLDFMTKINGLEVQIQAFMNSSFGKILSSQQALQLLQRFQKLNIPCLGLEINHTIERILQYYVAELDATKKASLYHSQKDDPPLARNMPPIAGKILWVRQLYRRISEPINYFFKNSDILSSPDGKAVIRQYNKISYVLVEFEVVYHTAWIREISQLHYALQATLFVRHPETGKLLVNFDPKILEVVRETKCMIKMKLDVPEQAKRLLKLESKLKADKLYLQGLLQYYDELCQEVPSVFVNLMTPKMKKVESVLRQGLTVLTWSSLTLESFFQEVELVLDMFNQLLKKISDLCEMHIDTVLKEIAKTVLISLPESGATKVEDMLTLNETYTKEWADILNHKSKHVEEAVRELISIFEQIYEVKYTGKVGKQSEQRKHVVFGSETGEGENNDYEANIVNEFDTHDKEDEFKKECKEVFAFFSHQLLDSLQKATRLSLDTMKRRIFVARQVENMLIILYGRKQSEDIISFIKSEVHLAIPNVVMIPSLDDIQQAINRMIQLTLEVSRGVAHWGQQQIRPIKSVIPSPTTTDVTHQNTGKLLKKEERSFEEAIPARKLKNFYPGVAEHKDISKLVLLLSSSVNSLRKAAHEALQDFQKYKTLWTEDRDVKVKEFLANNPSLTEIRSEILHYATFEQEIDELKPIIVVGALELHTEPMKLALSIEAKAWKMLLCRYLNEEYKKKMSYMIAFINEYLKKLSRPIRDLDDVRFAMEALSCIRDNEIQMDMTLGPIEEAYAILNRFEVEVTKEESEAVDTLRYSFNKLQSKAVSVQEDLVQVQPKFKSNLLESVEVFREDVINFAEAYELEGPMVPNIPPQEASNRLQIFQASFDDLWRKFVTYSSGEQLFGLPVTDYEVLHKTRKELNLLQKLYGLYDTVMSSISGYYEILWGDVDIEKINAELLEFQNRCRKLPKGLKDWQAFLDLKKRIDDFSESCPLLEMMTNKAMKQRHWDRISELTGTPFDVESDSFCLRNIMEAPLLKHKDDIEDICISAIKEKDIEAKLTQVIENWTNQNLSFAAFKGKGELLLKGTESGEIITLMEDSLMVLGSLLSNRYNAPFKKNIQNWVYKLSTSSDIIEEWLVVQNLWVYLEAVFVGGDIAKQLPQEAKRFQNIDKSWIKIMQRAHENPNVINCCVGDETMGQLLPHLHEQLEVCQKSLTGYLEKKRLLFPRFFFVSDPVLLEILGQASDSHTIQPHLPAVSDNINEVTFHAKDYDRIMAVISREGEKIVLDNSVMAKGPVEIWLLDLLKMQMSSLHNIIRSAFYQISDSGFQLLPFLSHFPAQVGLLGIQMLWTHDSEEALRNAKDDRKIMQVTNQKFLDILNTLISQTTHDLSKFDRVKFETLITIHVHQRDIFDDLVKMHIKSPTDFEWLKQSRFYFKEDLDQTVVSITDVDFIYQNEFLGCTDRLVITPLTDRCYITLAQALGMNMGGAPAGPAGTGKTETTKDMGRCLGKYVVVFNCSDQMDFRGLGRIFKGKCLAQSGSWGCFDEFNRIELPVLSVAAQQIYIVLTARKERKKQFIFSDGDCVDLNPEFGIFLTMNPGYAGRQELPENLKIQFRTVAMMVPDRQIIMRVKLASCGFLENVILAQKFYVLYKLCEEQLTKQVHYDFGLRNILSVLRTLGSQKRARPEDSELSIVMRGLRDMNLSKLVDEDEPLFLSLINDLFPGLQLDSNTYAELQNAVAHQVQIEGLINHPPWNLKLVQLYETSLVRHGLMTLGPSGSGKTTVITILMKAQTECGRPHREMRMNPKAITAPQMFGRLDTATNDWTDGIFSTLWRKTLKAKKGENIFLILDGPVDAIWIENLNSVLDDNKTLTLANGDRIPMAPSCKLLFEVHNIENASPATVSRMGMVYISSSALSWRPILQAWLKKRTAQEAAVFLTLYEKVFEDTYTYMKLNLNPKMQLLECNYIVQSLNLLEGLIPSKEEGGVSCVEHLHKLFVFGLMWSLGALLELESREKLEAFLRQHESKLDLPEIPKGSNQTMYEFYVTDYGDWEHWNKKLQPYYYPTDSIPEYSSILVPNVDNIRTNFLIDTIAKQHKAVLLTGEQGTAKTVMVKAYLKKYDPEVQLSKSLNFSSATEPMMFQRTIESYVDKRIGSTYGPPGGRKMTVFIDDINMPVINEWGDQITNEIVRQMMEMEGMYSLDKPGDFTTIVDVQLIAAMIHPGGGRNDIPQRLKRQFTVFNCTLPSNASIDKIFGIIGCGYFDPCRSFKPQICEMIVNLVSVGRVLWQWTKVKMLPTPSKFHYIFNLRDLSRIWQGMLTIKAEECASIPTLLSLFKHECSRVIADRFITPEDEQWFNAHLTRAVEENIGSDAASCILPEPYFVDFLREMPEPTGDEPEDSVFEVPKIYELMPSFDFLAEKLQFYQRQFNEIIRGTSLDLVFFKDAMTHLIKISRIIRTSCGNALLVGVGGSGKQSLSRLASFIAGYQIFQITLTRSYNVTNLTDDLKALYKVAGADGKGITFIFTDSEIKDEAFLEYLNNLLSSGEISNLFARDEMDEITQGLISVMKRELPRHPPTFDNLYEYFISRSRKNLHVVLCFSPVGEKFRARSLKFPGLISGCTMDWFSRWPREALIAVASYFLSDYNIVCSSEIKRQVVETMGLFHDMVSESCESYFQRYRRRAHVTPKSYLSFINGYKNIYAEKVKFINEQAERMNIGLDKLMEASESVAKLSQDLAVKEKELAVASIKADEVLAEVTVSAQASAKIKNEVQEVKDKAQKIVDEIDSEKVKAESKLEAAKPALEEAEAALNTIKPNDIATVRKLAKPPHLIMRIMDCVLLLFQKKIDPVTMDPEKSCCKPSWGESLKLMSATGFLWSLQQFPKDTINEETVELLQPYFNMDDYTFESAKKVCGNVAGLLSWTLAMAIFYGINREVLPLKANLAKQEGRLAVANAELGKAQALLDEKQAELDKVQAKFDAAMNEKMDLLNDADTCRKKMQAASTLIDGLSGEKIRWTQQSKEFKAQINRLVGDILLCTGFLSYLGPFNQIFRNYLLKDQWEMELRARKIPFTENLNLISMLVDPPTIGEWGLQGLPGDDLSIQNGIIVTKATRYPLLIDPQTQGKTWIKSKEKENDLQVTSLNHKYFRTHLEDSLSLGRPLLIEDIHEELDPALDNVLEKNFIKSGTTFKVKVGDKECDIMDTFKLYITTKLPNPAFTPEINAKTSVIDFTVTMKGLENQLLRRVILTEKQELEAERVKLLEDVTFNKRKMKELEDNLLYKLSATKGSLVDDESLIGVLRTTKQTAAEVSEKLHVAAETEIKINAAQEEFRPAATRGSILYFLITEMSMVNIMYQTSLAQFLKLFDQSMARSEKSPLPQKRITNIIEYLTYEVFTYSVRGLYENHKFLFVLLMTLKIDLQRGTVKHREFQALIKGGAALDLKACPPKPYRWILDMTWLNLVELSKLPQFAEIMNQISRNEKGWKSWFDKDAPEEEIIPDGYNDSLDTCHKLLLIRSWCPDRTVFQARKYIADSLEEKYTEPVILNLEKTWEESDTRTPLICFLSMGSDPTNQIDALAKKLKLECRTISMGQGQEVHARKLIQMSMQQGGWVLLQNCHLGLEFMEELLETLITTEASDDSFRVWITTEPHDRFPITLLQTSLKFTNEPPQGVRAGLKRTFAGINQDLLDISNLPMWKPMLYTVAFLHSTVQERRKFGPLGWNIPYEFNSADFSASVQFIQNHLDECDIKKGVSWNTVRYMIGEVQYGGRVTDDFDKRLLNCFARVWFSEKMFEPSFCFYTGYKIPLCKTLDQYFEYIQSLPSLDNPEVFGLHPNADITYQSNTASAVLETITNIQPKESGGGVGETREAIVYRLSEDMLSKLPPDYIPHEVKSRLIKMGHLNSMNIFLRQEIDRMQRVISILRSSLSDLKLAIEGTIIMSENLRDALDNMYDARIPQLWKRVSWDSSTLGFWFTELLERNAQFSTWIFEGRPNVFWMTGFFNPQGFLTAMRQEVTRAHKGWALDTVTIHNEVLRQTKEEITSPPGEGVYIYGLYMDGAAWDRRNGKLMESTPKVLFTQLPVLHIFAINSTAPKDPKLYVCPIYKKPRRTDLTFITVVYLRTVLSPDHWILRGVALLCDIK

SEQ ID NO: 7825 - protein, 872 aa, Homo sapiens
MGNRGMEELIPLVNKLQDAFSSIGQSCHLDLPQIAVVGGQSAGKSSVLENFVGRDFLPRGSGIVTRRPLILQLIFSKTEHAEFLHCKSKKFTDFDEVRQEIEAETDRVTGTNKGISPVPINLRVYSPHVLNLTLIDLPGITKVPVGDQPPDIEYQIKDMILQFISRESSLILAVTPANMDLANSDALKLAKEVDPQGLRTIGVITKLDLMDEGTDARDVLENKLLPLRRGYIGVVNRSQKDIEGKKDIRAALAAERKFFLSHPAYRHMADRMGTPHLQKTLNQQLTNHIRESLPALRSKLQSQLLSLEKEVEEYKNFRPDDPTRKTKALLQMVQQFGVDFEKRIEGSGDQVDTLELSGGARINRIFHERFPFELVKMEFDEKDLRREISYAIKNIHGVRQVPRGETGLFTPDLAFEAIVKKQVVKLKEPCLKCVDLVIQELINTVRQCTSKLSSYPRLREETERIVTTYIREREGRTKDQILLLIDIEQSYINTNHEDFIGFANAQQRSTQLNKKRAIPNQVIRRGWLTINNISLMKGGSKEYWFVLTAESLSWYKDEEEKEKKYMLPLDNLKIRDVEKGFMSNKHVFAIFNTEQRNVYKDLRQIELACDSQEDVDSWKASFLRAGVYPEKDQAENEDGAQENTFSMDPQLERQVETIRNLVDSYVAIINKSIRDLMPKTIMHLMINNTKAFIHHELLAYLYSSADQSSLMEESADQAQRRDDMLRMYHALKEALNIIGDISTSTVSTPVPPPVDDTWLQSASSHSPTPQRRPVSSIHPPGRPPAVRGPTPGPPLIPVPVGAAASFSAPPIPSRPGPQSVFANSDLFPAPPQIPSRPVRIPPGIPPGVPSRRPPAAPSRPTIIRPAEPSLLD

SEQ ID NO: 7826 - protein, 464 aa, Homo sapiens
MAFEAIVKKQIVKLKEPSLKCVDLVVSELATVIKKCAEKLSSYPRLREETERIVTTYIREREGRTKDQILLLIDIEQSYINTNHEDFIGFANAQQRSTQLNKKRAIPNQGEILVIRRGWLTINNISLMKGGSKEYWFVLTAESLSWYKDEEEKEKKYMLPLDNLKIRDVEKGFMSNKHVFAIFNTEQRNVYKDLRQIELACDSQEDVDSWKASFLRAGVYPEKDQAENEDGAQENTFSMDPQLERQVETIRNLVDSYVAIINKSIRDLMPKTIMHLMINNTKAFIHHELLAYLYSSADQSSLMEESADQAQRRDDMLRMYHALKEALNIIGDISTSTVSTPVPPPVDDTWLQSASSHSPTPQRRPVSSIHPPGRPPAVRGPTPGPPLIPVPVGAAASFSAPPIPSRPGPQSVFANSDLFPAPPQIPSRPVRIPPGIPPGVPSRRPPAAPSRPTIIRPAEPSLLD

SEQ ID NO: 7827 - protein, 870 aa, Homo sapiens
MGNRGMEELIPLVNKLQDAFSSIGQSCHLDLPQIAVVGGQSAGKSSVLENFVGRDFLPRGSGIVTRRPLILQLIFSKTEHAEFLHCKSKKFTDFDEVRQEIEAETDRVTGTNKGISPVPINLRVYSPHVLNLTLIDLPGITKVPVGDQPPDIEYRVKDMILQFISRESSLILAVTPANMDLANSDALKLAKEVDPQGLRTIGVITKLDLMDEGTDARDVLENKLLPLRRGYIGVVNRSQKDIEGKKDIRAALAAERKFFLSHPAYRHMADRMGTPHLQKTLNQQLTNHIRESLPALRSKLQSQLLSLEKEVEEYKIFRPDDPTPKTKALLQMVQQFGVDFEKRIEGSGDQVDTLELSGGARINRIFHERFPFELVKMEFDEKDLRREISYAIKNIHGVRTGLFTPDLAFEAIVKKQVVKLKEPCLKCVDLVIQELINTVRQCTSKLSSYPRLREETERIVTTYIREREGRTKDQILLLIDIEQSYINTNHEDFIGFANAQQRSTQLNKKRAIPNQGEILVIRRGWLTINNISLMKGGSKEYWFVLTAESLSWYKDEEEKEKKYMLPLDNLKIRDVEKGFMSNKHVFAIFNTEQRNVYKDLRQIELACDSQEDVDSWKASFLRAGVYPEKDQAENEDGAQENTFSMDPQLERQVETIRNLVDSYVAIINKSIRDLMPKTIMHLMINNTKAFIHHELLAYLYSSADQSSLMEESADQAQRRDDMLRMYHALKEALNIIGDISTSTVSTPVPPPVDDTWLQSASSHSPTPQRRPVSSIHPPGRPPAVRGPTPGPPLIPVPVGAAASFSAPPIPSRPGPQSVFANSDLFPAPPQIPSRPVRIPPGIPPGVPSRRPPAAPSRPTIIRPAEPSLLD

SEQ ID NO: 7828 - protein, 608 aa, Homo sapiens
MSQLPSTTRLELQVELNLDRPTPVHLPVPLYEGGGEACLEERERLLGASGVRRLALSVFTSPSGKLDHLRSRPSPSSPHAGSFFLNGSRTEASHKMILLNNSQKLLVLYKPLAWSIPESLKVYGSVYHINHRNPFNMEVLVDSWPEYQMVIIQPQKQSFFLKGSRTEASHKMILLNNSEQLLALFKSLARSIPESLKVYGSLFHINHGNPFNMEVLVDSWPGYQMVIIRPQKQEMTDDMDSYTNVYRIFSKDPQKSQEVLKNSEIINWKQKLQIQGFQESLGEGIKAAAFSNSVKVEHSRALLFVTEDILKLYATNKSKLGSWAETGHPDDELESETPNFKYAQLNVSYSGLVNDNWKLGMNKRSLHYIKRCLGALPAVCMLGPEGVPVSWVTMDPSCEIGMGYSVEKYRRRGNATRMMIQMSVLSDTKCFYSSTVQPPEPDVLVPRVLVPGQIPGDFTQTRVQPALGLEVRWSLSLCIIRVELSLLLPKDPAWMLIPPPSPTPQLQNGSNCHTPKQLGWLFALQLPPARCPSWQSKVWESAKAPRASHSAQLPRSSSLASTGRQGTPMRRKEQGSDCLVYPGTRELSPWTEWRGEGITETGKGHPDK

SEQ ID NO: 7829 - protein, 637 aa, Homo sapiens
MAGGAGWSGAPAALLRSVRRLREVFEVCGRDPDGFLRVERVAALGLRFGQGEEVEKLVKYLDPNDLGRINFKDFCRGVFAMKGCEELLKDVLSVESAGTLPCAPEIPDCVEQGSEVTGPTFADGELIPREPGFFPEDEEEAMTLAPPEGPQELYTDSPMESTQSLEGSVGSPAEKDGGLGGLFLPEDKSLVHTPSMTTSDLSTHSTTSLISNEEQFEDYGEGDDVDCAPSSPCPDDETRTNVYSDLGSSVSSSAGQTPRKMRHVYNSELLDVYCSQCCKKINLLNDLEARLKNLKANSPNRKISSTAFGRQLMHSSNFSSSNGSTEDLFRDSIDSCDNDITEKVSFLEKKVTELENDSLTNGDLKSKLKQENTQLVHRVHELEEMVKDQETTAEQALEEEARRHREAYGKLEREKATEVELLNARVQQLEEENTELRTTVTRLKSQTEKLDEERQRMSDRLEDTSLRLKDEMDLYKRMMDKLRQNRLEFQKEREATQELIEDLRKELEHLQMYKLDCERPGRGRSASSGLGEFNARAREVELEHEVKRLKQENYKLRDQNDDLNGQILSLSLYEAKNLFAAQTKAQSLAAEIDTASRDELMEALKEQEEINFRLRQYMDKIILAILDHNPSILEIKH

SEQ ID NO: 7830 - protein, 295 aa, Homo sapiens
MWRSCLRLRDGGRRLLNRPAGGPSASMSPGPTIPSPARAYAPPTERKRFYQNVSITQGEGGFEINLDHRKLKTPQAKLFTVPSEALAIAVATEWDSQQDTIKYYTMHLTTLCNTSLDNPTQRNKDQLIRAAVKFLDTDTICYRVEEPETLVELQRNEWDPIIEWAEKRYGVEISSSTSIMGPSIPAKTREVLVSHLASYNTWALQGMYGVSWIEFVAAQLKSMVLTLGLIDLRLTVEQAVLLSRLEEEYQIQKWGNIEWAHDYELQELRARTAAGTLFIHLCSESTTVKHKLLKE

SEQ ID NO: 7831 - protein, 136 aa, Homo sapiens
MKIGKGSVFSDAFSPPVSLAALELSTQRGKQPQYNKVLCHGSLEFQCPLLLLLPVAPICVLSCGIGFDAEMGYLCTHQLLFLQLNQSSFNSKNQYAKKRRKRWNHQALLGSEYVCVSAHTQVHAALQYKIKLYNVL

SEQ ID NO: 7832 - protein, 600 aa, Homo sapiens
MASTDYSTYSQAAAQQGYSAYTAQPTQGYAQTTQAYGQQSYGTYGQPTDVSYTQAQTTATYGQTAYATSYGQPPTGYTTPTAPQAYSQPVQGYGTGAYDTTTATVTTTQASYAAQSAYGTQPAYPAYGQQPAATAPTSYSSTQPTSYDQSSYSQQNTYGQPSSYGQQGSYGQQSSYGQQPPTSYPPQTGSYSQAPSQYSQQSSSYGQQSSFRQDHPSSMGVYGQESGGFSGPGENRSMSGPDNRGRGRGGFDRGGMSRGGRGGGRGGMGSAGERGGFNKPGGPMDEGPDLDLGPPVDPDEDSDNSAIYVQGLNDSVTLDDLADFFKQCGVVKMNKRTGQPMIHIYLDKETGKPKGDATVSYEDPPTAKAAVEWFDGKDFQGSKLKVSLARKKPPMNSMRGGLPPREGRGMPPPLRGGPGGPGGPGGPMGRMGGRGGDRGGFPPRGPRGSRGNPSGGGNVQHRAGDWQCPNPGCGNQNFAWRTECNQCKAPKPEGFLPPPFPPPGGDRGRGGPGGMRGGRGGLMDRGGPGGMFRGGRGGDRGGFRGGRGMDRGGFGGGRRGGPGGPPGPLMEQMGGRRGGRGGPGKMDKGEHRQERRDRPY

SEQ ID NO: 7833 - protein, 354 aa, Homo sapiens
MASTDYSTYSQAAAQQGYSAYTAQPTQGYAQTTQAYGQQSYGTYGQPTDVSYTQAQTTATYGQTAYATSYGQPPTGYTTPTAPQAYSQPVQGYGTGAYDTTTATVTTTQASYAAQSAYGTQPAYPAYGQQPAATAPTRPQDGNKPTETSQPQSSTGGYNQPSLGYGQSNYSYPQVPGSYPMQPVTAPPSYPPTSYSSTQPTSYDQSSYSQQNTYGQPSSYGQQSSYGQQSSYGQQPPTSYPPQTGSYSQAPSQYSQQSSSYGQQSSFRQDHPSSMGVYGQESGGFSGPGENRSMSGPDNRGRGRGGFDRGGMSRGGRGGGRGGMGLQSESLVYTSILKKYPYSVLSRQHNEKWD

SEQ ID NO: 7834 - protein, 656 aa, Homo sapiens
MASTDYSTYSQAAAQQGYSAYTAQPTQGYAQTTQAYGQQSYGTYGQPTDVSYTQAQTTATYGQTAYATSYGQPPTGYTTPTAPQAYSQPVQGYGTGAYDTTTATVTTTQASYAAQSAYGTQPAYPAYGQQPAATAPTRPQDGNKPTETSQPQSSTGGYNQPSLGYGQSNYSYPQVPGSYPMQPVTAPPSYPPTSYSSTQPTSYDQSSYSQQNTYGQPSSYGQQSSYGQQSSYGQQPPTSYPPQTGSYSQAPSQYSQQSSSYGQQSSFRQDHPSSMGVYGQESGGFSGPGENRSMSGPDNRGRGRGGFDRGGMSRGGRGGGRGGMGSAGERGGFNKPGGPMDEGPDLDLGPPVDPDEDSDNSAIYVQGLNDSVTLDDLADFFKQCGVVKMNKRTGQPMIHIYLDKETGKPKGDATVSYEDPPTAKAAVEWFDGKDFQGSKLKVSLARKKPPMNSMRGGLPPREGRGMPPPLRGGPGGPGGPGGPMGRMGGRGGDRGGFPPRGPRGSRGNPSGGGNVQHRAGDWQCPNPGCGNQNFAWRTECNQCKAPKPEGFLPPPFPPPGGDRGRGGPGGMRGGRGGLMDRGGPGGMFRGGRGGDRGGFRGGRGMDRGGFGGGRRGGPGGPPGPLMEQMGGRRGGRGGPGKMDKGEHRQERRDRPY

SEQ ID NO: 7835 - protein, 433 aa, Homo sapiens
MALDLRTIFQCEPSENNLGSENSAFQQSQGPAVQREEGISEFSRMVLNSFQDSNNSYARQELQRLYRIFHSWLQPEKHSKDEIISLLVLEQFMIGGHCNDKASVKEKWKSSGKNLERFIEDLTDDSINPPALVHVHMQGQEALFSEDMPLRDVIVHLTKQVNAQTTREANMGTPSQTSQDTSLETGQGYEDEQDGWNSSSKTTRVNENITNQGNQIVSLIIIQEENGPRPEEGGVSSDNPYNSKRAELVTARSQEGSINGITFQGVPMVMGAGCISQPEQSSPESALTHQSNEGNSTCEVHQKGSHGVQKSYKCEECPKVFKYLCHLLAHQRRHRNERPFVCPECQKGFFQISDLRVHQIIHTGKKPFTCSMCKKSFSHKTNLRSHERIHTGEKPYTCPFCKTSYRQSSTYHRHMRTHEKITLPSVPSTPEAS

SEQ ID NO: 7836 - protein, 268 aa, Homo sapiens
MFRMLNSSFEDDPFFSESILAHRENMRQMIRSFSEPFGRDLLSISDGRGRAHNRRGHNDGEDSLTHTDVSSFQTMDQMVSNMRNYMQKLERNFGQLSVDPNGHSFCSSSVMTYSKIGDEPPKVFQASTQTRRAPGGIKETRKAMRDSDSGLEKMAIGHHIHDRAHVIKKSKNKKTGDEEVNQEFINMNESDAHAFDEEWQSEVLKYKPGRHNLGNTRMRSVGHENPGSRELKRREKPQQSPAIEHGRRSNVLGDKLHIKGSSVKSNKK

SEQ ID NO: 7837 - protein, 1235 aa, Homo sapiens
MATGTGKHKLLSTGPTEPWSIREKLCLASSVMRSGDQNWVSVSRAIKPFAEPGRPPDWFSQKHCASQYSELLETTETPKRKRGEKGEVVETVEDVIVRKLTAERVEELKKVIKETQERYRRLKRDAELIQAGHMDSRLDELCNDIATKKKLEEEEAEVKRKATDAAYQARQAVKTPPRRLPTVMVRSPIDSASPGGDYPLGDLTPTTMEEATSGVNESEMAVASGHLNSTGVLLEVGGVLPMIHGGEIQQTPNTVAASPAASGAPTLSRLLEAGPTQFTTPLASFTTVASEPPVKLVPPPVESVSQATIVMMPALPAPSSAPAVSTTESVAPVSQPDNCVPMEAVGDPHTVTVSMDSSEISMIINSIKEECFRSGVAEAPVGSKAPSIDGKEELDLAEKMDIAVSYTGEELDFETVGDIIAIIEDKVDDHPEVLDVAAVEAALSFCEENDDPQSLPGPWEHPIQQERDKPVPLPAPEMTVKQERLDFEETENKGIHELVDIREPSAEIKVEPAEPEPVISGAEIVAGVVPATSMEPPELRSQDLDEELGSTAAGEIVEADVAIGKGDETPLTNVKTEASPESMLSPSHGSNPIEDPLEAETQHKFEMSDSLKEESGTIFGSQIKDAPGEDEEEDGVSEAASLEEPKEEDQGEGYLSEMDNEPPVSESDDGFSIHNATLQSHTLADSIPSSPASSQFSVCSEDQEAIQAQKIWKKAIMLVWRAAANHRYANVFLQPVTDDIAPGYHSIVQRPMDLSTIKKNIENGLIRSTAEFQRDIMLMFQNAVMYNSSDHDVYHMAVEMQRDVLEQIQQFLATQLIMQTSESGISAKSLRGRDSTRKQDASEKDSVPMGSPAFLLSLFMGHEWVWLDSEQDHPNDSELSNDCRSLFSSWDSSLDLDVGNWRETEDPEAEELEESSPEREPSELLVGDGGSEESQEAARKASHQNLLHFLSEVAYLMEPLCISSNESSEGCCPPSGTRQEGREIKASEGERELCRETEELSAKGDPLVAEKPLGENGKPEVASAPSVICTVQGLLTESEEGEAQQESKGEDQGEVYVSEMEDQPPSGECDDAFNIKETPLVDTLFSHATSSKLTDLSQDDPVQDHLLFKKTLLPVWKMIASHRFSSPFLKPVSERQAPGYKDVVKRPMDLTSLKRNLSKGRIRTMAQFLRDLMLMFQNAVMYNDSDHHVYHMAVEMRREVLEQIQVLNIWLDKRKGSSSLEGEPANPVDDGKPVF

SEQ ID NO: 7838 - protein, 951 aa, Homo sapiens
MATGTGKHKLLSTGPTEPWSIREKLCLASSVMRSGDQNWVSVSRAIKPFAEPGRPPDWFSQKHCASQYSELLETTETPKRKRGEKGEVVETVEDVIVRKLTAERVEELKKVIKETQERYRRLKRDAELIQAGHMDSRLDELCNDIATKKKLEEEEAEVKRKATDAAYQARQAVKTPPRRLPTVMVRSPIDSASPGGDYPLGDLTPTTMEEATSGVTPGTLPSTPVTSFPGIPDTLPPGSAPLEAPMTPVTDDSPQKKMLGQKATPPPSPLLSELLKKGSLLPTSPRLVNESEMAVASGHLNSTGVLLEVGGVLPMIHGGEIQQTPNTVAASPAASGAPTLSRLLEAGPTQFTTPLASFTTVASEPPVKLVPPPVESVSQATIVMMPALPAPSSAPAVSTTESVAPVSQPDNCVPMEAVGDPHTVTVSMDSSEISMIINSIKEECFRSGVAEAPVGSKAPSIDGKEELDLAEKMDIAVSYTGEELDFETVGDIIAIIEDKVDDHPEVLDVAAVEAALSFCEENDDPQSLPGPWEHPIQQERDKPVPLPAPEMTVKQERLDFEETENKGIHELVDIREPSAEIKVEPAEPEPVISGAEIVAGVVPATSMEPPELRSQDLDEELGSTAAGEIVEADVAIGKGDETPLTNVKTEASPESMLSPSHGSNPIEDPLEAETQHKFEMSDSLKEESGTIFGSQIKDAPGEDEEEDGVSEAASLEEPKEEDQGEGYLSEMDNEPPVSESDDGFSIHNATLQSHTLADSIPSSPASSQFSVCSEDQEAIQAQKIWKKAIMLVWRAAANHRYANVFLQPVTDDIAPGYHSIVQRPMDLSTIKKNIENGLIRSTAEFQRDIMLMFQNAVMYNSSDHDVYHMAVEMQRDVLEQIQQFLATQLIMQTSESGISAKSLRGRDSTRKQDASEKDSVPMGSPAFLLSLFDGGTRGRRCAIEADMKMKK

SEQ ID NO: 7839 - protein, 757 aa, Homo sapiens [sequence omitted]

SEQ ID NO: 7840 - protein, 1849 aa, Homo sapiens
MSVGELYSQCTRVWIPDPDEVWRSAELTKDYKEGDKSLQLRLEDETILEYPIDVQRNQLPFLRNPDILVGENDLTALSYLHEPAVLHNLKVRFLESNHIYTYCGIVLVAINPYEQLPIYGQDVIYAYSGQNMGDMDPHIFAVAEEAYKQMARDEKNQSIIVSGESGAGKTVSAKYAMRYFATVGGSASETNIEEKVLASSPIMEAIGNAKTTRNDNSSRFGKYIQIGFDKRYHIIGANMRTYLLEKSRVVFQADDERNYHIFYQLCAAAGLPEFKELALTSAEDFFYTSQGGDTSIEGVDDAEDFEKTRQAFTLLGVKESHQMSIFKIIASILHLGSVAIQAERDGDSCSISPQDVYLSNFCRLLGVEHSQMEHWLCHRKLVTTSETYVKTMSLQQVINARNALAKHIYAQLFGWIVEHINKALHTSLKQHSFIGVLDIYGFETFEVNSFEQFCINYANEKLQQQFNSHVFKLEQEEYMKEQIPWTLIDFYDNQPCIDLIEAKLGILDLLDEECKVPKGTDQNWAQKLYDRHSSSQHFQKPRMSNTAFIIVHFADKVEYLSDGFLEKNRDTVYEEQINILKASKFPLVADLFHDDKDPVPATTPGKGSSSKISVRSARPPMKVSNKEHKKTVGHQFRTSLHLLMETLNATTPHYVRCIKPNDEKLPFHFDPKRAVQQLRACGVLETIRISAAGYPSRWAYHDFFNRYRVLVKKRELANTDKKAICRSVLENLIKDPDKFQFGRTKIFFRAGQVAYLEKLRADKFRTATIMIQKTVRGWLQKVKYHRLKGATLTLQRYCRGHLARRLAEHLRRIRAAVVLQKHYRMQRARQAYQRVRRAAVVIQAFTRAMFVRRTYRQVLMEHKATTIQKHVRGWMARRHFQRLRDAAIVIQCAFRMLKARRELKALRIEARSAEHLKRLNVGMENKVVQLQRKIDEQNKEFKTLSEQLSVTTSTYTMEVERLKKELVHYQQSPGEDTSLRLQEEVESLRTELQRAHSERKILEDAHSREKDELRKRVADLEQENALLKDEKEQLNNQILCQSKDEFAQNSVKENLLMKKELEEERSRYQNLVKEYSQLEQRYDNLRDEMTIIKQTPGHRRNPSNQSSLESDSNYPSISTSEIGDTEDALQQVEEIGLEKAAMDMTVFLKLQKRVRELEQERKKLQVQLEKREQQDSKKVQAEPPQTDIDLDPNADLAYNSLKRQELESENKKLKNDLNELRKAVADQATQNNSSHGSPDSYSLLLNQLKLAHEELEVRKEEVLILRTQIVSADQRRLAGRNAEPNINARSSWPNSEKHVDQEDAIEAYHGVCQTNSKTEDWGYLNEDGELGLAYQGLKQVARLLEAQLQAQSLEHEEEVEHLKAQLEALKEEMDKQQQTFCQTLLLSPEAQVEFGVQQEISRLTNENLDLKELVEKLEKNERKLKKQLKIYMKKAQDLEAAQALAQSERKRHELNRQVTVQRKEKDFQGMLEYHKEDEALLIRNLVTDLKPQMLSGTVPCLPAYILYMCIRHADYTNDDLKVHSLLTSTINGIKKVLKKHNDDFEMTSFWLSNTCRLLHCLKQYSGDEGFMTQNTAKQNEHCLKNFDLTEYRQVLSDLSIQIYQQLIKIAEGVLQPMIVSAMLENESIQGLSGVKPTGYRKRSSSMADGDNSYCLEAIIRQMNAFHTVMCDQGLDPEIILQVFKQLFYMINAVTLNNLLLRKDVCSWSTGMQLRYNISQLEEWLRGRNLHQSGAVQTMEPLIQAAQLLQLKKKTQEDAEAICSLCTSLSTQQIVKILNLYTPLNEFEERVTVAFIRTIQAQLQERNDPQQLLLDAKHMFPVLFPFNPSSLTMDSIHIPACLNLEFLNEV

SEQ ID NO: 7841 - protein, 963 aa, Homo sapiens
MEHKATTIQKHVRGWMARRHFQRLRDAAIVIQCAFRMLKARRELKALRIEARSAEHLKRLNVGMENKVVQLQRKIDEQNKEFKTLSEQLSVTTSTYTMEVERLKKELVHYQQSPGEDTSLRLQEEVESLRTELQRAHSERKILEDAHSREKDELRKRVADLEQENALLKDEKEQLNNQILCQSKDEFAQNSVKENLMKKELEEERSRYQNLVKEYSQLEQRYDNLRDEMTIIKQTPGHRRNPSNQSSLESDSNYPSISTSEIGDTEDALQQVEEIGLEKAAMDMTVFLKLQKRVRELEQERKKLQVQLEKREQQDSKKVQAEPPQTDIDLDPNADLAYNSLKRQELESENKKLKNDLNELRKAVADQATQNNSSHGSPDSYSLLLNQLKLAHEELEVRKEEVLILRTQIVSADQRRLAGRNAEPNINARSSWPNSEKHVDQEDAIEAYHGVCQTNRLLEAQLQAQSLEHEEEVEHLKAQLEALKEEMDKQQQTFCQTLLLSPEAQVEFGVQQEISRLTNENLDLKELVEKLEKNERKLKKQLKIYMKKAQDLEAAQALAQSERKRHELNRQVTVQRKEKDFQGMLEYHKEDEALLIRNLVTDLKPQMLSGTVPCLPAYILYMCIRHADYTNDDLKVHSLLTSTINGIKKVLKKHNDDFEMTSFWLSNTCRLLHCLKQYSGDEGFMTQNTAKQNEHCLKNFDLTEYRQVLSDLSIQIYQQLIKIAEGVLQPMIVSAMLENESIQGLSGVKPTGYRKRSSSMADGDNSYCLEAIIRQMNAFHTVMCDQGLDPEIILQVFKQLFYMINAVTLNNLLLRKDVCSWSTGMQLRYNISQLEEWLRGRNLHQSGAVQTMEPLIQAAQLLQLKKKTQEDAEAICSLCTSLSTQQIVKILNLYTPLNEFEERVTVAFIRTIQAQLQERNDPQQLLLDAKHMFPVLFPFNPSSLTMDSIHIPACLNLEFLNEV

SEQ ID NO: 7842 - protein, 354 aa, Homo sapiens
LYDQALLGILQHVGNVQDFLRVLFGFLYRKTDFYRLLRHPSDRMGFPPGAAQALVLQVFKTFDHMARQDDEKRRQELEEKIRRKEEEEAKTVSAAAAEKEPVPVPVQEIEIDSTTELDGHQEVEKVQPPGPVKEMAHGSQEAEAPGAVAGAAEVPREPPILPRIQEQFQKNPDSYNGAVRENYTWSQDYTDLEVRVPVPKHVVKGKQVSVALSSSSIRVAMLEENGERVLMEGKLTHKINTESSLWSLEPGKCVLVNLSKVGEYWWNAILEGEEPIDIDKINKERSMATVDEEEQAVLDRLTFDYHQKLQGKPQSHELKVHEMLKKGWDAEGSPFRGQRFDPAMFNISPGAVQF

SEQ ID NO: 7843 - protein, 361 aa, Homo sapiens [sequence omitted]

SEQ ID NO: 7844 - protein, 256 aa, Homo sapiens
MAHGSQEAEAPGAVAGAAEVPREPPILPRIQEQFQKNPDSYNGAVRENYTWSQDYTDLEVRVPVPKHVVKGKQVSVALSSSSIRVAMLEENGERVLMEGKLTHKINTESSLWSLEPGKCVLVNLSKVGEYWWNAILEGEEPIDIDKINKERSMATVDEEEQAVLDRLTFDYHQKLQGKPQSHELKVHEMLKKGWDAEGSPFRGQRFDPAMFNISPGAVQFNDQKERKPSPVGRQSLILGCPSWLPAFQGLARLVYP

SEQ ID NO: 7845 - protein, 276 aa, Homo sapiens
MDNAGKEREAVQLMAEAEKRVKASHSFPRGLFGGNTRIEEACEMYTRAANMFKMAKNWSAAGNAFCQAAKLHMQLQSKHDSATSFVDAGNAYKKADPQEAINCLNAAIDIYTDMGRFTIAAKHHITIAEIYETELVDIEKAIAHYEQSADYYKGEESNSSANKCLLKVAAYAAQLEQYQKAIEIYEQVGANTMDNPLLKYSAKDYFFKAALCHFIVDELNAKLALEKYEEMFPAFTDSRECKLLKKLLEAHEEQNSEEQSPSTKPWRRSNVAPSSA

SEQ ID NO: 7846 - protein, 298 aa, Homo sapiens
MDNAGKEREAVQLMAEAEKRVKASHSFLRGLFGGNTRIEEACEMYTRAANMFKMAKNWSAAGNAFCQAAKLHMQLQSKHDSATSFVDAGNAYKKADPQEAINCLNAAIDIYTDMGRFTIAAKHHITIAEIYETELVDIEKAIAHYEQSADYYKGEESNSSANKCLLKVAAYAAQLEQYQKAIEIYEQVGANTMDNPLLKYSAKDYFFKAALCHFIVDELNAKLALEKYEEMFPAFTDSRECKLLKKLLEAHEEQNSEAYTEAVKEFDSISRLDQWLTTMLLRIKKSIQGDGEGDGDLK

SEQ ID NO: 7847 - protein, 1224 aa, Homo sapiens
MNKMLPSVPATAVRVSCSGCKKILQKGQTAYQRKGSTQLFCSTLCLTGYTVPPARPPPPLTKKTCSSCSKDILNPKDVISAQFENTTTSKDFCSQSCLSTYELKKKPIVTINTNSISTKCSMCQKNAVIRHEVNYQNVVHKLCSDACFSKFRSANNLTMNCCENCGGYCYSGSGQCHMLQIEGQSKKFCSSSCITAYKQKSAKITPCALCKSLRSSAEMIENTNSLGKTELFCSVNCLSAYRVKMVTSAGVQVQCNSCKTSAIPQYHLAMSDGSIRNFCSYSCVVAFQNLFNKPTGMNSSVVPLSQGQVIVSIPTGSTVSAGGGSTSAVSPTSISSSAAAGLQRLAAQSQHVGFARSVVKLKCQHCNRLFATKPELLDYKGKMFQFCGKNCSDEYKKINNVMAMCEYCKIEKIVKETVRFSGADKSFCSEGCKLLYKHDLAKRWGNHCKMCSYCLQTSPKLVQNNLGGKVEEFCCEECMSKYTVLFYQMAKCDACKRQGKLSESLKWRGEMKHFCNLLCILMFCNQQSVCDPPSQNNAANISMVQAASAGPPSLRKDSTPVIANVVSLASAPAAQPTVNSNSVLQGAVPTVTAKIIGDASTQTDALKLPPSQPPRLLKNKALLCKPITQTKATSCKPHTQNKECQTEDTPSQPQIIVVPVPVPVFVPIPLHLYTQYAPVPFGIPVPMPVPMLIPSSMDSEDKVTESIEDIKEKLPTHPFEADLLEMAEMIAEDEEKKTLSQGESQTSEHELFLDTKIFEKDQGSTYSGDLESEAVSTPHSWEEELNHYALKSNAVQEADSELKQFSKGETEQDLEADFPSDSFDPLNKGQGIQARSRTRRRHRDGFPQPRRRGRKKSIVAVEPRSLIQGAFQGCSVSGMTLKYMYGVNAWKNWVQWKNAKEEQGDLKCGGVEQASSSPRSDPLGSTQDHALSQESSEPGCRVRSIKLKEDILSCTFAELSLGLCQFIQEVRRPNGEKYDPDSILYLCLGIQQYLFENGRIDNIFTEPYSRFMIELTKLLKIWEPTILPNGYMFSRIEEEHLWECKQLGAYSPIVLLNTLLFFNTKYFQLKNVTEHLKLSFAHVMRRTRTLKYSTKMTYLRFFPPLQKQESEPDKLTVGKRKRNEDDEVPVGVEMAENTDNPLRCPVRLYEFYLSKCSESVKQRNDVFYLQPERSCVPNSPMWYSTFPIDPGTLDTMLTRILMVREVHEELAKAKSEDSDVELSD

SEQ ID NO: 7848 - protein, 1509 aa, Homo sapiens
MNSPVDPGARQALRKKPPERTPEDLNTIYSYLHGMEILSNLREHQLRLMSARARYERYSGNQVLFCSETIARCWYILLSGSVLVKGSMVLPPCSFGKQFGGKRGCDCLVLEPSEMIVVENAKDNEDSILQREIPARQSRRRFRKINYKGERQTITDDVEVNSYLSLPADLTKMHLTENPHPQVTHVSSSQSGCSIASDSGSSSLSDIYQATESEVGDVDLTRLPEGPVDSEDDEEEDEEIDRTDPLQGRDLVRECLEKEPADKTDDDIEQLLEFMHQLPAFANMTMSVRRELCSVMIFEVVEQAGAIILEDGQELDSWYVILNGTVEISHPDGKVENLFMGNSFGITPTLDKQYMHGIVRTKVDDCQFVCIAQQDYWRILNHVEKNTHKVEEEGEIVMVHEHRELDRSGTRKGHIVIKATPERLIMHLIEEHSIVDPTYIEDFLLTYRTFLESPLDVGIKLLEWFKIDSLRDKVTRIVLLWVNNHFNDFEGDPAMTRFLEEFEKNLEDTKMNGHLRLLNIACAAKAKWRQVVLQKASRESPLQFSLNGGSEKGFGIFVEGVEPGSEAADSGLKRGDQIMEVNGQNFENITFMKAVEILRNNTHLALTVKTNIFVFKELPFRTEQEKSGVPHIPKIAKKKSNRHSIQHVPGDIEQTSQEKGSKKVKANTASGGRNKIRKILDKTRFSILPPKLFSDGGLSQSQDDSIVGTRHCRHSLAIMPIPGTLSSSSPDLLQPTTSMLDFSNPSAVGFYYIPDQVIRVFKVDQQSCYIIISKDTTAKEVVFHAVHEFGLTGASDTYSLCEVSVTPEGVIKQRRLPDQFSKLADRIQLNGRYYLKNNMETETLCSDEDAQELVKESQLSMLQLSTIEVATQLSMRDFDLFRNIEPTEYIDDLFKLNSKTGNTHLKRFEDIVNQETFWVASEILTEANQLKRMKIIKHFIKIALHCRECKNFNSMFAIISGLNLASVARLRGTWEKLPSKYEKHLQDLQDIFDPSRNMAKYRNILSSQSMQPPIIPLFPVVKKDMTFLHEGNDSKVDGLVNFEKLRMISKEIRQVVRMTSANMDPAMMFRQRKKRWRSLGSLSQGSTNSNMLDVQGGAHKKRARRSSLLNAKKLYEDAQMARKVKQYLSSLDVETDEEKFQMMSLQWEPAYGTLTKNLSEKRSAKSSEMSPVPMRSAGQTTKAHLHQPHRVSQVLQVPAVNLHPIRKKGQTKDPALNTSLPQKVLGTTEEISGKKHTEDTISVASSLHSSPPASPQGSPHKGYTLIPSAKSDNLSDSSHSEISSRSSIVSNCSVDSMSAALQDERCSSQALAVPESTGALEKTEHASGIGDHSQHGPGWTLLKPSLIKCLAVSSSVSNEEISQEHIIIEAADSGRGSWTSCSSSSHDNFQSLPNPKSWDFLNSYRHTHLDDPIAEVEPTDSEPYSCSKSCSRTCGQCKGSLERKSWTSSSSLSDTYEPNYGTVKRRVLESTPAESSEGLDPKDATDPVYKTVTSSTEKGLIENEQVSAV

SEQ ID NO: 7849 - protein, 1204 aa, Homo sapiens
MAPTLFQKLFSKRTGLGAPGRDARDPDCGFSWPLPEFDPSQIRLIVYQDCERRGRNVLFDSSVKRRNEDISVSDLNTIYSYLHGMEILSNLREHQLRLMSARARYERYSGNQVLFCSETIARCWYILLSGSVLVKGSMVLPPCSFGKQFGGKRGCDCLVLEPSEMIVVENAKDNEDSILQREIPARQSRRRFRKINYKGERQTITDDVEVNSYLSLPADLTKMHLTENPHPQVTHVSSSQSGCSIASDSGSSSLSDIYQATESEVGDVDLTRLPEGPVDSEDDEEEDEEIDRTDPLQGRDLVRECLEKEPADKTDDDIEQLLEFMHQLPAFANMTMSVRRELCSVMIFEVVEQAGAIILEDGQELDSWYVILNGTVEISHPDGKVENLFMGNSFGITPTLDKQYMHGIVRTKVDDCQFVCIAQQDYWRILNHVEKNTHKVEEEGEIVMVHEHRELDRSGTRKGHIVIKATPERLIMHLIEEHSIVDPTYIEDFLLTYRTFLESPLDVGIKLLEWFKIDSLRDKVTRIVLLWVNNHFNDFEGDPAMTRFLEEFEKNLEDTKMNGHLRLLNIACAAKAKWRQVVLQKASRESPLQFSLNGGSEKGFGIFVEGVEPGSKAADSGLKRGDQIMEVNGQNFENITFMKAVEILRNNTHLALTVKTNIFVFKELLFRTEQEKSGVPHIPKIAEKKSNRHSIQHVPGDIEQTSQEKGSKKVKANTVSGGRNKIRKILDKTRFSILPPKLFSDGGLSQSQDDSIVGTRHCRHSLAIMPIPGTLSSSSPDLLQPTTSMLDFSNPSDIPDQVIRVFKVDQQSCYIIISKDTTAKEVVFHAVHEFGLTGASDTYSLCEVSVTPEGVIKQRRLPDQFSKLADRIQLNGRYYLKNNMETETLCSDEDAQELVKESQLSMLQLSTIEVATQLSMRDFDLFRNIEPTEYIDDLFKLNSKTGNTHLKRFEDIVNQETFWVASEILTEANQLKRMKIIKHFIKIALHCRECKNFNSMFAIISGLNLASVARLRGTWEKLPSKYEKHLQDLQDIFDPSRNMAKYRNILSSQSMQPPIIPLFPVVKKDMTFLHEGNDSKVDGLVNFEKLRMISKEIRQVVRMTSANMDPAMMFRQRSLSQGSTNSNMLDVQGGAHKKRARRSSLLNAKKLYEDAQMARKVKQYLSSLDVETDEEKFQMMSLQWEPAYGTLTKNLSEKRSAKII

SEQ ID NO: 7850 - protein, 1601 aa, Homo sapiens [sequence omitted]

SEQ ID NO: 7851 - protein, 1391 aa, Homo sapiens [sequence omitted]

SEQ ID NO: 7852 - protein, 1113 aa, Homo sapiens [sequence omitted]

SEQ ID NO: 7853 - protein, 1384 aa, Homo sapiens
ELWSLRTMDALNRNQIGPGCQTQTMVQKGPLDLIETGKGLKVQTDKPHLVSLGSGRLSTAITLLPLEEGRTVIGSAARDISLQGPGLAPEHCYIENLRGTLTLYPCGNACTIDGLPVRQPTRLTQGCMLCLGQSTFLRFNHPAEAKWMKSMIPAGGRAPGPPYSPVPAESESLVNGNHTPQTATRGPSACASHSSLVSSIEKDLQEIMDSLVLEEPGAAGKKPAATSPLSPMANGGRYLLSPPTSPGAMSVGSSYENTSPAFSPLSSPASSGSCASHSPSGQEPGPSVPPLVPARSSSYHLALQPPQSRPSGARSESPRLSRKGGHERPPSPGLRGLLTDSPAATVLAEARRATESPRLGGQLPVVAISLSEYPASGALSQPTSIPGSPKFQPPVPAPRNKIGTLQDRPPSPFREPPGSERVLTTSPSRQLVGRTFSDGLATRTLQPPESPRLGRRGLDSMRELPPLSPSLSRRALSPLPTRTTPDPKLNREVAESPRPRRWAAHGASPEDFSLTLGARGRRTRSPSPTLGESLAPHKGSFSGRLSPAYSLGSLTGASPCQSPCVQRKLSSGDLRVPVTRERKNSITEISDNEDDLLEYHRRQRQERLREQEMERLERQRLETILNLCAEYSRADGGPEAGELPSIGEATAALALAGRRPSRGLAGASGRSSEEPGVATQRLWESMERSDEENLKEECSSTESTQQEHEDAPSTKLQGEVLALEEERAQVLGHVEQLKVRVKELEQQLQESAREAEMERALLQGEREAERALLQKEQKAVDQLQEKLVALETGIQKERDKEAEALETETKLFEDLEFQQLERESRVEEERELAGQGLLRSKAELLRSIAKRKERLAILDSQAGQIRAQAVQESERLARDKNASLQLLQKEKEKLTVLERRYHSLTGGRPFPKTTSTLKEMEKLLLPAVDLEQWYQELMAGLGTGPAAASPHSSPPPLPAKASRQLQVYRSKMDGEATSPLPRTRSGPLPSSSGSSSSSSQLSVATLGRSPSPKSALLTQNGTGSLPRNLAATLQDIETKRQLALQQKGQQVIEEQRRRLAELKQKAAAEAQCQWDALHGAAPFPAGPSGFPPLMHHSILHHLPAGRERGEEGEHAYDTLSLESSDSMETSISTGGNSACSPDNMSSASGLDMGKIEEMEKMLKEAHAEKNRLMESREREMELRRQALEEERRRREQVERRLQSESARRQQLVEKEVKMREKQFSQARPLTRYLPIRKEDFDLKTHIESSGHGVDTCLHVVLSSKVCRGYLVKMGGKIKSWKKRWFVFDRLKRTLSYYVDKHETKLKGVIYFQAIEEVYYDHLRSAAKKRFFRFTMVTESPNPALTFCVKTHDRLYYMVAPSAEAMRIWMDVIVTGAEGYTQFMN

SEQ ID NO: 7854 - protein, 1326 aa, Homo sapiens
ELWSLRTMDALNRNQIGPGCQTQTMVQKGPLDLIEKGKGLKVQTDKPHLVSLGSGRLSTAITLLPVEEGRTVIGSAARDISIQGPGLAPEHCYIENLGGTLTLYPCGNACTIDGLPVRQPTRLTQGCMLCLGQSTFLRFNHPAEAKWMKSMIPAGGRAPGPPYSPVPAESESLVNGNHTPQTATRGPSACASHSSLVSSIEKDLQEIMDSLVLEEPGAAGKKPAATSPLSPMANGGRYLLSPPTSPGAMSVGSSYENTSPAFSPLSSPASSGSCASHSPSGQEPGPSVPPLVPARSSSYHLALQPPQSRPSGARSESPRLSRKGGHERPPSPGLRGLLTDSPAATVLAEARRATESPRLGGQLPVVAISLSEYPASGALSQPTSIPGSPKFQPPVPAPRNKIGTLQDRPPSPFREPPGSERVLTTSPSRQLVGRTFSDGLATRTLQPPESPRLGRRGLDSMRELPPLSPSLSRRALSPLPTRTTPDPKLNREVAESPRPRRWAAHGASPEDFSLTLGARGRRTRSPSPTLGESLAPHKGSFSGRLSPAYSLGSLTGASPCQSPCVQRKLSSGDLRVPVTRERKNSITEISDNEDDLLEYHRRQRQERLREQEMERLERQRLETILNLCAEYSRADGGPEAGELPSIGEATAALALAGRRPSRGLAGASGRSSEEPGVATQRLWESMERSDEENLKEECSSTESTQQEHEDAPSTKLQGEVLALEEERAQVLGHVEQLKVRVKELEQQLQESAREAEMERALLQGEREAERALLQKEQKAVDQLQEKLVALETGIQKERDKEAEALETETKLFEDLEFQQLERESRVEEERELAGQGLLRSKAELLRSIAKRKERLAILDSQAGQIRAQAVQESERLARDKNASLQLLQKEKEKLTVLERRYHSLTGGRPFPKTTSTLKEVYRSKMDGEATSPLPRTRSGPLPSSSGSSSSSSQLSVATLGRSPSPKSALLTQNGTGSLPRNLAATLQDIETKRQLALQQKGQQVIEEQRRRLAELKQKAAAEAQCQWDALHGAAPFPAGPSGFPPLMHHSILHHLPAGRERGEEGEHAYDTLSLESSDSMETSISTGGNSACSPDNMSSASGLDMGKIEEMEKMLKEAHAEKNRLMESREREMELRRQALEEERRRREQVERRLQSESARRQQLVEKEVKMREKQFSQARPLTRYLPIRKEDFDLKTHIESSGHGVDTCLHVVLSSKVCRGYLVKMGGKIKSWKKRWFVFDRLKRTLSYYVDKHETKLKGVIYFQAIEEVYYDHLRSAAKSPNPALTFCVKTHDRLYYMVAPSAEAMRIWMDVIVTGAEGYTQFMN

SEQ ID NO: 7855 - protein, 613 aa, Homo sapiens
MERALLQGEREAERALLQKEQKAVDQLQEKLVALETGIQKERDKERAELAAGRRHLEARQALYAELQTQLDNCPESVREQLQEQLRREAEALETETKLFEDLEFQQLERESRVEEERELAGQGLLRSKAELLRSIAKRKERLAILDSQAGQIRAQAVQESERLARDKNASLQLLQKEKEKLTVLERRYHSLTGGRPFPKTTSTLKEVYRSKMDGEATSPLPRTRSGPLPSSSGSSSSSSQLSVATLGRSPSPKSALLTQNGTGSLPRNLAATLQDIETKRQLALQQKGQQVIEEQRRRLAELKQKAAAEAQCQWDALHGAAPFPAGPSGFPPLMHHSILHHLPAGRERGEEGEHAYDTLSLESSDSMETSISTGGNSACSPDNMSSASGLDMGKIEEMEKMLKEAHAEKNRLMESREREMELRRQALEEERRRREQVERRLQSESARRQQLVEKEVKMREKQFSQARPLTRYLPIRKEDFDLKTHIESSGHGVDTCLHVVLSSKVCRGYLVKMGGKIKSWKKRWFVFDRLKRTLSYYVDKHETKLKGVIYFQAIEEVYYDHLRSAAKSPNPALTFCVKTHDRLYYMVAPSAEAMRIWMDVIVTGAEGYTQFMN

SEQ ID NO: 7856 - protein, 844 aa, Homo sapiens
MVTVMPLEMEKTISKLMFDFQRNSTSDDDSGCALEEYAWVPPGLKPEQVHQYYSCLPEEKVPYVNSPGEKLRIKQLLHQLPPHDNEVRYCNSLDEEEKRELKLFSSQRKRENLGRGNVRPFPVTMTGAICEQCGGQINGGDIAVFASRAGHGVCWHPPCFVCTVCNELLVDLIYFYQDGKIYCGRHHAECLKPRCAACDEIIFADECTEAEGRHWHMKHFCCFECETVLGGQRYIMKEGRPYCCHCFESLYAEYCDTCAQHIGIDQGQMTYDGQHWHATETCFCCAHCKKSLLGRPFLPKQGQIFCSRACSAGEDPNGSDSSDSAFQNARAKESRRSAKIGKNKGKTEEPMLNQHSQLQVSSNRLSADVDPLSLQMDMLSLSSQTPSLNRDPIWRSREEPYHYGNKMEQNQTQSPLQLLSQCNIRTSYSPGGQGAGAQPEMWGKHFSNPKRSSSLAMTGHAGSFIKECREDYYPGRLRSQESYSDMSSQSFSETRGSIQVPKYEEEEEEEGGLSTQQCRTRHPISSLKYTEDMTPTEQTPRGSMESLALSNATGLSADGGAKRQEHLSRFSMPDLSKDSGMNVSEKLSNMGTLNSSMQFRSAESVRSLLSAQQYQEMEGNLHQLSNPIGYRDLQSHGRMHQSFDFDGGMAGSKLPGQEGVRIQPMSERTRRRATSRDDNRRFRPHRSRRSRRSRSDNALHLASEREAISRLKDRPPLRAREDYDQFMRQRSFQESMGHGSRRDLYGQCPRTVSDLALQNAFGDRWGPYFAEYDWCSTCSSSSESDNEGYFLGEPIPQPARLRYVTSDELLHKYSSYGLPKSSTLGGRGQLHSRKRQKSKNCIIS

SEQ ID NO: 7857 - protein, 529 aa, Homo sapiens
MEQEKKLLVSDSNSFMERESLKSPFTGDTSMNNLETVHHNNSKADKLKEKPSEWSKRHRPQHYKHEDAKEMPLTWVQDEIWCHDSYESDGKSENWGNFIAKEEEKPNHQEWDSGEHTNACVQQNSSFVDRPYKCSECWKSFSNSSHLRTHQRTHSGEKPYKCSECAKCFCNSSHLIQHLRMHTGEKPYQCGECGKSFSNTSHLIIHERTHTGEKPYKCPECGKRFSSSSHLIQHHRSHTGEKPYECSVCGKGFSHSYVLIEHQRTHTGEKPYKCPDCGKSFSQSSSLIRHQRTHTGEKPYKCLECEKSFGCNSTLIKHQRIHTGEKPYQCPECGKNFSRSSNLITHQKMHTGEKSYESSEYEESLGQNCNVIEECRIQLGEKPYRCCECGKSFGLSSHLIRHQRTHTGEKPYRCSECWKTFSQSSTLVIHQRTHTGEKPYKCPDCGESFSQSFNLIRHRRTHIGEKPYKCTSCEKCFSRIAYLSQHRKIHVEKPFESPDVGDFPHEWTWKNCSGEMPFISSFSVSNSSS

SEQ ID NO: 7858 - protein, 824 aa, Homo sapiens
MSSSPVNVKKLKVSELKEELKKRRLSDKGLKAELMERLQAALDDEEAGGRPAMEPGNGSLDLGGDSAGRSGAGLEQEAAAGGDEEEEEEEEEEEGISALDGDQMELGEENGAAGAADSGPMEEEEAASEDENGDDQGFQEGEDELGDEEEGAGDENGHGEQQPQPPATQQQQPQQQRGAAKEAAGKSSGPTSLFAVTVAPPGARQGQQQAGGKKKAEGGGGGGRPGAPAGDGKTEQKGGDKKRGVKRPREDHGRGYFEYIEENKYSRAKSPQPPVEEEDEHFDDTVVCLDTYNCDLHFKISRDRLSASSLTMESFAFLWAGGRASYGVSKGKVCFEMKVTEKIPVRHLYTKDIDIHEVRIGWSLTTSGMLLGEEEFSYGYSLKGIKTCNCETEDYGEKFDENDVITCFANFESDEVELSYAKNGQDLGVAFKISKEVLAGRPLFPHVLCHNCAVEFNFGQKEKPYFPIPEEYTFIQNVPLEDRVRGPKGPEEKKDCEVVMMIGLPGAGKTTWVTKHAAENPGKYNILGTNTIMDKMMVAGFKKQMADTGKLNTLLQRAPQCLGKFIEIAARKKRNFILDQTNVSAAAQRRKMCLFAGFQRKAVVVCPKDEDYKQRTQKKAEVEGKDLPEHAVLKMKGNFTLPEVAECFDEITYVELQKEEAQKLLEQYKEESKKALPPEKKQNTGSKKSNKNKSGKNQFNRGGGHRGRGGLNMRGGNFRGGAPGNRGGYNRRGNMPQRGGGGGGSGGIGYPYPRAPVFPGRGSYSNRGNYNRGGMPNRGNYNQNFRGRGNNRGYKNQSQGYNQWQQGQFWGQKPWSQHYHQGYY

SEQ ID NO: 7859 - protein, 813 aa, Homo sapiens
MSSSPVNVKKLKVSELKEELKKRRLSDKGLKAELMERLQAALDDEEAGGRPAMEPGNGSLDLGGDSAGRSGAGLEQEAAAGGDEEEEEEEEEEEGISALDGDQMELGEENGAAGAADSGPMEEEEAASEDENGDDQGFQEGEDELGDEEEGAGDENGHGEQQPQPPATQQQQPQQQRGAAKEAAGKSSGPTSLFAVTVAPPGARQGQQQAGGDGKTEQKGGDKKRGVKRPREDHGRGYFEYIEENKYSRAKSPQPPVEEEDEHFDDTVVCLDTYNCDLHFKISRDRLSASSLTMESFAFLWAGGRASYGVSKGKVCFEMKVTEKIPVRHLYTKDIDIHEVRIGWSLTTSGMLLGEEEFSYGYSLKGIKTCNCETEDYGEKFDENDVITCFANFESDEVELSYAKNGQDLGVAFKISKEVLAGRPLFPHVLCHNCAVEFNFGQKEKPYFPIPEEYTFIQNVPLEDRVRGPKGPEEKKDCEVVMMIGLPGAGKTTWVTKHAAENPGKYNILGTNTIMDKMMVAGFKKQMADTGKLNTLLQRAPQCLGKFIEIAARKKRNFILDQTNVSAAAQRRKMCLFAGFQRKAVVVCPKDEDYKQRTQKKAEVEGKDLPEHAVLKMKGRNFTLPEVAECFDEITYVELQKEEAQKLLEQYKEESKKALPPEKKQNTGSKKSNKNKSGKNQFNRGGGHRGRGGFNMRGGNFRGGGNSCLLAPGNRGGYNRRGNMPQRGGGGGGSGGIGYPYPRAPVFPGRGSYSNRGNYNRGGMPNRGNYNQNFRGRGNNRGYKNQSQGYNQWQQGQFWGQKPWSQHYHQGYY

SEQ ID NO: 7860 - protein, 229 aa, Homo sapiens
MTTAARPTFEPARGGRGKGEGDLSQLSKQYSSRDLPSHTKIKYRQTTQDAPEEVRNRDFRRELEERERAAAREKNRDRPTREHTTSSSVSKKPRLDQIPAANLDADDPLTDEEDEDFEEESDDDDTAALLAELEKIKKERAEEQARKDQEQKAEEERIRMENILSGNPLLNLTGPSQPQANFKVKRRWDDDVVFKNCAKGVDDQKKDKRFVNDTLRSEFHKKFMEKYIK

SEQ ID NO: 7861 - protein, 395 aa, Homo sapiens
MMAAKVVPMPPKPKQSFILRVPPDSKLGQDLLRDATNGPKTIHQLVLEHFLTFLPKPSLVQPSQKVKETLVIMKDVSSSLQNRVHPRPLVKLLPKGVQKEQETVSLYLKANPEELVVFEDLNVFHCQEECVSLDPTQQLTSEKEDDSSVGEMMLLAVNGSNPEGEDPEREPVENEDYREKSSDDDEMDSSLVSQQPPDNQEKERLNTSIPQKRKMRNLLVTIENDTPLEELSKYVDISIIALTRNRRTRRWYTCPLCGKQFNESSYLISHQRTHTGEKPYDCNHCGKSFNHKTNLNKHERIHTGEKPYSCSQCGKNFRQNSHRSRHEGIHIREKIFKCPECGKTFPKNEEFVLHLQSHEAERPYGCKKCGRRFGRLSNCTRHEKTHSACKTRKQK

SEQ ID NO: 7862 - protein, 394 aa, Homo sapiens
MMAAKVVPMPPKPKQSFILRVPPDSKLGQDLLRDATNGPKTIHQLVLEHFLTFLPKPSLVQPSQKVKETLVIMKDVSSSLQNRVHPRPLVKLLPKGVQKEQETVSLYLKANPELVVFEDLNVFHCQEECVSLDPTQQLTSEKEDDSSVGEMMLLAVNGSNPEGEDPEREPVENEDYREKSSDDDEMDSSLVSQQPPDNQEKERLNTSIPQKRKMRNLLVTIENDTPLEELSKYVDISIIALTRNRRTRRWYTCPLCGKQFNESSYLISHQRTHTGEKPYDCNHCGKSFNHKTNLNKHERIHTGEKPYSCSQCGKNFRQNSHRSRHEGIHIREKIFKCPECGKTFPKNEEFVLHLQSHEAERPYGCKKCGRRFGRLSNCTRHEKTHSACKTRKQK

SEQ ID NO: 7863 - protein, 1919 aa, Homo sapiens
GCVEGAAPRMATADTPAPASSGLSPKEEGELEDGEISDDDNNSQIRSRSSSSSSGGGLLPYPRRRPPHSARGGGSGGGGGSSSSSSSSQQQLRNFSRSRHASERGHLRGPSSYRPKEPFRSHPPSVRMPSSSLSESSPRPSFWERSHLALDRFRFRGRPYRGGSRWSRGRGVGERGGKPGCRPPLGGGAGSGFSSSQSWREPSPPRKSSKSFGRSPSRKQNYSSKNENCVEETFEDLLLKYKQIQLELECINKDEKLALSSKEENVQEDPKTLNFEDQTSTDNVSITKDSSKEVAPEEKTQVKTFQAFELKPLRQKLTLPGDKNRLKKVKDGAKPLSLKSDTTDSSQGLQDKEQNLTRRISTSDILSEKKLGEDEEELSELQLRLLALQSASKKWQQKEQQVMKESKEKLTKTKTVQQKVKTSTKTHSAKKVSTTAKQALRKQQTKAWKKLQQQKEQERQKEEDQRKQAEEEERRKREEEIRKIRDLSNQEEQYNRFMKLVGGKRRSRSKSSDPDLRRSLDKQPTDSGGGIYQYDNYEEVAMDTDSETSSPAPSPVQPPFFSECSLGYFSPAPSLSLPPPPQVSSLPPLSQPYVEGLCVSLEPLPPLPPLPPLPPEDPEQPPKPPFADEEEEEEMLLREELLKSLANKRAFKPEETSSNSDPPSPPVLNNSHPVPRSNLSIVSINTVSQPRIQNPKFHRGPRLPRTVISLPKHKSVVVTLNDSDDSESDGEASKSTNSVFGGLESMIKEARRTAEQASKPKVPPKSEKENDPLRTPEALPEEKKIEYRLLKEEIANREKQRLIKSDQLKTSSSSPANSDVEIDGIGRIAMVTKQVTDAESKLKKHRILLMKDESVLKNLVQQEAKKKESVRNAEAKITKLTEQLQATEKILNVNRMFLKKLQEQIHRVQQRVTIKKALTLKYGEELARAKAVASKEIGKRKLEQDRFGPNKMMRLDSSPVSSPRKHSAELIAMEKRRLQKLEYEYALKIQKLKEARALKAKEQQNISPVVEEEPEFSLPQPSLHDLTQDKLTLDTEENDVDDEILSGSSRERRRSFLESNYFTKPNLKHTDTANKECINKLNKNTVEKPELFLGLKIGELQKLYSKADSLKQLILKTTTGITEKVLHGQEISVDVDFVTAQSKTMEVKPCPFRPYHSPLLVFKSYRFSPYYRTKEKLPLSSVSYSNMIEPDQCFCRFDLTGTCNDDDCQWQHIQDYTLSRKQLFQDILSYNLSLIGCAETSTNEEITASAEKYVEKLFGVNKDRMSMDQMAVLLVSNINESKGHTPPFTTYKDKRKWKPKFWRKPISDNSFSSDEEQSTGPIKYAFQPENQINVPALDTVVTPDDVRYFTNETDDIANLEASVLENPSHVQLWLKLAYKYLNQNEGECSESLDSALNVLARALENNKDNPEIWCHYLRLFSKRGTKDEVQEMCETAVEYAPDYQSFWTFLHLESTFEEKDYVCERMLEFLMGAAKQETSNILSFQLLEALLFRVQLHIFTGRCQSALAILQNALKSANDGIVAEYLKTSDRCLAWLAYIHLIEFNILPSKFYDPSNDNPSRIVNTESFVMPWQAVQDVKTNPDMLLAVFEDAVKACTDESLAVEERIEACLPLYTNMIALHQLLERYEAAMELCKSLLESCPINCQLLEALVALYLQTNQHDKARAVWLTAFEKNPQNAEVFYHMCKFFILQNRGDNLLPFLRKFIASFFKPGFEKYNNLDLFRYLLNIPGPIDIPSRLCKGNFDDDMFNHQVPYLWLIYCLCHPLQSSIKETVEAYEAALGVAMRCDIVQKIWMDYLVFANNRAAGSRNKVQEFKFFTDLVNRCLVTVPARYPIPFSSADYWSNYEFHNRVIFFYLSCVPKTQHSKTLERFCSVMPANSGLALRLLQHEWEESNVQILKLQAKMFTYNIPTCLATWKM

SEQ ID NO: 7864 - protein, 5689 aa, Homo sapiens
MDQAQVSPLALDNMGLAQDNPLALDNMSLDQVSLAMANTVLAQVSHLAMANMGLDRHLALDNMGQAQVNPLALANMDQAQVSPLALDNMGLAQDNPLALDSMSLDHISPAMANMVLAQVNHLAMVNMGQVRDRHLALDNTGQAQVNTLALDNMDQAQVSPVALDNMGLAQDNTLVLDNMSLDHISLAMANMVLAQVSHLAMVNMGQVQDRLLDLDNTGQAQVNPLALANMDQAQVSPLALDNMSQAQENPLALDSMSLDQVSLIMANMVLAQVSHLAMVNMGLVQDRQLALDNTGQAQANTQALDNMDQAQISPLALDNMGLVQDNPLVLDNMSLDHVSLAMANMVLAQVNHLAMVNMGQIQDRHLDLDNTGQAQVSPLALANMDRAQHEYRSGQSSYGQHGTGSSQSSGCGQHESGSGPTTSFGQHVSGSDNFSSSGQHISDSGQSTGFGQYGSGSGQSTGLGQGESQQVESGSTVHGRQETTHGQTINTTRHSQSGQGQSTQTGSRVTRRRRSSQSENSDSEVHSKVSHRHSEHIHTQAGSHYPKSGSTVRRRQGTTHGQRGDTTRHGHSGHGQSTQTGSRTSGRQRFSHSDATDSEVHSGVSHRPHSQEQTHSQAGSQHGESESTVHERHETTYGQTGEATGHGHSGHGQSTQRGSRTTGRRGSGHSESSDSEVHSGGSHRPQSQEQTHGQAGSQHGESGSTVHGRHGTTHGQTGDTTRHAHYHHGKSTQRGSSTTGRRGSGHSESSDSEVHSGGSHTHSGHTHGQSGSQHGESESIIHDRHRITHGQTGDTTRHSYSGHEQTTQTGSRTTGRQRTSHSESTDSEVHSGGSHRPHSREHTYGQAGSQHEEPEFTVHERHGTTHGQIGDTTGHSHSGHGQSTQRGSRTTGRQRSSHSESSDSEVHSGVSHTHTGHTHGQAGSQHGQSESIVPERHGTTHGQTGDTTRHAHYHHGLTTQTGSRTTGRRGSGHSEYSDSEGYSGVSHTHSGHTHGQARSQHGESESIVHERHGTIHGQTGDTTRHAHSGHGQSTQTGSRTTGRRSSGHSEYSDSEGHSGFSQRPHSRGHTHGQAGSQHGESESIVDERHGTTHGQTGDTSGHSQSGHGQSTQSGSSTTGRRRSGHIMDKPYRQGPGQLEEGDLATVSTVTVKGPQGSHTHIQDTLTVKLDLTIQSQDPQFMRDTELLMDKQQIPLDMATLVMDSPHREGPGQLEEGHLATVSTVTVKGTQGSHTHIQDTLMAKPDLNMESQDPQFMRDTELLMDRQEIPLDMLTLVMDSPHREGQGQLEEGDLATVSPVTVKCTQGSHTHIQDTLMAKPDLNMESQDLPFTGDRELYMDRQEIPLDMASLVMDSPHRQVPGQLEDKDLVTVSPVIVKCTQRPHPHIQDTLTAKPDLDMDSQDPQVMGDRELLMDRQEIPLDMPTMVMDNPHREGPGQLEEGDLATVSPVTVKCTHGAHTHIQDTFRAKLDLNKDSQDPQFMGDWKLLMDRQEIPLDMAILVMDNPHRQVPDLVEQVIFSHIVVKGKGMDQVRFGNMAAMDLQNMTMGTLVSKATKRTGRHSLNHEQSMVSYEHSVDSQYQSRPIIIRSQESSHGHSIVTHKQSNNTYVQPGYNTARREGCTHSQSNDHLGFGHGQSISVHGHSKSSSIRKQESHTDNKKHSEDWEKDTHEQLGSRHGKLEFNTIGIHGSSQQHFGDTTFHGQVHIYCQKMSTLLENIFAIINLFKQYSKKDKNTDTLSKKELKELLEKEFRQILKNPDDPDMVDVFMDHLDIDHNKKIDFTEFLLMVFKLAQAYYESTRKENLPISGHKHRKHSHHDKHEDNKQEENKENRKRPSSLERRNNRKGNKGRSKSPRETGGKRHESSSEKKERKGYSPTHREEEYGKNHHNSSKKEKNKTENTRLGDNRKRLSERLEEKEDNEEGVYDYENTGRMTQKWIQSGHIATYYTIQDEAYDTTDSLLEENKIYERSRSSDGKSSSQVNRSRHENTSQVPLQESRTRKRRGSRVSQDRDSEGHSEDSERHSGSASRNHHGSAWEQSRDGSRHPRSHDEDRASHGHSADSSRQSGTRHAETSSRGQTASSHEQARSSPGERHGSGHQQSADSSRHSATGRGQASSAVSDRGHRGSSGSQASDSEGHSENSDTQSVSGHGKAGLRQQSHQESTRGRSGERSGRSGSSLYQVSTHEQPDSAHGRTGTSTGGRQGSHHEQARDSSRHSASQEGQDTIRGHPGSSRGGRQGSHHEQSVNRSGHSGSHHSHTTSQGRSDASHGQSGSRSASRQTRNEEQSGDGTRHSGSRHHEASSQADSSRHSQVGQGQSSGPRTSRNQGSSVSQDSDSQGHSEDSERWSGSASRNHHGSAQEQSRDGSRHPRSHHEDRAGHGHSADSSRKSGTRHTQNSSSGQAASSHEQARSSAGERHGSRHQLQSADSSRHSGTGHGQASSAVRDSGHRGSSGSQATDSEGHSEDSDTQSVSGHGQAGHHQQSHQESARDRSGERSRRSGSFLYQGRSDASRGQSGSRSASRTTRNEEQSRDGSRHSGSRHHEASSHADISRHSQAGQGQSEGSRTSRRQGSSVSQDSDSEGHSEDSERWSGSASRNHRGSAQEQSRHGSRHPRSHHEDRAGHGHSADSSRQSGTPHAETSSGGQAASSHEQARSSPGERHGSRHQQSADSSRHSGIPRRQASSAVRDSGHWGSSGSQASDSEGHSEESDTQSVSGHGQDGPHQQSHQESARDWSGGRSGRSGSFIYQVSTHEQSESAHGRTRTSTGRRQGSHHEQARDSSRHSASQEGQDTIRAHPGSRRGGRQGSHHEQSVDRSGHSGSHHSHTTSQGRSDASHGQSGSRSASRQTRKDKQSGDGSRHSGSRHHEAASWADSSRHSQVGQEQSSGSRTSRHQGSSVSQDSDSERHSDDSERLSGSASRNHHGSSREQSRDGSRHPGFHQEDRASHGHSADSSRQSGTHHTESSSHGQAVSSHEQARSSPGERHGSRHQQSADSSRHSGIGHRQASSAVRDSGHRGSSGSQVTNSEGHSEDSDTQSVSAHGQAGPHQQSHKESARGQSGESSGRSRSFLYQVSSHEQSESTHGQTAPSTGGRQGSRHEQARNSSRHSASQDGQDTIRGHPGSSRGGRQGSYHEQSVDRSGHSGYHHSHTTPQGRSDASHGQSGPRSASRQTRNEEQSGDGSRHSGSRHHEPSTRAGSSRHSQVGQGESAGSKTSRRQGSSVSQDRDSEGHSEDSERRSESASRNHYGSAREQSRHGSRNPRSHQEDRASHGHSAESSRQSGTRHAETSSGGQAASSQEQARSSPGERHGSRHQQSADSSTDSGTGRRQDSSVVGDSGNRGSSGSQASDSEGHSEESDTQSVSAHGQAGPHQQSHQESTRGQSGERSGRSGSFLYQVSTHEQSESAHGRTGPSTGGRQRSRHEQARDSSRHSASQEGQDTIRGHPGSSRGGRQGSHYEQSVDSSGHSGSHHSHTTSQERSDVSRGQSGSRSVSRQTRNEKQSGDGSRHSGSRHHEASSRADSSRHSQVGQGQSSGPRTSRNQGSSVSQDSDSQGHSEDSERWSGSASRNHLGSAWEQSRDGSRHPGSHHEDRAGHGHSADSSRQSGTRHTESSSRGQAASSHEQARSSAGERHGSHHQLQSADSSRHSGIGHGQASSAVRDSGHRGYSGSQASDSEGHSEDSDTQSVSAQGKAGPHQQSHKESARGQSGESSGRSGSFLYQVSTHEQSESTHGQSAPSTGGRQGSHYDQAQDSSRHSASQEGQDTIRGHPGPSRGGRQGSHQEQSVDRSGHSGSHHSHTTSQGRSDASRGQSGSRSASRKTYDKEQSGDGSRHSGSHHHEASSWADSSRHSLVGQGQSSGPRTSRPRGSSVSQDSDSEGHSEDSERRSGSASRNHHGSAQEQSRDGSRHPRSHHEDRAGHGHSAESSRQSGTHHAENSSGGQAASSHEQARSSAGERHGSHHQQSADSSRHSGIGHGQASSAVRDSGHRGSSGSQASDSEGHSEDSDTQSVSAHGQAGPHQQSHQESTRGRSAGRSGRSGSFLYQVSTHEQSESAHGRTGTSTGGRQGSHHKQARDSSRHSTSQEGQDTIHGHPGSSSGGRQGSHYEQLVDRSGHSGSHHSHTTSQGRSDASHGHSGSRSASRQTRNDEQSGDGSRHSGSRHHEASSRADSSGHSQVGQGQSEGPRTSRNWGSSFSQDSDSQGHSEDSERWSGSASRNHHGSAQEQLRDGSRHPRSHQEDRAGHGHSADSSRQSGTRHTQTSSGGQAASSHEQARSSAGERHGSHHQQSADSSRHSGIGHGQASSAVRDSGHRGYSGSQASDNEGHSEDSDTQSVSAHGQAGSHQQSHQESARGRSGETSGHSGSFLYQVSTHEQSESSHGWTGPSTRGRQGSRHEQAQDSSRHSASQDGQDTIRGHPGSSRGGRQGYHHEHSVDSSGHSGSHHSHTTSQGRSDASRGQSGSRSASRTTRNEEQSGDGSRHSGSRHHEASTHADISRHSQAVQGQSEGSRRSRRQGSSVSQDSDSEGHSEDSERWSGSASRNHHGSAQEQLRDGSRHPRSHQEDRAGHGHSADSSRQSGTRHTQTSSGGQAASSHEQARSSAGERHGSHHQQSADSSRHSGIGHGQASSAVRDSGHRGYSGSQASDNEGHSEDSDTQSVSAHGQAGSHQQSHQESARGRSGETSGHSGSFLYQVSTHEQSESSHGWTGPSTRGRQGSRHEQAQDSSRHSASQYGQDTIRGHPGSSRGGRQGYHHEHSVDSSGHSGSHHSHTTSQGRSDASRGQSGSRSASRTTRNEEQSGDSSRHSVSRHHEASTHADISRHSQAVQGQSEGSRRSRRQGSSVSQDSDSEGHSEDSERWSGSASRNHRGSVQEQSRHGSRHPRSHHEDRAGHGHSADRSRQSGTRHAETSSGGQAASSHEQARSSPGERHGSRHQQSADSSRHSGIPRGQASSAVRDSRHWGSSGSQASDSEGHSEESDTQSVSGHGQAGPHQQSHQESARDRSGGRSGRSGSFLYQVSTHEQSESAHGRTRTSTGRRQGSHHEQARDSSRHSASQEGQDTIRGHPGSSRRGRQGSHYEQSVDRSGHSGSHHSHTTSQGRSDASRGQSGSRSASRQTRNDEQSGDGSRHSWSHHHEASTQADSSRHSQSGQGQSAGPRTSRNQGSSVSQDSDSQGHSEDSERWSGSASRNHRGSAQEQSRDGSRHPTSHHEDRAGHGHSAESSRQSGTHHAENSSGGQAASSHEQARSSAGERHGSHHQQSADSSRHSGIGHGQASSAVRDSGHRGSSGSQASDSEGHSEDSDTQSVSAHGQAGPHQQSHQESTRGRSAGRSGRSGSFLYQVSTHEQSESAHGRAGPSTGGRQGSRHEQARDSSRHSASQEGQDTIRGHPGSRRGGRQGSYHEQSVDRSGHSGSHHSHTTSQGRSDASHGQSGSRSASRETRNEEQSGDGSRHSGSRHHEASTQADSSRHSQSGQGESAGSRRSRRQGSSVSQDSDSEAYPEDSERRSESASRNHHGSSREQSRDGSRHPGSSHRDTASHVQSSPVQSDSSTAKEHGHFSSLSQDSAYHSGIQSRGSPHSSSSYHYQSEGTERQKGQSGLVWRHGSYGSADYDYGESGFRHSQHGSVSYNSNPVVFKERSDICKASAFGKDHPRYYATYINKDPGLCGHSSDISKQLGFSQSQRYYYYE

SEQ ID NO: 7865 - protein, 533 aa, Homo sapiens
MISSSSVHSRTFNTSNALGPVCKHKKPLSAAKACISEILPSKFKPRLSAPSALLQEQKSILLPSEKAQSCENLCVSGSLNDSKRGLPLQVGGSIENLLMRSRRDYDSKSSSTMSLQEYSTSGRRPCPLSRKAGMQFTMLYRDMHQINRSGLFLGSISSSSSVRDLASHFEKSSLALSRGELGPSQEGSEHIPKHTVSSRITAFEQLIQRSRSMPSLDLSGRLSKSPTPVLSRGSLTSARSAESLLESTKLHPKEMDGMNSSGVYASPTCSNMAHHALSFRGLVPSEPLSTCSDDVDRCSNISTDSREGSGGSVHGDFPKHRLNKCKGTCPASYTRFTTIRKHEQQQTSRQPEWRLDARGDKSTLLRNIYLMSPLPFRLKKPLHHHPRQPSPGDSSGLLVGQKPDLPSQPHQDQPPSGGKPVVPTRLSSRHTMARLSRSSEPSQERPTALEDYPRAINNGNSVPYSDHSLDRNNNPQSELAPSRGGGILCVCLVSPARPSTLLALSRPPLCPWCSFSGLSFVFCLFCLAINHGS

SEQ ID NO: 7866 - protein, 985 aa, Homo sapiens
MSRIESLTRARIDRSRELASKTREKEKMKEAKDARYTNGHLFTTISVSGMTMCYACNKSITAKEALICPTCNVTIHNRCKDTLANCTKVKQKQQKAALLKNNTALQSVSLRSKTTIRERPSSAIYPSDSFRQSLLGSRRGRSSLSLAKSVSTTNIAGHFNDESPLGLRRILSQSTDSLNMRNRTLSVESLIDEEVIYSELMSDFEMDEKDFAADSWSLAVDSSFLQQHKKEVMKQQDVIYELIQTELHHVRTLKIMTRLFRTGMLEELHLEPGVVQGLFPCVDELSDIHTRFLSQLLERRRQALCPGSTRNFVIHRLGDLLISQFSGPSAEQMCKTYSEFCSRHSKALKLYKELYARDKRFQQFIRKVTRPAVLKRHGVQECILLVTQRITKYPLLISRILQHSHGIEEERQDLTTALGLVKELLSNVDEGIYQLEKGARLQEIYNRMDPRAQTPVPGKGPFGREELLRRKLIHDGCLLWKTATGRFKDVLVLLMTDVLVFLQEKDQKYIFPTLDKPSVVSLQNLIVRDIANQEKGMFLISAAPPEMYEVHTASRDDRSTWIRVIQQSVRTCPSREDFPLIETEDEAYLRRIKMELQQKDRALVELLREKVGLFAEMTHFQAEEDGGSGMALPTLPRGLFRSESLESPRGERLLQDAIREVEGLKDLLVGPGVELLLTPREPALPLEPDSGGNTSPGVTANGEARTFNGSIELCRADSDSSQRDRNGNQLRSPQEEALQRLVNLYGLLHGLQAAVAQQDTLMEARFPEGPERREKLCRANSRDGEAGRAGAAPVAPEKQATELALLQRQHALLQEELRRCRRLGEERATEAGSLEARLRESEQARALLEREAEEARRQLAALGQTEPLPAEAPWARRPVDPRRRSLPAGDALYLSFNPPQPSRGTDRLDLPVTTRSVHRNFEDRERQELGSPEERLQDSSDPDTGSEEEGSSRLSPPHSPRDFTRMQDIPEETESRDGEAVASES

SEQ ID NO: 7867 - protein, 331 aa, Homo sapiens
MGSAGLSRLHGLFAVYKPPGLKWKHLRDTVELQLLKGLNARKPPAPKQRVRFLLGPMEGSEEKELTLTATSVPSFINHPLVCGPAFAHLKVGVGHRLDAQASGVLVLGVGHGCRLLTDMYNAHLTKDYTVRGLLGKATDDFREDGRLVEKTTYDHVTREKLDRILAVIQGSHQKALVMYSNLDLKTQEAYEMAVRGLIRPMNKSPMLITGIRCLYFAPPEFLLEVQCMHETQKELRKLVHEIGLELKTTAVCTQVRRTRDGFFTLDSALLRTQWDLTNIQDAIRAATPQVAAELEKSLSPGLDTKQLPSPGWSWDSQGPSSTLGLERGAGQ

SEQ ID NO: 7868 - protein, 245 aa, Homo sapiens
MTSSYGHVLERQPALGGRLDSPGNLDTLQAKKNFSVSHLLDLEEAGDMVAAQADENVGEAGRSLLESPGLTSGSDTPQQDNDQLNSEEKKKRKQRRNRTTFNSSQLQALERVFERTHYPDAFVREDLARRVNLTEARVQVWFQNRRAKFRRNERAMLANKNASLLKSYSGDVTAVEQPIVPRPAPRPTDYLSWGTASPYSAMATYSATCANNSPAQGINMANSIANLRLKAKEYSLQRNQVPTVN

SEQ ID NO: 7869 - protein, 113 aa, Homo sapiens
MATRTLNLSFFPRSHWPPGTCSLATAIMKDLTGLSTCAQATQVEVEGMGFKPRPSLALNIYLKQPPYQEGGCPAWSEECMEQSQPTQVGCVTWPRNPPMLLRATAPWGHVSPN

SEQ ID NO: 7870 - protein, 343 aa, Homo sapiens
NAGEVGADHINILALGWVGVEPQKCSQAHSYQEPMSKIRGLPPEVREPGPGVELGVENGLLCQLIHSPEFNLFSNSVVFESNFIQTHVPEADFQVTKPGNWRDVCEGSATVILGVTSSVPSLPLPNVLLMANVTWPQGPFTTWSTTGDAPVINLSRLLPLKYVELRIYDWLQRILRVRTVTEKIYYLKLHEKHPEIVFQFWVRLVKILQKGLSITTKDPRIKFTHCLVPKMPTNSTETTPENSLLSSPQPSEPLVLLAAEQTSGSFSQLSGKPQLTADRNNDTAVEIDNCSSYKIPSPVASPINLNIPMRAALSHSLWEQEDWNEHLLQVHIASYLGEHFLGA

SEQ ID NO: 7871 - protein, 165 aa, Homo sapiens [sequence omitted]

SEQ ID NO: 7872 - protein, 431 aa, Homo sapiens
MSDYWVVGKKSNYEVLEKDVGLKRFFPKSLLDSVKAKTLRKLIQQTFRQFANLNREESILKFFEILSPVYRFDKECFKCALGSSWIISVELAIGPEEGISYLTDKGCNPTHLADFTQVQTIQYSNSEDKDRKGMLQLKIAGAPEPLTVTAPSLTIAENMADLIDGYCRLVNGTSQSFIIRPQKEGERALPSIPKLANSEKQGMRTHAVSVSETDDYAEIIDEEDTYTMPSTRDYEIQRERIELGRCIGEGQFGDVHQGIYMSPENPALAVAIKTCKNCTSDSVREKFLQEACHYTSLHWNWCRYISDPNVDACPDPRNAELTMRQFDHPHIVKLIGVITENPVWIIMELCTLGELRSFLQVRKYSLDLASLILYAYQLSTALAYLESKRFVHRDIAARNVLVSSNDCVKLGDFGLSRYMEDSTYYKGKKSG

SEQ ID NO: 7873 - protein, 1006 aa, Homo sapiens
MAAAYLDPNLNHTPNSSTKTHLGTGMERSPGAMERVLKVFHYFESNSEPTTWASIIRHGDATDVRGIIQKIVDSHKVKHVACYGFRLSHLRSEEVHWLHVDMGVSSVREKYELAHPPEEWKYELRIRYLPKGFLNQFTEDKPTLNFFYQQVKSDYMLEIADQVDQEIALKLGCLEIRRSYWEMRGNALEKKSNYEVLEKDVGLKRFFPKSLLDSVKAKTLRKLIQQTFRQFANLNREESILKFFEILSPVYRFDKECFKCALGSSWIISVELAIGPEEGISYLTDKGCNPTHLADFTQVQTIQYSNSEDKDRKGMLQLKIAGAPEPLTVTAPSLTIAENMADLIDGYCRLVNGTSQSFIIRPQKEGERALPSIPKLANSEKQGMRTHAVSVSETDDYAEIIDEEDTYTMPSTRDYEIQRERIELGRCIGEGQFGDVHQGIYMSPENPALAVAIKTCKNCTSDSVREKFLQEALTMRQFDHPHIVKLIGVITENPVWIIMELCTLGELRSFLQVRKYSLDLASLILYAYQLSTALAYLESKRFVHRDIAARNVLVSSNDCVKLGDFGLSRYMEDSTYYKASKGKLPIKWMAPESINFRRFTSASDVWMFGVCMWEILMHGVKPFQGVKNNDVIGRIENGERLPMPPNCPPTLYSLMTKCWAYDPSRRPRFTELKAQLSTILEEEKAQQEERMRMESRRQATVSWDSGGSDEAPPKPSRPGYPSPRSSEGFYPSPQHMVQTNHYQDSTVLDLRGIGQVLPTHLMEERLIRQQQEMEEDQRWLEKEERFLKPDVRLSRGSIDREDGSLQGPIGNQHIYQPVGKPDPAAPPKKPPRPGAPGHLGSLASLSSPADSYNEGVKLQPQEISPPPTANLDRSNDKVYENVTGLVKAVIEMSSKIQPAPPEEYVPMVKEVGLALRTLLATVDETIPLLPASTHREIEMAQKLLNSDLGELINKMKLAQQYVMTSLQQEYKKQMLTAAHALAVDAKNLLDVIDQARLKMLGQTRPH

SEQ ID NO: 7874 - protein, 554 aa, Homo sapiens
MSDYWVVGKKSNYEVLEKDVGLKRFFPKSLLDSVKAKTLRKLIQQTFRQFANLNREESILKFFEILSPVYRFDKECFKCALGSSWIISVELAIGPEEGISYLTDKGCNPTHLADFTQVQTIQYSNSEDKDRKGMLQLKIAGAPEPLTVTAPSLTIAENMADLIDGYCRLVNGTSQSFIIRPQKEGERALPSIPKLANSEKQGMRTHAVSVSETDDYAEIIDEEDTYTMPSTRDYEIQRERIELGRCIGEGQFGDVHQGIYMSPENPALAVAIKTCKNCTSDSVREKFLQEACHYTSLHWNWCRYISDPNVDACPDPRNAELTMRQFDHPHIVKLIGVITENPVWIIMELCTLGELRSFLQVRKYSLDLASLILYAYQLSTALAYLESKRFVHRDIAARNVLVSSNDCVKLGDFGLSRYMEDSTYYKASKGKLPIKWMAPESINFRRFTSASDVWMFGVCMWEILMHGVKPFQGVKNNDVIGRIENGERLPMPPNCPPTLYSLMTKCWAYDPSRRPRFTELKAQLFQNPAQMLPASGRLPNQPCPERENYSFATF

SEQ ID NO: 7875 - protein, 1074 aa, Homo sapiens
MISADCNLCLPEYDRYLASSKIMAAAYLDPNLNHTPNSSTKTHLGTGMERSPGAMERVLKVFHYFESNSEPTTWASIIRHGDATDVRGIIQKIVDSHKVKHVACYGFRLSHLRSEEVHWLHVDMGVSSVREKYELAHPPEEWKYELRIRYLPKGFLNQFTEDKPTLNFFYQQVKSDYMLEIADQVDQEIALKLGCLEIRRSYWEMRGNALEKKSNYEVLEKDVGLKRFFPKSLLDSVKAKTLRKLIQQTFRQFANLNREESILKFFEILSPVYRFDKECFKCALGSSWIISVELAIGPEEGISYLTDKGCNPTHLADFTQVQTIQYSNSEDKDRKGMLQLKIAGAPEPLTVTAPSLTIAENMADLIDGYCRLVNGTSQSFIIRPQKEGERALPSIPKLANSEKQGMRTHAVSVSETDDYAEIIDEEDTYTMPSTRDYEIQRERIELGRCIGEGQFGDVHQGIYMSPENPALAVAIKTCKNCTSDSVREKFLQEALTMRQFDHPHIVKLIGVITENPVWIIMELCTLGELRSFLQVRKYSLDLASLILYAYQLSTALAYLESKRFVHRDIAARNVLVSSNDCVKLGDFGLSRYMEDSTYYKASKGKLPIKWMAPESINFRRFTSASDVWMFGVCMWEILMHGVKPFQGVKNNDVIGRIENGERLPMPPNCPPTLYSLMTKCWAYDPSRRPRFTELKAQLSTILEEEKAQQEERMRMESRRQATVSWDSGGSDEAPPKPSRPGYPSPRSSEGFYPSPQHMVQTNHYQVSGYPGSHGITAMAGSIYPGQASLLDQTDSWNHRPQEIAMWQPNVEDSTVLDLRGIGQVLPTHLMEERLIRQQQEMEEDQRWLEKEERFLKPDVRLSRGSIDREDGSLQGPIGNQHIYQPVGKPDPAAPPKKPPRPGAPGHLGSLASLSSPADSYNEGVKLQPQEISPPPTANLDRSNDKVYENVTGLVKAVIEMSSKIQPAPPEEYVPMVKEVGLALRTLLATVDETIPLLPASTHREIEMAQKLLNSDLGELINKMKLAQQYVMTSLQQEYKKQMLTAAHALAVDAKNLLDVIDQARLKMLGQTRPH

SEQ ID NO: 7876 - protein, 1052 aa, Homo sapiens
MAAAYLDPNLNHTPNSSTKTHLGTGMERSPGAMERVLKVFHYFESNSEPTTWASIIRHGDATDVRGIIQKIVDSHKVKHVACYGFRLSHLRSEEVHWLHVDMGVSSVREKYELAHPPEEWKYELRIRYLPKGFLNQFTEDKPTLNFFYQQVKSDYMLEIADQVDQEIALKLGCLEIRRSYWEMRGNALEKKSNYEVLEKDVGLKRFFPKSLLDSVKAKTLRKLIQQTFRQFANLNREESILKFFEILSPVYRFDKECFKCALGSSWIISVELAIGPEEGISYLTDKGCNPTHLADFTQVQTIQYSNSEDKDRKGMLQLKIAGAPEPLTVTAPSLTIAENMADLIDGYCRLVNGTSQSFIIRPQKEGERALPSIPKLANSEKQGMRTHAVSVSETDDYAEIIDEEDTYTMPSTRDYEIQRERIELGRCIGEGQFGDVHQGIYMSPENPALAVAIKTCKNCTSDSVREKFLQEALTMRQFDHPHIVKLIGVITENPVWIIMELCTLGELRSFLQVRKYSLDLASLILYAYQLSTALAYLESKRFVHRDIAARNVLVSSNDCVKLGDFGLSRYMEDSTYYKASKGKLPIKWMAPESINFRRFTSASDVWMFGVCMWEILMHGVKPFQGVKNNDVIGRIENGERLPMPPNCPPTLYSLMTKCWAYDPSRRPRFTELKAQLSTILEEEKAQQEERMRMESRRQATVSWDSGGSDEAPPKPSRPGYPSPRSSEGFYPSPQHMVQTNHYQVSGYPGSHGITAMAGSIYPGQASLLDQTDSWNHRPQEIAMWQPNVEDSTVLDLRGIGQVLPTHLMEERLIRQQQEMEEDQRWLEKEERFLKPDVRLSRGSIDREDGSLQGPIGNQHIYQPVGKPDPAAPPKKPPRPGAPGHLGSLASLSSPADSYNEGVKLQPQEISPPPTANLDRSNDKVYENVTGLVKAVIEMSSKIQPAPPEEYVPMVKEVGLALRTLLATVDETIPLLPASTHREIEMAQKLLNSDLGELINKMKLAQQYVMTSLQQEYKKQMLTAAHALAVDAKNLLDVIDQARLKMLGQTRPH

SEQ ID NO: 7877 - protein, 235 aa, Homo sapiens
MAAANPWDPASAPNGAGLVLGHFIASGMVNQEMLNMSKKTVSCFVNFTRLQQITNIQAEIYQKNLEIELLKLEKDTADVVHPFFLAQKCHTLQSMNNHLEAVLKEKRSLRQRLLKPMCQENLPIEAVYHRYMVHLLELAVTFIERLETHLETIRNIPHLAANLKKMNQALAKMDILVTETEELAENILKWRKQQNEVSSCIPKILAEESYLYKHDIIMPPLPFTSKVHVQTINAK

SEQ ID NO: 7878 - protein, 361 aa, Homo sapiens
MSADATPLHVARSGNDTEDFSNPSACSDIYGESISSHFTESTGKLIESLSDCASSLPIKKIAGSNYNTFLDSELSMLNGTKVLSDSAVGIDLGSTGDTTEALHELRTAEEFKTEEQDDSGSIEFGVSFPDRESSSMETSIEPKATETSRTEGITAIEESWESMFNDDGDCLDPRLLQELSGNTKSRESIQEPRSDYYNHEVPDIDLSDCEFPHVIEIYDFPQEFRTEDLLRVFCSYQKKGFDIKWVDDTHALGVFSSPITARDALGIKHTMVKIRPLSQATRAAKAKARAYAEFLQPAKERPETSAALARRLVISALGVRSKQSKTEREAELKKLQEARERKRLEAKQREDIWEGRDQSTV

SEQ ID NO: 7879 - protein, 792 aa, Homo sapiens
MQQESERCRVRARRPDMALYVPKARRGAVLLKTGDEEESCGSPNSVVKEKQKESSLSQKEVFKDKPEARRLNINPDRKEHNCREEKKSSTKLRMDTCLQKTNRVCSKRGTTESKEVLSQGQQQGAPNAGVITNAPLQRHFKPKKVECLEVETTDVTGHERILLSQACLEISEAQVPSKPFQNVEFCDFSRHEPDGEAFEDKDLEGRIETDTEVLEILYEFPRVFSSVMKPENMIVPIKLSSDSEIVQQSMQTSDGILNPSSGGITTTSVPGSPDGVFDQTCVDFEVESVGGIANSTGFILDQKDTDSIPATMGHISLSESTNDTVSPVMIRECEKNDSTADELHVKHEPPDTAVLAHETHRDSGFKNVGDITNKACMMDTTGMSCSDHVTVDSPYVVAVRIADETSINTRSFSKFVGMSADATPLHVARSGNDTEDFGNPSACSDIYGESISSHFTESTGKLIESLSDCASSLPIKKIAGSNYNTFLDSELSMLNGTKVLSDSAVGIDLGSTGDTTEALHELRTAEEFKTEEQDDSGSIEFGVSFPDRESSSMETSIEPKATETSHTEGITAIEESWESMFNDDGDCLDPRLLQEGILMHIKPENHCSKLSGNTKSRESIQEPRSDYYNHEVPDIDLSDCEFPHVIEIYDFPQEFRTEDLLRVFCSYQKKGFDIKWVDDTHALGVFSSPITARDALGIKHTMVKIRPLSQATRAAKAKARAYAEFLQPAKERPETSAALARRLVISALGVRSKQSKTEREAELKKLQEARERKRLEAKQREDIWEGRDQSTV

SEQ ID NO: 7880 - protein, 260 aa, Homo sapiens
MIKRRFARENQSQRVEKEVETFLCICQSHAELPERKRKGRRGQKYQIQLRNLRTKSPNDLHPTKVKTASCTSMPLAETGSGRSTSGPPSSAAAVGMETSAPRAGSRLTEMAASSQGNFEGDIESVDLAEFAKQQPWWRKLFGPESGLSAEKYSVATHLFIGGVTGWCTGFIFQKVGKLAATAVGGGFFLLQLANHSGYIKVDWQRVEKDMKKAKEQLKIPKSTQIPNQVRSKAEEVVSFVKKNVLVTGGFFGGFLLGMAS

SEQ ID NO: 7881 - protein, 147 aa, Homo sapiens
PPGDPGFPGRYGETGDVGPPGPPGLLGRPGEACAGMIGPPGPQGFPGLPGLPGEAGIPGRPDSAPGKPGKPGSPGLPGAPGLQGLPGSSGNMTNLPLILCLGNEGLCACEPGPMGPPGPPGLPGRQGSKGDLGLPGWLGTKGDPGPP

SEQ ID NO: 7882 - protein, 1978 aa, Homo sapiens [sequence omitted]

SEQ ID NO: 7883 - protein, 767 aa, Homo sapiens
MFAKLKKKIAEETAVAQRPGGATRIPRSVSKESVASMGADSGDDFASDGSSSREDLSSQLLRRNEQIRKLEARLSDYAEQVRNLQKIKEKLEIALEKHQDSSMRKFQEQNETFQANRAKMAEGLALALARKDQEWSEKMDQLEKEKNILTAQLQEMKNQSMNLFQRRDEMDELEGFQQQELSKIKHMLLKKEESLGKMEQELEARTRELSRTQEELMNSNQMSSDLSQKLEELQRHYSTLEEQRDHVIASKTGAESKITALEQKEQELQALIQQLSIDLQKVTAETQEKEDVITHLQEKVASLEKRLEQNLSGEEHVQELLKEKTLAEQNLEDTRQQLLAARSSQAKAINTLETRVRELEQTLQASEEQLQQSKGIVAAQETQIQELAAANQESSHVQQQALALEQQFLERTQALEAQIVALERMRAADQTTAEQGMRQLEQENAALKECRNEYERSLQNHQFELKKLKEEWSQREIVSVAMAQALEEVRKQREEFQQQAANLTAIIDEKEQNLREKTEVLLQKEQEILQLERGHNSALLQIHQLQAELEALRTLKAEEAAVVAEQEDLLRLRGPLQAEALSVNESHVTSRAMQDPVFQLPTAGRTPNGEVGAMDLTQLQKEKQDLEQQLLEKNKTIKQMQQRMLELRKTLQKELKIRPDNELFEVREKPGPEMANMAPSVTNNTDLTDAREINFEYLKHVVLKFMSCRESEAFHLIKAVSVLLNFSQEEENMLKETLEYKMSWFGSKPAPKGSIRPSISNPRIPWS

SEQ ID NO: 7884 - protein, 560 aa, Homo sapiens
MSEHSRNSDQEELLDEEINEDEILANLSAEELKELQSEMEVMAPDPSLPVGMIQKDQTDKPPTGNFNHKSLVDYMYWEKASRRMLEEERVPVTFVKSEEKTQEEHEEIEKRNKNMAQYLKEKLNNEIVANKRESKGSSNIQETDEEDEEEEDDDDDDEGEDDGEESEETNREEEGKAKEQIRNCENNCQQVTDKAFKEQRDRPEAQEQSEKKISKLDPKKLALDTSFLKVSTRPSGNQTDLDGSLRRVRKNDPDMKELNLNNIENIPKEMLLDFVNAMKKNKHIKTFSLANVGADENVAFALANMLRENRSITTLNIESNFITGKGIVAIMRCLQFNETLTELRFHNQRHMLGHHAEMEIARLLKANNTLLKMGYHFELPGPRMVVTNLLTRNQDKQRQKRQEEQKQQQLKEQKKLIAMLENGLGLPPGMWELLGGPKPDSRMQEFFQPPPPRPPNPQNVPFSQRSEMMKKPSQAPKYRTDPDSFRVVKLKRIQRKSRMPEAREPPEKTNLKDVIKTLKPVPRNRPPPLVEITPRDQLLNDIRHSSVAYLKPVQLPKELA

SEQ ID NO: 7885 - protein, 350 aa, Homo sapiens
MYWEKASRRMLEEERVPVTFVKSEYLKEKLNNEIVANKRESKGSSNIQETDEEDEEEEDDDDDDEGEDDGEESEETNREEEGKAKEQIRNCENNCQQVTDKAFKEQRDRPEAQEQSEKKISKLDPKKLALDTSFLKVSTRPSGNQTDLDGSLRRVRKNDPDMKELNLNNIENIPKEMLLDFVNAMKKNKHIKTFSLANVGADENVAFALANMLRENRSITTLNIESNFITGKGIVAIMRCLQFNETLTELRFHNQRHMLGHHAEMEIARLLKANNTLLKMGYHFELPGPRMVVTNLLTRNQDKQRQKRQEEQKQQQLKEQKKLIAMLENGLGLPPGMWELLGGPKPDSRM

SEQ ID NO: 7886 - protein, 222 aa, Homo sapiens
MDLLFGRRKTPEELLRQNQRALNRAMRELDRERQKLETQEKKIIADIKKMAKQGQMDAVRIMAKDLVRTRRYVRKFVLMRANIQAVSLKIQTLKSNNSMAQAMKGVTKAMGTMNRQLKLPQIQKIMMEFERQAEIMDMKEEMMNDAIDDAMGDEEDEEESDAVVSQVLDELGLSLTDELSNLPSTGGSLSVAAGGKKAEAAASALADADADLEERLKNLRRD

SEQ ID NO: 7887 - protein, 756 aa, Homo sapiens
MSPQKRVKNVQAQNRTSQGSSSFQTTLSAWKVKQDPSNSKNISKHGQNNPVGDYEHADDQAEEDALQMAVGYFEKGPIKASQNKDKTLEKHLKTVENVAWKNGLASEEIDILLNIALSGKFGNAVNTRILKCMIPATVISEDSVVKAVSWLCVGKCSGSTKVLFYRWLVAMFDFIDRKEQINLLYGFFFASLQDDALCPYVCHLLYLLTKKENVKPFRVRKLLDLQAKMGMQPHLQALLSLYKFFAPALISVSLPVRKKIYLQNSENLWKTALLAVKQRNRGPSPEPLKLMLGPANVRPLKRKWNSLSVIPVLNSSSYTKECGKKEMSLSDCLNRSGSFPLEQLQSFPQLLQNIHCLELPSQMGSVLNNSLLLHYINCVRDEPVLLRFHYWLSQTLQEECIWYKVNNYEHGKEFTNFLDTIIRAECFLQEGYYSCEAFLYKSLPLWDGLSCRSQFLQLVSWIPFSSFSEVKPLLFDHLAQLFFTSTIYFKCSVLQSLKELLQNWLLWLSMDIHMKPVTNSPLETTLGGSMNCVSKLIHYVGWLSTTAMRLESNNTFLLHFILDFYEKVCDIYINYDLPLVVLFPPGIFYSALLSLDTSILNQLCFIMHRYRKNLTAAKKNELVQKTKSEFNFSSKTYQEFNYYLTSMVGCLWTSKPFAKGIYIDPEILEKTGVAEYKNSLNVVHHPSFLSYAVSFLLQESPEERTVNVSSIRGKKWSWYLDYLFSQGLQGLKLFIRSSVHHSSIPRAEGINCNNQY

SEQ ID NO: 7888 - protein, 2612 aa, Homo sapiens
MADVDPDTLLEWLQMGQGDERDMQLIALEQLCMLLLMSDNVDRCFETCPPRTFLPALCKIFLDESAPDNVLEVTARAITYYLDVSAECTRRIVGVDGAIKALCNRLVVVELNNRTSRDLAEQCVKVLELICTRESGAVFEAGGLNCVLTFIRDSGHLVHKDTLHSAMAVVSRLCGKMEPQDSSLEICVESLSSLLKHEDHQVSDGALRCFASLADRFTRRGVDPAPLAKHGLTEELLSRMAAAGGTVSGPSSACKPGRSTTGAPSTTADSKLSNQVSTIVSLLSTLCRGSPVVTHDLLRSELPDSIESALQGDERCVLDTMRLVDLLLVLLFEGRKALPKSSAGSTGRIPGLRRLDSSGERSHRQLIDCIRSKDTDALIDAIDTGAFEVNFMDDVGQTLLNWASAFGTQEMVEFLCERGADVNRGQRSSSLHYAACFGRPQVAKTLLRHGANPDLRDEDGKTPLDKARERGHSEVVAILQSPGDWMCPVNKGDDKKKKDTNKDEEECNEPKGDPEMAPIYLKRLLPVFAQTFQQTMLPSIRKASLALIRKMIHFCSEALLQEVCDSDVGHNLPTILVEITATVLDQEDDDDGHLLALQIIRDIVDKGGDIYKHQLARLGVISKVSTLAGPSSDDENEEESKPEKEDEPQEDAQELQQGKPYHWRDWSIIRGRDCLYIWSDAAALELSNGSNGWFRFILDGKLATMYSSGSPEGGSDSSESRSEFLEKLQRARGQVKPSTSSQPILSAPGPTKLTVGNWSLTCLKEGEIAIHNSDGQQATILKEDLPGFVFESNRGTKHSFTAETSLGSEFVTGWTGKRGRKLKSKLEKTKQKVRTMARDLYDDHFKAVESMPRGVVVTLRNIATQLESSWELHTNRQCIESENTWRDLMKTALKNLIVLLKDENTISPYEMCSSGLVQALLTVLNNVSIFRATKQKQNEVPKVILSVFKTAFTENEDDESRPAVALIRKLIAVLESIERLPLHLYDTPGSTYNLQILTRRLRFRLERAPGETALIDRTGRMLKMEPLATVESLEQYLLKMVAKQWYDFDRSSFVFVRKLREGQNFIFRHQHDFDENGIIYWIGTNAKTAYEWVNPAAYGLVVVTSSEGRNLPYGRLEDILSRDNSALNCHSNDDKNAWFAIDLGLWVIPSAYTLRHARGYGRSALRNWVFQVSKDGQNWTSLYTHVDDCSLNEPGSTATWPLDPPKDEKQGWRHVRIKQMGKNASGQTHYLSLSGFELYGTVNGVCEDQLGKAAKEAEANLRRQRRLVRSQVLKYMVPGARVIRGLDWKWRDQDGSPQGEGTVTGELHNGWIDVTWDAGGSNSYRMGAEGKFDLKLAPGYDPDTVASPKPVSSTVSGTTQSWSSLVKNNCPDKTSAAAGSSSRKGSSSSVCSVASSSDISLGSTKTERRSEIVMEHSIVSGADVHEPIVVLSSAENVPQTEVGSSSSASTSTLTAETGSENAERKLGPDSSVRTPGESSAISMGIVSVSSPDVSSVSELTNKEAASQRPLSSSASNRLSVSSLLAAGAPMSSSASVPNLSSRETSSLESFVRRVANIARTNATNNMNLSRSSSDNNTNTLGRNVMSTATSPLMGAQSFPNLTTPGTTSTVTMSTSSVTSSSNVATATTVLSVGQSLSNTLTTSLTSTSSESDTGQEAEYSLYDFLDSCRASTLLAELDDDEDLPEPDEEDDENEDDNQEDQEYEEVMILRRPSLQRRAGSRSDVTHHAVTSQLPQVPAGAGSRPIGEQEEEEYETKGGRRRTWDDDYVLKRQFSALVPAFDPRPGRTNVQQTTDLEIPPPGTPHSELLEEVECTPSPRLALTLKVTGLGTTREVELPLTNFRSTIFYYVQKLLQLSCNGNVKSDKLRRIWEPTYTIMYREMKDSDKEKENGKMGCWSIEHVEQYLGTDELPKNDLITYLQKNADAAFLRHWKLTGTNKSIRKNRNCSQLIAAYKDFCEHGTKSGLNQGAISTLQSSDILNLTKEQPQAKAGNGQNSCGVEDVLQLLRILYIVASDPYSRISQEDGDEQLQFTFPPDEFTSKKITTKILQQIEEPLALASGALPDWCEQLTSKCPFLIPFETRQLYFTCTAFGASRAIVWLQNRREATVERTRTTSSVRRDDPGEFRVGRLKHERVKVPRGESLMEWAENVMQIHADRKSVLEVEFLGEEGTGLGPTLEFYALVAAEFQRTDLGAWLCDDNFPDDESRHVDLGGGLKPPGYYVQRSCGLFTAPFPQDSDELERITKLFHFLGIFLAKCIQDNRLVDLPISKPFFKLMCMGDIKSNMSKLIYESRGDRDLHCTESQSEASTEEGHDSLSVGSFEEDSKSEFILDPPKPKPPAWFNGILTWEDFELVNPHRARFLKEIKDLAIKRRQILSNKGLSEDEKNTKLQELVLKNPSGSGPPLSIEDLGLNFQFCPSSRIYGFTAVDLKPSGEDEMITMDNAEEYVDLMFDFCMHTGIQKQMEAFRDGFNKVFPMEKLSSFSHEEVQMILCGNQSPSWAAEDIINYTEPKLGYTRDSPGFLRFVRVLCGMSSDERKAFLQFTTGCSTLPPGGLANLHPRLTVVRKVDATDASYPSVNTCVHYLKLPEYSSEEIMRERLLAATMEKGFHLN

SEQ ID NO: 7889 - protein, 722 aa, Homo sapiens [sequence omitted]

SEQ ID NO: 7890 - protein, 636 aa, Homo sapiens
MVRNDMFYNHYPYVPETEQETNVAKPARYRRAVSYDSKEYYMRLASGNPAIVQDAIVESSEGEAAQQEPEHGEDTIAKVKGLVKPPLKRSRSAPDGGDEENQEQLQDQIAEGSSIEEEEKTDNATLLRLLEEGEKIQHMYRCARVQGLDTSEGLLLFGKEHFYVIDGFTMTATREIRDIETLPPNMHEPIIPRGARQGPSQLKRTCSIFAYEDIKEVHKRRYLLQPIAVEVFSGDGRNYLLAFQKGIRNKVYQRFLAVVPSLTDSSESVSGQRPNTSVEQGSGLLSTLVGEKSVTQRWERGEISNFQYLMHLNTLAGRSYNDLMQYPVFPWILADYDSEEVDLTNPKTFRNLAKPMGAQTDERLAQYKKRYKDWEDPNGETPAYHYGTHYSSAMIVASYLVRMEPFTQIFLRLQGGHFDLADRMFHSVREAWYSASKHNMADVKELIPEFFYLPEFLFNSNNFDLGCKQNGTKLGDVILPPWAKGDPREFIRVHREALECDYVSAHLHEWIDLIFGYKQQGPAAVEAVNVFHHLFYEGQVDIYNINDPLKETATIGFINNFGQIPKQLFKKPHPPKRVRSRLNGDNAGISVLPGSTSDKIFFHHLDNLRPSLTPVKELKEPVGQIVCTDKGILAVE

SEQ ID NO: 7891 - protein, 664 aa, Homo sapiens
MEEMEEELKCPVCGSFYREPIILPCSHNLCQACARNILVQTPESESPQSHRAAGSGVSDYDYLDLDKMSLYSEADSGYGSYGGFASAPTTPCQKSPNGVRVFPPAMPPPATHLSPALAPVPRNSCITCPQCHRSLILDDRGLRGFPKNRVLEGVIDRYQQSKAAALKCQLCEKAPKEATVMCEQCDVFYCDPCRLRCHPPRGPLAKHRLVPPAQGRVSRRLSPRKVSTCTDHELENHSMYCVQCKMPVCYQCLEEGKHSSHEVKALGAMWKLHKSQLSQALNGLSDRAKEAKEFLVQLRNMVQQIQENSVEFEACLVAQCDALIDALNRRKAQLLARVNKEHEHKLKVVRDQISHCTVKLRQTTGLMEYCLEVIKENDPSGFLQISDALIRRVHLTEDQWGKGTLTPRMTTDFDLSLDNSPLLQSIHQLDFVQVKASSPVPATPILQLEECCTHNNSATLSWKQPPLSTVPADGYILELDDGNGGQFREVYVGKETMCTVDGLHFNSTYNARVKAFNKTGVSPYSKTLVLQTSEVAWFAFDPGSAHSDIILSNDNLTVTCSSYDDRVVLGKTGFSKGIHYWELTVDRYDNHPDPAFGVARMDVMKDVMLGKDDKAWAMYVDNNRSWFMHNNSHTNRTEGGITKGATIGVLLDLNRKNLTFFYQR

SEQ ID NO: 7892 - protein, 802 aa, Homo sapiens
MEEMEEELKCPVCGSFYREPIILPCSHNLCQACARNILVQTPESESPQSHRAAGSGVSDYDYLDLDKMSLYSEADSGYGSYGGFASAPTTPCQKSPNGVRVFPPAMPPPATHLSPALAPVPRNSCITCPQCHRSLILDDRGLRGFPKNRVLEGVIDRYQQSKAAALKCQLCEKAPKEATVMCEQCDVFYCDPCRLRCHPPRGPLAKHRLVPPAQGRVSRRLSPRKVSTCTDHELENHSMYCVQCKMPVCYQCLEEGKHSSHEVKALGAMWKLHKSQLSQALNGLSDRAKEAKEFLVQLRNMVQQIQENSVEFEACLVAQCDALIDALNRRKAQLLARVNKEHEHKLKVVRDQISHCTVKLRQTTGLMEYCLEVIKENDPSGFLQISDALIRRVHLTEDQWGKGTLTPRMTTDFDLSLDNSPLLQSIHQLDFVQVKVPATPILQLEECCTHNNSATLSWKQPPLSTVPADGYILELDDGNGGQFREVYVGKETMCTVDGLHFNSTYNARVKAFNKTGVSPYSKTLVLQTSEDTDSEEQTLPFPVPSERLPLRRMSPFSSTLNLQPSFPGRSYFDFRSSPHQLSLHSSLQSLNAPGCNFETQSAPYSQLVDIKKLLAVAWFAFDPGSAHSDIILSNDNLTVTCSSYDDRVVLGKTGFSKGIHYWELTVDRYDNHPDPAFGVARMDVMKDVMLGKDDKAWAMYVDNNRSWFMHNNSHTNRTEGGITKGATIGVLLDLNRKNLTFFINDEQQGPIAFDNVEGLFFPAVSLNRNVQVSTLPLRLNSCCWLPVQRLPRAVQSNRREGS

SEQ ID NO: 7893 - protein, 710 aa, Homo sapiens
MEEMEEELKCPVCGSFYREPIILPCSHNLCQACARNILVQTPESESPQSHRAAGSGVSDYDYLDLDKMSLYSEADSGYGSYGGFASAPTTPCQKSPNGVRVFPPAMPPPATHLSPALAPVPRNSCITCPQCHRSLILDDRGLRGFPKNRVLEGVIDRYQQSKAAALKCQLCEKAPKEATVMCEQCDVFYCDPCRLRCHPPRGPLAKHRLVPPAQGRVSRRLSPRKVSTCTDHELENHSMYCVQCKMPVCYQCLEEGKHSSHEVKALGAMWKLHKSQLSQALNGLSDRAKEAKEFLVQLRNMVQQIQENSVEFEACLVAQCDALIDALNRRKAQLLARVNKEHEHKLKVVRDQISHCTVKLRQTTGLMEYCLEVIKENDPSGFLQISDALIRRVHLTEDQWGKGTLTPRMTTDFDLSLDNSPLLQSIHQLDFVQVKASSPVPATPILQLEECCTHNNSATLSWKQPPLSTVPADGYILELDDGNGGQFREVYVGKETMCTVDGLHFNSTYNARVKAFNKTGVSPYSKTLVLQTSEVAWFAFDPGSAHSDIILSNDNLTVTCSSYDDRVVLGKTGFSKGIHYWELTVDRYDNHPDPAFGVARMDVMKDVMLGKDDKAWAMYVDNNRSWFMHNNSHTNRTEGGITKGATIGVLLDLNRKNLTFFINDEQQGPIAFDNVEGLFFPAVSLNRNVQVTLHTGLPVPDFYSSRASIA

SEQ ID NO: 7894 - protein, 550 aa, Homo sapiens
MEEMEEELKCPVCGSFYREPIILPCSHNLCQACARNILVQTPESESPQSHRAAGSGVSDYDYLDLDKMSLYSEADSGYGSYGGFASAPTTPCQKSPNGVRVFPPAMPPPATHLSPALAPVPRNSCITCPQCHRSLILDDRGLRGFPKNRVLEGVIDRYQQSKAAALKCQLCEKAPKEATVMCEQCDVFYCDPCRLRCHPPRGPLAKHRLVPPAQGRVSRRLSPRKVSTCTDHELENHSMYCVQCKMPVCYQCLEEGKHSSHEVKALGAMWKLHKSQLSQALNGLSDRAKEAKEFLVQLRNMVQQIQENSVEFEACLVAQCDALIDALNRRKAQLLARVNKEHEHKLKVVRDQISHCTVKLRQTTGLMEYCLEVIKENDPSGFLQISDALIRRVHLTEDQWGKGTLTPRMTTDFDLSLDNSPLLQSIHQLDFVQVKASSPVPATPILQLEECCTHNNSATLSWKQPPLSTVPADGYILELDDGNGGQFREVYVGKETMCTVDGLHFNSTYNARVKAFNKTGVSPYSKTLVLQTSEGKALQQYPSERELRGI

SEQ ID NO: 7895 - protein, 664 aa, Homo sapiens [sequence omitted]

SEQ ID NO: 7896 - protein, 589 aa, Homo sapiens
MAVPPGHGPFSGFPGPQEHTQVLPDVRLLPRRLPLAFRDATSAPLRKLSVDLIKTYKHINEVYYAKKKRRAQQAPPQDSSNKKEKKVLNHGYDDDNHDYIVRSGERWLERYEIDSLIGKGSFGQVVKAYDHQTQELVAIKIIKNKKAFLNQAQIELRLLELMNQHDTEMKYYIVHLKRHFMFRNHLCLVFELLSYNLYDLLRNTHFRGVSLNLTRKLAQQLCTALLFLATPELSIIHCDLKPENILLCNPKRSAIKIVDFGSSCQLGQRIYQYIQSRFYRSPEVLLGTPYDLAIDMWSLGCILVEMHTGEPLFSGSNEVDQMNRIVEVLGIPPAAMLDQAPKARKYFERLPGGGWTLRRTKELRKDLVLRMLEYEPAARISPLGALQHGFFRRTADEATNTGPAGSSASTSPAPLDTCPSSSTASSISSSGGSSGSSSDNRTYRYSNRYCGGPGPPITDCEMNSPQVPPSQPLRPWAGGDVPHKTHQAPASASSLPGTGAQLPPQPRYLGRPPSPTSPPPPELMDVSLVGGPADCSPPHPAPAPQHPAASALRTRMTGGRPPLPPPDDPATLGPHLGLRGVPQSTAASS

SEQ ID NO: 7897 - protein, 629 aa, Homo sapiens
MAVPPGHGPFSGFPGPQEHTQVLPDVRLLPRRLPLAFRDATSAPLRKLSVDLIKTYKHINEVYYAKKKRRAQQAPPQDSSNKKEKKVLNHGYDDDNHDYIVRSGERWLERYEIDSLIGKGSFGQVVKAYDHQTQELVAIKIIKNKKAFLNQAQIELRLLELMNQHDTEMKYYIVHLKRHFMFRNHLCLVFELLSYNLYDLLRNTHFRGVSLNLTRKLAQQLCTALLFLATPELSIIHCDLKPENILLCNPKRSAIKIVDFGSSCQLGQRIYQYIQSRFYRSPEVLLGTPYDLAIDMWSLGCILVEMHTGEPLFSGSNEVDQMNRIVEVLGIPPAAMLDQAPKARKYFERLPGGGWTLRRTKELRKDYQGPGTRRLQEVLGVQTGGPGGRRAGEPGHSPADYLRFQDLVLRMLEYEPAARISPLGALQHGFFRRTADEATNTGPAGSSASTSPAPLDTCPSSSTASSISSSGGSSGSSSDNRTYRYSNRYCGGPGPPITDCEMNSPQVPPSQPLRPWAGGDVPHKTHQAPASASSLPGTGAQLPPQPRYLGRPPSPTSPPPPELMDVSLVGGPADCSPPHPAPAPQHPAASALRTRMTGGRPPLPPPDDPATLGPHLGLRGVPQSTAASS

SEQ ID NO: 7898 - protein, 601 aa, Homo sapiens
MAVPPGHGPFSGFPGPQEHTQVLPDVRLLPRRLPLAFRDATSAPLRKLSVDLIKTYKHINEVYYAKKKRRAQQAPPQDSSNKKEKKVLNHGYDDDNHDYIVRSGERWLERYEIDSLIGKGSFGQVVKAYDHQTQELVAIKIIKNKKAFLNQAQIELRLLELMNQHDTEMKYYIVHLKRHFMFRNHLCLVFELLSYNLYDLLRNTHFRGVSLNLTRKLAQQLCTALLFLATPELSIIHCDLKPENILLCNPKRSAIKIVDFGSSCQLGQRIYQYIQSRFYRSPEVLLGTPYDLAIDMWSLGCILVEMHTGEPLFSGSNEVDQMNRIVEVLGIPPAAMLDQAPKARKYFERLPGGGWTLRRTKELRKDYQGPGTRRLQEDLVLRMLEYEPAARISPLGALQHGFFRRTADEATNTGPAGSSASTSPAPLDTCPSSSTASSISSSGGSSGSSSDNRTYRYSNRYCGGPGPPITDCEMNSPQVPPSQPLRPWAGGDVPHKTHQAPASASSLPGTGAQLPPQPRYLGRPPSPTSPPPPELMDVSLVGGPADCSPPHPAPAPQHPAASALRTRMTGGRPPLPPPDDPATLGPHLGLRGVPQSTAASS

SEQ ID NO: 7899 - protein, 227 aa, Homo sapiens
MDNARMNSFLEYPILSSGDSGTCSARAYPSDHRITTFQSCAVSANSCGGDDRFLVGRGVQIGSPHHHHHHHHHHPQPATYQTSGNLGVSYSHSSCGPSYGSQNFSAPYSPYALNQEADVSGGYPQCAPAVYSGNLSSPMVQHHHHHQGYAGGAVGSPQYIHHSYGQEHQSLALATYNNSLSPLHASHQEACRSPASETSSPAQTFDWMKVKRNPPKTGQSCWLVDAP

SEQ ID NO: 7900 - protein, 335 aa, Homo sapiens
MDNARMNSFLEYPILSSGDSGTCSARAYPSDHRITTFQSCAVSANSCGGDDRFLVGRGVQIGSPHHHHHHHHHHPQPATYQTSGNLGVSYSHSSCGPSYGSQNFSAPYSPYALNQEADVSGGYPQCAPAVYSGNLSSPMVQHHHHHQGYAGGAVGSPQYIHHSYGQEHQSLALATYNNSLSPLHASHQEACRSPASETSSPAQTFDWMKVKRNPPKTGKVGEYGYLGQPNAVRTNFTTKQLTELEKEFHFNKYLTRARRVEIAASLQLNETQVKIWFQNRRMKQKKREKEGLLPISPATPPGNDEKAEESSEKSSSSPCVPSPGSSTSDTLTTSH

SEQ ID NO: 7901 - protein, 1557 aa, Homo sapiens
MEVSPLQPVNENMQVNKIKKNEDAKKRLSVERIYQKKTQLEHILLRPDTYIGSVELVTQQMWVYDEDVGINYREVTFVPGLYKIFDEILVNAADNKQRDPKMSCIRVTIDPENNLISIWNNGKGIPVVEHKVEKMYVPALIFGQLLTSSNYDDDEKKVTGGRNGYGAKLCNIFSTKFTVETASREYKKMFKQTWMDNMGRAGEMELKPFNGEDYTCITFQPDLSKFKMQSLDKDIVALMVRRAYDIAGSTKDVKVFLNGNKLPVKGFRSYVDMYLKDKLDETGNSLKVIHEQVNHRWEVCLTMSEKGFQQISFVNSIATSKGGRHVDYVADQIVTKLVDVVKKKNKGGVAVKAHQVKNHMWIFVNALIENPTFDSQTKENMTLQPKSFGSTCQLSEKFIKAHLYSRFLIDPFFPNMIPNMIFSFSKAAIGCGIVESILNWVKFKAQVQLNKKCSAVKHNRIKGIPKLDDANDAGGRNSTECTLILTEGDSAKTLAVSGLGVVGRDKYGVFPLRGKILNVREASHKQIMENAEINNIIKIVGLQYKKNYEDEDSLKTLRYGKIMIMTDQDQDGSHIKGLLINFIHHNWPSLLRHRFLEEFITPIVKVSKNKQEMAFYSLPEFEEWKSSTPNHKKWKVKYYKGLGTSTSKEAKEYFADMKRHRIQFKYSGPEDDAAISLAFSKKQIDDRKEWLTNFMEDRRQRKLLGLPEDYLYGQTTTYLTYNDFINKELILFSNSDNERSIPSMVDGLKPGQRKVLFTCFKRNDKREVKVAQLAGSVAEMSSYHHGEMSLMMTIINLAQNFVGSNNLNLLQPIGQFGTRLHGGKDSASPRYIFTMLSSLARLLFPPKDDHTLKFLYDDNQRVEPEWYIPIIPMVLINGAEGIGTGWSCKIPNFDVREIVNNIRRLMDGEEPLPMLPSYKNFKGTIEELAPNQYVISGEVAILNSTTIEISELPVRTWTQTYKEQVLEPMLNGTEKTPPLITDYREYHTDTTVKFVVKMTEEKLAEAERVGLHKVFKLQTSLTCNSMVLFDHVGCLKKYDTVLDILRDFFELRLKYYGLRKEWLLGMLGAESAKLNNQARFILEKIDGKIIIENKPKKELIKVLIQRGYDSDPVKAWKEAQQKVPDEEENEESDNEKETEKSDSVTDSGPTFNYLLDMPLWYLTKEKKDELCRLRNEKEQELDTLKRKSPSDLWKEDLATFIEELEAVEAKEKQDEQVGLPGKGGKAKGKKTQMAEVLPSPRGQRVIPRITIEMKAEAEKKNKKKIKNENTEGSPQEDGVELEGLKQRLEKKQKREPGTKTKKQTTLAFKPIKKGKKRNPWSDSESDRSSDESNFDVPPRETEPRRAATKTKFTMDLDSDEDFSDFDEKTDDEDFVPSDASPPKTKTSPKLSNKELKPQKSVVSDLEADDVKGSVPLSSSPPATHFPDETEITNPVPKKNVTVKKTAAKSQSSTSTTGAKKRAAPKGTKRDPALNSGVSQKPDPAKTKNRRKRKPSTSDDSDSNFEKIVSKAVTSKKSKGESDDFHMDFDSAVAPRAKSVRAKKPIKYLEESDEDDLF

SEQ ID NO: 7902 - protein, 1612 aa, Homo sapiens
MEVSPLQPVNENMQVNKIKKNEDAKKRLSVERIYQKKTQLEHILLRPDTYIGSVELVTQQMWVYDEDVGINYREVTFVPGLYKIFDEILVNAADNKQRDPKMSCIRVTIDPENNLISIWNNGKGIPVVEHKVEKMYVPALIFGQLLTSSNYDDDEKKVTGGRNGYGAKLCNIFSTKFTVETASREYKKMFKQTWMDNMGRAGEMELKPFNGEDYTCITFQPDLSKFKMQSLDKDIVALMVRRAYDIAGSTKDVKVFLNGNKLPVKGFRSYVDMYLKDKLDETGNSLKVIHEQVNHRWEVCLTMSEKGFQQISFVNSIATSKGGRHVDYVADQIVTKLVDVVKKKNKGGVAVKAHQRELCNGAILAHCNLRLMGSSDSPASASRVAGIAGGCHHTQLIFVFLVETGFHHVGQAGLERLTSGDPPASASQSSGITDVKVKNHMWIFVNALIENPTFDSQTKENMTLQPKSFGSTCQLSEKFIKAAIGCGIVESILNWVKFKAQVQLNKKCSAVKHNRIKGIPKLDDANDAGGRNSTECTLILTEGDSAKTLAVSGLGVVGRDKYGVFPLRGKILNVREASHKQIMENAEINNIIKIVGLQYKKNYEDEDSLKTLRYGKIMIMTDQDQDGSHIKGLLINFIHHNWPSLLRHRFLEEFITPIVKVSKNKQEMAFYSLPEFEEWKSSTPNHKKWKVKYYKGLGTSTSKEAKEYFADMKRHRIQFKYSGPEDDAAISLAFSKKQIDDRKEWLTNFMEDRRQRKLLGLPEDYLYGQTTTYLTYNDFINKELILFSNSDNERSIPSMVDGLKPGQRKVLFTCFKRNDKREVKVAQLAGSVAEMSSYHHGEMSLMMTIINLAQNFVGSNNLNLLQPIGQFGTRLHGGKDSASPRYIFTMLSSLARLLFPPKDDHTLKFLYDDNQRVEPEWYIPIIPMVLINGAEGIGTGWSCKIPNFDVREIVNNIRRLMDGEEPLPMLPSYKNFKGTIEELAPNQYVISGEVAILNSTTIEISELPVRTWTQTYKEQVLEPMLNGTEKTPPLITDYREYHTDTTVKFVVKMTEEKLAEAERVGLHKVFKLQTSLTCNSMVLFDHVGCLKKYDTVLDILRDFFELRLKYYGLRKEWLLGMLGAESAKLNNQARFILEKIDGKIIIENKPKKELIKVLIQRGYDSDPVKAWKEAQQKVPDEEENEESDNEKETEKSDSVTDSGPTFNYLLDMPLWYLTKEKKDELCRLRNEKEQELDTLKRKSPSDLWKEDLATFIEELEAVEAKEKQDEQVGLPGKGGKAKGKKTQMAEVLPSPRGQRVIPRITIEMKAEAEKKNKKKIKNENTEGSPQEDGVELEGLKQRLEKKQKREPGTKTKKQTTLAFKPIKKGKKRNPWSDSESDRSSDESNFDVPPRETEPRRAATKTKFTMDLDSDEDFSDFDEKTDDEDFVPSDASPPKTKTSPKLSNKELKPQKSVVSDLEADDVKGSVPLSSSPPATHFPDETEITNPVPKKNVTVKKTAAKSQSSTSTTGAKKRAAPKGTKRDPALNSGVSQKPDPAKTKNRRKRKPSTSDDSDSNFEKIVSKAVTSKKSKGESDDFHMDFDSAVAPRAKSVRAKKPIKYLEESDEDDLF

SEQ ID NO: 7903 - protein, 1534 aa, Homo sapiens
PVNENMQVNKIKKNEDAKKRLSVERIYQKKTQLEHILLRPDTYIGSVELVTQQMWVYDEDVGINYREVTFVPGLYKIFDEILVNAADNKQRDPKMSCIRVTIDPENNLISIWNNGKGIPVVEHKVEKMYVPALIFGQLLTSSNYDDDEKKVTGGRNGYGAKLCNIFSTKFTVETASREYKKMFKQANWMDNMGRAGEMELKPFNGEDYTCITFQPDLSKFKMQSLDKDIVALMVRRAYDIAGSTKDVKVFLNGNKLPVKGFRSYVDMYLKDKLDETGNSLKVIHEQVNHRWEVCLTMSEKGFQQISFVNSIATSKGGRHVDYVADQIVTKLVDVVKKKNKGGVAVKAHQVKNHMWIFVNALIENPTFDSQTKENMTLQPKSFGSTCQLSEKFIKAAIGCGIVESILNWVKFKAQVQLNKKCSAVKHNRIKGIPKLDDANDAGGRNSTECTLILTEGDSAKTLAVSGLGVVGRDKYGVFPLRGKILNVREASHKQIMENAEINNIIKIVGLQYKKNYEDEDSLKTLRYGKIMIMTDQDQDGSHIKGLLINFIHHNWPSLLRHRFLEEFITPIVKVSKNKQEMAFYSLPEFEEWKSSTPNHKKWKVKYYKGLGTSTSKEAKEYFADMKRHRIQFKYSGPEDDAAISLAFSKKQIDDRKEWLTNFMEDRRQRKLLGLPEDYLYGQTTTYLTYNDFINKELILFSNSDNERSIPSMVDGLKPGQRKVLFTCFKRNDKREVKVAQLAGSVAEMSSYHHGEMSLMMTIINLAQNFVGSNNLNLLQPIGQFGTRLHGGKDSASPRYIFTMLSSLARLLFPPKDDHTLKFLYDDNQRVEPEWYIPIIPMVLINGAEGIGTGWSCKIPNFDVREIVNNIRRLMDGEEPLPMLPSYKNFKGTIEELAPNQYVISGEVAILNSTTIEISELPVRTWTQTYKEQVLEPMLNGTEKTPPLITDYREYHTDTTVKFVVKMTEEKLAEAERVGLHKVFKLQTSLTCNSMVLFDHVGCLKKYDTVLDILRDFFELRLKYYGLRKEWLLGMLGAESAKLNNQARFILEKIDGKIIIENKPKKELIKVLIQRGYDSDPVKAWKEAQQKVPDEEENEESDNEKETEKSDSVTDSGPTFNYLLDMPLWYLTKEKKDELCRLRNEKEQELDTLKRKSPSDLWKEDLATFIEELEAVEAKEKQDEQVGLPGKGGKAKGKKTQMAEVLPSPRGQRVIPRITIEMKAEAEKKNKKKIKNENTEGSPQEDGVELEGLKQRLEKKQKREPGTKTKKQTTLAFKPIKKGKKRNPWSDSESDRSSDESNFDVPPRETEPRRAATKTKFTMDLDSDEDFSDFDEKTDDEDFVPSDASPPKTKTSPKQVSYLIWVLLSNKELKPQKSVVSDLEADDVKGSVPLSSSPPATHFPDETEITNPVPKKNVTVKKTAAKSQSSTSTTGAKKRAAPKGTKRDPALNSGVSQKPDPAKTKNRRKRKPSTSDDSDSNFEKIVSKAVTSKKSKGESDDFHMDFDSAVAPRAKSVRAKKPIKYLEESDEDDLF

SEQ ID NO: 7904 - protein, 1567 aa, Homo sapiens
MEVSPLQPVNENMQVNKIKKNEDAKKRLSVERIYQKKTQLEHILLRPDTYIGSVELVTQQMWVYDEDVGINYREVTFVPGLYKIFDEILVNAADNKQRDPKMSCIRVTIDPENNLISIWNNGKGIPVVEHKVEKMYVPALIFGQLLTSSNYDDDEKKVTGGRNGYGAKLCNIFSTKFTVETASREYKKMFKQTWMDNMGRAGEMELKPFNGEDYTCITFQPDLSKFKMQSLDKDIVALMVRRAYDIAGSTKDVKVFLNGNKLPVKGFRSYVDMYLKDKLDETGNSLKVIHEQVNHRWEVCLTMSEKGFQQISFVNSIATSKSSKYWSSRKSKQHILLNFFVLFKFINDAFFGICPFKGGRHVDYVADQIVTKLVDVVKKKNKGGVAVKAHQVKNHMWIFVNALIENPTFDSQTKENMTLQPKSFGSTCQLSEKFIKAAIGCGIVESILNWVKFKAQVQLNKKCSAVKHNRIKGIPKLDDANDAGGRNSTECTLILTEGDSAKTLAVSGLGVVGRDKYGVFPLRGKILNVREASHKQIMENAEINNIIKIVGLQYKKNYEDEDSLKTLRYGKIMIMTDQDQDGSHIKGLLINFIHHNWPSLLRHRFLEEFITPIVKVSKNKQEMAFYSLPEFEEWKSSTPNHKKWKVKYYKGLGTSTSKEAKEYFADMKRHRIQFKYSGPEDDAAISLAFSKKQIDDRKEWLTNFMEDRRQRKLLGLPEDYLYGQTTTYLTYNDFINKELILFSNSDNERSIPSMVDGLKPGQRKVLFTCFKRNDKREVKVAQLAGSVAEMSSYHHGEMSLMMTIINLAQNFVGSNNLNLLQPIGQFGTRLHGGKDSASPRYIFTMLSSLARLLFPPKDDHTLKFLYDDNQRVEPEWYIPIIPMVLINGAEGIGTGWSCKIPNFDVREIVNNIRRLMDGEEPLPMLPSYKNFKGTIEELAPNQYVISGEVAILNSTTIEISELPVRTWTQTYKEQVLEPMLNGTEKTPPLITDYREYHTDTTVKFVVKMTEEKLAEAERVGLHKVFKLQTSLTCNSMVLFDHVGCLKKYDTVLDILRDFFELRLKYYGLRKEWLLGMLGAESAKLNNQARFILEKIDGKIIIENKPKKELIKVLIQRGYDSDPVKAWKEAQQKVPDEEENEESDNEKETEKSDSVTDSGPTFNYLLDMPLWYLTKEKKDELCRLRNEKEQELDTLKRKSPSDLWKEDLATFIEELEAVEAKEKQDEQVGLPGKGGKAKGKKTQMAEVLPSPRGQRVIPRITIEMKAEAEKKNKKKIKNENTEGSPQEDGVELEGLKQRLEKKQKREPGTKTKKQTTLAFKPIKKGKKRNPWSDSESDRSSDESNFDVPPRETEPRRAATKTKFTMDLDSDEDFSDFDEKTDDEDFVPSDASPPKTKTSPKLSNKELKPQKSVVSDLEADDVKGSVPLSSSPPATHFPDETEITNPVPKKNVTVKKTAAKSQSSTSTTGAKKRAAPKGTKRDPALNSGVSQKPDPAKTKNRRKRKPSTSDDSDSNFEKIVSKAVTSKKSKGESDDFHMDFDSAVAPRAKSVRAKKPIKYLEESDEDDLF

SEQ ID NO: 7905 - protein, 113 aa, Homo sapiens
MLFDITVSGFMCLGGDFTCHNGTGGKSIYAEKFDDESVILKYTGSGILSMANAVLNTNGSHFFICTAKTEWLVGKHVVFGKVKAGTNKVEAMECFGSRNGKTSKKIIADCGKR

SEQ ID NO: 7906 - protein, 2299 aa, Homo sapiens
MADRTAPRCQLRLEWVYGYRGHQCRNNLYYTAGKEVVYFVAGVGVVYNTREHSQKFFLGHNDDIISLALHPDKTLVATGQVGKEPYICIWDSYNVQTVSLLKDVHTHGVACLAFDSDGQRLASVGLDAKNTVCIWDWRKGKLLASATGHSDRIFDISWDPYQPNRVVSCGVKHIKFWTLCGNALTAKRGIFGKTGDLQTILCLACAKEDITYSGALNGDIYVWKGLNLVRTIQGAHSVSITLWKSVGDLPNKAGIFSMYACEEGFATGGRDGCIRLWDTDFKPITKIDLRETEQGYKGVVLITSAPQPTPIYRVRTVSDALRYTSVSDSRPILTKIKAHLAGLSIRSVCWKADRLLAGTQDSEIFEVIVRERDKPMLILQGHCEGELWALALHPKKPLAVTGSDDRSVRLWSLADHALIARCNMEEAVRSVAFSPDGSQLALGMKDGSFIVLRVRHVSSLTVTRFLKDMTEVVHIKDRKEVIHEMKFSPDGSYLAVGSNDGPVDVYAVAQRYKKIGECSKSLSFITHIDWSLDSKYLQTNDGAGERLFYRMPSGKPLTSKEEIKGIPWASWTCVKGPEVSGIWPKYTEVTDINSVDANYNSSVLVSGDDFGLVKLFKFPCLKRGAKFRKYVGHSAHVTNVRWSHDFQWVLSTGGADHSVFQWRFIPEGVSNGMLETAPQEGGADSYSEESDSDLSDVPELDSDIEQEAQINYDRQVAPKTLKYILKKNVQVYKEDLPQLKQQSKEKNHAVPFLKREKAPEDSLKLQFIHGYRGYDCRNNLFYTQAGEVVYHIAAVAVVYNRQQHSQRLYLGHDDDILSLTIHPVKDYVATGQVGRDAAIHVWDTQTLKCLSLLKGQHQRGVCALDFSADGKCLVSVGLDDFHSIVFWDWKKGEKIATTRGHKDKIFVVKCNPHHVDKLVTVGIKHIKFWQQAGGGFTSKRGTFGSVGKLETMMCVSYGRMEDLVFSGAATGDIFIWKDILLLKTVKAHDGPVFAMYALDKGFVTGGKDGIVELWDDMFERCLKTYAIKRSALSTSSKGLLLEDNPSIRAITLGHGHILVGTKNGEILEIDKSGPMTLLVQGHMEGEVWGLAAHPLLPICATVSDDKTLRIWELSAQHRMLAVRKLKKGGRCCAFSPDGKALAVGLNDGSFLVVNADTVEDMVSFHHRKEMISDIKFSKDTGKYLAVASHDNFVDIYNVLTSKRVGICKGASSYITHIDWDLTGKLLQVNSGAREQLFFEAPRGKRHIIRPSEIEKIEWDTWTCVLGPTCEGIWPAHSDITDVNAASLTKDCSLLATGDDFGFVKLFSYPVKGQHARFKKYVGHSAHVTNVRWLHNDSVLLTVGGADTALMIWTREFVGTQESKLVDSEESDTDVEEDGGYDSDVAREKAIDYTTKIYAVSIREMEGTKPHQQLKEVSVEERPPVSRAAPQPEKLQKNNITKKKKLVEELALDHVFGYRGFDCRNNLHYLNDGADIIFHTAAAGIVQNLSTGPREKAAMLTPASVTDSHGEKQETGWSQSFYLEHTDDILCLTVNQHPKYRNVVATSQIGTTPSIHIWDAMTKHTLSMLRCFHSKGVNYINFSATGKLLVSVGVDPEHTITVWRWQEGKPALGFLSLQGVCLWVSSLWARTQICLTPKPAVGTDCCWASGKQGTGDPGIAAPLMPVHPRVPGPGGGWPGTPGPISEGALRRFPDVGSPPPRKAAASPTSVLATFLPKGAKVASRGGHLERIFVVEFRPDSDTQFVSVGVKHMKFWTLAGSALLYKKGVIGSLGAAKMQTMLSVAFGANNLTFTGAINGDVYVWKDHFLIRLVAKAHTGPVFTMYTTLRDGLIVTGGKERPTKEGGAVKLWDQEMKRCRAFQLETGQLVECVRSVCRGKVSTASSPGGWAREGGSVVFQLQQGKILVGTKDGEIIEVGEKNAASNILIDGHMEGEIWGLATHPSKDLFISASNDGTARIWDLADKKLLNKVSLGHAARCAAYSPDGEMVAIGMKNGEFVILLVNSLKVWGKKRDRKSAIQDIRISPDNRFLAVGSSEHTVDFYDLTQGTNLNRIGYCKDIPSFVIQMDFSADGKYIQVSTGAYKRQVHEVPLGKQVTEAVVIEKITWASWTSVLGDEVIGIWPRNADKADVNCACVTHAGLNIVTGDDFGLVKLFDFPCTEKFAKHKRYFGHSAHVTNIRFSYDDKYVVSTGGDDCSLLCWLLLALIALEIVPPAAPCEVLTPLQSSTNPIVNKLGVKDCICVAMSVKCQKPLMLLLLLLPASNCRGHAEVPPCHQPLGNAYHAAPDAQAQNAAEVTQLLP

SEQ ID NO: 7907 - protein, 5147 aa, Homo sapiens
IPAGMEADLSQLSEEERRQIAAVMSRAQGLPKGSVPPAAAESPSMHRKQELDSSHPPKQSGRPPDPGRPAQPGLSKSRTTDTFRSEQKLPGRSPSTISLKESKSRTDLKEEHKSSMMPGFLSEVNALSAVSSVVNKFNPFDLISDSEASQEETTKKQKVVQKEQGKPEGIIKPPLQQQPPKPIPKQQGPGRDPLQQDGTPKSISSQQPEKIKSQPPGTGKPIQGPTQTPQTDHAKLPLQRDASRPQTKQADIVRGESVKPSLPSPSKPPIQQPTPGKPPAQQPGHEKSQPGPAKPPAQPSGLTKPLAQQPGTVKPPVQPPGTTKPPAQPLGPAKPPAQQTGSEKPSSEQPGPKALAQPPGVGKTPAQQPGPAKPPTQQVGTPKPLAQQPGLQSPAKAPGPTKTPAQTKPPSQQPGSTKPPPQQPGPAKPSPQQPGSTKPPSQQPGSAKPSAQQPSPAKPSAQQFTKPVSQTGFGKPLQPPTVSPSAKQPPSQGLPKTICPLCNTTELLLHVPEKANFNTCTECQTTVCSLCGFNPNPHLTEAKEWLCLNCQMKRALGGDLAPVPSSPQPKLKTAPVTTTSAVSKSSPQPQQTSPKKDAAPKQDLSKAPEPKKPPPLVKQPTLHGSPSAKAKQPPEADSLSKPAPPKEPSVPSEQDKAPVADDKPKQPKMVKPTTDLVSSSSATTKPDIPSSKVQSQAEEKTTPPLKTDSAKPSQSFPPTGEKVTPFDSKAIPRPASDSKIISHPGPSSESKGQKQVDPVQKKEEPKKAQTKMSPKPDAKPMPKGSPTPPGPRPTAGQTVPTPQQSPKPQEQSRRFSLNLGSITDAPKSQPTTPQETVTGKLFGFGASIFSQASNLISTAGQPGPHSQSGPGAPMKQAPAPSQPPTSQGPPKSTGQAPPAPAKSIPVKKETKAPAAEKLEPKAEQAPTVKRTETEKKPPPIKDSKSLTAEPQKAVLPTKLEKSPKPESTCPLCKTELNIGSKDPPNFNTCTECKNQVCNLCGFNPTPHLTENCQTQRAISGQLGDIRKMPPAPSGPKASPMPVPTESSSQKTAVPPQVKLVKKQEQEVKTEAEKVILEKVKETLSMEKIPPMVTTDQKQEESKLEKDKASALQEKKPLPEEKKLIPEEEKIRSEEKKPLLEEKKPTPEDKKLLPEAKTSAPEEQKHDLLKSQVQIAEEKLEGRVAPKTVQEGKQPQTKMEGLPSGTPQSLPKEDDKTTKTIKEQPQPPCTAKPDQEKEDDKSDTSSSQQPKSPQGLSDTGYSSDGISSSLGEIPSLIPTDEKDILKGLKKDSFSQESSPSSPSDLAKLESTVLSILEAQASTLADEKSEKKTQPHEVSPEQPKDQEKTQSLSETLEITISEEEIKESQEERKDTFKKDSQQDIPSSKDHKEKSEFVDDITTRREPYDSVEESSESENSPVPQRKRRTSVGSSSSDEYKQEDSQGSGEEEDFIRKQIIEMSADEDASGSEDDEFIRNQLKEISSSTESQKKEETKGKGKITAGKHRRLTRKSSTSIDEDAGRRHSWHDEDDEAFDESPELKYRETKSQESEELVVTGGGGLRRFKTIELNSTIADKYSAESSQKKTSLYFDEEPELEMESLTDSPEDRSRGEGSSSLHASSFTPGTSPTSVSSLDEDSDSSPSHKKGESKQQRKARHRPHGPLLPTIEDSSEEEELREEEELLKEQEKQREIEQQQRKSSSKKSKKDKDELRAQRRRERPKTPPSNLSPIEDASPTEELRQAAEMEELHRSSCSEYSPSIESDPEGFEISPEKIIEVQKVYKLPTAVSLYSPTDEQSIMQKEGSQKALKSAEEMYEEMMHKTHKYKAFPAANERDEVFEKEPLYGGMLIEDYIYESLVEDTYNGSVDGSLLTRQEEENGFMQQKGREQKIRLSEQIYEDPMQKITDLQKEFYELESLHSVVPQEDIVSSSFIIPESHEIVDLGTMVTSTEEERKLLDADAAYEELMKRQQMQLTPGSSPTQAPIGEDMTESTMDFDRMPDASLTSSVLSGASLTDSTSSATLSIPDVKITQHFSTEEIEDEYVTDYTREIQEIIAHESLILTYSEPSESATSVPPSDTPSLTSSVSSVCTTDSSSPITTLDSITTVYTEPVDMITKFEDSEEISSSTYFPGSIIDYPEEISVSLDRTAPPDGRASADHIVISLSDMASSIIESVVPKPEGPVADTVSTDLLISEKDPVKKAKKETGNGIILEVLEAYRDKKELEAERTKSSLSETVFDHPPSSVIALPMKEQLSTTYFTSGETFGQEKPASQLPSGSPSVSSLPAKPRPFFRSSSLDISAQPPPPPPPPPPPPPPPPPPPPPPLPPPTSPKPTILPKKKLTVASPVTTATPLFDAVTTLETTAVLRSNGLPVTRICTTAPPPVPPKPSSIPSGLVFTHRPEPSKPPIAPKPVIPQLPTTTQKPTDIHPKPTGLSLTSSMTLNLVTSADYKLPSPTSPLSPHSNKSSPRFSKSLTETYVVITLPSEPGTPTDSSASQAITSWPLGSPSKDLVSVEPVFSVVPPVTAVEIPISSEQTFYISGALQTFSATPVTAPSSFQAAPTSVTQFLTTEVSKTEVSATRSTAPSVGLSSISITIPPEPLALDNIHLEKPQYKEDGKLQLVGDVIDLRTVPKVEVKTTDKCIDLSASTMDVKRQITANEVYGKQISAVQPSIINLSVTSSIVTPVSLATETVTFVTCTASASYTTGTESLVGAEHAMTTPLQLTTSKHAEPPYRIPSDQVFPIAREEAPINLSLGTPAHAVTLAITKPVTVPPVGVTNGWTDSTVSQGITDGEVVDLSTTKSHRTVVTMDESTSSVMTKIIEDEKPVDLTAGRRAVCCDVVYKLPFGRSCTAQQPATTLPEDRFGYRDDHYQYDRSGPYGYRGIGGMKPSMSDTNLAEAGHFFYKSKNAFDYSEGTDTAVDLTSGRVTTGEVMDYSSKTTGPYPETRQVISGAGISTPQYSTARMTPPPGPQYCVGSVLRSSNGVVYSSVATPTPSTFAITTQPGSIFSTTVRDLSGIHTADAVTSLPAMHHSQPMPRSYFITTGASETDIAVTGIDISASLQTITMESLTAETIDSVPTLTTASEVFPEVVGDESALLIVPEEDKQQQQLDLERELLELEKIKQQRFAEELEWERQEIQRFREQEKIMVQKKLEELQSMKQHLLFQQEEERQAQFMMRQETLAQQQLQLEQIQQLQQQLHQQLEEQKIRQIYQYNYDPSGTASPQTTTEQAILEGQYAALEGSQFWATEDATTTASAVVAIEIPQSQGWYTVQSDGVTQYIAPPGILSTVSEIPLTDVVVKEEKQPKKRSSGAKVRGQYDDMGENMTDDPRSFKKIVDSGVQTDDEDATDRSYVSRRRRTKKSVDTSVQTDDEDQDEWDMPTRSRRKARVGKYGDSMTEADKTKPLSKVSSIAVQTVAEISVQTEPVGTIRTPSIRARVDAKVEIIKHISAPEKTYKGGSLGCQTEADSDTQSPQYLSATSPPKDKKRPTPLEIGYSSHLRADSTVQLAPSPPKSPKVLYSPISPLSPGKALESAFVPYEKPLPDDISPQKVLHPDMAKVPPASPKTAKMMQRSMSDPKPLSPTADESSRAPFQYTEGYTTKGSQTMTSSGAQKKVKRTLPNPPPEEISTGTQSTFSTMGTVSRRRICRTNTMARAKILQDIDRELDLVERESAKLRKKQAELDEEEKEIDAKLRYLEMGINRRKEALLKEREKRERAYLQGVAEDRDYMSDSEVSSTRPTRIESQHGIERPRTAPQTEFSQFIPPQTQTESQLVPPTSPYTQYQYSSPALPTQAPTSYTQQSHFEQQTLYHQQVSPYQTQPTFQAVATMSFTPQVQPTPTPQPSYQLPSQMMVIQQKPRQTTLYLEPKITSNYEVIRNQPLMIAPVSTDNTFAVSHLGSKYNSLDLRIGLEERSSMASSPISSISADSFYADIDHHTPRNYVLIDDIGEITKGTAALSTAFSLHEKDLSKTDRLLRTTETRRSQEVTDFLAPLQSSSRLHSYVKAEEDPMEDPYELKLLKHQIKQEFRRGTESLDHLAGLSHYYHADTSYRHFPKSEKYSISRLTLEKQAAKQLPAAILYQKQSKHKKSLIDPKMSKFSPIQESRDLEPDYSSYMTSSTSSIGGISSRARLLQDDITFGLRKNITDQQKFMGSSLGTGLGTLGNTIRSALQDEADKPYSSGSRSRPSSRPSSVYGLDLSIKRDSSSSSLRLKAQEAEALDVSFSHASSSARTKPTSLPISQSRGRIPIVAQNSEEESPLSPVGQPMGMARAAAGPLPPISADTRDQFGSSHSLPEVQQHMREESRTRGYDRDIAFIMDDFQHAMSDSEAYHLRREETDWFDKPRESRLENGHGLDRKLPERLVHSRPLSQHQEQIIQMNGKTMHYIFPHARIKITRDSKDHTVSMQVLEWNGIPLTSKTYEEVQSIISQQSGEAEICVRLDLNMLSDSENSQHLELHEPPKAVDKAKSPGVDPKQLAAELQKVSLQQSPLVLSSVVEKGSHVHSGPTSAGSSSVPSPGQPGSPSVSKKKHGSSKLQINYDLGNLIIHILQARNLVPRDNNGYSDPFVKVYLLPGRGAEYKRRTKHVQKSLNPEWNQTVIYKSISMEQLKKKTLEVTVWDYDRFSSNDFLGEVLIDLSSTSHLDNTPRWYPLKEQTESIDHGKSHSSQSSQQSPKPSVIKSRSHGIFPDPSKDMQVPTIEKSHSSPGSSKSSSEGHLRSHGPSRSQSKTSVTQTHLEDAGAAIAAAEAAVQQLRIQPTAHKSGQSNHARKQHRHSIAGVLPIQRTQSDNLPPPANGNQDQSQLALRKVMSDGPVKPEGAKPPNHRPAESSVSTGSSGSSFGSGYSVDSEGSSSTAGETNLFPIPRIGKMGQNGQEPVKQPGVGVGLADTEARGQREPKPGQACFLGARNMKEIQPMPEIYPETDKDGEKYPGSLFLPFSNLCQCLIKTNWKPVDGEAQADLELLPNLQTRRILPPSMYLLQKTKALQTYKRSDIRGSNGPTINATTCFETTSVMGEIKIALKKEMKTDGEQLIVEILQCRNITYKFKSPDHLPDLYVKIYVMNISTQKKVIKKKTRVCRHDREPSFNETFRFSLSPAGHSLQILLFSNGGKFMKKTLIGEACIWLDKVDLRKRIVNWHKLLVSPTQTH

SEQ ID NO: 7908 - protein, 4830 aa, Homo sapiens
IPAGMEADLSQLSEEERRQIAAVMSRAQGLPKGSVPPAAAESPSMHRKQELDSSHPPKQSGRPPDPGRPAQPGLSKSRTTDTFRSEQKLPGRSPSTISLKESKSRTDLKEEHKSSMMPGFLSEVNALSAVSSVVNKFNPFDLISDSEASQEETTKKQKVVQKEQGKPEGIIKPPLQQQPPKPIPKQQGPGRDPLQQDGTPKSISSQQPEKIKSQPPGTGKPIQGPTQTPQTDHAKLPLQRDASRPQTKQADIVRGESVKPSLPSPSKPPIQQPTPGKPPAQQPGHEKSQPGPAKPPAQPSGLTKPLAQQPGTVKPPVQPPGTTKPPAQPLGPAKPPAQQTGSEKPSSEQPGPKALAQPPGVGKTPAQQPGPAKPPTQQVGTPKPLAQQPGLQSPAKAPGPTKTPAQTKPPSQQPGSTKPPPQQPGPAKPSPQQPGSTKPPSQQPGSAKPSAQQPSPAKPSAQQFTKPVSQTGFGKPLQPPTVSPSAKQPPSQGLPKTICPLCNTTELLLHVPEKANFNTCTECQTTVCSLCGFNPNPHLTEAKEWLCLNCQMKRALGGDLAPVPSSPQPKLKTAPVTTTSAVSKSSPQPQQTSPKKDAAPKQDLSKAPEPKKPPPLVKQPTLHGSPSAKAKQPPEADSLSKPAPPKEPSVPSEQDKAPVADDKPKQPKMVKPTTDLVSSSSATTKPDIPSSKVQSQAEEKTTPPLKTDSAKPSQSFPPTGEKVTPFDSKAIPRPASDSKIISHPGPSSESKGQKQVDPVQKKEEPKKAQTKMSPKPDAKPMPKGSPTPPGPRPTAGQTVPTPQQSPKPQEQSRRFSLNLGSITDAPKSQPTTPQETVTGKLFGFGASIFSQASNLISTAGQPGPHSQSGPGAPMKQAPAPSQPPTSQGPPKSTGQAPPAPAKSIPVKKETKAPAAEKLEPKAEQAPTVKRTETEKKPPPIKDSKSLTAEPQKAVLPTKLEKSPKPESTCPLCKTELNIGSKDPPNFNTCTECKNQVCNLCGFNPTPHLTENCQTQRAISGQLGDIRKMPPAPSGPKASPMPVPTESSSQKTAVPPQVKLVKKQEQEVKTEAEKVILEKVKETLSMEKIPPMVTTDQKQEESKLEKDKASALQEKKPLPEEKKLIPEEEKIRSEEKKPLLEEKKPTPEDKKLLPEAKTSAPEEQKHDLLKSQVQIAEEKLEGRVAPKTVQEGKQPQTKMEGLPSGTPQSLPKEDDKTTKTIKEQPQPPCTAKPDQEKEDDKSDTSSSQQPKSPQGLSDTGYSSDGISSSLGEIPSLIPTDEKDILKGLKKDSFSQESSPSSPSDLAKLESTVLSILEAQASTLADEKSEKKTQPHEVSPEQPKDQEKTQSLSETLEITISEEEIKESQEERKDTFKKDSQQDIPSSKDHKEKSEFVDDITTRREPYDSVEESSESENSPVPQRKRRTSVGSSSSDEYKQEDSQGSGEEEDFIRKQIIEMSADEDASGSEDDEFIRNQLKEISSSTESQKKEETKGKGKITAGKHRRLTRKSSTSIDEDAGRRHSWHDEDDEAFDESPELKYRETKSQESEELVVTGGGGLRRFKTIELNSTIADKYSAESSQKKTSLYFDEEPELEMESLTDSPEDRSRGEGSSSLHASSFTPGTSPTSVSSLDEDSDSSPSHKKGESKQQRKARHRPHGPLLPTIEDSSEEEELREEEELLKEQEKQREIEQQQRKSSSKKSKKDKDELRAQRRRERPKTPPSNLSPIEDASPTEELRQAAEMEELHRSSCSEYSPSIESDPEGFEISPEKIIEVQKVYKLPTAVSLYSPTDEQSIMQKEGSQKALKSAEEMYEEMMHKTHKYKAFPAANERDEVFEKEPLYGGMLIEDYIYESLVEDTYNGSVDGSLLTRQEEENGFMQQKGREQKIRLSEQIYEDPMQKITDLQKEFYELESLHSVVPQEDIVSSSFIIPESHEIVDLGTMVTSTEEERKLLDADAAYEELMKRQQMQLTPGSSPTQAPIGEDMTESTMDFDRMPDASLTSSVLSGASLTDSTSSATLSIPDVKITQHFSTEEIEDEYVTDYTREIQEIIAHESLILTYSEPSESATSVPPSDTPSLTSSVSSVCTTDSSSPITTLDSITTVYTEPVDMITKFEDSEEISSSTYFPGSIIDYPEEISVSLDRTAPPDGRASADHIVISLSDMASSIIESVVPKPEGPVADTVSTDLLISEKDPVKKAKKETGNGIILEVLEAYRDKKELEAERTKSSLSETVFDHPPSSVIALPMKEQLSTTYFTSGETFGQEKPASQLPSGSPSVSSLPAKPRPFFRSSSLDISAQPPPPPPPPPPPPPPPPPPPPPPLPPPTSPKPTILPKKKLTVASPVTTATPLFDAVTTLETTAVLRSNGLPVTRICTTAPPPVPPKPSSIPSGLVFTHRPEPSKPPIAPKPVIPQLPTTTQKPTDIHPKPTGLSLTSSMTLNLVTSADYKLPSPTSPLSPHSNKSSPRFSKSLTETYVVITLPSEPGTPTDSSASQAITSWPLGSPSKDLVSVEPVFSVVPPVTAVEIPISSEQTFYISGALQTFSATPVTAPSSFQAAPTSVTQFLTTEVSKTEVSATRSTAPSVGLSSISITIPPEPLALDNIHLEKPQYKEDGKLQLVGDVIDLRTVPKVEVKTTDKCIDLSASTMDVKRQITANEVYGKQISAVQPSIINLSVTSSIVTPVSLATETVTFVTCTASASYTTGTESLVGAEHAMTTPLQLTTSKHAEPPYRIPSDQVFPIAREEAPINLSLGTPAHAVTLAITKPVTVPPVGVTNGWTDSTVSQGITDGEVVDLSTTKSHRTVVTMDESTSSVMTKIIEDEKPVDLTAGRRAVCCDVVYKLPFGRSCTAQQPATTLPEDRFGYRDDHYQYDRSGPYGYRGIGGMKPSMSDTNLAEAGHFFYKSKNAFDYSEGTDTAVDLTSGRVTTGEVMDYSSKTTGPYPETRQVISGAGISTPQYSTARMTPPPGPQYCVGSVLRSSNGVVYSSVATPTPSTFAITTQPGSIFSTTVRDLSGIHTADAVTSLPAMHHSQPMPRSYFITTGASETDIAVTGIDISASLQTITMESLTAETIDSVPTLTTASEVFPEVVGDESALLIVPEEDKQQQQLDLERELLELEKIKQQRFAEELEWERQEIQRFREQEKIMVQKKLEELQSMKQHLLFQQEEERQAQFMMRQETLAQQQLQLEQIQQLQQQLHQQLEEQKIRQIYQYNYDPSGTASPQTTTEQAILEGQYAALEGSQFWATEDATTTASAVVAIEIPQSQGWYTVQSDGVTQYIAPPGILSTVSEIPLTDVVVKEEKQPKKRSSGAKVRGQYDDMGENMTDDPRSFKKIVDSGVQTDDEDATDRSYVSRRRRTKKSVDTSVQTDDEDQDEWDMPTRSRRKARVGKYGDSMTEADKTKPLSKVSSIAVQTVAEISVQTEPVGTIRTPSIRARVDAKVEIIKHISAPEKTYKGGSLGCQTEADSDTQSPQYLSATSPPKDKKRPTPLEIGYSSHLRADSTVQLAPSPPKSPKVLYSPISPLSPGKALESAFVPYEKPLPDDISPQKVLHPDMAKVPPASPKTAKMMQRSMSDPKPLSPTADESSRAPFQYTEGYTTKGSQTMTSSGAQKKVKRTLPNPPPEEISTGTQSTFSTMGTVSRRRICRTNTMARAKILQDIDRELDLVERESAKLRKKQAELDEEEKEIDAKLRYLEMGINRRKEALLKEREKRERAYLQGVAEDRDYMSDSEVSSTRPTRIESQHGIERPRTAPQTEFSQFIPPQTQTESQLVPPTSPYTQYQYSSPALPTQAPTSYTQQSHFEQQTLYHQQVSPYQTQPTFQAVATMSFTPQVQPTPTPQPSYQLPSQMMVIQQKPRQTTLYLEPKITSNYEVIRNQPLMIAPVSTDNTFAVSHLGSKYNSLDLRIGLEERSSMASSPISSISADSFYADIDHHTPRNYVLIDDIGEITKGTAALSTAFSLHEKDLSKTDRLLRTTETRRSQEVTDFLAPLQSSSRLHSYVKAEEDPMEDPYELKLLKHQIKQEFRRGTESLDHLAGLSHYYHADTSYRHFPKSEKYSISRLTLEKQAAKQLPAAILYQKQSKHKKSLIDPKMSKFSPIQESRDLEPDYSSYMTSSTSSIGGISSRARLLQDDITFGLRKNITDQQKFMGSSLGTGLGTLGNTIRSALQDEADKPYSSGSRSRPSSRPSSVYGLDLSIKRDSSSSSLRLKAQEAEALDVSFSHASSSARTKPTSLPISQSRGRIPIVAQNSEEESPLSPVGQPMGMARAAAGPLPPISADTRDQFGSSHSLPEVQQHMREESRTRGYDRDIAFIMDDFQHAMSDSEAYHLRREETDWFDKPRESRLENGHGLDRKLPERLVHSRPLSQHQEQIIQMNGKTMHYIFPHARIKITRDSKDHTVSGNGLGIRIVGGKEIPGHSGEIGAYIAKILPGGSAEQTGKLMEGMQVLEWNGIPLTSKTYEEVQSIISQQSGEAEICVRLDLNMLSDSENSQHLELHEPPKAVDKAKSPGVDPKQLAAELQKVSLQQSPLVLSSVVEKGSHVHSGPTSAGSSSVPSPGQPGSPSVSKKKHGSSKPTDGTKVVSHPITGEIQLQINYDLGNLIIHILQARNLVPRDNNGYSDPFVKVYLLPGRGQVMVVQNASAEYKRRTKHVQKSLNPEWNQTVIYKSISMEQLKKKTLEVTVWDYDRFSSNDFLGEVLIDLSSTSHLDNTPRWYPLKEQTESIDHGKSHSSQSSQQSPKPSVIKSRSHGIFPDPSKDMQVPTIEKSHSSPGSSKSSSEGHLRSHGPSRSQSKTSVTQTHLEDAGAAIAAAEAAVQQLRIQPSKRRK

SEQ ID NO: 7909 - protein, 1163 aa, Homo sapiens
MNREDRNVLRMKERERRNQEIQQGEDAFPPSSPLFAEPYKVTSKEDKLSSRIQSMLGNYDEMKDFIGDRSIPKLVAIPKPTVPPSADEKSNPNFFEQRHGGSHQSSKWTPVGPAPSTSQSQKRSSGLQSGHSSQRTSAGSSSGTNSSGQRHDRESYNNSGSSSRKKGQHGSEHSKSRSSSPGKPQAVSSLNSSHSRSHGNDHHSKEHQRSKSPRDPDANWDSPSRVPFSSGQHSTQSFPPSLMSKSNSMLQKPTAYVRPMDGQESMEPKLSSEHYSSQSHGNSMTELKPSSKAHLTKLKIPSQPLDASASGDVSCVDEILKEMTHSWPPPLTAIHTPCKTEPSKFPFPTKESQQSNFGTGEQKRYNPSKTSNGHQSKSMLKDDLKLSSSEDSDGEQDCDKTMPRSTPGSNSEPSHHNSEGADNSRDDSSSHSGSESSSGSDSESESSSSDSEANEPSQSASPEPEPPPTNKWQLDNWLNKVNPHKVSPASSVDSNIPSSQGYKKEGREQGTGNSYTDTSGPKETSSATPGRDSKTIQKGSESGRGRQKSPAQSDSTTQRRTVGKKQPKKAEKAAAEEPRGGLKIESETPVDLASSMPSSRHKAATKGSRKPNIKKESKSSPRPTAEKKKYKSTSKSSQKSREIIETDTSSSDSDESESLPPSSQTPKYPESNRTPVKPSSVEEEDSFFRQRMFSPMEEKELLSPLSEPDDRYPLIVKIDLNLLTRIPGKPYKETEPPKGEKKNVPEKHTREAQKQASEKVSNKGKRKHKNEDDNRASESKKPKTEDKNSAGHKPSSNRESSKQSAAKEKDLLPSPAGPVPSKDPKTEHGSRKRTISQSSSLKSSSNSNKETSGSSKNSSSTSKQKKTEGKTSSSSKEVKEKAPSSSSNCPPSAPTLDSSKPRRTKLVFDDRNYSADHYLQEAKKLKHNADALSDRFEKAVYYLDAVVSFIECGNALEKNAQESKSPFPMYSETVDLIKYTMKLKNYLAPDATAADKRLTVLCLRCESLLYLRLFKLKKENALKYSKTLTEHLKNSYNNSQAPSPGLGSKAVGMPSPVSPKLSPGNSGNYSSGASSASASGSSVTIPQKIHQMAASYVQVTSNFLYATEIWDQAEQLSKEQKEFFAELDKVMGPLIFNASIMTDLVRYTRQGLHWLRQDAKLIS

SEQ ID NO: 7910 - protein, 418 aa, Homo sapiens
MAKLLQPPPKFLPSEWHIANKNQYHRADAQRSRSERLVAESQRLVDEIEKTTRKSQSDVNKKLEQRLEEVQFWKKELDDKLEQLVNVTDDLLIYKIRLEKALETLKEPLHITETCLAYREKRIGIDLVHDTVEHELIKEAEIIQGIMALLTRTLEEASEQIRMNRSAKYNLEKDLKDKFVALTIDDICFSLNNNSPNIRYSENAVRIEPNSVSLEDWLDFSSTNVEKADKQRNNSLMLKALVDRILSQTANDLRKQCDVVDTAFKNGLKDTKDARDKLADHLAKVMEEIASQEKNITALEKAILDQEGPAKVAHTRLETRTHRPNVELCRDVAQYRLMKEVQEITHNVARLKETLAQAQAELKGLHRRQLALQEEIQVKENTIYIDEVLCMQMRKSIPLRDGEDHGVWAGGLRPDAVC

SEQ ID NO: 7911 - protein, 184 aa, Homo sapiens
MGNGMNKILPGLYIGNFKDARDAEQLSKNKVTHILSVHDSARPMLEGVKYLCIPAADSPSQNLTRHFKESIKFIHECRLRGESCLVHCLAGVSRSVTLVIAYIMTVTDFGWEDALHTVRAGRSCANPNVGFQRQLQEFEKHEVHQYRQWLKEEYGESPLQDAEEAKNILAAPGILKFWAFLRRL

SEQ ID NO: 7912 - protein, 940 aa, Homo sapiens
MGSGPIDPKELLKGLDSFLNRDGEVKSVDGISKIFSLMKEARKMVSRCTYLNILLQTRSPEILVKFIDVGGYKLLNNWLTYSKTTNNIPLLQQILLTLQHLPLTVDHLKQNNTAKLVKQLSKSSEDEELRKLASVLVSDWMAVIRSQSSTQPAEKDKKKRKDEGKSRTTLPERPLTEVKAETRAEEAPEKKREKPKSLRTTAPSHAKFRSTGLELETPSLVPVKKNASTVVVSDKYNLKPIPLKRQSNVAAPGDATPPAEKKYKPLNTTPNATKEIKVKIIPPQPMEGLGFLDALNSAPVPGIKIKKKKKVLSPTAAKPSPFEGKTSTEPSTAKPSSPEPAPPSEAMDADRPGTPVPPVEVPELMDTASLEPGALDAKPVESPGDPNQLTRKGRKRKSVTWPEEGKLREYFYFELDETERVNVNKIKDFGEAAKREILSDRHAFETARRLSHDNMEEKVPWVCPRPLVLPSPLVTPGSNSQERYIQAEREKGILQELFLNKESPHEPDPEPYEPIPPKLIPLDEECSMDETPYVETLEPGGSGGSPDGAGGSKLPPVLANLMGSMGAGKGPQGPGGGGINVQEILTSIMGSPNSHPSEELLKQPDYSDKIKQMLVPHGLLGPGPIANGFPPGGPGGPKGMQHFPPGPGGPMPGPHGGPGGPVGPRLLGPPPPPRGGDPFWDGPGDPMRGGPMRGGPGPGPGPYHRGRGGRGGNEPPPPPPPFRGARGGRSGGGPPNGRGGPGGGMVGGGGHRPHEGPGGGMGNSSGHRPHEGPGGGMGSGHRPHEGPGGSMGGGGGHRPHEGPGGGISGGSGHRPHEGPGGGMGAGGGHRPHEGPGGSMGGSGGHRPHEGPGHGGPHGHRPHDVPGHRGHDHRGPPPHEHRGHDGPGHGGGGHRGHDGGHSHGGDMSNRPVCRHFMMKGNCRYENNCAFYHPGVNGPPLP

SEQ ID NO: 7913 - protein, 940 aa, Homo sapiens [sequence omitted]

SEQ ID NO: 7914 - protein, 557 aa, Homo sapiens
MDDCGKLKKYKELTLTRNQGICGKNNSYIEHQIHQVRFGRHREECNYFLVVYQNPIISEDPLDLWLLGFEEPGVTSNLDIYRVSRLRPFIVALNMDSDDLQVFQNELICCICVNYFIDPVTIDCGHSFCRPCLCLCSEEGRAPMRCPSCRKISEKPNFNTNVVLKKLSSLARQTRPQNINSSDNICVLHEETKELFCEADKRLLCGPCSESPEHMAHSHSPIGWAAEECREKLIKEMDYLWEINQETRNNLNQETRTFHSLKDYVSVRKRIITIQYQKMPIFLDEEEQRHLQALEREAEELFQQLQDSQVRMTQHLERMKDMYRELWETCHVPDVELLQDVRNVSASSGPGNITEAIFFCRTDLAQMQKPQPVNPELTSWCITGVLDMLNNFRVDSALSTEMIPCYISLSEDVRYVIFGDDHLSAPTDPQGVDSFAVWGAQAFTSGKHYWEVDVTLSSNWILGVCQDSRTADANFVIDSDERFFLISSKRSNHYSLSTNSPPLIQYVQRPLGQVGVFLDYDNGSVSFFDVSKGSLIYGFPPSSFSSPLRPFFCFGCT

SEQ ID NO: 7915 - protein, 1372 aa, Homo sapiens
DGLAYRGRVFLELITQIKSYQDSTIKDLSHEVTRIEKHQNRQKYGLCVIFLSCTMMPNFKELIHFEVSIGHYGNKMDLNYKPLVSSTPYSPVIYDGNIYHYVPWYNTKPVVAVTSNWEDVSFRMNCLNLLHFTRDRLVSGAGADAGKTPVSDREVQPLLPCPGHRRPLPCMTYQPKATSLDRKRWQLRSLLLQELAQKAKQAKPKDMVATAEDWLYRLNTVLPEPQMGLPDVMIWLVAKEQRVAYAQVPAHSVLFSPAGALHSGRLCGKIQTLFLQYPEGEGQKDVLPAHLRVCMWLGNVTDSKDLQLLRQGDTAVYAEMYENQAKYKDQWGQQGLYHCPNFSDVMGNKTLPMTDFQPPLGWHWQDSWTVEPQRRLLLDIDINKSQVLEEVYENQGRDTRGAWGPAAIPNTDVNGQPMEARENVKCPQGWHFKKDWVVELNHAVDSKGWEYGVGIPPSGLPQVWSPVEKTYHSCRRRRWARVRFRNHGELSHEQETLSFLQLGLAKGEEEGWEYDTFGSKFHLNPQPQSRFRRRCWRRRLAPNKDKGIAPIFLLEGSLVKPHRLGDACLDPQRQDTRPPNLPFIYCTFNKPHYYQLFCYIYQARNLVSNQILTFQGPFIRVVFLNHSQCTQTLRSSAGPTWAQTLIFQHLLLYENPQDTKESPPLVVLELWQRDFWGKESLWGRSVWPPMVWLDLQDRILPPMRWHPLVKELGKEEGEILASCELILQTEVLGERAWLGKGLMLPALPQKLGEKQLPILSVPWKNGAYTLPKSIQPTIKRMAIEILAWGLRNMKKASSPQLLVEFGEESLRTEPIRDFQTNPNFPESESVLVLTVLMPTEEAYALPLVVKVVDNWAFGQQTVTGQANIDFLQPYFCDPWAQDYMHPKLPRRWGAAPARGQNDPLLCQDEYEHEVDWWSKLFWATDEHKSLKYKYKDYHTLKVYECELEAVPAFQGLQDFCQTFKLYQEQPKLDSPVVGEFKGLFRIYPFPENPEAPKPPLQFLVWPEREDFPQPCLVRVYMVRAINLQPQDYNGLCDPYVILKLGKTELGNRDMYQPNTLDPIFGMMFELTCNIPLEKDLEIQLYDFDLFSPDDKIGTTVIDLENRLLSGFGAHCGLSKSYCQSGPFRWRDQMPPSYLLERYAKRKGLPPPLFSPEEDAVFYNGKKFKLQSFEPKTPTVHGLGPKKERLALYLLHTQGLVPEHVETRTLYSHSQPGIDQGKVQMWVDIFPKKLGPPGPQVNINPRKPKRYELRCIIWKTANVDLVDDNLSREKTSDIYIKGWLYGLEKDMQKTDIHYHSLTGEADFNWRFIFTMDYLAAERTCVQSQKDYIWSLDATSMKFPARLIIQVWDNDIFSPDDFLGVLELDLSDMP

SEQ ID NO: 7916 - protein, 1252 aa, Homo sapiens
MLRLVVQSAKIDPPLAPLPRPCMSIDFRDIKKRTRVVEGNDPVWNETLIWHLWNRPLENDSFLQVTLQDMGSQKKERFIGLATVLLKPLLKQPSEVLFVKDLTLLNHSMKPTDCTVTLQVAHMSNQDIEKTGAEDHLGITAREAASQKLMVPGSTAHRALSSKPQHFQVRVKVFEARQLMGNNIKPVVKVSIAGQQHQTRIKMGNNPFFNEIFFQNFHEVPAKFFDETILIQTDIGFIYHSPGHTLLRKWLGLCQPNNPGSGVTGYLKVTIYALGVGDQALIDQKLLYGTDDTDIQIFKSAVVPINMAYLQLFIYCAEDLHLRVYSGFLPCFGPSFLTLHGGKKAPFRIQEEGACIPDSVRDGLAYRGRVFLELITQIKSYQDSTIKDLSHEVTRIEKHQNRQKYGLCVIFLSCTMMPNFKELIHFEVSIGHYGNKMDLNYKPLVSSTPYSPVIYDGNIYHYVPWYNTKPVVAVTSNWEDVSFRMNCLNLLHFTRDRLKANLDTLKSTRNPKDPALLYQWEKLLRELAEDCKRPLPCMTYQPKATSLDRKRWQLRSLLLQELAQKAKQAKPKDMVATAEDWLYRLNTVLPEPQMGLPDVMIWLVAKEQRVAYAQVPAHSVLFSPAGALHSGRLCGKIQTLFLQYPEGEGQKDVLPAHLRVCMWLGNVTDSKDLQLLRQGDTAVYAEMVYSELSPSSSTAREVSKALTCRGLTHHQQGSPGPLQAPVGSQEYENQAKYKDQWGQQGLYHCPNFSDVMGNKTLPMTDFQPPLGWHWQDSWTVEPQRRLLLDIDINKSQVLEEVYENQGRDTRGAWGPAAIPNTDVNGQPMEARENVKCPQGWHFKKDWVVELNHAVDSWEYGVGIPPSGLPQVWSPVEKTYHSCRRRRWARVRFRNHGELSHEQETLSFLQLGLAKGEEEGWEYDTFGSKFHLNPQPQSRFRRRCWRRRLAPNKDKGIAPIFLLEGSLAMDLKYHAGKEEDSKTWPWGLDRQFRDPQRQDTRPPNLPFIYCTFNKPHYYQLFCYIYQARNLVSNQILTFQGPFIRVVFLNHSQCTQTLRSSAGPTWAQTLIFQHLLLYENPQDTKESPPLVVLELWQRDFWGKESLWGRSVWPPMVWLDLQDRILPPMRWHPLVKELGKEEGEILASCELILQTEKLGEKQLPILSVPWKNGAYTLPKSIQPTIKRMAIEVLAMWDGDGPEEAQSQGAAISWQDARSLNGHGVLNELDGTGALRNPGTSCFFRPQRQSASGTPT

SEQ ID NO: 7917 - protein, 1398 aa, Homo sapiens
NIYHYVPWYNTKPVVAVTSNWEDVSFRMNCLNLLHFTRDRLKANLDTLKSTRNPKDPALLYQWEKLLRELAEDCKRPLPCMTYQPKATSLDRKRWQLRSLLLQELAQKAKQAKPKDMVATAEDWLYRLNTVLPEPQMGLPDVMIWLVAKEQRVAYAQVPAHSVLFSPAGALHSGRLCGKIQTLFLQYPEGEGQKDVLPAHLRVCMWLGNVTDSKDLQLLRQGDTAVYAEMYENQAKYKDQWGQQGLYHCPNFSDVMGNKTLPMTDFQPPLGWHWQDSWTVEPQRRLLLDIDINKSQVLEEVYENQGRDTRGAWGPAAIPNTDVNGQPMEARENVKCPQGWHFKKDWVVELNHAVDSKGWEYGVGIPPSGLPQVWSPVEKTYHSCRRRRWARVRFRNHGELSHEQETLSFLQLGLAKGEEEGWEYDTFGSKFHLNPQPQSRFRRRCWRRRLAPNKDKGIAPIFLLEGSLVKPHRLGDACLDPQRQDTRPPNLPFIYCTFNKPHYYQLFCYIYQARNLVSNQILTFQGPFIRVVFLNHSQCTQTLRSSAGPTWAQTLIFQHLLLYENPQDTKESPPLVVLELWQRDFWGKESLWGRSVWPPMVWLDLQDRILPPMRWHPLVKELGKEEGEILASCELILQTEVLGERAWLGKGLMLPALPQKLGEKQLPILSVPWKNGAYTLPKSIQPTIKRMAIEILAWGLRNMKKASSPQLLVEFGEESLRTEPIRDFQTNPNFPESESVLVLTVLMPTEEAYALPLVVKVVDNWAFGQQTVTGQANIDFLQPYFCDPWAQDYMHPKLPRRWGAAPARGQNDPLLCQDEYEHEVDWWSKLFWATDEHKSLKYKYKDYHTLKVYECELEAVPAFQGLQDFCQTFKLYQEQPKLDSPVVGEFKGLFRIYPFPENPEAPKPPLQFLVWPEREDFPQPCLVRVYMVRAINLQPQDYNGLCDPYVILKLGKTELGNRDMYQPNTLDPIFGMMFELTCNIPLEKDLEIQLYDFDLFSPDDKIGTTVIDLENRLLSGFGAHCGLSKSYCQSGPFRWRDQMPPSYLLERYAKRKGLPPPLFSPEEDAVFYNGKKFKLQSFEPKTPTVHGLGPKKERLALYLLHTQGLVPEHVETRTLYSHSQPGIDQGKVQMWVDIFPKKLGPPGPQVNINPRKPKRYELRCIIWKTANVDLVDDNLSREKTSDIYIKGWLYGLEKDMQKTDIHYHSLTGEADFNWRFIFTMDYLAAERTCVQSQKDYIWSLDATSMKFPARLIIQVWDNDIFSPDDFLGVLELDLSDMPLPARHAKQCSIRMMDADPKWPYFIQYKHFSLFKKKTVTGWWPCQVLDGGKWRLSGKVKMSLEILSEKEALIKPAGRGQSEPNQYPTLHPPLRTNTSFTWLRSPVQNFCYIFWKRYR

SEQ ID NO: 7918 - protein, 447 aa, Homo sapiens
MAEGEGYFAMSEDELACSPYIPLGGDFGGGDFGGGDFGGGDFGGGDFGGGGSFGGHCLDYCESPTAHCNVLNWEQVQRLDGILSETIPIHGRGNFPTLELQPSLIVKVVRRRLAEKRIGVRDVRLNGSAASHVLHQDSGLGYKDLDLIFCADLRGEGEFQTVKDVVLDCLLDFLPEGVNKEKITPLTLKEAYVQKMVKVCNDSDRWSLISLSNNSGKNVELKFVDSLRRQFEFSVDSFQIKLDSLLLFYECSENPMTETFHPTIIGESVYGDFQEAFDHLCNKIIATRNPEEIRGGGLLKYCNLLVRGFRPASDEIKALQRYMCSRFFIDFSDIGEQQRKLESYLQNHFVGLEDRKYEYLMTLHGVVNESTVCLMGHERRQTLNLITMLAIRVLADQNVIPNVANVTCYYQPAPYVADANFSNYYIAQVQPVFTCQQQTYSTWLPCN

SEQ ID NO: 7919 - protein, 890 aa, Homo sapiens
MVQLYNLHPFGSQQVVPCKLEPDRFCGGGRDALFVAAGCKVEAFAVAGQELCQPRCAFSTLGRVLRLAYSEAGDYLVAIEEKNKATFLRAYVNWRNKRTENSRVCIRMIGHNVEGPFSKAFRDQMYIIEMPLSEAPLCISCCPVKGDLLVGCTNKLVLFSLKYQIINEEFSLLDFERSLIIHIDNITPVEVSFCVGYVAVMSDLEVLIVKLESGPKNGERVHHHPHKTNNRIRRTEEGISNEISQLESDDFVICQKPLELLGEKSEQSGLSVTLESTGLADEKRKYSHFQHLLYRRFAPDISSYVLSDDIKLHSLQLLPIYQTGSLTSDGKNLSQEKELLSLFCFFSLPHVGYLYMVVKSVELMSVYQYPEKSQQAVLTPQFLHVITSNNLQCFTVRCSAAAAREEDPYMDTTLKACPPVSMDVCALRIQLFIGLKAICHFKNHIILLTKAEPEAIPERRQSPKRLLSRKDTSVKIKIPPVAEAGWNLYIVNTISPVQLYKEMVDYSNTYKTVKTQSCIHLLSEAHLLVRAALMDASQLEPGEKAELLEAFKESCGHLGDCYSRLDSQHSHLTLPYYKMSGLSMAEVLARTDWTVEDGLQKYERGLIFYINHSLYENLDEELNEELAAKVVQMFYVAEPKQVPHILCSPSMKNINPLTAMSYLRKLDTSGFSSILVTLTKAAVALKMGDLDMHRNEMKSHSEMKLVCGFILEPRLLIQQRKGQIVPTELALHLKETQPGLLVASVLGLQKNNKIGIEEADSFFKVLCAKDEDTIPQLLVDFWEAQLVACLPDVVLQELFFKLTSQYIWRLSKRQPPDTTPLRTSEDLINACSHYGLIYPWVHVVISSDSLADKNYTEDLSKLQLPLFRSWSHFQKTLLPASVSMFCVVHA

SEQ ID NO: 7920 - protein, 1004 aa, Homo sapiens
MVQLYNLHPFGSQQVVPCKLEPDRFCGGGRDALFVAAGCKVEAFAVAGQELCQPRCAFSTLGRVLRLAYSEAGDYLVAIEEKNKATFLRAYVNWRNKRTENSRVCIRMIGHNVEGPFSKAFRDQMYIIEMPLSEAPLCISCCPVKGDLLVGCTNKLVLFSLKYQIINEEFSLLDFERSLIIHIDNITPVEVSFCVGYVAVMSDLEVLIVKLESGPKNGERVHHHPHKTNNRIRRTEEGISNEISQLESDDFVICQKPLELLGEKSEQSGLSVTLESTGLADEKRKYSHFQHLLYRRFAPDISSYVLSDDIKLHSLQLLPIYQTGSLTSDGKNLSQEKELLSLFCFFSLPHVGYLYMVVKSVELMSVYQYPEKSQQAVLTPQFLHVITSNNLQCFTVRCSAAAAREEDPYMDTTLKACPPVSMDVCALRIQLFIGLKAICHFKNHIILLTKAEPEAIPERRQSPKRLLSRKDTSVKIKIPPVAEAGWNLYIVNTISPVQLYKEMVDYSNTYKTVKTQSCIHLLSEAHLLVRAALMDASQLEPGEKAELLEAFKESCGHLGDCYSRLDSQHSHLTLPYYKMSGLSMAEVLARTDWTVEDGLQKYERGLIFYINHSLYENLDEELNEELAAKVVQMFYVAEPKQVPHILCSPSMKNINPLTAMSYLRKLDTSGFSSILVTLTKAAVALKMGDLDMHRNEMKSHSEMKLVCGFILEPRLLIQQRKGQIVPTELALHLKETQPGLLVASVLGLQKNNKIGIEEADSFFKVLCAKDEDTIPQLLVDFWEAQLVACLPDVVLQELFFKLTSQYIWRLSKRQPPDTTPLRTSEDLINACSHYGLIYPWVHVVISSDSLADKNYTEDLSKLQSLICGPSFDIASIIPFLEPLSEDTIAGLSVHVLCRTRLKEYEQCIDILLERCPEAVIPYANHELKEENRTLWWKKLLPELCQRIKCGGEKYQLYLSSLKETLSIVAVELELKDFMNVLPEDGTATFFLPYLLYCSRKKPLT

SEQ ID NO: 7921 - protein, 1686 aa, Homo sapiens
MAQIFSNSGFKECPFSHPEPTRAKDVDKEEALQMEAEALAKLQKDRQVTDNQRGFELSSSTRKKAQVYNKQDYDLMVFPESDSQKRALDIDVEKLTQAELEKLLLDDSFETKKTPVLPVTPILSPSFSAQLYFRPTIQRGQWPPGLPGPSTYALPSIYPSTYSKQAAFQNGFNPRMPTFPSTEPIYLSLPGQSPYFSYPLTPATPFHPQGSLPIYRPVVSTDMAKLFDKIASTSEFLKNGKARTDLEITDSKVSNLQVSPKSEDISKFDWLDLDPLSKPKVDNVEVLDHEEEKNVSSLLAKDPWDAVLLEERSTANCHLERKVNGKSLSVATVTRSQSLNIRTTQLAKAQGHISQKDPNGTSSLPTGSSLLQEVEVQNEEMAAFCRSITKLKTKFPYTNHRTNPGYLLSPVTAQRNICGENASVKVSIDIEGFQLPVTFTCDVSSTVEIIIMQALCWVHDDLNQVDVGSYVLKVCGQEEVLQNNHCLGSHEHIQNCRKWDTEIRLQLLTFSAMCQNLARTAEDDETPVDLNKHLYQIEKPCKEAMTRHPVEELLDSYHNQVELALQIENQHRAVDQVIKAVRKICSALDGVETLAITESVKKLKRAVNLPRSKTADVTSLFGGEDTSRSSTRGSLNPENPVQVSINQLTAAIYDLLRLHANSGRSPTDCAQSSKSVKEAWTTTEQLQFTIFAAHGISSNWVSNYEKYYLICSLSHNGKDLFKPIQSKKVGTYKNFFYLIKWDELIIFPIQISQLPLESVLHLTLFGILNQSSGSSPDSNKQRKGPEALGKVSLPLCDFRRFLTCGTKLLYLWTSSHTNSVPGTVTKKGYVMERIVLQVDFPSPAFDIIYTTPQVDRSIIQQHNLETLENDIKGKLLDILHKDSSLGLSKEDKAFLWEKRYYCFKHPNCLPKILASAPNWKWGNLAKTYSLLHQWPALYPLIALELLDSKFADQEVRSLAVTWIEAISDDELTDLLPQFVQALKYEIYLNSSLVQFLLSRALGNIQIAHNLYWLLKDALHDVQFSTRYEHVLGALLSVGGKRLREELLKQTKLVQLLGGVAEKVRQASGSARQVVLQRSMERVQSFFQKNKCRLPLKPSLVAKELNIKSCSFFSSNAVPLKVTMVNADPLGEEINVMFKVGEDLRQDMLALQMIKIMDKIWLKEGLDLRMVIFKCLSTGRDRGMVELVPASDTLRKIQVEYGVTGSFKDKPLAEWLRKYNPSEEEYEKASENFIYSCAGCCVATYVLGICDRHNDNIMLRSTGHMFHIDFGKFLGHAQMFGSFKRDRAPFVLTSDMAYVINGGEKPTIRFQLFVDLCCQAYNLIRKQTNLFLNLLSLMIPSGLPELTSIQDLKYVRDALQPQTTDAEATIFFTRLIESSLGSIATKFNFFIHNLAQLRFSGLPSNDEPILSFSPKTYSFRQDGRIKEVSVFTYHKKYNPDKHYIYVVRILWEGQIEPSFVFRTFVEFQELHNKLSIIFPLWKLPGFPNRMVLGRTHIKDVAAKRKIELNSYLQSLMNASTDVAECDLVCTFFHPLLRDEKAEGIARSADAGSFSPTPGQIGGAVKLSISYRNGTLFIMVMHIKDLVTEDGADPNPYVKTYLLPDNHKTSKRKTKISRKTRNPTFNEMLVYSGYSKETLRQRELQLSVLSAESLRENFFLGGVTLPLKDFNLSKETVKWYQLTAATYL

SEQ ID NO: 7922 - protein, 389 aa, Homo sapiens
MSEIRFTNLTWDQVITLDQVLDEVIPIHGKGNFPTMEVKPKDIIHVVKDQLIGQGIIVKDARLNGSVASYILASHNGISYKDLDVIFGVELPGNEEFQVVKDAVLDCLLDFLPKDVKKEKLSPDIMKDAYVQKLVKVCNGHDCWSLISLSNNTGKNLELKFVSSLRRQFEFSVDSFQIVLDPMLDFYSDKNAKLTKESYPVVVAESMYGDFQEAMTHLQHKLICTRKPEEIRGGGLLKYCSLLVHGFKPACMSEIKNLERYMCSRFFIDFPHIEEQQKKIESYLHNHFIGEGMTKYDYLMTLHGVVNESTVCLMSYERRQILHLITMMALKVLGELNILPNTQKVTCFYQPAPYFAAEARYPIYVIPEPPPVSFQPYHPLHFRGSNGMS

SEQ ID NO: 7923 - protein, 675 aa, Homo sapiens
  VARIANT 610: Xaa = Any Amino Acid
MGTKGHAYLALGHQGGLQNEVLGSPLKAVLIQCRRGTGTLSRHQGADKGADEGSQCDEGADEGSQCDEGADEGSQWDEGAGEGSQHDKGTGEGSQRARALVKAASAGVPGVQVTGKVGERTTGGAASKMGLQALGELNSGGSCASPRGRSEWDGWHAGHQGGLGASAGMEGEQTMKGLQPTLKRACILKGFMKEKKWCPTCLSRKVDEWIRSLHYNCVKWKYEQLNSIQKLSSVHSPSPAAEPFLLTKESRGAARPASSSPPVVHSWQEPGITTVSRLKCAQGRAPGALPPGEENPSEVVLCAFSKREAQYEHSLRPLKEDRTQTAASSLTSPATSLRHHGEGEGQGQWIWSYWAPGQQGYFNSGKVDIITISDPFIDLKYMVYMFLYDSTHGKFHGTIKAENGKLVINGNPITIFQERDPSKIKWGTAGAEYIVEPTGTFTTMEKTGAHLQGGAKRVIISAPSADASVFIMGVNNEKYDNSLKIISNASCTTNCLAPRAKVLHDNFGIVKGLMTTVHAITATQKTVDGPSRKLWHDGGGTLQNIIPASTGTAKAVGKVIPELNGKLTGMAFCVPTANVSVVDLIYHLEKPTKYHGIKKVVKEASEGSLXGILGYNTEHQVVSFDFNSDIHSSTFDVGAGIALNNHCVKLISWYENEFGYSNRVVDVMAHKSSKE

SEQ ID NO: 7924 - protein, 364 aa, Homo sapiens
DGCGHTVLGPESGTLTSINYPQTYPNSTVCEWEIRVKMGERVRIKFGDFDIEDSDSCHFNYLRIYNGIGVSRTEIGKYCGLGLQINHSIESKGNEITLLFMSGIHVSGRGFLASYSVIDKQRSNYLFGHCIQFFWNLSSVSTAPAGCLLPFAEISGTIPHGYRDSSPLCMAGVHAGVVSNTLGGQISVVISKGIPYYESSLANNVTSVVGHLILQVFFTFKTSGCYGTLGMESGGDRGSSNNSITVLEWTDHTGQENSWKPKKSQAEKTWTALGAFATDEYQWLQIDLNKEKKITGIITTGSTMVSTITMCLPTESCTVMMGRNGLCTESLVVEQDKIFQGNKRIITRMVRNNFLPPIIARLLE

SEQ ID NO: 7925 - protein, 534 aa, Homo sapiens
  VARIANT 265: Xaa = Any Amino Acid
MVIGEKLTFNRNSPLTHSPVPLFLSLFPLSSWKHTGYLRKDFGSQHSEACSLSSSLLPGTFRAVSVFQTYHHVRTSNLTSGPEMEMGHSLKTVTVSYRKVKSLTVPSTVPPLNQGTIKYALIIVMMTIMTATDIQLLNQTMENTRQGRRGPDPQPPSHSGSLRARDFESEELLAPRAAGQDLVSLKRGPDNQHENPCFLFLKCNPDGGEEIASIGILSSARNTEVYPGEEYCGTSRGKNVYTVLDYRTVRTWEIENPKKQKKCVXTTDDAEQKNVIPTTCTYSRDGNLIAAACQNGSMQIWDRYLTVHPKFNYKQPHYLGTDTSCVTFSYDGNVLASRGGDDSLKLWDIRQFNKHFFQPPGLPTMFPMIDCCFSPDDKLIVTGTSVQRGCGSGKLVCLELYYNPNKSQRGAKLYVVKTRRKGTRQSHGTAARSLGWWEAKQAETLTQDYIIAPHVLPMFCEPHERSTRKQLEKDRLDPLKLHKPEPPVADPGCEDNPYWVSPTHSKTQPRIMFGQVESDDEEAKNEPEWKKCKI

SEQ ID NO: 7926 - protein, 522 aa, Homo sapiens
MSITSDEVNFLVYRYLQESGFSHSAFTFGIESHISQSNINGTLVPPSALISILQKGLQYVEAEISINKDGTVFDSRPIESLSLIVAVIPDVVQMRQQAFGEKLTQQQASAAATEASAMAKAATMTPAAISQQNPPKNREATVNGEENGAHEINNHSKPMEIDGDVEIPPNKATVLRGHESEVFICAWNPVSDLLASGSGDSTARIWNLNENSNGGSTQLVLRHCIREGGHDVPSNKDVTSLDWNSDGTLLAMGSYDGFARIWTENGNLASTLGQHKGPIFALKWNKKGNYVLSAGVDKTTIIWDAHTGEAKQQFPFHSAPALDVDWQNNMTFASCSTDMCIHVCRLGCDHPVKTFQGHTNEVNAIKWDPSGMLLASCSDDMTLKIWSMKQDACVHDLQAHSKEIYTIKWSPTGPATSNPNSSIMLASASFDSTVRLWDVEQGVCTHTLMKHQEPVYSVAFSPDGKYLASGSFDKYVHIWNTQSGSLVHSYQGTGGIFEVCWNARGDKVGASASDGSVCVLDL

SEQ ID NO: 7927 - protein, 653 aa, Homo sapiens [sequence omitted]

SEQ ID NO: 7928 - protein, 545 aa, Homo sapiens
MPASRLRDRAASSASGSTCGSMSQTHPVLESGLLASAGCSAPRGPRKGGPAPVDRKAKASAMPDSPAEVKTQPRSTPPSMPPPPPAASQGATRPPSFTPHTHREDGPATLPHGRFHGCLKWSMVCLLMNGSSHSPTAINGAPCTPNGFSNGPATSSTASLSTQHLPPACGARQLSKLKRFLTTLQQFGSDISPEIGERVRTLVLGLVNSTLTIEEFHSKLQEATNFPLRPFVIPFLKANLPLLQRELLHCARLAKQTPAQYLAQLVPGSRQEEVIDHKLTEREWAEEWKHLNNLLNCIMDMVEKTRRSLTVLRRCQEADRGELNHWARRYSDAEDTKKGPAPAAARPRSSSAGPEGPQLDVPREFLPRTLTGYVPEDIWRKAEEAVNEVKRQAMSELQKAVSDAERKAHELITTERAKMERALAEAKRQASEDALTVINQQEDSSESCWNCGRKASETCSGCNAARYCGSFCQHRDWEKHHHVCGQSLQGPTAVVADPVPGPPEAAHSLGPSLPVGAASPSEAGSAGPSRPGSPSPPGPLDTVPR

SEQ ID NO: 7929 - protein, 1278 aa, Homo sapiens
MKHLYGLFHYNPMMLGLESLPDPTDTWEIIETIGKGTYGKVYKVTNKRDGSLAAVKILDPVSDMDEEIEAEYNILQFLPNHPNVVKFYGMFYKADHCVGGQLWLVLELCNGGSVTELVKGLLRCGQRLDEAMISYILYGALLGLQHLHNNRIIHRDVKGNNILLTTEGGVKLVDFGVSAQLTSTRLRRNTSVGTPFWMAPEVIACEQQYDSSYDARCDVWSLGITAIELGDGDPPLFDMHPVKTLFKIPRNPPPTLLHPEKWCEEFNHFISQCLIKDFERRPSVTHLLDHPFIKGVHGKVLFLQKQLAKVLQDQKHQNPVAKTRHERMHTRRPYHVEDAEKYCLEDDLVNLEVLDEDTIIHQLQKRYADLLIYTYVGDILIALNPFQNLSIYSPQFSRLYHGVKRASNPPHIFASADAAYQCMVTLSKDQCIVISGESGSGKTESAHLIVQHLTFLGKANNQTLREKILQVNSLVEAFGNSCTAINDNSSRFGKYLEMMFTPTGVVMGARISEYLLEKSRVIKQAAREKNFHIFYYIYAGLHHQKKLSDFRLPEEKPPRYIADETGRVMHDITSKESYRRQFEAIQHCFRIIGFTDKEVHSVYRILAGILNIGNIEFAAISSQHQTDKSEVPNAEALQNAASVLCISPEELQEALTSHCVVTRGETIIRANTVDRAADVRDAMSKALYGRLFSWIVNRINTLLQPDENICSAGGGMNVGILDIFGFENFQRNSFEQLCINIANEQIQYYFNQHVFALEQMEYQNEGIDAVPVEYEDNRPLLDMFLQKPLGLLALLDEESRFPQATDQTLVDKFEDNLRCKYFWRPKGVELCFGIQHYAGKVLYDASGVLEKNRDTLPADVVVVLRTSENMLLQQLFSIPLTKTGNLAQTRARITVASSSLPPHFSAGKAKVDTLEVIRHPEETTNMKRQTVASYFRYSLMDLLSKMVVGQPHFVRCIKPNDDREALQFSRERVLAQLRSTGILETVSIRRQGYSHRILFEEFVKRYYYLAFTAHQTPLASKESCVAILEKSRLDHWVLGKTKVFLKYYHVEQLNLLLREVIGRVVVLQAYTKGWLGARRYKKVREKREKGAIAIQSAWRGYDARRKFKKISNRRNESAAHNQAGDTSNQSSGPHSPVAAGTRGSAEVQDCSEPGDHKVLRGSVHRRSHSQAESNNGRTQTSSNSPAVTEKNGHSQAQSSPKGCDIFAGHANKHSVSGTDLLSSRICHPAPDQQGLSLWGAPQKPAFPHYGCNFYGFRKWSCTEASNTSPTMSAAQNAE

SEQ ID NO: 7930 - protein, 1865 aa, Homo sapiens
MTRWVPTKREEKYGVAFYNYDARGADELSLQIGDTVHILETYEGWYRGYTLRKKSKKGIFPASYIHLKEAIVEGKGQHETVIPGDLPLIQEVTTTLREWSTIWRQLYVQDNREMFRSVRHMIYDLIEWRSQILSGTLPQDELKELKKKVTAKIDYGNRILDLDLVVRDEDGNILDPELTSTISLFRAHEIASKQVEERLQEEKSQKQNIDINRQAKFAATPSLALFVNLKNVVCKIGEDAEVLMSLYDPVESKFISENYLVRWSSSGLPKDIDRLHNLRAVFTDLGSKDLKREKISFVCQIVRVGRMELRDNNTRKLTSGLRRPFGVAVMDVTDIINGKVDDEDKQHFIPFQPVAGENDFLQTVINKVIAAKEVNHKGQGLWVTLKLLPGDIHQIRKEFPHLVDRTTAVARKTGFPEIIMPGDVRNDIYVTLVQGDFDKGSKTTAKNVEVTVSVYDEDGKRLEHVIFPGAGDEAISEYKSVIYYQVKQPRWFETVKVAIPIEDVNRSHLRFTFRHRSSQDSKDKSEKIFALAFVKLMRYDGTTLRDGEHDLIVYKAEAKKLEDAATYLSLPSTKAELEEKGHSATGKSMQSLGSCTISKDSFQISTLVCSTKLTQNVDLLGLLKWRSNTSLLQQNLRQLMKVDGGEVVKFLQDTLDALFNIMMENSESETFDTLVFDALVFIIGLIADRKFQHFNPVLETYIKKHFSATLAYTKLTKVLKNYVDGAEKPGVNEQLYKAMKALESIFKFIVRSRILFNQLYENKGEADFVESLLQLFRSINDMMSSMSDQTVRVKGAALKYLPTIVNDVKLVFDPKELSKMFTEFILNVPMGLLTIQKLYCLIEIVHSDLFTQHDCREILLPMMTDQLKYHLERQEDLEACCQLLSHILEVLYRKDVGPTQRHVQIIMEKLLRTVNRTVISMGRDSELIGNFVACMTAILRQMEDYHYAHLIKTFGKMRTDVVDFLMETFIMFKNLIGKNVYPFDWVIMNMVQNKVFLRAINQYADMLNKKFLDQANFELQLWNNYFHLAVAFLTQESLQLENFSSAKRAKILNKYGDMRRQIGFEIRDMWYNLGQHKIKFIPEMVGPILEMTLIPETELRKATIPIFFDMMQCEFHSTRSFQMFENEIITKLDHEVEGGRGDEQYKVLFDKILLEHCRKHKYLAKTGETFVKLVVRLMERLLDYRTIMHDENKENRMSCTVNVLNFYKEIEREEMYIRYLYKLCDLHKECDNYTEAAYTLLLHAKLLKWSEDVCVAHLTQRDGYQATTQGQLKEQLYQEIIHYFDKGKMWEEAIALGKELAEQYENEMFDYEQLSELLKKQAQFYENIVKVIRPKPDYFAVGYYGQGFPTFLRGKVFIYRGKEYERREDFEARLLTQFPNAEKMKTTSPPGDDIKNSPGQYIQCFTVKPKLDLPPKFHRPVSEQIVSFYRVNEVQRFEYSRPIRKGEKNPDNEFANMWIERTIYTTAYKLPGILRWFEVKSVFMVEISPLENAIETMQLTNDKINSMVQQHLDDPSLPINPLSMLLNGIVDPAVMGGFANYEKAFFTDRYLQEHPEAHEKIEKLKDLIAWQIPFLAEGIRIHGDKVTEALRPFHERMEACFKQLKEKVEKEYGVRIMPSSLDDRRGSRPRSMVRSFTMPSSSRPLSVASVSSLSSDSTPSRPGSDGFALEPLLPKKMHSRSQDKLDKDDLEKEKKDKKKEKRNSKHQEIFEKEFKPTDISLQQSEAVILSETISPLRPQRPKSQVMNVIGSERRFSVSPSSPSSQQTPPPVTPRAKLSFSMQSSLELNGMTGADVADVPPPLPLKGSVADYGNLMENQDLLGSPTPPPPPPHQRHLPPPLPSKTPPPPPPKTTRKQTSVDSGIVQ

SEQ ID NO: 7931 - protein, 126 aa, Homo sapiens
MEVLGHFGQGSNGYLELALPSARGVSVCLRKWQSAIQDFRSNATALCHIRNQAWPQPEGTCSLMGKHTKNKRASRTCGACGPETAGNGSQARVAGRTHVAGSVGGSYRGKRPSQQLGEAATPLVDG

SEQ ID NO: 7932 - protein, 1770 aa, Homo sapiens
MHLDKDLEQARSVGAHSQEMGITQSLQNLLGPQGETHTVIDLYWGVEEDEWDSPELQKTRMKLLENCLKTSAVWMRWKFAVGEALAGDPRRAKPDTTHAMRGAPLPPMEAGLSADSSVKKKKIPLEQWISRMYGQLSCFGLLGEKYGNIRIPGEVEASEFEMILDAAIEAKLETKLLEEWYCRDENSVPAAYYLRPKSEMLRSNRNAMQPSTNAENEKTWQEISDEIKKIFKAAVKLLHEKGKMKHSQAKRYLFSAIEDEFDFALGKQTPAFLKKCVCYIRKIANIERFVKIPEMGKYMDITGTEPRIIRDPEAQEKLIKLRDEFIPTIVASSNLRVYTSVTHCDMKLGYSQEIENHYIEGLGKQFYEDMIDIIQATIQQNFDTETDTLYDEILQHSSLCKTYASFYEYKCESLNIVHNYILPSKAGHINPLIIYDKDKPSGHSSLLNQSPFSNEYVQAKAYGWLHEDTGPESDPVVIVRFLGTTDMSSDLRTLLLSVCEQLAVNYRCLVQSYPKKIHDLCDLFINLLNESSLQRPLVIIFDALEQLSENDDARKLWWLPAHLPRFVRIVLSTLPNKHGILQKLRCLIHEEDNYIELIPRDRKMCSQVLKHQLLRVKRKVTSGQQIYVNNALSKCTLPMFVNLTFREVRHWRSHKDVDESSLSVTVHESIEQLFWSLEKKCGQKLVSRALGYITMAKMGLSEMELEDVLALDNSVMSELKENTRPSNPLRVPYLYIARLKEGLSGYLIERHVKNVTLLVWANRHLQLIAQKLYLQDDNDLREMHTILADYFLGVWSGGRRKAFCLEDPYLNGCLDLENRSLLEEEKHFMEQASFDRQAPDQPWVFQCNPLEPDIFFVNHRKMSELLYHLTRCGKTDDLLYGIIMNFSWLYTMIKIGQFDKVLSDIELAYNYSQEKELKFLANTLRSIKNKVTAFPGSLSAELQQRLLPVVSSLPKLRHLLLECDKDGPKYCSIVPLHSSMDVTYSPERLPLSSSHLHVTEILPTCNPSTVLTALENGSISTWDVETRQLLRQITTAQSVILGMKLTSDEKYLVVATTNNTLLIYDNVNSCLLSEVEIKGTKHGSSATYINGFTLSANHALAWLEASKDVTVIDLLYGWPLYQFHCWYEVTCVQCSLDGLYAFCGQYLNTTTIFHLGSGEKLCTVTSEFSGGFVKFLLILDTAQEMVMVDSEGSLSVWNTEDISSPQLTDDFDCRREDSEVVSIELSEDQSAVLICKALSIELLDTGLWKVAEKFRAKHNERFISAVLSKNGDCIIATMENTSAVFFWRRDTGQCMASLQEISGSIVKLVKSSHHNMLLSLSTSGVLSIWDIDIITAMSNIDKTGKPIQSLLLPARGEIIYSLDGSDCVHKWNFSSGFIEAVFKHEGIVEHCVLTSTGDIMVTSDDKSSQYVWHTSSGENLFRINGQRISQLLITHNDQFVVSLCEENASRVWRLATGHRVCNILTTLQNAFITSANTFVVGMTKSKVLAVSLWTGSITKKFCCEDGTTIVNFKLIPDCPDIIVFITSAETVNIWSLTDEVICRRVQLPNNFLKNLEDFEISPNGKLGIIARGDENINVLDLYSGKLRVVHASGIIWRQRLSRDGRYLVYICFRNGEEEDENGAIFSLIVMRLADGKNIGACSLYKTPTFLALSQRHLNIIVGFDDGSIGIYTVVDRVDAALKIKIATSNSRQIFNNATHTSRPKCNSYCFKISVDCLWRESTEVFARDSPITVSDSTESNEATPSKKHNSCYERVCSALEARGHSYAPDN

SEQ ID NO: 7933 - protein, 477 aa, Homo sapiens
MATYTCITCRVAFRDADMQRAHYKTDWHRYNLRRKVASMAPVTAEGFQERVRAQRAVAEEESKGSATYCTVCSKKFASFNAYENHLKSRRHVELEKKAVQAVNRKVEMMNEKNLEKGLGVDSVDKDAMNAAIQQAIKAQPSMSPKKAPPAPAKEARNVVAVGTGGRGTHDRDPSEKPPRLQWFEQQAKKLAKQQEEDSEEEEEDLDGDDWEDIDSDEELECEDTEAMDDVVEQDAEEEEAEEGPPLGAIPITDCLFCSHHSSSLMKNVAHMTKDHSFFIPDIEYLSDIKGLIKYLGEKVGVGKICLWCNEKGKSFYSTEAVQAHMNDKSHCKLFTDGDAALEFADFYDFRSSYPDHKEGEDPNKAEELPSEKNLEYDDETMELILPSGARVGHRSLMRYYKQRFGLSRAVAVAKNRKAVGRVLQQYRALGWTGSTGAALMRERDMQYVQRMKSKWMLKTGMKNNATKQMHFRVQVRF

SEQ ID NO: 7934 - protein, 1077 aa, Homo sapiens
MPRRKQEQPKRLPSHVSRQEEAEGELSEGEHWYGNSSEAPSEASYGEVQENYKLSLEDRIQEQSTSPDTSLGSTTPSSHTLELVALDSEVLRDSLQCQDHLSPGVSSLCDDDPGSNKPLSSNLRRLLEAGSLKLDAAATANGRVESPVNVGSNLSFSPPSHHARQLSVLARKLAEKQEQNDQYTPSNRFIWNQGKWLPNSTTTCSLSPDSAILKLKAAANAVLQDKSLTRTEETMRFESLSSPFSSQSASSTLAALSKKVSERSLTPGQEHPPPASSFLSLASMTSSAALLKEVAARAAGSLLAEKSSLLPEDPLPPPPSEKKPEKVTPPPPPPPPPPPPPPPQSLELLLLPVPKGRVSKPSNSASEEESGKPFQCPICGLVIKRKSYWKRHMVIHTGLKSHQCPLCPFRCARKDNLKSHMKVHQHQDRGETFQCQLCPFTSSRHFSLKLHMRCHQHFLRTEAKVKEEIPDPDVKGSPHLSDSACLGQQREGGGTELVGTMMTSNTPERTSQGGAGVSPLLVKEEPKEDNGLPTSFTLNAADRPANHTKLKDPSEYVANSASALFSQDISVKMASDFLMKLSAANQKEPMNLNFKVKEEPKEGESLSTTLPRSSYVFSPESEVSAPGVSEDALKPQEGKGSVLRRDVSVKAASELLMKLSAESYKETQMVKIKEEPMEVDIQDSHVSISPSRNVGYSTLIGREKTEPLQKMPEGRVPPERNLFSQDISVKMASELLFQLSEKVSKEHNHTKENTIRTTTSPFFSEDTFRQSPFTSNSKELLPSDSVLHGRISAPETEKIVLEAGNGLPSWKFNDQLFPCDVCGKVFGRQQTLSRHLSLHTEERKYKCHLCPYAAKCRANLNQHLTVHSVKLVSTDTEDIVSAVTSEGSDGKKHPYYYSCHVCGFGTELNVQFVSHMSLHVDKEQWMFSICCTACDFVTMEEAEIKTHIGTKHTGEDRKTPSESNSPSSSSLSALSDSANSKDDSDGSQKNKGGNNLLVISVMPGSQPSLNSEEKPEKGFECVFCNFVCKTKNMFERHLQIHLITRMFECDVCHKFMKTPEQLLEHKKCHTVPTGGLK

SEQ ID NO: 7935 - protein, 229 aa, Homo sapiens
MWAAGRWGPTFPSSYAGFSADCRPRSRPSSDSCSVPMTGARGQGLEVVRSPSPPLPLSCSNSTRSLLSPLGHQSFQFDEDDGDGEDEEDVDDEEDVDEDAHDSEAKVASLRGMELQGCASTQVESENNQEEQKQVRLPESRLTPWEVWFIGKEKEERDRLQLKALEELNQQLEKRKEMEEREKRKIIAEEKHKEWVQKKNEQVRRGKWIHTLTSLLQNISSYYTSLPRF

SEQ ID NO: 7936 - protein, 885 aa, Homo sapiens [sequence omitted]

SEQ ID NO: 7937 - protein, 5607 aa, Homo sapiens
MTTQAPTFTQPLQSVVVLEGSTATFEAHISGFPVPEVSWFRDGQVISTSTLPGVQISFSDGRAKLTIPAVTKANSGRYSLKATNGSGQATSTAELLVKAETAPPNFVQRLQSMTVRQGSQVRLQVRVTGIPTPVVKFYRDGAEIQSSLDFQISQEGDLYSLLIAEAYPEDSGTYSVNATNSVGRATSTAELLVQGEEEVPAKKTKTIVSTAQISESRQTRIEKKIEAHFDARSIATVEMVIDGAAGQQLPHKTPPRIPPKPKSRSPTPPSIAAKAQLARQQSPSPIRHSPSPVRHVRAPTPSPVRSVSPAARISTSPIRSVRSPLLMRKTQASTVATGPEVPPPWKQEGYVASSSEAEMRETTLTTSTQIRTEERWEGRYGVQEQVTISGAAGAAASVSASASYAAEAVATGAKEVKQDADKSAAVATVVAAVDMARVREPVISAVEQTAQRTTTTAVHIQPAQEQVRKEAEKTAVTKVVVAADKAKEQELKSRTKEVITTKQEQMHVTHEQIRKETEKTFVPKVVISAAKAKEQETRISEEITKKQKQVTQEAIRQETEITAASMVVVATAKSTKLETVPGAQEETTTQQDQMHLSYEKIMKETRKTVVPKVIVATPKVKEQDLVSRGREGITTKREQVQITQEKMRKEAEKTALSTIAVATAKAKEQETILRTRETMATRQEQIQVTHGKVDVGKKAEAVATVVAAVDQARVREPREPGHLEESYAQQTTLEYGYKERISAAKVAEPPQRPASEPHVVPKAVKPRVIQAPSETHIKTTDQKGMHISSQIKKTTDLTTERLVHVDKRPRTASPHFTVSKISVPKTEHGYEASIAGSAIATLQKELSATSSAQKITKSVKAPTVKPSETRVRAEPTPLPQFPFADTPDTYKSEAGVEVKKEVGVSITGTTVREERFEVLHGREAKVTETARVPAPVEIPVTPPTLVSGLKNVTVIEGESVTLECHISGYPSPTVTWYREDYQIESSIDFQITFQSGIARLMIREAFAEDSGRFTCSAVNEAGTVSTSCYLAVQVSEEFEKETTAVTEKFTTEEKRFVESRDVVMTDTSLTEEQAGPGEPAAPYFITKPVVQKLVEGGSVVFGCQVGGNPKPHVYWKKSGVPLTTGYRYKVSYNKQTGECKLVISMTFADDAGEYTIVVRNKHGETSASASLLEEADYELLMKSQQEMLYQTQVTAFVQEPKVGETAPGFVYSEYEKEYEKEQALIRKKMAKDTVVVRTYVEDQEFHISSFEERLIKEIEYRIIKTTLEELLEEDGEEKMAVDISESEAVESGFDSRIKNYRILEGMGVTFHCKMSGYPLPKIAWYKDGKRIKHGERYQMDFLQDGRASLRIPVVLPEDEGIYTAFASNIKGNAICSGKLYVEPAAPLGAPTYIPTLEPVSRIRSLSPRSVSRSPIRMSPARMSPARMSPARMSPARMSPGRRLEETDESQLERLYKPVFVLKPVSFKCLEGQTARFDLKVVGRPMPETFWFHDGQQIVNDYTHKVVIKEDGTQSLIIVPATPSDSGEWTVVAQNRAGRSSISVILTVEAVEHQVKPMFVEKLKNVNIKEGSRLEMKVRATGNPNPDIVWLKNSDIIVPHKYPKIRIEGTKGEAALKIDSTVSQDSAWYTATAINKAGRDTTRCKVNVEVEFAEPEPERKLIIPRGTYRAKEIAAPELEPLHLRYGQEQWEEGDLYDKEKQQKPFFKKKLTSLRLKRFGPAHFECRLTPIGDPTMVVEWLHDGKPLEAANRLRMINEFGYCSLDYGVAYSRDSGIITCRATNKYGTDHTSATLIVKDEKSLVEESQLPEGRKGLQRIEELERMAHEGALTGVTTDQKEKQKPDIVLYPEPVRVLEGETARFRCRVTGYPQPKVNWYLNGQLIRKSKRFRVRYDGIHYLDIVDCKSYDTGEVKVTAENPEGVIEHKVKLEIQQREDFRSVLRRAPEPRPEFHVHEPGKLQFEVQKVDRPVDTTETKEVVKLKRAERITHEKVPEESEELRSKFKRRTEEGYYEAITAVELKSRKKDESYEELLRKTKDELLHWTKELTEEEKKALAEEGKITIPTFKPDKIELSPSMEAPKIFERIQSQTVGQGSDAHFRVRVVGKPDPECEWYKNGVKIERSDRIYWYWPEDNVCELVIRDVTAEDSASIMVKAINIAGETSSHAFLLVQAKQLITFTQELQDVVAKEKDTMATFECETSEPFVKVKWYKDGMEVHEGDKYRMHSDRKVHFLSILTIDTSDAEDYSCVLVEDENVKTTAKLIVEGAVVEFVKELQDIEVPESYSGELECIVSPENIEGKWYHNDVELKSNGKYTITSRRGRQNLTVKDVTKEDQGEYSFVIDGKKTTCKLKMKPRPIAILQGLSDQKVCEGDIVQLEVKVSLESVEGVWMKDGQEVQPSDRVHIVIDKQSHMLLIEDMTKEDAGNYSFTIPALGLSTSGRVSVYSVDVITPLKDVNVIEGTKAVLECKVSVPDVTSVKWYLNDEQIKPDDRVQAIVKGTKQRLVINRTHASDEGPYKLIVGRVETNCNLSVEKIKIIRGLRDLTCTETQNVVFEVELSHSGIDVLWNFKDKEIKPSSKYKIEAHGKIYKLTVLNMMKDDEGKYTFYAGENMTSGKLTVAGGAISKPLTDQTVAESQEAVFECEVANPDSKGEWLRDGKHLPLTNNIRSESDGHKRRLIIAATKLDDIGEYTYKVATSKTSAKLKVEGKVTVKIKKTLKNLTVTETQDAVFTVELTHPNVKGVQWIKNGVVLESNEKYAISVKGTIYSLRIKNCAIVDESVYGFRLGRLGASARLHVETVKIIKKPKDVTALENATVAFEVSVSHDTVPVKWFHKSVEIKPSDKHRLVSERKVHKLMLQNISPSDAGEYTAVVGQLECKAKLFVETLHITKTMKNIEVPETKTASFECEVSHFNVPSMWLKNGVEIEMSEKFKIVVQGKLHQLIIMNTSTEDSAEYTFVCGNDQVSATLTVTPIMITSMLKDINAEEKDTITFEVTVNYEGISYKWLKNGVEIKSTDKCQMRTKKLTHSLNIRNVHFGDAADYTFVAGKATSTATLYVEARHIEFRKHIKDIKVLEKKRAMFECEVSEPDITVQWMKDDQELQITDRIKIQKEKYVHRLLIPSTRMSDAGKYTVVAGGNVSTAKLFVEGRDVRIRSIKKEVQVIEKQRAVVEFEVNEDDVDAHWYKDGIEINFQVQERHKYVVERRIHRMFISETRQSDAGEYTFVAGRNRSSVTLYVNAPEPPQVLQELQPVTVQSGKPARFCAVISGRPQPKISWYKEEQLLSTGFKCKFLHDGQEYTLLLIEAFPEDAAVYTCEAKNDYGVATTSASLSVEVPEVVSPDQEMPVYPPAIITPLQDTVTSEGQPARFQCRVSGTDLKVSWYSKDKKIKPSRFFRMTQFEDTYQLEIAEAYPEDEGTYTFVASNAVGQVSSTANLSLEAPESILHERIEQEIEMEMKELFSEGESEHSERDTRDAFSDSEDIDHKSMAAKRYASRISSTSSWPEYFKPSFTQKLTFKYVLEGEPVVFTCRLIACPTPEMTWFHNNRPIPTGLRRIIKAESDLHHHSSSLEIKRVQDRDSGSYRLLAINSEGSAESTASLLVIQKGQDEKYLEFLKRAERTHENVEALVERGEDRIKVDLRFTGSPFNKKQDVEQKGMMRTIHFKTMSSAKKTDYMYDEEYLESKSDIRGWLNVGESFLDKETKVKLQRLREARKTLMEKKKLSLLDTSSEISSRTLRSEASDKDILFSREDMKIRSMSDLAESYKVDHSAESIVQNPHALSNQMDQNIESEELPTSFQTIVDEEIFQTEIRMSQEALVKESLPKDHLYGEILVNENTQARGQLEEIMANTTIGESSTYITNVCEKEEVYETPENVSQAITPHASESFGTLVNVEESEEIASERIKKDDLRELQLSASTRIDEFKTEQKEENMRFFENSFRKRPQRCPPSFLQEIESQEVYEGDSCNFVCHFQGYPQPIVTWYNNDMPIPRNQNFIIHSLENYSILTLSSVHHQNEGSITCVLFNQYGTVKTTSMLKVKAKQKHDVKAHKVPVFHDYLDEEEELALVFDQAKGAHPSMSQEGQTNLHLLKTNPPVPPSGDTELLSFPVEIQVTAATPIPEQDKESKEVFQTEELEPKAMPQDQVTQSPKHRFVFLSDITNEPPKMLQEMPKHARCREGDSIILECLISGEPQPVVTWFQNGVLLKQNQKFQFEEVNCSHQLYIKDVNSQDSGKYKCVAENNSGAVESVSDLTVEPVTYRENSQFENIGEIYGKYSRDQQLQDQGESVRAHFYDYPAGPFTPWTNVKEYSVRDYFQSLETIEQIDQKEQVRCIPSREKIPRFVHGASRTIKISKPIRAEFIQCQAEGKERHVSEKSKLHQAEGTVYPFVDDFSDVTIKKEIRNNFGKLGRSEKENVQECAQSDYLPNIHSERISDSYNTKDSSAIVYEESLGEEIHYPGKKVKHRIIEFEKLHVEKGVLEKRPTRTSIVNPPQKKIDDKAFSLKQRESRSSNLNANMYQAEKMSPNTESDSSNIAINLKLLSSQTHKEFDAQEREQQEKISLIDKPAISKRAEHESPITFDLKQFHTQIKHTDVKFQELDSGQPEEAYFKIQHPADTENIVFDLKQMYSHIGDPALEFQGQETREQQEIHYKEKIPSPETLQPDTHNISKSVQNNVFASQEISSSQELSNRTMVEKSSIDENSISLEKEVRHVQEQNLDILKTDLSLKSFSEEIYSESCALLPTSSADIEETDLSEKSCPLENGGRSSISHLKKAASEEKPLGVGEMEEECTLEPELAAFPKQDGGTQEYTDATLEDHRGDVQEADTLHRQLSLSQCFPLLMTEEQQNPGEQISTNIHASGEEKCYEEVQVQNEASFSTLEGEMIETSFSQNIPKLDEAHTTEAAESETSLTQYLLAAGKREVPETKDTRDQAKLVQSESITSMEVEEVTFNTVYEYYNQKQESLGRPLSPESDISIGVGSTTSEEISELDQFYTPPSSVEYFESPKSPDLYFNPSDITKQSSIHSGGETVERYSTPLGEVAERYSTPSEGEVGERYSTPPGETLERYSTPPGETLERYSTPPGETLERYSTPPGETLERYSTPPGETLERYSTPPGEALERYSIPTGGPNPTGTFKTYPSKIEREDGTPNEHFYTPTEERGSAYEIWRSDSFGTPNEAIEPKDNEMPPSFIEPLTKRKVYENTTLGFIVEVEGLPVPGVKWYRNKSLLEPDERIKMERVGNVCSLEISNIQKGEGGEYMCHAVNIIGEAKSFANVDIMPQEERVVALPPPVTHQHVMEFDLEHTTSSRTPSPQEIVLEVELSEKDVKEFEKQVKIVTVPEFTPDHKSMIVSLDVLPFNFVDPNMDSREGEDKELKIDLEVFEMPPRFIMPICDFKIPENSDAVFKCSVIGIPTPEVKWYKEYMCIEPDNIKYVISEEKGSHTLKIRNVCLSDSATYRCRAVNCVGEAICRGFLTMGDSEIFAVIAKKSKVTLSSLMEELVLKSNYTDSFFEFQVVEGPPRFIKGISDCYAPIGTAAYFQCLVRGSPRPTVYWYKDGKLVQGRRFTVEESGTGFHNLFITSLVKSDEGEYRCVATNKSGMAESFAALTLT

SEQ ID NO: 7938 - protein, 518 aa, Homo sapiens
MLRVVSWNINGIRRPLQGVANQEPSNCAAVAVGRILDELDADIVCLQETKVTRDALTEPLAIVEGYNSYFSFSRNRSGYSGVATFCKDNATPVAAEEGLSGLFATQNGDVGCYGNMDEFTQEELRALDSEGRALLTQHKIRTWEGKEKTLTLINVYCPHADPGRPERLVFKMRFYRLLQIRAEALLAAGSHVIILGDLNTAHRPIDHWDAVNLECFEEDPGRKWMDSLLSNLGCQSASHVGPFIDSYRCFQPKQEGAFTCWSAVTGARHLNYGSRLDYVLGDRTLVIDTFQASFLLPEVMGSDHCPVGAVLSVSSVPAKQCPPLCTRFLPEFAGTQLKILRFLVPLEQSPVLEQSTLQHNNQTRVQTCQNKAQVRSTRPQPSQVGSSRGQKNLKSYFQPSPSCPQASPDIELPSLPLMSALMTPKTPEEKAVAKVVKGQAKTSEAKDEKELRTSFWKSVLAGPLRTPLCGGHREPCVMRTVKKPGPNLGRRFYMCARPRGPPTDPSSRCNFFLWSRPS

SEQ ID NO: 7939 - protein, 252 aa, Homo sapiens
  VARIANT 175: Xaa = Any Amino Acid
MLLWSHDCSHEMQHTFLTKQTQTFTTYPDNQPDVLIQVYEGESAITKDNNLLVIQGKFELTGILPAPFAVPQIKVTCDIDVNSSLNISAVGKSTEKENKIIITNDQGHLSKEDIENMVQEAEYKAEDEKQKNKVASKNSLDSYAFNMKATEKLQGKINNKDKQKILDKCNKIINXLDKNQTIMKEEFEHQQKELVCSPSLSSCTRVQGHTRRNYQAILGYRDMLGGMPEGFPGGRAPFSGSASLRPIIEEVD

SEQ ID NO: 7940 - protein, 169 aa, Homo sapiens
MVPERLPPWLQRYVDKVSNLSLFGGLPANHVLVNQYLPGEGIMPHEDGPLYYPTVSTISLGSHTVLDFYEPRRPEDDDPTEQPRPPPRPTTSLLLEPRSLLVLRGPAYTRLLHGIAAARVDALDAASSPPNAAACPSARPGACLVRGTRVSLTIRRVPRVLRAGLLLGK

SEQ ID NO: 7941 - protein, 538 aa, Homo sapiens
MAENLKRLVSNETLRTLQEKLDFWLKEYNTNTCDQNLNHCLELIEQVAKVQGQLFGILTAAAQEGGRNDGVETIKSRLLPWLEASFTAASLGKSVDSKVPSLQDTFDRERHKDPSPRDRDMQQLDSNLNSTRSQCNQVQDDLVETEKNLEESKNRSAISLLAAEEEINQLKKQLKSLQAQEDARHRNTDQRSSENRRSEPWSLEERKREQWNSLKQNADQQDTEAMSDYKKQLRNLKEEIAVLSAEKSALQGRSSRSRSPSPAPRSRSCSRSRSASPSTAVKVRRPSPNRSKLSNVARKAALLSRFSDSYSQARLDAQCLLRRCIDKAETVQRIIYIATVEAFHVAKMAFRHFKIHVRKSLTPSYVGSNDFENAVLDYVICHLDLYDSQSSVNDVIRAMNVNPKISFPPVVDFCLLSDFIQEICCIAFAMQALEPPLDIAYGADGEVFNDCKYRRSYDSDFTAPLVLYHVWPALMENDCVIMKGEAVTRRGAFWNSVRSVSRCRSRSLSPICPRSQIGLNTMSRSRSPSPIRCGLPRF

SEQ ID NO: 7942 - protein, 522 aa, Homo sapiens
MAENLKRLVSNETLRTLQEKLDFWLKEYNTNTCDQNLNHCLELIEQVAKVQGQLFGILTAAAQEGGRNDGVETIKSRLLPWLEASFTAASLGKSVDSKVPSLQDTFDRERHKDPSPRDRDMQQLDSNLNSTRSQCNQVQDDLVETEKNLEESKNRSAISLLAAEEEINQLKKQLKSLQAQEDARHRNTDQRSSENRRSEPWSLEERKREQWNSLKQNADQQDTEAMPDYKKQLRNLKEEIAVLSAEKSALQGRSSRSRSPSPAPRSRSCSRSRSASPSTAVKVRRPSPNRSKLSNVARKAALLSRFSDSYSQARLDAQCLLRRCIDKAETVQRIIYIATVEAFHVAKMAFRHFKIHVRKSLTPSYVGSNDFENAVLDYVICHLDLYDSQSSVNDVIRAMNVNPKISFPPVVDFCLLSDFIQEICCIAFAMQALEPPLDIAYGADGEVFNDCKYRRSYDSDFTAPLVLYHVWPALMENDCVIMKGEAVTRRGAFVRWPCIVTIHPKCLIHKFENIYKPRDSIK

SEQ ID NO: 7943 - protein, 502 aa, Homo sapiens [sequence omitted]

SEQ ID NO: 7944 - protein, 557 aa, Homo sapiens
LFIVHFCRHLNIAKEGFTQASLGLLANQRKRQLLIGLLKSLRTIKTLQRTDVRLSEMLEEEDYPGAIQLCLECQKAASTFKHYSCISELNSKLQDTLEQIEEQLDVALSKICKNFDINHYTKVQQAYRLLGKTQTAMDQLHMHFTQAIHNTVFQVVLGYVELCAGNTDTKFQKLQYKDLCTHVTPDSYIPCLADLCKALWEVMLSYYRTMEWHEKHDNEDTASASEGSNMIGTEETNFDRGYIKKKLEHGLTRIWQDVQLKVKTYLLGTDLSIFKYDDFIFVLDIISRLMQVGEEFCGSKSEVLQESIRKQSVNYFKNYHRTRLDELRMFLENETWELCPVKSNFSILQLHEFKFMEQSRSPSVSPSKQPVSTSSKTVTLFEQYCSGGNPFEIQANHKDEETEDVLASNGYESDEQEKSAYQEYDSDSDVPEELKRDYVDEQTGDGPVKSVSRETLKSRKKSDYSLNKVNAPILTNTTLNVIRLVGKYMQMMNILKPIAFDVIHFMSQLFDYYLYAIYTFFGRNDSLESTGLGLSSSRLRTTLNRIQESLIDLDMFI

SEQ ID NO: 7945 - protein, 413 aa, Homo sapiens [sequence omitted]

SEQ ID NO: 7946 - protein, 117 aa, Homo sapiens
MGRAIPKGRVSKSLKVNPTLVIQPTNLSARLETDVECLKLNLFSTCSACNFWGATVILVKYCEDSSETELSSPSMYSAIPRLQVCFFHRFQGGKDKAAFLRPSDKNSPTDKYLVAQT

SEQ ID NO: 7947 - protein, 5171 aa, Homo sapiens
MHSSSYSYRSSDSVFSNTTSTRTSLDSNENLLLVHCGPTLINSCISFGSESFDGHRLEMLQQIANRVQRDSVICEDKLILAGNALQSDSKRLESGVQFQNEAEIAGYILECENLLRQHVIDVQILIDGKYYQADQLVQRVAKLRDEIMALRNECSSVYSKGRILTTEQTKLMISGITQSLNSGFAQTLHPSLTSGLTQSLTPSLTSSSMTSGLSSGMTSRLTPSVTPAYTPGFPSGLVPNFSSGVEPNSLQTLKLMQIRKPLLKSSLLDQNLTEEEINMKFVQDLLNWVDEMQVQLDRTEWGSDLPSVESHLENHKNVHRAIEEFESSLKEAKISEIQMTAPLKLTYAEKLHRLESQYAKLLNTSRNQERHLDTLHNFVSRATNELIWLNEKEEEEVAYDWSERNTNIARKKDYHAELMRELDQKEENIKSVQEIAEQLLLENHPARLTIEAYRAAMQTQWSWILQLCQCVEQHIKENTAYFEFFNDAKEATDYLRNLKDAIQRKYSCDRSSSIHKLEDLVQESMEEKEELLQYKSTIANLMGKAKTIIQLKPRNSDCPLKTSIPIKAICDYRQIEITIYKDDECVLANNSHRAKWKVISPTGNEAMVPSVCFTVPPPNKEAVDLANRIEQQYQNVLTLWHESHINMKSVVSWHYLINEIDRIRASNVASIKTMLPGEHQQVLSNLQSRFEDFLEDSQESQVFSGSDITQLEKEVNVCKQYYQELLKSAEREEQEESVYNLYISEVRNIRLRLENCEDRLIRQIRTPLERDDLHESVFRITEQEKLKKELERLKDDLGTITNKCEEFFSQAAASSSVPTLRSELNVVLQNMNQVYSMSSTYIDKLKTVNLGLKNTQAAEALVKLYETKLCEEEAVIADKNNIENLISTLKQWRSEVDEKRQVFHALEDELQKAKAISDEMFKTYKERDLDFDWHKEKADQLVERWQNVHVQIDNRLRDLEGIGKSLKYYRDTYHPLDDWIQQVETTQRKIQENQPENSKTLATQLNQQKMLVSEIEMKQSKMDECQKYAEQYSATVEDYELQTMTYRAMVDSQQKSPVKRRRMQSSADLIIQEFMDLRTRYTALVTLMTQYIKFAGDSLKRLEEEEKSLEEEKKEHVEKAKELQKWVSNISKTLKDAEKAGKPPFSKQKISSEEISTKKEQLSEALQTIQLFLAKHGDKMTDEERNELEKQVKTLQESYNLLFSESLKQLQESQTSGDVKVEEKIVAERQQEYKEKLQGICDLLTQTENRLIGHQEAFMIGDGTVELKKYQSKQEELQKDMQGSAQALAEVVKNTENFLKENGEKLSQEDKALIEQKLNEAKIKCEQLNLKAEQSKKELDKVVTTAIKEETEKVAAVKQLEESKTKIENLLDWLSNVDKDSERAGTKHKQVIEQNGTHFQEGDGKSAIGEEDEVNGNLLETDVDGQVGTTQENLNQQYQKVKAQHEKIISQHQAVIIATQSAQVLLEKQGQYLSPEEKEKLQKNMKELKVHYETALAESEKKMKLTHSLQEELEKFDADYTEFEHWLQQSEQELENLEAGADDINGLMTKLKRQKSFSEDVISHKGDLRYITISGNRVLEAAKSCSKRDGGKVDTSATHREVQRKLDHATDRFRSLYSKCNVLGNNLKDLVDKYQHYEDASCGLLAGLQACEATASKHLSEPIAVDPKNLQRQLEETKALQGQISSQQVAVEKLKKTAEVLLDARGSLLPAKNDIQKTLDDIVGRYEDLSKSVNERNEKLQITLTRSLSVQDGLDEMLDWMGNVESSLKEQGQVPLNSTALQDIISKNIMLEQDIAGRQSSINAMNEKVKKFMETTDPSTASSLQAKMKDLSARFSEASHKHKETLAKMEELKTKVELFENLSEKLQTFLETKTQALTEVDVPGKDVTELSQYMQESTSEFLEHKKHLEVLHSLLKEISSHGLPSDKALVLEKTNNLSKKFKEMEDTIKEKKEAVTSCQEQLDAFQVLVKSLKSWIKETTKKVPIVQPSFGAEDLGKSLEDTKKLQEKWSLKTPEIQKVNNSGISLCNLISAVTTPAKAIAAVKSGGAVLNGEGTATNTEEFWANKGLTSIKKDMTDISHGYEDLGLLLKDKIAELNTKLSKLQKAQEESSAMMQWLQKMNKTATKWQQTPAPTDTEAVKTQVEQNKSFEAELKQNVNKVQELKDKLTELLEENPDTPEAPRWKQMLTEIDSKWQELNQLTIDRQQKLEESSNNLTQFQTVEAQLKQWLVEKELMVSVLGPLSIDPNMLNTQRQQVQILLQEFATRKPQYEQLTAAGQGILSRPGEDPSLRGIVKEQLAAVTQKWDSLTGQLSDRCDWIDQAIVKSTQYQSLLRSLSDKLSDLDNKLSSSLAVSTHPDAMNQQLETAQKMKQEIQQEKKQIKVAQALCEDLSALVKEEYLKAELSRQLEGILKSFKDVEQKAENHVQHLQSACASSHQFQQMSRDFQAWLDTKKEEQNKSHPISAKLDVLESLIKDHKDFSKTLTAQSHMYEKTIAEGENLLLKTQGSEKAALQLQLNTIKTNWDTFNKQVKERENKLKESLEKALKYKEQVETLWPWIDKCQNNLEEIKFCLDPAEGENSIAKLKSLQKEMDQHFGMVELLNNTANSLLSVCEIDKGVVTDENKSLIQKVDMVTEQLHSKKFCLENMTQKFKEFQEVSKESKRQLQCAKEQLDIHDSLGSQAYSNKYLTMLQTQQKSLQALKHQVDLAKRLAQDLVVEASDSKGTSDVLLQVETIAQEHSTLSQQVDEKCSFLETKLQGIGHFRNTIREMFSQFAEFDDELDSMAPVGRDAETLQKQKETIKAFLKKLEALMASNDNANKTCKMMLATEETSPDLVGIKRDLEALSKQCNKLLDRAQAREEQVEGTIKRLEEFYSKLKEFSILLQRAEEHEESQGPVGMETETINQQLNMFKVFQKEEIEPLQGKQQDVNWLGQGLIQSAAKSTSTQGLEHDLDDVNARWKTLNKKVAQRAAQLQEALLHCGRFQDALESLLSWMVDTEELVANQKPPSAEFKVVKAQIQEQKLLQRLLDDRKSTVEVIKREGEKIATTAEPADKVKILKQLSLLDSRWEALLNKAETRNRQLEGISVVAQQFHETLEPLNEWLTTIEKRLVNCEPIGTQASKLEEQIAQHKALEDDIINHNKHLHQAVSIGQSLKVLSSREDKDMVQSKLDFSQVWYIEIQEKSHSRSELLQQALCNAKIFGEDEVELMNWLNEVHDKLSKLSVQDYSTEGLWKQQSELRVLQEDILLRKQNVDQALLNGLELLKQTTGDEVLIIQDKLEAIKARYKDITKLSTDVAKTLEQALQLARRLHSTHEELCTWLDKVEVELLSYETQVLKGEEASQAQMRPKELKKEAKNNKALLDSLNEVSSALLELVPWRAREGLEKMVAEDNERYRLVSDTITQKVEEVDAAILRSQQFDQAADAELSWITETEKKLMSLGDIRLEQDQTSAQLQVQKTFTMEILRHRDIIDDLVKSGHKIMTACSEEEKQSMKKKLDKVLKNYDTICQINSERYLQLERAQSLVNQFWETYEELWPWLTETQSIISQLPAPALEYETLRQQQEEHRQLRESIAEHKPHIDKMNKTGPQLLELSPGEGFSIQEKYVAADTLYSQIKEDVKKRAVALDEAISQSTQFHDKIDQILESLERIVERLRQPPSISAEVEKIKEQISENKNVSVDMEKLQPLYETLKQRGEEMIARSGGTDKDISAKAVQDKLDQMVFIWENIHTLVEEREAKLLDVMELAEKFWCDHMSLIVTIKDTQDFIRDLEGPGIDPSVVKQQQEAAETIREEIDGLQEELDIVINLGSELIAACGEPDKPIVKKSIDELNSAWDSLNKAWKDRIDKLEEAMQAAVQYQDGLQAVFDWVDIAGGKLASMSPIGTDLETVKQQIEELKQFKSEAYQQQIEMERLNHQAELLLKKVTEESDKHTVQDPLMELKLIWDSLEERIINRQHKLEGALLALGQFQHALDELLAWLTHTEGLLSEQKPVGGDPKAIEIELAKHHVLQNDVLAHQSTVEAVNKGGNDLIESSAGEEASNLQNKLEVLNQRWQNVLEKTEQRKQQLDGALRQAKGFHGEIEDLQQWLTDTERHLLASKPLGGLPETAKEQLNVHMEVCAAFEAKEETYKSLMQKGQQMLARCPKSAETNIDQDINNLKEKWESVETKLNERKTKLEEALNLAMEFHNSLQDFINWLTQAEQTLNVASRPSLILDTVLFQIDEHKVFANEVNSHREQIIELDKTGTHLKYFSQKQDVVLIKNLLISVQSRWEKVVQRLVERGRSLDDARKRAKQFHEAWSKLMEWLEESEKSLDSELEIANDPDKIKTQLAQHKEFQKSLGAKHSVYDTTNRTGRSLKEKTSLADDNLKLDDMLSELRDKWDTICGKSVERQNKLEEALLFSGQFTDALQALIDWLYRVEPQLAEDQPVHGDIDLVMNLIDNHKAFQKELGKRTSSVQALKRSARELIEGSRDDSSWVKVQMQELSTRWETVCALSISKQTRLEAALRQAEEFHSVVHALLEWLAEAEQTLRFHGVLPDDEDALRTLIDQHKEFMKKLEEKRAELNKATTMGDTVLAICHPDSITTIKHWITIIRARFEEVLAWAKQHQQRLASALAGLIAKQELLEALLAWLQWAETTLTDKDKEVIPQEIEEVKALIAEHQTFMEEMTRKQPDVDKVTKTYKRRAADPSSLQSHIPVLDKGRAGRKRFPASSLYPSGSQTQIETKNPRVNLLVSKWQQVWLLALERRRKLNDALDRLEELREFANFDFDIWRKKYMRWMNHKKSRVMDFFRRIDKDQDGKITRQEFIDGILSSKFPTSRLEMSAVADIFDRDGDGYIDYYEFVAALHPNKDAYKPITDADKIEDEVTRQVAKCKCAKRFQVEQIGDNKYRFFLGNQFGDSQQLRLVRILRSTVMVRVGGGWMALDEFLVKNDPCRAKGRTNMELREKFILADGASQGMAAFRPRGRRSRPSSRGASPNRSTSVSSQAAQAASPQVPATTTPKILHPLTRNYGKPWLTNSKMSTPCKAAECSDFPVPSAEGTPIQGSKLRLPGYLSGKGFHSGEDSGLITTAAARVRTQFADSKKTPSRPGSRAGSKAGSRASSRRGSDASDFDISEIQSVCSDVETVPQTHRPTPRAGSRPSTAKPSKIPTPQRKSPASKLDKSSKR

SEQ ID NO: 7948 - protein, 5497 aa, Homo sapiens
MAGYLSPAAYLYVEEQEYLQAYEDVLERYKDERDKVQKKTFTKWINQHLMKVRKHVNDLYEDLRDGHNLISLLEVLSGDTLPREKGRMRFHRLQNVQIALDYLKRRQVKLVNIRNDDITDGNPKLTLGLIWTIILHFQISDIHVTGESEDMSAKERLLLWTQQATEGYAGIRCENFTTCWRDGKLFNAIIHKYRPDLIDMNTVAVQSNLANLEHAFYVAEKIGVIRLLDPEDVDVSSPDEKSVITYVSSLYDAFPKVPEGGEGIGANDVEVKWIEYQNMVNYLIQWIRHHVTTMSERTFPNNPVELKALYNQYLQFKETEIPPKETEKSKIKRLYKLLEIWIEFGRIKLLQGYHPNDIEKEWGKLIIAMLEREKALRPEVERLEMLQQIANRVQRDSVICEDKLILAGNALQSDSKRLESGVQFQNEAEIAGYILECENLLRQHVIDVQILIDGKYYQADQLVQRVAKLRDEIMALRNECSSVYSKGRILTTEQTKLMISGITQSLNSGFAQTLHPSLTSGLTQSLTPSLTSSSMTSGLSSGMTSRLTPSVTPAYTPGFPSGLVPNFSSGVEPNSLQTLKLMQIRKPLLKSSLLDQNLTEEEINMKFVQDLLNWVDEMQVQLDRTEWGSDLPSVESHLENHKNVHRAIEEFESSLKEAKISEIQMTAPLKLTYAEKLHRLESQYAKLLNTSRNQERHLDTLHNFVSRATNELIWLNEKEEEEVAYDWSERNTNIARKKDYHAELMRELDQKEENIKSVQEIAEQLLLENHPARLTIEAYRAAMQTQWSWILQLCQCVEQHIKENTAYFEFFNDAKEATDYLRNLKDAIQRKYSCDRSSSIHKLEDLVQESMEEKEELLQYKSTIANLMGKAKTIIQLKPRNSDCPLKTSIPIKAICDYRQIEITIYKDDECVLANNSHRAKWKVISPTGNEAMVPSVCFTVPPPNKEAVDLANRIEQQYQNVLTLWHESHINMKSVVSWHYLINEIDRIRASNVASIKTMLPGEHQQVLSNLQSRFEDFLEDSQESQVFSGSDITQLEKEVNVCKQYYQELLKSAEREEQEESVYNLYISEVRNIRLRLENCEDRLIRQIRTPLERDDLHESVFRITEQEKLKKELERLKDDLGTITNKCEEFFSQAAASSSVPTLRSELNVVLQNMNQVYSMSSTYIDKLKTVNLVLKNTQAAEALVKLYETKLCEEEAVIADKNNIENLISTLKQWRSEVDEKRQVFHALEDELQKAKAISDEMFKTYKERDLDFDWHKEKADQLVERWQNVHVQIDNRLRDLEGIGKSLKYYRDTYHPLDDWIQQVETTQRKIQENQPENSKTLATQLNQQKMLVSEIEMKQSKMDECQKYAEQYSATVKDYELQTMTYRAMVDSQQKSPVKRRRMQSSADLIIQEFMDLRTRYTALVTLMTQYIKFAGDSLKRLEEEEKSLEEEKKEHVEKAKELQKWVSNISKTLKDAEKAGKPPFSKQKISSEEISTKKEQLSEALQTIQLFLAKHGDKMTDEERNELEKQVKTLQESYNLLFSESLKQLQESQTSGDVKVEEKIVAERQQEYKEKLQGICDLLTQTENRLIGHQEAFMIGDGTVELKKYQSKQEELQKDMQGSAQALAEVVKNTENFLKENGEKLSQEDKALIEQKLNEAKIKCEQLNLKAEQSKKELDKVVTTAIKEETEKVAAVKQLEESKTKIENLLDWLSNVDKDSERAGTKHKQVIEQNGTHFQEGDGKSAIGEEDEVNGNLLETDVDGQVGTTQENLNQQYQKVKAQHEKIISQHQAVIIATQSAQVLLEKQGQYLSPEEKEKLQKNMKELKVHYETALAESEKKMKLTHSLQEELEKFDADYTEFEHWLQQSEQELENLEAGADDINGLMTKLKRQKSFSEDVISHKGDLRYITISGNRVLEAAKSCSKRDGGKVDTSATHREVQRKLDHATDRFRSLYSKCNVLGNNLKDLVDKYQHYEDASCGLLAGLQACEATASKHLSEPIAVDPKNLQRQLEETKALQGQISSQQVAVEKLKKTAEVLLDARGSLLPAKNDIQKTLDDIVGRYEDLSKSVNERNEKLQITLTRSLSVQDGLDEMLDWMGNVESSLKEQGQVPLNSTALQDIISKNIMLEQDIAGRQSSINAMNEKVKKFMETTDPSTASSLQAKMKDLSARFSEASHKHKETLAKMEELKTKVELFENLSEKLQTFLETKTQALTEVDVPGKDVTELSQYMQESTSEFLEHKKHLEVLHSLLKEISSHGLPSDKALVLEKTNNLSKKFKEMEDTIKEKKEAVTSCQEQLDAFQVLVKSLKSWIKETTKKVPIVQPSFGAEDLGKSLEDTKKLQEKWSLKTPEIQKVNNSGISLCNLISAVTTPAKAIAAVKSGGAVLNGEGTATNTEEFWANKGLTSIKKDMTDISHGYEDLGLLLKDKIAELNTKLSKLQKAQEESSAMMQWLQKMNKTATKWQQTPAPTDTEAVKTQVEQNKSFEAELKQNVNKVQELKDKLTELLEENPDTPEAPRWKQMLTEIDSKWQELNQLTIDRQQKLEESSNNLTQFQTVEAQLKQWLVEKELMVSVLGPLSIDPNMLNTQRQQVQILLQEFATRKPQYEQLTAAGQGILSRPGEDPSLRGIVKEQLAAVTQKWDSLTGQLSDRCDWIDQAIVKSTQYQSLLRSLSDKLSDLDNKLSSSLAVSTHPDAMNQQLETAQKMKQEIQQEKKQIKVAQALCEDLSALVKEEYLKAELSRQLEGILKSFKDVEQKAENHVQHLQSACASSHQFQQMSRDFQAWLDTKKEEQNKSHPISAKLDVLESLIKDHKDFSKTLTAQSHMYEKTIAEGENLLLKTQGSEKAALQLQLNTIKTNWDTFNKQVKERENKLKESLEKALKYKEQVETLWPWIDKCQNNLEEIKFCLDPAEGENSIAKLKSLQKEMDQHFGMVELLNNTANSLLSVCEIDKEVVTDENKSLIQKVDMVTEQLHSKKFCLENMTQKFKEFQEVSKESKRQLQCAKEQLDIHDSLGSQAYSNKYLTMLQTQQKSLQALKHQVDLAKRLAQDLVVEASDSKGTSDVLLQVETIAQEHSTLSQQVDEKCSFLETKLQGIGHFQNTIREMFSQFAEFDDELDSMAPVGRDAETLQKQKETIKAFLKKLEALMASNDNANKTCKMMLATEETSPDLVGIKRDLEALSKQCNKLLDRAQAREEQVEGTIKRLEEFYSKLKEFSILLQKAEEHEESQGPVGMETETINQQLNMFKVFQKEEIEPLQGKQQDVNWLGQGLIQSAAKSTSTQGLEHDLDDVNARWKTLNKKVAQRAAQLQEALLHCGRFQDALESLLSWMVDTEELVANQKPPSAEFKVVKAQIQEQKLLQRLLDDRKSTVEVIKREGEKIATTAEPADKVKILKQLSLLDSRWEALLNKAETRNRQLEGISVVAQQFHETLEPLNEWLTTIEKRLVNCEPIGTQASKLEEQIAQHKALEDDIINHNKHLHQAVSIGQSLKVLSSREDKDMVQSKLDFSQVWYIEIQEKSHSRSELLQQALCNAKIFGEDEVELMNWLNEVHDKLSKLSVQDYSTEGLWKQQSELRVLQEDILLRKQNVDQALLNGLELLKQTTGDEVLIIQDKLEAIKARYKDITKLSTDVAKTLEQALQLARRLHSTHEELCTWLDKVEVELLSYETQVLKGEEASQAQMRPKELKKEAKNNKALLDSLNEVSSALLELVPWRAREGLEKMVAEDNERYRLVSDTITQKVEEIDAAILRSQQFDQAADAELSWITETEKKLMSLGDIRLEQDQTSAQLQVQKTFTMEILRHKDIIDDLVKSGHKIMTACSEEEKQSMKKKLDKVLKNYDTICQINSERYLQLERAQSLVNQFWETYEELWPWLTETQSIISQLPAPALEYETLRQQQEEHRQLRELIAEHKPHIDKMNKTGPQLLELSPGEGFSIQEKYVAADTLYSQIKEDVKKRAVALDEAISQSTQFHDKIDQILESLERIVERLRQPPSISAEVEKIKEQISENKNVSVDMEKLQPLYETLKQRGEEMIARSGGTDKDISAKAVQDKLDQMVFIWENIHTLVEEREAKLLDVMELAEKFWCDHMSLIVTIKDTQDFIRDLEDPGIDPSVVKQQQEAAETIREEIDGLQEELDIVINLGSELIAACGEPDKPIVKKSIDELNSAWDSLNKAWKDRIDKLEEAMQAAVQYQDGLQAVFDWVDIAGGKLASMSPIGTDLETVKQQIEELKQFKSEAYQQQIEMERLNHQAELLLKKVTEESDKHTVQDPLMELKLIWDSLEERIINRQHKLEGALLALGQFQHALDELLAWLTHTEGLLSEQKPVGGDPKAIEIELAKHHVLQNDVLAHQSTVEAVNKAGNDLIESSAGEEASNLQNKLEVLNQRWQNVLEKTEQRKQQLDGALRQAKGFHGEIEDLQQWLTDTERHLLASKPLGGLPETAKEQLNVHMEVCAAFEAKEETYKSLMQKGQQMLARCPKSAETNIDQDINNLKEKWESVETKLNERKTKLEEALNLAMEFHNSLQDFINWLTQAEQTLNVASRPSLILDTVLFQIDEHKVFANEVNSHREQIIELDKTGTHLKYFSQKQDVVLIKNLLISVQSRWEKVVQRLVERGRSLDDARKRAKQFHEAWSKLMEWLEESEKSLDSELEIANDPDKIKTQLAQHKEFQKSLGAKHSVYDTTNRTGRSLKEKTSLADDNLKLDDMLSELRDKWDTICGKSVERQNKLEEALLFSGQFTDALQALIDWLYRVEPQLAEDQPVHGDIDLVMNLIDNHKAFQKELGKRTSSVQALKRSARELIEGSRDDSSWVKVQMQELSTRWETVCALSISKQTRLEAALRQAEEFHSVVHALLEWLAEAEQTLRFHGVLPDDEDALRTLIDQHKEFMKKLEEKRAELNKATTMGDTVLAICHPDSITTIKHWITIIRARFEEVLAWAKQHQQRLASALAGLIAKQELLEALLAWLQWAETTLTDKDKEVIPQEIEEVKALIAEHQTFMEEMTRKQPDVDKVTKTYKRRAADPSSLQSHIPVLDKGRAGRKRFPASSLYPSGSQTQIETKNPRVNLLVSKWQQVWLLALERRRKLNDALDRLEELREFANFDFDIWRKKYMRWMNHKKSRVMDFFRRIDKDQDGKITRQEFIDGILSSKFPTSRLEMSAVADIFDRDGDGYIDYYEFVAALHPNKDAYKPITDADKIEDEVTRQVAKCKCAKRFQVEQIGDNKYRFFLGNQFGDSQQLRLVRILRSTVMVRVGGGWMALDEFLVKNDPCRAKGRTNMELREKFILADGASQGMAAFRPRGRRSRPSSRGASPNRSTSVSSQAAQAASPQVPATTTPKILHPLTRNYGKPWLTNSKMSTPCKAAECSDFPVPSAEGTPIQGSKLRLPGYLSGKGFHSGEDSGLITTAAARVRTQFADSKKTPSRPGSRAGSKAGSRASSRRGSDASDFDISEIQSVCSDVETVPQTHRPTPRAGSRPSTAKPSKIPTPQRKSPASKLDKSSKR

SEQ ID NO: 7949 - protein, 351 aa, Homo sapiens
MALPFQKELEKYKNIDEDELLGKLSEEELKQLENVLDDLDPESAMLPAGFRQKDQTQKAATGPFDREHLLMYLEKEALEQKDREDFVPFTGEKKGRVFIPKEKPIETRKEEKVTLDPELEEALASASDTELYDLAAVLGVHNLLNNPKFDEETANNKGGKGPVRNVVKGEKVKPVFEEPPNPTNVEISLQQMKANDPSLQEVNLNNIKNIPIPTLREFAKALETNTHVKKFSLAATRSNDPVAIAFADMLKVNKTLTSLNIESNFITGTGILALVEALKENDTLTEIKIDNQRQQLGTAVEMEIAQMLEENSRILKFGYQFTKQGPRTRVAAAITKNNDLVRKKRVEADRR

SEQ ID NO: 7950 - protein, 777 aa, Homo sapiens
MSGSHTPACGPFSALTPSIWPQEILAKYTQKEESAEQPEFYYDEFGFRVYKEEGDEPGSSLLANSPLMEDAPQRLRWQAHLEFTHNHDVGDLTWDKIAVSLPRSEKLRSLVLAGIPHGMRPQLWMRLSGALQKKRNSELSYREIVKNSSNDETIAAKQIEKDLLRTMPSNACFASMGSIGVPRLRRVLRALAWLYPEIGYCQGTGMVAACLLLFLEEEDAFWMMSAIIEDLLPASYFSTTLLGVQTDQRVLRHLIVQYLPRLDKLLQEHDIELSLITLHWFLTAFASVVDIKLLLRIWDLFFYEGSRVLFQLTLGMLHLKEEELIQSENSASIFNTLSDIPSQMEDAELLLGVAMRLAGSLTDVAVETQRRKHLAYLIADQGQLLGAGTLTNLSQVVRRRTQRRKSTITALLFGEDDLEALKAKNIKQTELVADLREAILRVARHFQCTDPKNCSVVSRQLPGLLPNTALTPPTPLVGLCSLWQELTPDYSMESHQRDHENYVACSRSHRRRAKALLDFERHDDDELGFRKNDIITIVSQKDEHCWVGELNGLRGWFPAKFVEVLDERSKEYSIAGDDSVTEGVTDLVRGTLCPALKALFEHGLKKPSLLGGACHPWLFIEEAAGREVERDFASVYSRLVLCKTFRLDEDGKVLTPEELLYRAVQSVNVTHDAVHAQMDVKLRSLICVGLNEQVLHLWLEVLCSSLPTVEKWYQPWSFLRSPGWVQIKCELRVLCCFAFSLSQDWELPAKREAQQPLKEGVRDMLVKHHLFSWDVDG

SEQ ID NO: 7951 - protein, 749 aa, Homo sapiens
MSGSHTPACGPFSALTPSIWPQEILAKYTQKEESAEQPEFYYDEFGFRVYKEEGDEPGSSLLANSPLMEDAPQRLRWQAHLEFTHNHDVGDLTWDKIAVSLPRSEKLRSLVLAGIPHGMRPQLWMRLSGALQKKRNSELSYREIVKNSSNDETIAAKQIEKDLLRTMPSNACFASMGSIGVPRLRRVLRALAWLYPEIGYCQGTGMVAACLLLFLEEEDAFWMMSAIIEDLLPASYFSTTLLGVQTDQRVLRHLIVQYLPRLDKLLQEHDIELSLITLHWFLTAFASVVDIKLLLRIWDLFFYEGSRVLFQLTLGMLHLKEEELIQSENSASIFNTLSDIPSQMEDAELLLGVAMRLAGSLTDVAVETQRRKHLAYLIADQGQLLGAGTLTNLSQVVRRRTQRRKSTITALLFGEDDLEALKAKNIKQTELVADLREAILRVARHFQCTDPKNCSVELTPDYSMESHQRDHENYVACSRSHRRRAKALLDFERHDDDELGFRKNDIITIVSQKDEHCWVGELNGLRGWFPAKFVEVLDERSKEYSIAGDDSVTEGVTDLVRGTLCPALKALFEHGLKKPSLLGGACHPWLFIEEAAGREVERDFASVYSRLVLCKTFRLDEDGKVLTPEELLYRAVQSVNVTHDAVHAQMDVKLRSLICVGLNEQVLHLWLEVLCSSLPTVEKWYQPWSFLRSPGWVQIKCELRVLCCFAFSLSQDWELPAKREAQQPLKEGVRDMLVKHHLFSWDVDG

SEQ ID NO: 7952 - protein, 383 aa, Homo sapiens
MDPKRSQKESVLITGGSGYFGFRLGCALNQNGVHVILFDISSPAQTIPEGIKFIQGDIRHLSDVEKAFQDADVTCVFHIASYGMSGREQLNRNLIKEVNVRGTDNILQVCQRRRVPRLVYTSTFNVIFGGQVIRNGDESLPYLPLHLHPDHYSRTKSIAEQKVLEANATPLDRGDGVLRTCALRPAGIYGPGEQRHLPRIVSYIEKGLFKFVYGDPRSLVEFVHVDNLVQAHILASEALRADKGHIASGQPYFISDGRPVNNFEFFRPLVEGLGYTFPSTRLPLTLVYCFAFLTEMVHFILGRLYNFQPFLTRTEVYKTGVTHYFSLEKAKKELGYKAQPFDLQEAVEWFKAHGHGRSSGSRDSECFVWDGLLVFLLIIAVLM

SEQ ID NO: 7953 - protein, 188 aa, Homo sapiens
MEVHGKPQASPSCSSPTRDSSGVPVSKELLTAGSDGRGGIWDRLLINSQPKSRKTSTLQTVRIERSPLLDQVQTFLPQMARANEKLRKEMAAAPPGRFNIENIDGPHSKVIQMDVALFEMNQSDSKEVDSSEESSQDSSENSSESEDEDDSIPSEVTIDNIKLPNSEGGKGKIEVLDSPASKKKEIVK

SEQ ID NO: 7954 - protein, 994 aa, Homo sapiens
  VARIANT 95, 101, 150, 713, 746, 859: Xaa = Any Amino Acid
MASHSSIAPSGSSSSSSPTDTSVITTSLPQLGDLTTLGNFSVINSNVIIENLQSTKVVVSQFSQEVRCRGASWGKLAIPALMEQLLGMQQQQVHXLQLIEXICHQILLLASQNADLPTSSHPSQGTLQTSANPLSMLNSHLSQQLAAAAXLSQSLASQSASISGVKQLPPIQLLQSSSGNTIIPSNSGFSPNMNILVVSVTTPSSEKVASRAAASHVSNPAVSSSSSPAFAISSLLSPASDPLLHQLAPANSVFPSPLPNIGTTAGDLDSLSALAQQRKSKPPNVTAFEVKNTSNEAFFKRKCRFCTKVFESDSALQIHLHSHTGKRAFKYNICGNGFSTKKNLKVHFQCHKEKYTHTQMNPYPVPEHLDNIPMSTGIPYGMSITPEKPVTSWLDTKPVLATLTTSVCLPLLPTLPSLILFIKTEEPAPFPISHSATSPTGLVKSDSRAAELATRNLGGLPEEAEGSTLPPSSGKSKESGVVTNSVLTANSSALSSPAADWGPLGKHYHLHQPFVASHVQAVQGQVSFWGALGLSPGIRDIQASATERNLKTHYSVHHAVPLLRAQHSCPICWKLTDDAVIPQQHTRMHMGGQVSNTPVPSSYSESMESDIGSFYGKNFDDLDNFSSEKMEDCPEGRFPDMPKSADDSQDSLSSSPLPLEMSSITALENQMKMMNVGLVEQLRASLKSVENGSFEDDVLINDSSSVGDDMESXSAGSPAISESTSSMQALSPSNSTQEFHKSPREXEKPQRVVPSEFANGLSFIPVNGGALDLTSSHIQKIIREDSLGTLFPFRVQLLLLALPRTPKQHYCNTCGKTSPSLSAWQTHIGEKLFACTICGRAFTTKVHTGTHMWNSTPVXQGRQLSGDGPMTFLGGNPIKFPEMFHKDLVARSGSGDPSSFWNQNAARHSNGLAMKGNGTSVIQNGGIHPIPGSLDTGNSSPGGHDELDEDGELYRTMPIIEQLQCPQHTWKAICHLCHLDDSPGVLKSTFMIIL

SEQ ID NO: 7955 - protein, 582 aa, Homo sapiens
  VARIANT 211, 410, 480: Xaa = Any Amino Acid
MNPTNTPNVFDAKCLIGCRFDDAVVQSDMKHWPFMVVNDAVRLKVQVEYKGETKSFYPEEVPSMVLTKMKEIAEADLGKIVTNAVVTVSAYFNDCQCQATKDAGTIAGLNVLRIINEPTAAAIAYGLDKKVGAERNVLIFDLGDDTFNVSILTTEDGIFEVKSRAGDTHLCGEDFDYRMVNHFTAEFKHKHKKGINENKRVLRCLHTACEXAKCTLSSSTLASIEIDSLYEGINFYTSITHARFEEKNADLFHGTLDPIEKALRDAKLEKSQIHDIVLIGGSTHTLIQKLLQDLFNRKELNKSINPDEAIAYGAAVQAAILSGDKSENVQDLLLLDVTLLSLRIEAADGVMTVLIKRNTTIPTKQTQNFTTYSDNQPGVLIQVYEGECAMTKDNNWFGKFELTGIPPAPXGVPQVEVTFDIDANVILNVSAVDKSTGKENKITITNDKRRLSKEDIERMAQEAEKYKAEDEKQRGKVSSXNSLESYAFNMKSTVEDEKLQGKINDDDKQKILDKCNEIINWLDKNQAAEKEEFEHQQKAGESLQPHQHQAVPECRRHARRNAWGIPWWWSSSLWWCFLRAYY

SEQ ID NO: 7956 - protein, 824 aa, Homo sapiens
MGSEKGKAGTATLAMSEKVRTRLEELDDFEEGSQKELLNLTQQDYVNRIEELNQSLKDAWASDQKVKALKIVIQCSKLLSDTSVIQFYPSKFVLITDILDTFGKLVYERIFSMCVDSRSVLPDHFSPENANDTAKETCLNWFFKIASIRELIPRFYVEASILKCNKFLSKTGISECLPRLTCMIRGIGDPLVSVYARAYLCRVGMEVAPHLKETLNKNFFDFLLTFKQIHGDTVQNQLVVQGVELPSYLPLYPPAMDWIFQCISYHAPEALLTEMMERCKKLGNNALLLNSVMSAFRAEFIATRSMDFIGMIKECDESGFPKHLLFRSLGLNLALADPPESDRLQILNEAWKVITKLKNPQDYINCAEVWVEYTCKHFTKREVNTVLADVIKHMTPDRAFEDSYPQLQLIIKKVIAHFHDFSVLFSVEKFLPFLDMFQKESVRVEVCKCIMDAFIKHQQEPTKDPVILNALLHVCKTMHDSVNALTLEDEKRMLSYLINGFIKMVSFGRDFEQQLSFYVESRSMFCNLEPVLVQLIHSVNRLAMETRKVMKGNHSRKTAAFVRACVAYCFITIPSLAGIFTRLNLYLHSGQVALANQCLSQADAFFKAAISLVPEVPKMINIDGKMRPSESFLLEFLCNFFSTLLIVPDHPEHGVLFLVRELLNVIQDYTWEDNSDEKIRIYTCVLHLLSAMSQETYLYHIDKVDSNDSLYGGDSKFLAENNKLCETVMAQILEHLKTLAKDEALKRQSSLGLSFFNSILAHGDLRNNKLNQLSVNLWHLAQRHGCADTRTMVKTLEYIKKQSKQPDMTHLTELALRLPLQTRT

SEQ ID NO: 7957 - protein, 813 aa, Homo sapiens [sequence omitted]

SEQ ID NO: 7958 - protein, 963 aa, Homo sapiens
MAVFPWHSRNRNYKAEFASCRLEAVPLEFGDYHPLKPITVTESKTKKVNRKGSTSSTSSSSSSSVVDPLSSVLDGTDPLSMFAATADPAALAAAMDSSRRKRDRDDNSVVGSDFEPWTNKRGEILARYTTTEKLSINLFMGSEKGKAGTATLAMSEKVRTRLEELDDFEEGSQKELLNLTQQDYVNRIEELNQSLKDAWASDQKVKALKIVIQCSKLLSDTSVIQFYPSKFVLITDILDTFGKLVYERIFSMCVDSRSVLPDHFSPENANDTAKETCLNWFFKIASIRELIPRFYVEASILKCNKFLSKTGISECLPRLTCMIRGIGDPLVSVYARAYLCRVGMEVAPHLKETLNKNFFDFLLTFKQIHGDTVQNQLVVQGVELPSYLPLYPPAMDWIFQCISYHAPEALLTEMMERCKKLGNNALLLNSVMSAFRAEFIATRSMDFIGMIKECDESGFPKHLLFRSLGLNLALADPPESDRLQILNEAWKVITKLKNPQDYINCAEVWVEYTCKHFTKREVNTVLADVIKHMTPDRAFEDSYPQLQLIIKKVIAHFHDFSVLFSVEKFLPFLDMFQKESVRVEVCKCIMDAFIKHQQEPTKDPVILNALLHVCKTMHDSVNALTLEDEKRMLSYLINGFIKMVSFGRDFEQQLSFYVESRSMFCNLEPVLVQLIHSVNRLAMETRKVMKGNHSRKTAAFVRACVAYCFITIPSLAGIFTRLNLYLHSGQVALANQCLSQADAFFKAAISLVPEVPKMINIDGKMRPSESFLLEFLCNFFSTLLIVPDHPEHGVLFLVRELLNVIQDYTWEDNSDEKIRIYTCVLHLLSAMSQETYLYHIDKVDSNDSLYGGDSKFLAENNKLCETVMAQILEHLKTLAKDEALKRQSSLGLSFFNSILAHGDLRNNKLNQLSVNLWHLAQRHGCADTRTMVKTLEYIKKQSKQPDMTHLTELALRLPLQTRT

SEQ ID NO: 7959 - protein, 668 aa, Homo sapiens
MSNVTLRKMSPTGNEMKSTTQGTTRKQQDFHEVNKRRTFLQDNSWIKKRPEEEKDENYGRVVLNRHNSHDALDRKVNERDVPKATISRYSSDDTLDRISDRNDAAKTYKANTLDNQLTNRSMSVFRSLEVTKLQPGGSLNANTSNTIASTSATTPVKKKRQSWFPPPPPGYNASSSTGTRRREPGVHPPIPPKPSSPVSSTNQLRQDNRQIHPPKPGVYTETNRSAERNISEELDNLIKMNKSLNRNQGLDSLFRANPKVEEREKRAKSLESLIYMSTRTDKDGKGIQSLGSPIKVNQRTDKNEKGRQNLESVAKVNARMNKTSRRSEDLDNATEVNPKGHENTTGKKDLDGLIKVDPETNKNITRGQSLDNLIKVTPEVKRSNQGSKDLNNFIKVYPGTEKSTEGGQSLDSLIKVTPERNRTNQGNQDLENLIKVIPSANKSSEQGLDEHINVSPKAVKNTDGKQDLDKLIKVNPEIFTNNQRNQDLANLIKVNPAVIRNNQSQDLDNLIKVKPSALRNTNRDQNLENLIEVNSHVSENKNGSSNTGAKQAGPQDTVVYTRTYVENSKSPKDGYQENISGKYIQTVYSTSDRSVIERDMCTYCRKPLGVETKMILDELQICCHSTCFKCEICKQPLENLQAGDSIWIYRQTIHCEPCYSKIMAKWIP

SEQ ID NO: 7960 - protein, 688 aa, Homo sapiens
MSNVTLRKMSPTGNEMKSTTQGTTRKQQDFHEVNKRRTFLQDNSWIKKRPEEEKDENYGRVVLNRHNSHDALDRKVNERDVPKATISRYSSDDTLDRISDRNDAAKTYKANTLDNQLTNRSMSMFRSLEVTKLQPGGSLNANTSNTIASTSATTPVKKKRQSWFPPPPPGYNASSSTGTRRREPGVHPPIPPKPSSPVSSPNQLRQDNRQIHPPKPGVYTETNRSAERNIRSQDLDNIVKVATSLQRSDKGEELDNLIKMNKSLNRNQGLDSLFRANPKVEEREKRAKSLESLIYMSTRTDKDGKGIQSLGSPIKVNQRTDKNEKGRQNLESVAKVNARMNKTSRRSEDLDNATEVNPKGHENTTGKKDLDGLIKVDPETNKNITRGQSLDNLIKVTPEVKRSNQGSKDLNNFIKVYPGTEKSTEGGQSLDSLIKVTPERNRTNQGNQDLENLIKVIPSANKSSEQGLDEHINVSPKAVKNTDGKQDLDKLIKVNPEIFTNNQRNQDLANLIKVNPAVIRNNQSQDLENLIKVIPSALRNTNRDQNLENLIEVNSHVSENKNGSSNTGAKQAGPQDTVVYTRTYVENSKSPKDGYQENISGKYIQTVYSTSDRSVIERDMCTYCRKPLGVETKMILDELQICCHSTCFKCEICKQPLENLQAGDSIWIYRQTIHCEPCYSKIMAKWIP

SEQ ID NO: 7961 - protein, 383 aa, Homo sapiens
MVFKAIANQQIPQQPERHLGKSGLSQSHVQRAVCNTWAKYREGRRPRAVKIYTINLESQYLLIQGVPAVGTMKEIVERFALHGATEQYNVLDEYPAEDFTEVYLIKFINLQSARTAKRKMDEQSFLGGLLHVCYAPAFETVEETRKKPEVRKAYVVRTTENKGFKPHHYVTKKLVTEHKDTENFRQDFHSEMSGFCTAAVNPSAGNSNPYLPYSCELPLCYFFSKCICSSGGHVDRASDSSKDDRNHGKTMGHYNHNDSLQKTQINTFKNSVAYPGAEKAITPSEAVDNRFMPRTTKLQERQRGREDDCKVGTFLETNSSSNEVMTGPLLPDISKVDMHDDSLNTTANLIWNKLKQVISSAKASGDKPAEVHTSHPLKQRRRI

SEQ ID NO: 7962 - protein, 929 aa, Homo sapiens
MPSEKVLVANSPRTVRGGNWLQSWRAQAYAVRSGPLGRKVDQGRKHAQQKLGVDKEKSRNFLDIDPEEDSQFNIKVDAARASGRQPCPGHDRRTQLFAVSAPSRDLQNCSRERFPKPNLVWPSGAAVQSTLLKGDRWLLLREMWESPRGARSGDRKGEGEKSETEDNPKGLTLPDDSTQLIIISLSVCLSLRLVSPCAFYCDLPVGTLSPSRSSMERRSESPCLRDSPDRRSGSPDVKGPPPVKVARLEQNGSPMGARGRPNGAVAKAVGGLMIPVFCVVEQLDGSLEYDNREEHAEFVLVRKDVLFSQLVETALLALGYSHSSAAQAQGIIKLGRWNPLPLSYVTDAPDATVADMLQDVYHVVTLKIQLQSCSKLEDLPAEQWNHATVRNALKELLKEMNQSTLAKECPLSQSMISSIVNSTYYANVSATKCQEFGRWYKKYKKIKVERVERENLSDYCVLGQRPMHLPNMNQLASLGKTNEQSPHSQIHHSTPIRNQVPALQPIMSPGLLSPQLSPQLVRQQIAMAHLINQQIAVSRLLAHQHPQAINQQFLNHPPIPRAVKPEPTNSSVEVSPDIYQQVRDELKRASVSQAVFARVAFNRTQGLLSEILRKEEDPRTASQSLLVNLRAMQNFLNLPEVERDRIYQDERERSMNPNAKTSTPTTDLPIKVDGANINITAAIYDEIQQEMKRAKVSQALFAKVAANKSQGWLCELLRWKENPSPENRTLWENLCTIRRFLNLPQHERDVIYEEESRHHHSERMQHVVQLPPEPVQVLHRQQSQPAKESSPPREEAPPPPPPTEDSCAKKPRSRTKISLEALGILQSFIHDVGLYPDQEAIHTLSAQLDLPKHTIIKFFQNQRYHVKHHGKLKEHLGSAVDVAEYKDEELLTESEENDSEEGSEEMYKVEAEEENADKSKAAPAEIDQR

SEQ ID NO: 7963 - protein, 715 aa, Homo sapiens
MAANMYRVGDYVYFENSSSNPYLIRRIEELNKTANGNVEAKVVCFYRRRDISSTLIALADKHATLSVCYKAGPGADNGEEGEIEEEMENPEMVDLPEKLKHQLRHRELFLSRQLESLPATHIRGKCSVTLLNETESLKSYLEREDFFFYSLVYDPQQKTLLADKGEIRVGNRYQADITDLLKEGEEDGRDQSRLETQVWEAHNPLTDKQIDQFLVVARSVGTFARALDCSSSVRQPSLHMSAAAASRDITLFHAMDTLHKNIYDISKAISALVPQGGPVLCRDEMEEWSASEANLFEEALEKYGKDFTDIQQDFLPWKSLTSIIEYYYMWKTTDRYVQQKRLKAAEAESKLKQVYIPNYNKPNPNQISVNNVKAGVVNGTGAPGQSPGAGRACESCYTTQSYQWYSWGPPNMQCRLCASCWTYWKKYGGLKMPTRLDGERPGPNRSNMSPHGLPARSSGSPKFAMKTRQAFYLHTTKLTRIARRLCREILRPWHAARNPYLPINSAAIKAECTARLPEASQSPLVLKQAVRKPLEAVLRYLETHPRPPKPDPVKSVSSVLSSLTPAKVAPVINNGSPTILGKRSYEQHNGVDGNMKKRLLMPSRGLANHGQTRHMGPSRNLLLNGKSYPTKVRLIRGGSLPPVKRRRMNWIDAPGDVFYMPKEETRKIRKLLSSSETKRAARRPYKPIALRQSQALPPRPPPPAPVNDEPIVIED

SEQ ID NO: 7964 - protein, 146 aa, Homo sapiens
MQVLTKRYPKNCLLTVMDRYAAEVHNMEQVVMIPSLLRDVQLSGPGGQAQAEAPDLYTYFTMLKAICVDVDHGLLPREEWQAKVAGSEENGTAETEEVEDESASGELDLEAQFHLHFSSLHHILMHLTEKAQEVTRKYQEMTGQVW

SEQ ID NO: 7965 - protein, 1698 aa, Homo sapiens
MVGELRYREFRVPLGPGLHAYPDELIRQRVGHDGHPEYQIRWLILRRGDEGDGGSGQVDCKAEHILLWMSKDEIYANCHKMLGEDGQVIGPSQESAGEVGALDKSVLEEMETDVKSLIQRALRQLEECVGTIPPAPLLHTVHVLSAYASIEPLTGVFKDPRVLDLLMHMLSSPDYQIRWSAGRMIQALSSHDAGTRTQILLSLSQQEAIEKHLDFDSRCALLALFAQATLSEHPMSFEGIQLPQVPGRVLFSLVKRYLHVTSLLDQLNDSAAEPGAQNTSAPEELSGERGQLELEFSMAMGTLISELVQAMRWDQASDRPRSSARSPGSIFQPQLADVSPGLPAAQAQPSFRRSRRFRPRSEFASGNTYALYVRDTLQPGMRVRMLDDYEEISAGDEGEFRQSNNGVPPVQVFWESTGRTYWVHWHMLEILGFEEDIEDMVEADEYQGAVASRVLGRALPAWRWRPMTELYAVPYVLPEDEDTEECEHLTLAEWWELLFFIKKLDGPDHQEVLQILQENLDGEILDDEILAELAVPIELAQDLLLTLPQRLNDSALRDLINCHVYKKYGPEALAGNQAYPSLLEAQEDVLLLDAQAQAKDSEDAAKVEAKEPPSQSPNTPLQRLVEGYGPAGKILLDLEQALSSEGTQENKVKPLLLQLQRQPQPFLALMQSLDTPETNRTLHLTVLRILKQLVDFPEALLLPWHEAVDACMACLRSPNTDREVLQELIFFLHRLTSVSRDYAVVLNQLGARDAISKALEKHLGKLELAQELRDMVFKCEKHAHLYRKLITNILGGCIQMVLGQIEDHRRTHRPINIPFFDVFLRYLCQGSSVEVKEDKCWEKVEVSSNPHRASKLTDHNPKTYWESNGSAGSHYITLHMRRGILIRQLTLLVASEDSSYMPARVVVCGGDSTSSLHTELNSVNVMPSASRVILLENLTRFWPIIQIRIKRCQQGGIDTRIRGLEILGPKPTFWPVFREQLCRHTRLFYMVRAQAWSQDMAEDRRSLLHLSSRLNGALRQEQNFADRFLPDDEAAQALGKTCWEALVSPVVQNITSPDEDGISPLGWLLDQYLECQEAVFNPQSRGPAFFSRVRRLTHLLVHVEPCEAPPPVVATPRPKGRNRSHDWSSLATRGLPSSIMRNLTRCWRAVVEKQVNNFLTSSWRDDDFVPRYCEHFNILQNSSSELFGPRAAFLLALQNGCAGALLKLPFLKAAHVSEQFARHIDQQIQGSRIGGAQEMERLAQLQQCLQAVLIFSGLEIATTFEHYYQHYMADRLLGVVSSWLEGAVLEQIGPCFPNRLPQQMLQSLSTSKELQRQFHVYQLQQLDQELLKLEDTEKKIQVGLGASGKEHKSEKEEEAGAAAVVDVAEGEEEEEENEDLYYEGAMPEVSVLVLSRHSWPVASICHTLNPRTCLPSYLRGTLNRYSNFYNKSQSHPALERGSQRRLQWTWLGWAELQFGNQTLHVSTVQMWLLLYLNDLKAVSVESLLAFSGLSADMLNQAIGPLTSSRGPLDLHEQKDIPGGVLKIRDGSKEPRSRWDIVRLIPPQTYLQAEGEDGQNLEKRRNLLNCLIVRILKAHGDEGLHIDQLVCLVLEAWQKGPCPPRGLVSSLGKGSACSSTDVLSCILHLLGKGTLRRHDDRPQVLSYAVPVTVMEPHTESLNPGSSGPNPPLTFHTLQIRSRGVPYASCTATQSFSTFR

SEQ ID NO: 7966 - protein, 702 aa, Homo sapiens
MEDPFEEADQPTTEPGMVLDSVEAGDTTPPTKRKSKFSGFGKIFKPWKWRKKKSSDKFKETSEVLERKISMRKPREELVKRGVLLEDPEQGGEDPGKPSDAMLKNGHTTPIGNARSSSPVQVEEEPVRLASLRKAIPEEDLKKRLGSTGSQPNSEAESVPENVPKPPLLPPKRPLSSSHEASEGQAKDATSSGGTARFIISTSITTAPAATTAATSLAKTVNLSVTPSPAPRTLPAAPASTNTTATPSLTHMVPAKQPPIPPPKPAHRNSNPVIAELSQAINSGTLLSKPSPPLPPKRGIPSTSVPTLESAAAITTKTPSDEREKSTCSMGSELLPMISPRSPSPPLPTHIPPEPPRTPPFPAKTFQVVPEIEFPPSLDLHQEIPQQEDQKKEVPKRILDQNFGEPHIPSRLPPLPLHIRIQQALTSPLPMTPILEGSHRAHSLLFENSDSFSEDSSTLGRTRSLPITIEMLKVPDDEEEEEQTCPSTFSEEMTPTSVIPKLPQCLREEEEKESDSDSEGPIQYRDEEDEDESYQSALANKVKRKDTLAMKLNHRPSEPELNLNSWPCKSKEEWNEIRHQIGNTLIRRLSQRPTPEELEQRNILQPKNEADRQAEKREIKRRLTRKLSQRPTVAELLARKILRFNEYVEVTDAQDYDRRADKPWTKLTPADKAAIRKELNEFKSSEMEVHEESKHFTRYHRP

SEQ ID NO: 7967 - protein, 318 aa, Homo sapiens
PAAAWRPTGQVGFPGEAAVEAEEAAAEIWKQYLTSLNWLIVAWKIHLRKQTSPLQSQAWSWTVWKQETQHLLPKGRASSQALARSSSPGNGEKKKSSDKFKETSEVLERKISMRKPREELVKRGVLLEDPEQGGEDPGKPSDAMLKNGHTTPIGNARSSSPVQVEEEPVRLASLRKAIPEEDLKKRLGSTGSQPNSEAESVPENVPKPPLLPPKRPLSSSHEASEGQAKDATSSGGTARFIISTSITTAPAATTAATSLAKTVNLSVTPSPAPRTLPAAPASTNTTATPSLTHMVPAKQPPIPPPKPAHRNSNPVIGK

SEQ ID NO: 7968 - protein, 632 aa, Homo sapiens
SLPGSPAPSQRCFKPYPLITPCYIKTTTRQLSSPNHSPSQSPNQSPRIKRRPEPSLSRGSRTALASVAAPAKKHRADGGLAAGLSRSADWTEELGARTPRVGGSAHLLERGVASDSGGGVSPALAAKASGAPAAADGFQNVFTGRTLLEKLFSQQENGPPEEAEKFCSRIIAMGLLLPFSDCFREPCNQNAQTNAASFDQDQLYTWAAVSQPTHSLDYSEGQFPRRVPSMGPPSKPPDEEHRLEDAETESQSAVSETPQKRSDAVQKEVVDMKSEGQATVIQQLEQTIEDLRTKIAELERQYPALDTEVASGHQGLENGVTASGDVCLEALRPRATRAKSLDKPEQFLYELSLIPNFSERVFCILFQSTFSESICSIRRKLELLQKLCETLKNGPGVMQVLGLVLAFGNYMNGGNKTRGQADGFGLDILPKLKDVKSSDNSRSLLSYIVSYYLRNFDEDAGKEQCLFPLPEPQDLFQASQMKFEDFQKDLRKLKKDLKACEVEAGKVYQVSSKEHMQPFKENMEQFIIQAKIDQEAEENSLTETHKCFLETTAYFFMKPKLGEKEVSPNAFFSIWHEFSSDFKDFWKKENKLLLQERVKEAEEVCRQKKGKSLYKIKPRHDSGIKAKISMKT

SEQ ID NO: 7969 - protein, 3914 aa, Homo sapiens
MHTNNAKAMSPRAEALKALVKPKEVKPKIPKGVSHKLDRLAYIAHPNLGKLARARMAKGLRLCRPKAKAKDQTKAQAAAPASVSAQAPKAAQCPTKTSESLLILFAEIDYWERLLFETPHYVVNVAERAEDLRILRENLLLVARDYNRIIAMLSPDEQALFKERIRLLDKKIHPGLKKLHWALKGASAFFITECRIHASKVQMIVNEFKASTLTIGWRAQEMSEKLLVRISGKRVYRDLEFEEDQREHRAAVQQKLMNLHQDVVTIMTNSYEVFKNDGPEIQQQWMLYMIRLDRMMEDALRLNVKWSLLELSKAINGDGKTSPNPLFQVLVILKNDLQGSVAQVEFSPTLQTLAGVVNDIGNHLFSTISVFCHLPDILTKRKLHREPIQTVVEQDEDIKKIQTQISSGMTNNASLLQNYLKTWDMYREIWEINKDSFIHRYQRLNPPVSSFVADIARYTEVANNVQKEETVTNIQFVLLDCSHLKFSLVQHCNEWQNKFATLLREMAAGRLLELHTYLKENAEKISRPPQTLEELGVSLQLVDALKHDLANVETQIPPIHEQFAILEKYEVPVEDSVLEMLDSLNGEWVVFQQTLLDSKQMLKKHKEKFKTGLIHSADDFKKKAHTLLEDFEFKGHFTSNVGYMSALDQITQVRAMLMAMREEENSLRANLGIFKIEQPPSKDLQNLEKVELDALQQIWEIARDWEENWNEWKTGRFLILQTETMETTAHGLFRRLTKLAKEYKDRNWEIIETTRSKIEQFKRTMPLISDLRNPALRERHWDQVRDEIQREFDQESESFTLEQIVELGMDQHVEKIGEISASATKELAIEVALQNIAKTWDVTQLDIVPYKDKGHHRLRGTEEVFQALEDNQVALSTMKASRFVKAFEKDVDHWERCLSLILEVIEMILTVQRQWMYLENIFLGEDIRKQLPNESTLFDQVNSNWKAIMDRMNKDNNALRSTHHPGLLDTLIEMNTILEDIQKSLDMYLETKRHIFPRFYFLSNDDLLEILGQSRNPEAVQPHLKKCFDNIKLLRIQKVGGPSSKWEAVGMFSGDGEYIDFLHSVFLEGPVESWLGDVEQTMRVTLRDLLRNCHLALRKFLNKRDKWVKEWAGQVVITASQIQWTADVTKCLLTAKERADKKILKVMKKNQVSILNKYSEAIRGNLTKIMRLKIVALVTIEIHARDVLEKLYKSGLMDVNSFDWLSQLRFYWEKDLDDCVIRQTNTQFQYNYEYLGNSGRLVITPLTDRCYMTLTTALHLHRGGSPKGPAGTGKTETVKDLGKALGIYVIVVNCSEGLDYKSMGRMYSGLAQTGAWGCFDEFNRINIEVLSVVAHQILCILSALAAGLTHFHFDGFEINLVWSCGIFITMNPGYAGRTELPENLKSMFRPIAMVVPDSTLIAEIILFGEGFGNCKILAKKVYTLYSLAVQQLSRQDHYDFGLRALTSLLRYAGKKRRLQPDLTDEEVLLLSMRDMNIAKLTSVDAPLFNAIVQDLFPNIELPVIDYGKLRETVEQEIRDMGLQSTPFTLTKVFQLYETKNSRHSTMIVGCTGSGKTASWRILQASLSSLCRAGDPNFNIVREFPLNPKALSLGELYGEYDLSTNEWTDGILSSVMRTACADEKPDEKWILFDGPVDTLWIENMNSVMDDNKVLTLINGERIAMPEQVSLLFEVEDLAMASPATVSRCGMVYTDYADLGWKPYVQSWLEKRPKAEVEPLQRMFEKLINKMLAFKKDNCKELVPLPEYSGITSLCKLYSALATPENGVNPADGENYVTMVEMTFVFSMIWSVCASVDEEGRKRIDSYLREIEGSFPNKDTVYEYFVDPKIRSWTSFEDKLPKSWRYPPNAPFYKIMVPTVDTVRYNYLVSSLVANQNPILLVGPVGTGKTSIAQSVLQSLPSSQWSVLVVNMSAQTTSNNVQSIIESRVEKRTKGVYVPFGGKSMITFMDDLNMPAKDMFGSQPPLELIRLWIDYGFWYDRTKQTIKYIREMFLMAAMGPPGGGRTVISPRLRSRFNIINMTFPTVRTSWGLQDEGRKSQIIRIFGTMINQKLQDFEEEVKPIGNVVTEATLDMYNTVVQRFLPTPTKMHYLFNLRDISKVFQGMLRANKDFHDTKSSITRLWIHECFRVFSDRLVDAADTEAFMGIISDKLGSFFDLTFHHLCPSKRPPIFGDFLKEPKVYEDLTDLTVLKTVMETALNEYNLSPSVVPMQLVLFREAIEHITRIVRVIGQPRGNMLLVGIGGSGRQSLARLASSICDYTTFQIEVTKHYRKQEFRDDIKRLYRQAGVELKTTSFIFVDTQIADESFLEDINNILSSGEVPNLYKPDEFEEIQSHIIDQARVEQVPESSDSLFAYLIERVQNNLHIVLCLSPMGDPFRNWIRQYPALVNCTTINWFSEWPQEALLEVAEKCLIGVDLGTQENIHRKVAQIFVTMHWSVAQYSQKMLLELRRHNYVTPTKYLELLSGYKKLLGEKRQELLAQANKLRTGLFKIDETREKVQVMSLELEDAKKKVAEFQKQCEEYLVIIVQQKREADEQQKAVTANSEKIAVEEIKCQALADNAQKDLEEALPALEEAMRALESLNKKDIGEIKSYGRPPAQVEIVMQAVMILRGNEPTWAEAKRQLGEQNFIKSLINFDKDNISDKVLKKIGAYCAQPDFQPDIIGRVSLAAKSLCMWVRAMELYGRLYRVVEPKRIRMNAALAQLREKQAALAEAQEKLREVAEKLEMLKKQYDEKLAQKEELRKKSEEMELKLERAGMLVSGLAGEKARWEETVQGLEEDLGYLVGDCLLAAAFLSYMGPFLTNYRDEIVNQIWIGKIWELQVPCSPSFAIDNFLCNPTKVRDWNIQGLPSDAFSTENGIIVTRGNRWALMIDPQAQALKWIKNMEGGQGLKIIDLQMSDYLRILEHAIHFGYPVLLQNVQEYLDPTLNPMLNKSVARIGGRLLMRIGDKEVEYNTNFRFYITTKLSNPHYSPETSAKTTIVNFAVKEQGLEAQLLGIVVRKERPELEEQKDSLVINIAAGKRKLKELEDEILRLLNEATGSLLDDVQLVNTLHTSKITATEVTEQLETSETTEINTDLAREAYRPCAQRASILFFVLNDMGCIDPMYQFSLDAYISLFILSIDKSHRSNKLEDRIDYLNDYHTYAVYRYTCRTLFERHKLLFSFHMCAKILETSGKLNMDEYNFFLRGGVVLDREGQMDNPCSSWLADAYWDNITELDKLTNFHGLMNSFEQYPRDWHLWYTNAAPEKAMLPGEWENACNEMQRMLIVRSLRQDRVAFCVTSFIITNLGSRFIEPPVLNMKSVLEDSTPRSPLVFILSPGVDPTSALLQLAEHMGMAQRFHALSLGQGQAPIAARLLREGHWVFLANCHLSLSWMPNLDKLVEQLQVEDPHPSFRLWLSSIPHPDFPISILQVSIKMTTEPPKGLKANMTRLYQLMSEPQFSRCSKPAKYKKLLFSLCFFHSVLLERKKFLQLGWNIIYGFNDSDFEVCISQGSSSQPSLLTQNLLSLYLDEYEETPWDALKYLIAGINYGGHVTDDWDRRLLTTYINDYFCDQSLSTPFHRLSALETYFIPKDGSLASYKEYISLLPGMDPPEAFGQHPNADVASQITEAQTLFDTLLSLQPQITPTRAGGQTREEKVKRAGPGGGKVMRRGGYTQELLPAQVLELAADVKQKIPEMIDYEGTQKLLALDPSPLNVVLLQEIQRYNTLMQTILFSLTDLEKGIQGLIAYPSQKPLAAWTRDLAMRVEQFELWASRARPPVIFWLSGFTFPTGFLTAVLQSSARQNNVSVDSLSWEFIVSTVDDSNLVYPPKDGVWVRGLYLEGAGWDRKNSCLVEAEPMQLVCLMPTIHFRPAESRKKSAKGMYSCPCYYYPNRAGSSDRASFVIGIDLRSGAMTPDHWIKRGTALLMSLDS

SEQ ID NO: 7970 - protein, 1734 aa, Homo sapiens
DPWCGAIGGGSDEWQPHGPTGAVRGPRGGARAGARRRRGGWAGGGGGTRRALGVPVARRRRMWRAEGKWLPKTSRKSVSQSVFCGTSTYCVLNTVPPIEDDHGNSNSSHVKIFLPKKLLECLPKCSSLPKERHRWNTNEEIAAYLITFEKHEEWLTTSPKTRPQNGSMILYNRKKVKYRKDGYCWKKRKDGKTTREDHMKLKVQGVECLYGCYVHSSIIPTFHRRCYWLLQNPDIVLVHYLNVPAIEDCGKPCGPILCSINTDKKEWAKWTKEELIGQLKPMFHGIKWTCSNGNSSSGFSVEQLVQQILDSHQTKPQPRTHNCLCTGSLGAGGSVHHKCNSAKHRIISPKVEPRTGGYGSHSEVQHNDVSEGKHEHSHSKGSSREKRNGKVAKPVLLHQSSTEVSSTNQVEVPDTTQSSPVSISSGLNSDPDMVDSPVVTGVSGMAVASVMGSLSQSATVFMSEVTNEAVYTMSPTAGPNHHLLSPDASQGLVLAVSSDGHKFAFPTTGSSESLSMLPTNVSEELVLSTTLDGGRKIPETTMNFDPDCFLNNPKQGQTYGGGGLKAEMVSSNIRHSPPGERSFSFTTVLTKEIKTEDTSFEQQMAKEAYSSSAAAVAASSLTLTAGSSLLPSGGGLSPSTTLEQMDFSAIDSNKDYTSSFSQTGHSPHIHQTPSPSFFLQDASKPLPVEQNTHSSLSDSGGTFVMPTVKTEASSQTSSCSGHVETRIESTSSLHLMQFQANFQAMTAEGEVTMETSQAAEGSEVLLKSGELQACSSEHYLQPETNGVIRSAGGVPILPGNVVQGLYPVAQPSLGNASNMELSLDHFDISFSNQFSDLINDFISVEGGSSTIYGHQLVSGDSTALSQSEDGARAPFTQAEMCLPCCSPQQGSLQLSSSEGGASTMAYMHVAEVVSAASAQGTLGMLQQSGRVFMVTDYSPEWSYPEGGVKVLITGPWQEASNNYSCLFDQISVPASLIQPGVLRCYCPAHDTGLVTLQVAFNNQIISNSVVFEYKARALPTLPSSQHDWLSLDDNQFRMSILERLEQMERRMAEMTGSQQHKQASGGGSSGGGSGSGNGGSQAQCASGTGALGSCFESRVVVVCEKMMSRACWAKSKHLIHSKTFRGMTLLHLAAAQGYATLIQTLIKWRTKHADSIDLELEVDPLNVDHFSCTPLMWACALGHLEAAVVLYKWDRRAISIPDSLGRLPLGIARSRGHVKLAECLEHLQRDEQAQLGQNPRIHCPASEEPSTESWMAQWHSEAISSPEIPKGVTVIASTNPELRRPRSEPSNYYSSESHKDYPAPKKHKLNPEYFQTRQEKLLPTALSLEEPNIRKQSPSSKQSVPETLSPSEGVRDFSRELSPPTPETAAFQASGSQPVGKWNSKDLYIGVSTVQVTGNPKGTSVGKEAAPSQVRPREPMSVLMMANREVVNTELGSYRDSAENEECGQPMDDIQVNMMTLAEHIIEATPDRIKQENFVPMESSGLERTDPATISSTMSWLASYLADADCLPSAAQIRSAYNEPLTPSSNTSLSPVGSPVSEIAFEKPNLPSAADWSEFLSASTSEKVENEFAQLTLSDHEQRELYEAARLVQTAFRKYKGRPLREQQEVAAAVIQRCYRKYKQYALYKKMTQAAILIQSKFRSYYEQKKFQQSRRAAVLIQKYYRSYKKCGKRRQARRTAVIVQQKLRSSLLTKKQDQAARKIMRFLRRCRHSPLVDHRLYKRSERIEKGQGT

SEQ ID NO: 7971 - protein, 1856 aa, Homo sapiens
LDFNKKNLSFLGFPRQRKVSSFQKEFSLEDKEQLANHERGIDAQLLVALPKVAELRQIFEPKKKEFLEMKRKERIARRLEGIENDTQPILLQSCTGLVTHRLLEEDTPRYMRASDPASPHIGRSNEEEETSDSSLEKQTRSKYCTETSGVHGDSPYGSGTMDTHSLESKAERIARYKAERRRQLAEKYGLTLDPEADSEYLSRYTKSRKEPDAVEKRGGKSDKQEESSRDASSLYPGTETMGLRTCAGESKDYALHVGDGSSDPEVLLNIENQRRGQELSATRQAHDLSPAAESSSTFSFSGRDSSFTEVPRSPKHAHSSSLQQAASRSPSFGDPQLSPEARPRCTSHSETPTVDDEEKVDERAKLSVAAKRLLFREMEKSFDEQNVPKRRSRNTAVEQRLRRLQDRSLTQPITTEEVVIAATLQASAHQKALAKDQTNEGKELAEQGEPDSSTLSLAEKLALFNKLSQPVSKAISTRNRIDTRQRRMNARYQTQPVTLGEVEQVQSGKLIPFSPAVNTSVSTVASTVAPMYAGDLRTKPPLDHNASATDYKFSSSIENSDSPVRSILKSQAWQPLVEGSENKGMLREYGETESKRALTGRDSGMEKYGSFEEAEASYPILNRAREGDSHKESKYAVPRRGSLERANPPITHLGDEPKEFSMAKMNAQGNLDLRDRLPFEEKVEVENVMKRKFSLRAAEFGEPTSEQTGTAAGKTIAQTTAPVSWKPQDSSEQPQEKLCKNPCAMFAAGEIKTPTGEGLLDSPSKTMSIKERLALLKKSGEEDWRNRLSRRQEGGKAPASSLHTQEAGRSLIKKRVTESRESQMTIEERKQLITVREEAWKTRGRGAANDSTQFTVAGRMVKKGLASPTAITPVASPICGKTRGTTPVSKPLEDIEARPDMQLESDLKLDRLETFLRRLNNKVGGMHETVLTVTGKSVKEVMKPDDDETFAKFYRSVDYNMPRSPVEMDEDFDVIFDPYAPKLTSSVAEHKRAVRPKRRVQASKNPLKMLAAREDLLQEYTEQRLNVAFMESKRMKVEKMSSNSNFSEVTLAGLASKENFSNVSLRSVNLTEQNSNNSAVPYKRLMLLQIKGRRHVQTRLVEPRASALNSGDCFLLLSPHCCFLWVGEFANVIEKAKASELATLIQTKRELGCRATYIQTIEEGINTHTHAAKDFWKLLGGQTSYQSAGDPKEDELYEAAIIETNCIYRLMDDKLVPDDDYWGKIPKCSLLQPKEVLVFDFGSEVYVWHGKEVTLAQRKIAFQLAKHLWNGTFDYENCDINPLDPGECNPLIPRKGQGRPDWAIFGRLTEHNETILFKEKFLDWTELKRSNEKNPGELAQHKEDPRTDVKAYDVTRMVSMPQTTAGTILDGVNVGRGYGLVEGHDRRQFEITSVSVDVWHILEFDYSRLPKQSIGQFHEGDAYVVKWKFMVSTAVGSRQKGEHSVRAAGKEKCVYFFWQGRHSTVSEKGTSALMTVELDEERGAQVQVLQGKEPPCFLQCFQGGMVVHSGRREEEEENVQSEWRLYCVRGEVPVEGNLLEVACHCSSLRSRTSMVVLNVNKALIYLWHGCKAQAHTKEVGRTAANKIKEQCPLEAGLHSSSKVTIHECDEGSEPLGFWDALGRRDRKAYDCMLQDPGSFNFAPRLFILSSSSGDFAATEFVYPARAPSVVSSMPFLQEDLYSAPQPALFLVDNHHEVYLWQGWWPIENKITGSARIRWASDRKSAMETVLQYCKGKNLKKPAPKSYLIHAGLEPLTFTNMFPSWEHREDIAEITEMDTEVSNQITLVEDVLAKLCKTIYPLADLLARPLPEGVDPLKLEIYLTDEDFEFALDMTRDEYNALPAWKQVNLKKAKGLF

SEQ ID NO: 7972 - protein, 929 aa, Homo sapiens
  VARIANT 411: Xaa = Any Amino Acid
MNRPEFYERVLPVISLMISALRLALLKKSGEEDWRNRLSRRQEGSKAPASSLQGSPSSGRIVLVLQCPKPRVTESRESQMMIEERKQLITVREEAWKTRGRGAANDSTQFTVAGRMVKKGLASPTAITPVASAICGKTRGTTPVSKPLEVGGMHETVLTVTGKSVKELMKPDDDETFAQFYRNVDCNMLRSPVELDEDFDVIFDPYAPKLTSSVAEHKWAVRPKRQVQASKNPLKMLAAREDLLQEYTEQRLNVAFMESKRIKVEKREYLNPHPASVFGNGFFRCFTHCLVFCLVKANNGAQKALMNFSEVTLAGLASKENFSNVSLRSVNLTEQNSNNSAVPFKRLMLLQIKGRRHVQTRLVEPRASALNSGDCFLLLSPHCCFLWVGEFANAIEKAKNLQLDCRATYIXIIEEGINIHTLAAKDFCKLLGGQTSYQSAGDPKEDELYEAAIIETNCIYCLMDDKLVPDDDYWGKIPKCSLLQPKEVLVFDFGSEVYVWHGKEVTLAQRKIEFQLAKHLWNGTFDYENCDINPLDPGECNPLIRRKGQGRPDWAIFGRLTEHNETILFKEKFLDWTELKRPNEKNPGELAQHKEDSRADVKRNNVTRMVSVPQTTAGAILDRVNIGCGCGLVEGHHRRQFEITSVSVDVWYILEFDYSRLPKQSIGQFHEGDAYVVKWKFMVSTADPGSFNFAPRLFVLSSSSGDFAATEFVYPARAPSVVSSMPFLQEDLYSVPQPVPFLDNHHEVCLWQGWWPIENKITGSARICRASDQKSTMETMLQYCKDEASPAAPRSPRPFFPFCMGQPEKNLKKPVPKSYLIHAGLEPLTFTNMFPSWEHRDDTAEITEMDMEVSNQITLVEDVLAKLCKTIYLLANLLARPLPEGVDPLKLEIYLTDEDFEFALDMMRDEYNALPAWKQVNLKKAKGLF

SEQ ID NO: 7973 - protein, 2282 aa, Homo sapiens
LDFNKKNLSFLGFPRQRKVSSFQKEFSLEDKEQLANHERGIDAQLLVALPKVAELRQIFEPKKKEFLEMKRKERIARRLEGIENDTQPILLQSCTGLVTHRLLEEDTPRYMRASDPASPHIGRSNEEEETSDSSLEKQTRSKYCTETSGVHGDSPYGSGTMDTHSLESKAERIARYKAERRRQLAEKYGLTLDPEADSEYLSRYTKSRKEPDAVEKRGGKSDKQEESSRDASSLYPGTETMGLRTCAGESKDYALHVGDGSSDPEVLLNIENQRRGQELSATRQAHDLSPAAESSSTFSFSGRDSSFTEVPRSPKHAHSSSLQQAASRSPSFGDPQLSPEARPSTGKPKHEWFLQKDSEGDTPSLINWPSRVKVREKLVKEESARNSPELASESVTQRRHQPAPVHYVSFQSEHSAFDRVPSKAAGSTRQPIRGYVQPADTGHTAKLVTPETPENASECSWVASATQNVPKPPSLTVLEGDGRDSPVLHVCESKAEEEEGEGEGEEKEEDVCFTEALEQSKKTLLALEGDGLVRSPEDPSRNEDFGKPAVSTVTLEHQKELENVAQPPQAPHQPTERTGRSEMVLYIQSEPVSQDAKPTGHNREASKKRKVRTRSLSDFTGPPQLQALKYKDPASRRELELPSSKTEGPYGEISMLDTKVSVAQLRSAFLASANACRRPELKSRVERSAEGPGLPTGVERERGSRKPRRYFSPGESRKTSERFRTQPITSAERKESDRCTSHSETPTVDDEEKVDERAKLSVAAKRLLFREMEKSFDEQNVPKRRSRNTAVEQRLRRLQDRSLTQPITTEEVVIAATEPIPASCSGGTHPVMARLPSPTVARSAVQPARLQASAHQKALAKDQTNEGKELAEQGEPDSSTLSLAEKLALFNKLSQPVSKAISTRNRIDTRQRRMNARYQTQPVTLGEVEQVQSGKLIPFSPAVNTSVSTVASTVAPMYAGDLRTKPPLDHNASATDYKFSSSIENSDSPVRSILKSQAWQPLVEGSENKGMLREYGETESKRALTGRDSGMEKYGSFEEAEASYPILNRAREGDSHKESKYAVPRRGSLERANPPITHLGDEPKEFSMAKMNAQGNLDLRDRLPFEEKVEVENVMKRKFSLRAAEFGEPTSEQTGTAAGKTIAQTTAPVSWKPQDSSEQPQEKLCKNPCAMFAAGEIKTPTGEGLLDSPSKTMSIKERLALLKKSGEEDWRNRLSRRQEGGKAPASSLHTQEAGRSLIKKRVTESRESQMTIEERKQLITVREEAWKTRGRGAANDSTQFTVAGRMVKKGLASPTAITPVASPICGKTRGTTPVSKPLEDIEARPDMQLESDLKLDRLETFLRRLNNKVGGMHETVLTVTGKSVKEVMKPDDDETFAKFYRSVDYNMPRSPVEMDEDFDVIFDPYAPKLTSSVAEHKRAVRPKRRVQASKNPLKMLAAREDLLQEYTEQRLNVAFMESKRMKVEKMSSNSNFSEVTLAGLASKENFSNVSLRSVNLTEQNSNNSAVPYKRLMLLQIKGRRHVQTRLVEPRASALNSGDCFLLLSPHCCFLWVGEFANVIEKAKASELATLIQTKRELGCRATYIQTIEEGINTHTHAAKDFWKLLGGQTSYQSAGDPKEDELYEAAIIETNCIYRLMDDKLVPDDDYWGKIPKCSLLQPKEVLVFDFGSEVYVWHGKEVTLAQRKIAFQLAKHLWNGTFDYENCDINPLDPGECNPLIPRKGQGRPDWAIFGRLTEHNETILFKEKFLDWTELKRSNEKNPGELAQHKEDPRTDVKAYDVTRMVSMPQTTAGTILDGVNVGRGYGLVEGHDRRQFEITSVSVDVWHILEFDYSRLPKQSIGQFHEGDAYVVKWKFMVSTAVGSRQKGEHSVRAAGKEKCVYFFWQGRHSTVSEKGTSALMTVELDEERGAQVQVLQGKEPPCFLQCFQGGMVVHSGRREEEEENVQSEWRLYCVRGEVPVEGNLLEVACHCSSLRSRTSMVVLNVNKALIYLWHGCKAQAHTKEVGRTAANKIKEQCPLEAGLHSSSKVTIHECDEGSEPLGFWDALGRRDRKAYDCMLQDPGSFNFAPRLFILSSSSGDFAATEFVYPARAPSVVSSMPFLQEDLYSAPQPALFLVDNHHEVYLWQGWWPIENKITGSARIRWASDRKSAMETVLQYCKGKNLKKPAPKSYLIHAGLEPLTFTNMFPSWEHREDIAEITEMDTEVSNQITLVEDVLAKLCKTIYPLADLLARPLPEGVDPLKLEIYLTDEDFEFALDMTRDEYNALPAWKQVNLKKAKGLF

SEQ ID NO: 7974 - protein, 691 aa, Homo sapiens
MIRGRNSATSADEQPHIGNYRLLKTIGKGNFAKVKLARHILTGKEVAVKIIDKTQLNSSSLQKLFREVRIMKVLNHPNIVKLFEVIETEKTLYLVMEYASGGEVFDYLVAHGRMKEKEARAKFRQIVSAVQYCHQKFIVHRDLKAENLLLDADMNIKIADFGFSNEFTFGNKLDTFCGSPPYAAPELFQGKKYDGPEVDVWSLGVILYTLVSGSLPFDGQNLKELRERVLRGKYRIPFYMSTDCENLLKKFLILNPSKRGTLEQIMKDRWMNVGHEDDELKPYVEPLPDYKDPRRTELMVSMGYTREEIQDSLVGQRYNEVMATYLLLGYKSSELEGDTITLKPRPSADLTNSSAPSPSHKVQRSVSANPKQRRFSDQAGPAIPTSNSYSKKTQSNNAENKRPEEDRESGRKASSTAKVPASPLPGLERKKTTPTPSTNSVLSTSTNRSRNSPLLERASLGQASIQNGKDSTAPQRVPVASPSAHNISSSGGAPDRTNFPRGVSSRSTFHAGQLRQVRDQQNLPYGVTPASPSGHSQGRRGASGSIFSKFTSKFVRRNLNEPESKDRVETLRPHVVGSGGNDKEKEEFREAKPRSLRFTWSMKTTSSMEPNEMMREIRKVLDANSCQSELHEKYMLLCMHGTPGHEDFVQWEMEVCKLPRLSLNGVRFKRISGTSMAFKNIASKIANELKL

SEQ ID NO: 7975 - protein, 757 aa, Homo sapiens
MIRGRNSATSADEQPHIGNYRLLKTIGKGNFAKVKLARHILTGKEVAVKIIDKTQLNSSSLQKLFREVRIMKVLNHPNIVKLFEVIETEKTLYLVMEYASGGEVFDYLVAHGRMKEKEARAKFRQVVSAVQYCHQKFIVHRDLKAENLLLDADMNIKIADFGFSNEFTFGNKLDTFCGSPPYAAPELFQGKKYDGPEVDVWSLGVILYTLVSGSLPFDGQNLKELRERVLRGKYRIPFYMSTDCENLLKKFLILNPSKRGTLEQIMKDRWMNVGHEDDELKPYVEPLPDYKDPRRTELMVSMGYTREEIQDSLVGQRYNEVMATYLLLGYKSSELEGDTITLKPRPSADLTNSSAPSPSHKVQRSVSANPKQRRFSDQAAGPAIPTSNSYSKKTQSNNAENKRPEEDRESGRKASSTAKVPASPLPGLERKKTTPTPSTNSVLSTSTNRSRNSPLLERASLGQASIQNGKDSLTMPGSRASTASASAAVSAARPRQHQKSMSASVHPNKASGLPPTESNCEVPRPRQVTAPQRVPVASPSAHNISSSGGAPDRTNFPRGVSSRSTFHAGQLRQVRDQQNLPYGVTPASPSGHSQGRRGASGSIFSKFTSKFVRRNLSFRFARRNLNEPESKDRVETLRPHVVGSGGNDKEKEEFREAKPRSLRFTWSMKTTSSMEPNEMMREIRKVLDANSCQSELHEKYMLLCMHGTPGHEDFVQWEMEVCKLPRLSLNGVRFKRISGTSMAFKNIASKIANELKL

SEQ ID NO: 7976 - protein, 747 aa, Homo sapiens
MIRGRNSATSADEQPHIGNYRLLKTIGKGNFAKVKLARHILTGKEVAVKIIDKTQLNSSSLQKLFREVRIMKVLNHPNIVKLFEVIETEKTLYLVMEYASGGEVFDYLVAHGRMKEKEARAKFRQVVSAVQYCHQKFIVHRDLKAENLLLDADMNIKIADFGFSNEFTFGNKLDTFCGSPPYAAPELFQGKKYDGPEVDVWSLGVILYTLVSGSLPFDGQNLKELRERVLRGKYRIPFYMSTDCENLLKKFLILNPSKRGTLEQIMKDRWMNVGHEDDELKPYVEPLPDYKDPRRTELMVSMGYTREEIQDSLVGQRYNEVMATYLLLGYKSSELEGDTITLKPRPSADLTNSSAPSPSHKVQRSVSANPKQRRFSDQAGPAIPTSNSYSKKTQSNNAENKRPEEDRESGRKASSTAKVPASPLPGLERKKTTPTPSTNSVLSTSTNRSRNSPLLERASLGQASIQNGKDSLTMPGSRASTASASAAVSAARPRQHQKSMSASVHPNKASGLPPTESNCEVPRPRQVTAPQRVPVASPSAHNISSSGGAPDRTNFPRGVSSRSTFHAGQLRQVRDQQNLPYGVTPASPSGHSQGRRGASGSIFSKFTSKFVRRNLNEPESKDRVETLRPHVVGSGGNDKEKEEFREAKPRSLRFTWSMKTTSSMEPNEMMREIRKVLDANSCQSELHEKYMLLCMHGTPGHEDFVQWEMEVCKLPRLSLNGVRFKRISGTSMAFKNIASKIANELKL

SEQ ID NO: 7977 - protein, 312 aa, Homo sapiens
MAAGVDCGDGVGARQHVFLVSEYLKDASKKMKNGLMFVKLVNPCSGEGAIYLFNMCLQQLLEVKVFKEKHHSWFINQSVQSGGLLHFATPVDPLFLLLHYLIKADKEGKFQPLDQVVVDNVFPNCILLLKLPGLEKLLHHVTEEKGNPEIDNKKYYKYSKEKTLKWLEKKVNQTVAALKTNNVNVSSRVQSTAFFSGDQASTDKEEDYIRYAHGLISDYIPKELSDDLSKYLKLPEPSASLPNPPSKKIKLSDEPVEAKEDYTKFNTKDLKTEKKNSKMTAAQKALAKVDKSGMKSIDTFFGVKNKKKIGKV

SEQ ID NO: 7978 - protein, 331 aa, Homo sapiens [sequence omitted]

SEQ ID NO: 7979 - protein, 740 aa, Homo sapiens
MNEHLSSLIKKKRKCMQPKDFNFKTPENDKRFQKKFEKMAKELQRQKTNLDDDVPILLFESNGSLIYTPTIEINSSHHSAMEKRLQEMKEKRENLSPTSSQMIQQSHDNPSNSLCEAPLNISRDTLCSDEYFAGGLHSSFDDLCGNSGCGNQERKLEGSINDIKSDVCISSLVLKANNIHSSPSFTHLDKSSPQKFLSNLSKEEINLQRNIAGKVVTPHQKQAAGMSQETFEEKYRLSPTLSSTKGHLLIHSRPRSSSVKRKRVSHGSHSPPKEKCKRKRSTRRSIMPRLQLCRSEGRLQHVAGPALEALSCGESSYDDYFSPDNLKERYSENLPPESQLPSSPAQLSCRSLSKKERTSIFEMSDFSCVGKKTRTVDITNFTAKTISSPRKTGNGEGRATSSCVTSAPEEALRCCRQAGKEDACPEGNGFSYTIEDPALPKGHDDDLTPLEGSLEEMKEAVGLKSTQNKGTTSKISNSSEGEAQSEHEPCFIVDCNMETSTEEKENLPGGYSGSVKNRPTRHDVLDDSCDGFKDLIKPHEELKKSGRGKKPTRTLVMTSMPSEKQNVVIQVVDKLKGFSIAPDVCETTTHVLSGKPLRTLNVLLGIARGCWVLSYDWVLWSLELGHWISEEPFELSHHFPAAPLCRSECHLSAGPYRGTLFADQPVMFVSPASSPPVAKLCELVHLCGGRVSQVPRQASIVIGPYSGKKKATVKYLSEKWVLDSITQHKVCAPENYLLSQ

SEQ ID NO: 7980 - protein, 1053 aa, Homo sapiens
MSRRKQAKPQHINSEEDQGEQQPQQQTPEFADAAPAAPAAGELGAPVNHPGNDEVASEDEATVKRLRREETHVCEKCCAEFFSISEFLEHKKNCTKNPPVLIMNDSEGPVPSEDFSGAVLSHQPTSPGSKDCHRENGGSSEDMKEKPDAESVVYLKTETALPPTPQDISYLAKGKVANTNVTLQALRGTKVAVNQRSADALPAPVPGANSIPWVLEQILCLQQQQLQQIQLTEQIRIQVNMWASHALHSSGAGADTLKTLGSHMSQQVSAAVALLSQKAGSQGLSLDALKQAKLPHANIPSATSSLSPGLAPFTLKPDGTRVLPNVMSRLPSALLPQAPGSVLFQSPFSTVALDTSKKGKGKPPNISAVDVKPKDEAALYKHKCKYCSKVFGTDSSLQIHLRSHTGERPFVCSVCGHRFTTKGNLKVHFHRHPQVKANPQLFAEFQDKVAAGNGIPYALSVPDPIDEPSLSLDSKPVLVTTSVGLPQNLSSGTNPKDLTGGSLPGDLQPGPSPESEGGPTLPGVGPNYNSPRAGGFQGSGTPEPGSETLKLQQLVENIDKATTDPNECLICHRVLSCQSSLKMHYRTHTGERPFQCKICGRAFSTKGNLKTHLGVHRTNTSIKTQHSCPICQKKFTNAVMLQQHIRMHMGGQIPNTPLPENPCDFTGSEPMTVGENGSTGAICHDDVIESIDVEEVSSQEAPSSSSKVPTPLPSIHSASPTLGFAMMASLDAPGKVGPAPFNLQRQGSRENGSVESDGLTNDSSSLMGDQEYQSRSPDILETTSFQALSPANSQAESIKSKSPDAGSKAESSENSRTEMEGRSSLPSTFIRAPPTYVKVEVPGTFVGPSTLSPGMTPLLAAQPRRQAKQHGCTRCGKNFSSASALQIHERTHTGEKPFVCNICGRAFTTKGNLKVHYMTHGANNNSARRGRKLAIENTMALLGTDGKRVSEIFPKEILAPSVNVDPVVWNQYTSMLNGGLAVKTNEISVIQSGGVPTLPVSLGATSVVNNATVSKMDGSQSGISADVEKPSATDGVPKHQFPHFLEENKIAVS

SEQ ID NO: 7981 - protein, 468 aa, Homo sapiens
MAASSNSSLSGSSVSSDAEEYQPPIWKSYLYQLQQEAPRPKRIICPREVENRPKYYGREFHGIISREQADELLGGVEGAYILRESQRQPGCYTLALRFGNQTLNYRLFHDGKHFVGEKRFESIHDLVTDGLITLYIETKAAEYISKMTTNPIYEHIGYATLLREKVSRRLSRSKNEPRKTNVTHEEHTAVEKISSLVRRAALTHNDNHFNYEKTHNFKVHTFRGPHWCEYCANFMWGLIAQGVRCSDCGLNVHKQCSKHVPNDCQPDLKRIKKVYCCDLTTLVKAHNTQRPMVVDICIREIEARGLKSEGLYRVSGFTEHIEDVKMAFDRDGEKADISANVYPDINIITGALKLYFRDLPIPVITYDTYSKFIDAAKISNADERLEAVHEVLMLLPPAHYETLRYLMIHLKKVTMNEKDNFMNAENLGIVFGPTLMRPPEDSTLTTLHDMRYQKLIVQILIENEDVLF

SEQ ID NO: 7982 - protein, 2089 aa, Homo sapiens
MEDTQAIDWDVEEEEETEQSSESLRCNVEPVGRLHIFSGAHGPEKDFPLHLGKNVVGRMPDCSVALPFPSISKQHAEIEILAWDKAPILRDCGSLNGTQILRPPKVLSPGVSHRLRDQELILFADLLCQYHRLDVSLPFVSRGPLTVEETPRVQGETQPQRLLLAEDSEEEVDFLSERRMVKKSRTTSSSVIVPESDEEGHSPVLGGLGPPFAFNLNSDTDVEEGQQPATEEASSAARRGATVEAKQSEAEVVTEIQLEKDQPLVKERDNDTKVKRGAGNGVVPAGVILERSQPPGEDSDTDVDDDSRPPGRPAEVHLERAQPFGFIDSDTDAEEERIPATPVVIPMKKRKIFHGVGTRGPGAPGLAHLQESQAGSDTDVEEGKAPQAVPLEKSQASMVINSDTDDEEEVSAALTLAHLKESQPAIWNRDAEEDMPQRVVLLQRSQTTTERDSDTDVEEEELPVENREAVLKDHTKIRALVRAHSEKDQPPFGDSDDSVEADKSSPGIHLERSQASTTVDINTQVEKEVPPGSAIMHIKKHQVSVEGTNQTDVKAVGGPAKLLVVSLEEAWPLHGDCETDAEEGTSLTASVVADVRKSQLPAEGDAGAEWAAAVLKQERAHEVGAQGGPPVAQVEQDLPISRENLTDLVVDTDTLGESTQPQREGAQVPTGREREQHVGGTKDSEDNYGDSEDLDLQATQCFLENQGLEAVQSMEDEPTQAFMLTPPQELGPSHCSFQTTGTLDEPWEVLATQPFCLRESEDSETQPFDTHLEAYGPCLSPPRAIPGDQHPESPVHTEPMGIQGRGRQTVDKVMGIPKETAERVGPERGPLERETEKLLPERQTDVTGEEELTKGKQDREQKQLLARDTQRQESDKNGESASPERDRESLKVEIETSEEIQEKQVQKQTLPSKAFEREVERPVANRECDPAELEEKVPKVILERDTQRGEPEGGSQDQKGQASSPTPEPGVGAGDLPGPTSAPVPSGSQSGGRGSPVSPRRHQKGLLNCKMPPAEKASRIRAAEKVSRGDQESPDACLPPAVPEAPAPPQKPLNSQSQKHLAPPPLLSPLLPSIKPTVRKTRQDGSQEAPEAPLSSELEPFHPKPKIRTRKSSRMTPFPATSAAPEPHPSTSTAQPVTPKPTSQATRSRTNRSSVKTPEPVVPTAPELQPSTSTDQPVTSEPTSQVTRGRKSRSSVKTPETVVPTALELQPSTSTDRPVTSEPTSQATRGRKNRSSVKTPEPVVPTAPELQPSTSTDQPVTSEPTYQATRGRKNRSSVKTPEPVVPTAPELRPSTSTDRPVTPKPTSRTTRSRTNMSSVKTPETVVPTAPELQISTSTDQPVTPKPTSRTTRSRTNMSSVKNPESTVPIAPELPPSTSTEQPVTPEPTSRATRGRKNRSSGKTPETLVPTAPKLEPSTSTDQPVTPEPTSQATRGRTNRSSVKTPETVVPTAPELQPSTSTDQPVTPEPTSQATRGRTDRSSVKTPETVVPTAPELQASASTDQPVTSEPTSRTTRGRKNRSSVKTPETVVPAAPELQPPTSTDRPVTPEPTSRATRGRTNRSSVKTPESIVPIAPELQPSTSRNQLVTPEPTSRATRCRTNRSSVKTPEPVVPTAPEPHPTTSTDQPVTPKLTSRATRRKTNRSSVKTPKPVEPAASDLEPFTPTDQSVTPEAIAQGGQSKTLRSSTVRAMPVPTTPEFQSPVTTDQPISPEPITQPSCIKRQRAAGNPGSLAAPIDHKPCSAPLEPKSQASRNQRWGAVRAAESLTAIPEPASPQLLETPIHASQIQKVEPAGRSRFTPELQPKASQSRKRSLATMDSPPHQKQPQRGEVSQKTVIIKEEEEDTAEKPGKEEDVVTPKPGKRKRDQAEEEPNRIPSRSLRRTKLNQESTAPKVLFTGVVDARGERAVLALGGSLAGSAAEASHLVTDRIRRTVKFLCALGRGIPILSLDWLHQSRKAGFFLPPDEYVVTDPEQEKNFGFSLQDALSRARERRLLEGYEIYVTPGVQPPPPQMGEIISCCGGTYLPSMPRSYKPQRVVITCPQDFPHCSIPLRVGLPLLSPEFLLTGVLKQEAKPEAFVLSPLEMSST

SEQ ID NO: 7983 - protein, 281 aa, Homo sapiens
MAQSGLTATSASQVQAILLPQPASVRHYAWVVDQIDTLTSDLQLEDEMTDSSKTDTLNSSSSGTTASSLEKIKVQANAPLIKPPAHPSAILTVLRKPNPPPPPPRLTPVKCEDPKRVVPTANPVKTNGTLLRNGGLPGGPNKIPNGDICCIPNSNLDKAPVQLLMHRPEKDRCPQAGPRERVRFNEKVQYHGYCPDCDTRYNIKNREVHLHSEPVHPPGKIPHQGPPLPPTPHLPPFPLENGGMGISHSNSFPPIRPATVPPPTAPKPQKTILRKSTTTTV

SEQ ID NO: 7984 - protein, 558 aa, Homo sapiens
MEAAAQFFVESPDVVYGPEAIEAQYEYRTTRVSREGGVLKVHPTSTRFTFRTARQVPRLGVMLVGWGGNNGSTLTAAVLANRLRLSWPTRSGRKEANYYGSLTQAGTVSLGLDAEGQEVFVPFSAVLPMVAPNDLVFDGWDISSLNLAEAMRRAKVLDWGLQEQLWPHMEALRPRPSVYIPEFIAANQSARADNLIPGSRAQQLEQIRRDIRDFRSSAGLDKVIVLWTANTERFCEVIPGLNDTAENLLRTIELGLEVSPSTLFAVASILEGCAFLNGSPQNTLVPGALELAWQHRVFVGGDDFKSGQTKVKSVLVDFLIGSGLKTMSIVSYNHLGNNDGENLSAPLQFRSKEVSKSNVVDDMVQSNPVLYTPGEEPDHCVVIKYVPYVGDSKRALDEYTSELMLGGTNTLVLHNTCEDSLLAAPIMLDLALLTELCQRVSFCTDMDPEPQTFHPVLSLLSFLFKAPLVPPGSPVVNALFRQRSCIENILRACVGLPPQNHMLLEHKMERPGPSLKRVGPVAATYPMLNKKGPVPAATNGCTGDANGHLQEEPPMPTT

SEQ ID NO: 7985 - protein, 430 aa, Homo sapiens
MVAPNDLVFDGWDISSLNLAEAMRRAKVLDWGLQEQLWPHMEALRPRPSVYIPEFIAANQSARADNLIPGSRAQQLEQIRRDIRDFRSSAGLDKVIVLWTANTERFCEVIPGLNDTAENLLRTIELGLEVSPSTLFAVASILEGCAFLNGSPQNTLVPGALELAWQHRVFVGGDDFKSGQTKVKSVLVDFLIGSGLKTMSIVSYNHLGNNDGENLSAPLQFRSKEVSKSNVVDDMVQSNPVLYTPGEEPDHCVVIKYVPYVGDSKRALDEYTSELMLGGTNTLVLHNTCEDSLLAAPIMLDLALLTELCQRVSFCTDMDPEPQTFHPVLSLLSFLFKAPLVPPGSPVVNALFRQRSCIENILRACVGLPPQNHMLLEHKMERPGPSLKRVGPVAATYPMLNKKGPVPAATNGCTGDANGHLQEEPPMPTT

SEQ ID NO: 7986 - protein, 526 aa, Homo sapiens [sequence omitted]

SEQ ID NO: 7987 - protein, 558 aa, Homo sapiens [sequence omitted]

SEQ ID NO: 7988 - protein, 162 aa, Homo sapiens
RGPAPPRTLPSTELGAAGLQSPSGLRSWRSRGPRPELAPEQFVIYQVGLIPSQYYGVLGNKDLEGFKTLTFLAVMLIVLNSTGPAHQPGRGAILPAAQQHGQQAHHLPVHPRLLHLPVLPKHRLARACEHLRVFHPGDRGEQNFDGPHCDEAGASGEAGGRF

SEQ ID NO: 7989 - protein, 515 aa, Homo sapiens
MPNTNGSIGHSPLSLSAQSVMEELNTAPVQESPPLAMPPGNSHGLEVGSLAEVKENPPFYGVIRWIGQPPGLNEVLAGLELEDECAGCTDGTFRGTRYFTCALKKALFVKLKSCRPDSRFASLQPVSNQIERCNSLAFGGYLSEVVEENTPPKMEKEGLEIMIGKKKGIQGHYNSCYLDSTLFCLFAFSSVLDTVLLRPKEKNDVEYYSETQELLRTEIVNPLRIYGYVCATKIMKLRKILEKVEAASGFTSEEKDPEEFLNILFHHILRVEPLLKIRSAGQKVQDCYFYQIFMEKNEKVGVPTIQQLLEWSFINSNLKFAEAPSCLIIQMPRFGKDFKLFKKIFPSLELIYQIYLKTLPDSAGYVEGLQCMSVENATTIRTFSAGKIKQFCKTCNTQVHLHPKRLNHKYNPVSLPKDLPDWDWRHGCIPCQNMELFAVLCIETSHYVAFVKYGKDDSAWLFFDSMADRDGGQNGFNIPQVTPCPEVGEYLKMSLEDLHSLDSRRIPRLCTKTAL

SEQ ID NO: 7990 - protein, 1883 aa, Homo sapiens
MPVGRIECPSSPSFPRDISHECRVCGVTEVGLSAYAKHISGQLHKDNVDAQEREDDGKGEEEEEDYFDKELIQLIKQRKEQSRQDEPSNSNQEINSDDRRPQWRREDRIPYQDRESYSQPAWHHRGPPQRDWKWEKDGFNNTRKNSFPHSLRNGGGPRGRSGWHKGVAGGSSTWFHNHSNSGGGWLSNSGAVDWNHNGTGRNSSWLSEGTGGFSSWHMNNSNGNWKSSVRSTNNWNYSGPGDKFQPGRNRNSNCQMEDMTMLWNKKSNKSNKYSHDRYNWQRQENDKLGTVATYRGPSEGFTSDKFPSEGLLDFNFEQLESQTTKQADTATSKVSGKNGSAAREKPRRWTPYPSQKTLDLQSGLKDITGNKSEMIEKPLFDFSLITTGIQEPQTDETRNSPTQKTQKEIHTGSLNHKASSDSAASFEVVRQCPTAEKPEQEHTPNKMPSLKSPLLPCPATKSLSQKQDPKNISKNTKTNFFSPGEHSNPSNKPTVEDNHGPYISKLRSSCPHVLKGNKSTFGSQKQSGDNLNDTLRKAKEVLQCHESLQNPLLSTSKSTRNYAKASRNVEESEKGSLKIEFQVHALEDESDGETSDTEKHGTKIGTLGSATTELLSGSTRTADEKEEDDRILKTSRELSTSPCNPIVRQKESELQMTSAASPHPGLLLDLKTSLEDAQVDDSIKSHVSYETEGFESASLDAELQKSDISQPSGPLLPELSKLGFPASLQRDLTRHISLKSKTGVHLPEPNLNSARRIRNISGHRKSETEKESGLKPTLRQILNASRRNVNWEQVIQQVTKKKQELGKGLPRFGIEMVPLVQNEQEALDLDGEPDLSSLEGFQWEGVSISSSPGLARKRSLSESSVIMDRAPSVYSFFSEEGTGKENEPQQMVSPSNSLRAGQSQKATMHLKQEVTPRAASLRTGERAENVATQRRHSAQLSSDHIIPLMHLAKDLNSQERSIPPSENQNSQESNGEGNCLSSSASSALAISSLADAATDSSCTSGAEQNDGQSIRKKRRATGDGSSPELPSLERKNKRRKIKGKKERSQVDQLLNISLREEELSKSLQCMDNNLLQARAALQTAYVEVQRLLMLKQQITMEMSALRTHRIQILQGLQETYEPSEHPDQVPCSLTRERRNSRSQTSIDAALLPTPFFPLFLEPPSSHVSPSPTGASLQITTSPTFQTHGSVPAPDSSVQIKQEPMSPEQDENVNAVPPSSACNVSKELLEANREISDSCPVYPVITARLSLPESTESFHEPSQELKFSVEQRNTRNRENSPSSQSAGLSSINKEGEEPTKGNSGSEACTSSFLRLSFASETPLEKEPHSPADQPEQQAESTLTSAETRGSKKKKKLRKKKSLRAAHVPENSDTEQDVLTVKPVRKVKAGKLIKGGKVTTSTWEDSRTGREQESVRDEPDSDSSLEVLEIPNPQLEVVAIDSSESGEEKPDSPSKKDIWNSTEQNPLETSRSGCDEVSSTSEIGTRYKDGIPVSVAETQTVISSIKGSKNSSEISSEPGDDDEPTEGSFEGHQAAVNAIQIFGNLLYTCSADKTVRVYNLVSRKCIGVFEGHTSKVNCLLVTQTSGKNAALYTGSSDHTIRCYNVKSRECVEQLQLEDRVLCLHSRWRILYAGLANGTVVTFNIKNNKRLEIFECHGPRAVSCLATAQEGARKLLVVGSYDCTISVRDARNGLLLRTLEGHSKTILCMKVVNDLVFSGSSDQSVHAHNIHTGELVRIYKGHNHAVTVVNILGKVMVTACLDKFVRVYELQSHDRLQVYGGHKDMIMCMTIHKSMIYTGCYDGSIQAVRLNLMQNYRCWWHGCSLIFGVVDHLKQHLLTDHTNPNFQTLKCRWKNCDAFFTARKGSKQDAAGHIERHAEDDSKIDS

SEQ ID NO: 7991 - protein, 348 aa, Homo sapiens
GYCPSWALNWEYRKKGIMEEIVNCDADIISLQEVETEQYFTLFLPALKERGYDGFFSPKSRAKIMSEQERKHVDGCAIFFKTEKFTLVQKHTVEFNQVAMANSDGSEAMLNRVMTKDNIGVAVVLEVHKELFGAGMKPIHAADKQLLIVANAHMHWDPEYSDVKLIQTMMFVSEVKNILEKASSRPGSPTADPNSIPLVLCADLNSLPDSGVVEYLSNGGVADNHKDFKELRYNECLMNFSCNGKNGSSEGRITHGFQLKSAYENNLMPYTNYTFDFKGVIDYIFYSKTHMNVLGVLGPLDPQWLVENNITGCPHPHIPSDHFSLLTQLELHPPLLPLVNGVHLPNRR

SEQ ID NO: 7992 - protein, 483 aa, Homo sapiens [sequence omitted]

SEQ ID NO: 7993 - protein, 189 aa, Homo sapiens
MPQTVILPGPAPWGFRLSGGIDFNQPLVITRITPGSKAAAANLCPGDVILAIDGFGTESMTHADAQDRIKAAAHQLCLKIDRGETHLWSPQVSEDGKAHPFKINLESEPQEFKPIGTAHNRRAQPFVAAANIDDKRQVVSASYNSPIGLYSTSNIQDALHGQLRGLIPSSPQKTGTTLNTSIIFGPNLS

SEQ ID NO: 7994 - protein, 405 aa, Homo sapiens
MDSLVTANTKFCFDLFQEIGKDDRHKNIFFSPLSLSAALGMVRLGARSDSAHQIDEVLHFNEFSQNESKEPDPCLKSNKQKAGSLNNESGLVSCYFGQLLSKLDRIKTDYTLSIANRLYGEQEFPICQEYLDGVIQFYHTTIESVDFQKNPEKSRQEINFWVECQSQGKIKELFSKDAINAETVLVLVNAVYFKAKWETYFDHENTVDAPFCLNANENKSVKMMTQKGLYRIGFIEEVKAQILEMRYTKGKLSMFVLLPSHSKDNLKGLEELERKITYEKMVAWSSSENMSEESVVLSFPRFTLEDSYDLNSILQDMGITDIFDETRADLTGISPSPNLYLSKIIHKTFVEVDENGTQAAAATGAVVSERSLRSWVEFNANHPFLFFIRHNKTQTILFYGRVCSP

SEQ ID NO: 7995 - protein, 1388 aa, Homo sapiens
MAPGCKTELRSVTNGQSNQPSNEGDAIKVFVRIRPPAERSGSADGEQNLCLSVLSSTSLRLHSNPEPKTFTFDHVADVDTTQESVFATVAKSIVESCMSGYNGTIFAYGQTGSGKTFTMMGPSESDNFSHNLRGVIPRSFEYLFSLIDREKEKAGAGKSFLCKCSFIEIYNEQIYDLLDSASAGLYLREHIKKGVFVVGAVEQVVTSAAEAYQVLSGGWRNRRVASTSMNRESSRSHAVFTITIESMEKSNEIVNIRTSLLNLVDLAGSERQKDTHAEGMRLKEAGNINRSLSCLGQVITALVDVGNGKQRHVCYRDSKLTFLLRDSLGGNAKTAIIANVHPGSRCFGETLSTLNFAQRAKLIKNKAVVNEDTQGNVSQLQAEVKRLKEQLAELASGQTPPESFLTRDKKKTNYMEYFQEAMLFFKKSEQEKKSLIEKVTQLEDLTLKKEKFIQSNKMIVKFREDQIIRLEKLHKESRGGFLPEEQDRLLSELRNEIQTLREQIEHHPRVAKYAMENHSLREENRRLRLLEPVKRAQEMDAQTIAKLEKAFSEISGMEKSDKNQQGFSPKAQKEPCLFANTEKLKAQLLQIQTELNNSKQEYEEFKELTRKRQLELESELQSLQKANLNLENLLEATKACKRQEVSQLNKIHAETLKIITTPTKAYQLHSRPVPKLSPEMGSFGSLYTQNSSILDNDILNEPVPPEMNEQAFEAISEELRTVQEQMSALQAKLDEEEHKNLKLQQHVDKLEHHSTQMQELFSSERIDWTKQQEELLSQLNVLEKQLQETQTKNDFLKSEVHDLRVVLHSADKELSSVKLEYSSFKTNQEKEFNKLSERHMHVQLQLDNLRLENEKLLESKACLQDSYDNLQEIMKFEIDQLSRNLQNFKKENETLKSDLNNLMELLEAEKERNNKLSLQFEEDKENSSKEILKVLEAVRQEKQKETAKCEQQMAKVQKLEESLLATEKVISSLEKSRDSDKKVVADLMNQIQELRTSVCEKTETIDTLKQELKDINCKYNSALVDREESRVLIKKQEVDILDLKETLRLRILSEDIERDMLCEDLAHATEQLNMLTEASKKHSGLLQSAQEELTKKEALIQELQHKLNQKKEEVEQKKNEYNFKMRQLEHVMDSAAEDPQSPKTPPHFQTHLAKLLETQEQEIEDGRASKTSLEHLVTKLNEDREVKNAEILRMKEQLREMENLRLESQQLIEKNWLLQGQLDDIKRQKENSDQNHPDNQQLKNEQEESIKERLAKSKIVEEMLKMKADLEEVQSALYNKEMECLRMTDEVERTQTLESKAFQEKEQLRSKLEEMYEERERTSQEMEMLRKQVECLAEENGKLVGHQNLHQKIQYVVRLKKENVRLAEETEKLRAENVFLKEKKRSES

SEQ ID NO: 7996 - protein, 576 aa, Homo sapiens [sequence omitted]

SEQ ID NO: 7997 - protein, 515 aa, Homo sapiens [sequence omitted]

SEQ ID NO: 7998 - protein, 460 aa, Homo sapiens [sequence omitted]

SEQ ID NO: 7999 - protein, 233 aa, Homo sapiens
MGEPQQVSALPPPPMQYIKEYTDENIQEGLAPKPPPPIKDSYMMFGNQFQCDDLIIRPLESQGIERLHPMQFDHKKELRKLNMSILINFLDLLDILIRSPGSIKREEKLEDLKLLFVHVHHLINEYRPHQARETLRVMMEVQKRQRLETAERFQKHLERVIEMIQNCLASLPDDLPHSEAGMRVKTEPMDADDSNNCTGQNEHQRENSGHRRDQIIEKDAALCVLIDEMNERP

SEQ ID NO: 8000 - protein, 167 aa, Homo sapiens
MVSNFFHVIQVFEKSATLISKTEHIGFVIYSWRKSTTHLGSRRKFAISIYLSEVSLQKYDCPFSGTSFVVFSLFLICAMAGDVVYADIKTVRTSPLELAFPLQRSVSFNFSTVHKSCPAKDWKVHKGKCYWIAETKKSWNKSQNDCAINNSYLMVIQDITAMVRFNI

SEQ ID NO: 8001 - protein, 780 aa, Homo sapiens
MEDLSSPDSTLLQGGHNLLSSASFQEAVTFKDVIVDFTQEEWKQLDPGQRDLFRDVTLENYTHLVSIGLQVSKPDVISQLEQGTEPWIMEPSIPVGTCADWETRLENSVSAPEPDISEEELSPEVIVEKHKRDDSWSSNLLESWEYEGSLERQQANQQTLPKEIKVTEKTIPSWEKGPVNNEFGKSVNVSSNLVTQEPSPEETSTKRSIKQNSNPVKKEKSCKCNECGKAFSYCSALIRHQRTHTGEKPYKCNECEKAFSRSENLINHQRIHTGDKPYKCDQCGKGFIEGPSLTQHQRIHTGEKPYKCDECGKAFSQRTHLVQHQRIHTGEKPYTCNECGKAFSQRGHFMEHQKIHTGEKPFKCDECDKTFTRSTHLTQHQKIHTGEKTYKCNECGKAFNGPSTFIRHHMIHTGEKPYECNECGKAFSQHSNLTQHQKTHTGEKPYDCAECGKSFSYWSSLAQHLKIHTGEKPYKCNECGKAFSYCSSLTQHRRIHTREKPFECSECGKAFSYLSNLNQHQKTHTQEKAYECKECGKAFIRSSSLAKHERIHTGEKPYQCHECGKTFSYGSSLIQHRKIHTGERPYKCNECGRAFNQNIHLTQHKRIHTGAKPYECAECGKAFRHCSSLAQHQKTHTEEKPYQCNKCEKTFSQSSHLTQHQRIHTGEKPYKCNECDKAFSRSTHLTEHQNTHTGEKPYNCNECRKTFSQSTYLIQHQRMHTGEKPYKCNECGNAFSDCSSLIQHQRTHTGEEPYECKQCGKAFSRSTYLTQHQRSHAGEK

SEQ ID NO: 8002 - protein, 892 aa, Homo sapiens
MEDLSSPDSTLLQGGHNLLSSASFQEAVTFKDVIVDFTQEEWKQLDPGQRDLFRDVTLENYTHLVSIGLQVSKPDVISQLEQGTEPWIMEPSIPVGTCADWETRLENSVSAPEPDISEEELSPEVIVEKHKRDDSWSSNLLESWEYEGSLERQQANQQTLPKEIKVTEKTIPSWEKGPVNNEFGKSVNVSSNLVTQEPSPEETSTKRSIKQNSNPVKKEKSCKCNECGKAFSYCSALIRHQRTHTGEKPYKCNECEKAFSRSENLINHQRIHTGDKPYKCDQCGKGFIEGPSLTQHQRIHTGEKPYKCDECGKAFSQRTHLVQHQRIHTGEKPYTCNECGKAFSQRGHFMEHQKIHTGEKPFKCDECDKTFTRSTHLTQHQKIHTGEKTYKCNECGKAFNGPSTFIRHHMIHTGEKPYECNECGKAFSQHSNLTQHQKTHTGEKPYDCAECGKSFSYWSSLAQHLKIHTGEKPYKCNECGKAFSYCSSLTQHRRIHTREKPFECSECGKAFSYLSNLNQHQKTHTQEKAYECKECGKAFIRSSSLAKHERIHTGEKPYQCHECGKTFSYGSSLIQHRKIHTGERPYKCNECGRAFNQNIHLTQHKRIHTGAKPYECAECGKAFRHCSSLAQHQKTHTEEKPYQCNKCEKTFSQSSHLTQHQRIHTGEKPYKCNECDKAFSRSTHLTEHQNTHTGEKPYNCNECRKTFSQSTYLIQHQRIHSGEKPFGCNDCGKSFRYRSALNKHQRLHPGREKPYKCSECGKAFSYCLVLNQHQRIHSGEKPYEGTECGKTFSRSTYLTQHQRIHTGEKPYTCLECGKAFSQNTHLTLHQRIHTGEKPYECNECGRSFSQSAHLTQHQRMYTGEKLYECNECEKAFHDHSALIQHHIVHTAE

SEQ ID NO: 8003 - protein, 268 aa, Homo sapiens
  VARIANT 231: Xaa = Any Amino Acid
MVRQTNNVQICATVRGLLPILDSSGPCCTLKEFLNVQENSGHPLDTPFSWWDLPQQAHQRGGLHHPDIAQAAGTVKIWTSEHVFDHSWETVTTAAMQKYPNPYEPTVVGVDVLDRHVDPSGKLHSHRLLSTEWGLPSIVKSLIGAARMKTYVQEHSVVDPVEKTMKLKSTNISFTDMVSADERLIYKPRPRDPEKTILTQEAIITMKGVSLSSYFEELMASMISSNTSKGXEAIEWVIHKLNAEIEELTASARGSIRTPMAAAAFADK

SEQ ID NO: 8004 - protein, 763 aa, Homo sapiens
MVACRAIGILSRFSAFRILRSRGYICRNFTGSSALLTRTHINYGVKGDVAVVRINSPNSKVNTLSKELHSEFSEVMNEIWASDQIRSAVLISSKPGCFIAGADINMLAACKTLQEVTQLSQEAQRIVEKLEKSTKPIVAAINGSCLGGGLEVAISCQYRIATKDRKTVLGTPEVLLGALPGAGGTQRLPKMVGVPAALDMMLTGRSIRADRAKKMGLVDQLVEPLGPGLKPPEERTIEYLEEVAITFAKGLADKKISPKRDKGLVEKLTAYAMTIPFVRQQVYKKVEEKVRKQTKGLYPAPLKIIDVVKTGIEQGSDAGYLCESQKFGELVMTKESKALMGLYHGQVLCKKNKFGAPQKDVKHLAILGAGLMGAGIAQVSVDKGLKTILKDATLTALDRGQQQVFKGLNDKVKKKALTSFERDSIFSNLTGQLDYQGFEKADMVIEAVFEDLSLKHRVLKEVEAVIPDHCIFASNTSALPISEIAAVSKRPEKVIGMHYFSPVDKMQLLEIITTEKTSKDTSASAVAVGLKQGKVIIVVKDGPGFYTTRCLAPMMSEVIRILQEGVDPKKLDSLTTSFGFPVGAATLVDEVGVDVAKHVAEDLGKVFGERFGGGNPELLTQMVSKGFLGRKSGKGFYIYQEGVKRKDLNSDMDSILASLKLPPKSEVSSDEDIQFRLVTRFVNEAVMCLQEGILATPAEGDIGAVFGLGFPPCLGGPFRFVDLYGAQKIVDRLKKYEAAYGKQFTPCQLLADHANSPNKKFYQ

SEQ ID NO: 8005 - protein, 445 aa, Homo sapiens
METRTEDGGLTRRPTLASSWDVAGGALTHSLLLTRAGLGPGDFDWEELLAPPAPGQDLVILKRNHNNKDENPCFLYLRCGPDGGEEIASIGILSSARNMEVYLGEEYCGTSRGKNVCTVLDDSEHEKIILYKKNLKLESSTHACKIKLLSFGERQCVFISKVVVHMRSVFANSSTSSPALGSRIDLDKVQTIMESMGSKLSPGAQQLMDMVRCQQRNCIPIGEQLQSVLGNSGYKHMIGLQSSSTLGTLNKSSSTPFPFRTGLTSGNVTENLQTYIDKSTQLPGGENSTKLDECKVMPQNHSFLENDLKNAMASFLPKKVSDNSNIPNSELLPFLQNLCSQVNHLHVGNKTECQENITKHGERILGVGMEEQSICSYLEKILSKNMELMEKKLMDYIDQRIHELQEHIDDKIALLLDLLQNPNSPPTGIPLRHYDSGERLSNGER

SEQ ID NO: 8006 - protein, 1047 aa, Homo sapiens
MDANSKDKPPETKESAMNNAGNASFILGTGKIVTPQKHAELPPNPCTPDTFKSPLNFSTVTVEQLGITPESFVRNSAGKSSSYLKKCRRRSAVGARGSPETNHLIRFIARQQNIKNARKSPLAQDSPSQGSPALYRNVNTLRERISAFQSAFHSIKENEKMTGCLEFSEAGKESEMTDLTRKEGLSACQQSGFPAVLSSKRRRISYQRDSDENLTDAEGKVIGLQIFNIDTDRACAVETSVDLSEISSKLGSTQSGFLVEESLPLSELTETSNAGNPTSNSANLPAFSAPAPELLIFALKVADCVVGKGSSDAVSPDTFTAEVSSDAVPDVRSPATPACRRDLPTPKTFVLRSVLKKPSVKMCLESLQEHCNNLYDDDGTHPSLISNLPNCCKEKEAEDEENFEAPAFLNMRKRKRVTFGEDLSPEVFDESLPANTPLRKGGTPVCKKDFSGLSSLLLEQSPVPEPLPQPDFDDKGENLENIEPLQVSFAVLSSPNKSSISETLSGTDTFSSSNNHEKISSPKVGRITRTSNRRNQLVSVVEESVCNLLNTEVQPCKEKKINRRKSQETKCTKRALPKKSQVLKSCRKKKGKGKKSVQKSLYGERDIASKKPLLSPIPELPEVPEMTPSIPSIRRLGSGYFSSNGKLEEVKTPKNPVKRKDLLRHDPDLHMHQGYDKYDVSEFCSYIKSSSSLGNATSDEDPNTNIMNINENKNIPKAKNKSESENEPKAGTDSPVSCASVTEERVASDSPKPALTLQQGQEFSAGGQNAENLCQFFKISPDLNIKCERKDDFLGAAEGKLQCNRLMPNSQKDCHCLGDVLIENTKESKSQSEDLGRKPMESSSVVSCRDRKDRRRSMCYSDGRSLHLEKNGNHTPSSSVGSSVEISLENSELFKDLSDAIEQTFQRRNSETKVRRSTRLQKDLENEGLVWISLPLPSTSQKAKRRTICTFDSSGFESMSPIKETVSSRQKPQMAPPVSDPENSQGPAAGSSDEPGKRRKSFCISTLANTKATSQFKGYRRRSSLNGKGESSLTALERIEHNGERKQ

SEQ ID NO: 8007 - protein, 568 aa, Homo sapiens
MAQVDSQDRWGEASPLSSLTEEAHDTQMLSMNLESDDEDGGEAEKEGTADPVACPRGSSPVTHENPDLPWPHPLGKEEEKFSDSSSAGGMGQKPVEMSGKASWSRDVTKINETQGSPGASRALGSLPSGLAHKLLGQMQPLGDRLPAGDDGYSGANQDAVLDVPPSFPSNGKYLCAHKSVDTSAGNSSLLCFPRPGSNWDLPTQETHTPAQASATPASLAAAVLAKARNSRKVQNQAGRREGGEAEARPYRCLRGGRAFQKPSKPLSPAETRGGAAKRYACELCGKAYSHRGTLQQHRRLHTGERPYQCSFCDKAYTWSSDHRKHIRTHTGEKPYPCPDCGKAFVRSSDLRKHQRNMHSNNKPFPCSECGLTFNKPLSLLRHQRTHLGAKPFRCPACDREFAVASRMVEHQRVHSGERPFPCPTCGKCFTKSSNLSEHQTLHTGQRPFKCADCGVAFAQPSRLVRHQRIHTGERPFPCTQCGQAFARSSTLKRHQQIHSGEKGFLCAECGRAFRIASELAQHIRMHNGERPYQCEDCGQAFTRSNHLQRHRAKHGTCKKEPIPSSSDE

SEQ ID NO: 8008 - protein, 482 aa, Homo sapiens
MPQLNGGGGDDLGANDELISFKDEGEQEEKSSENSSAERDLADVKSSLVNESETNQNSSSDSEAERRPPPRSESFRDKSRESLEEAAKRQDGGLFKGPPYPGYPFIMIPDLTSPYLPNGSLSPTARTLHFQSGSTHYSAYKTIEHQIAVQYLQMKWPLLDVQAGSLQSRQALKDARSPSPAHIVSNKVPVVQHPHHVHPLTPLITYSNEHFTPGNPPPHLPADVDPKTGIPRPPHPPDISPYYPLSPGTVGQIPHPLGWLVPQQGQPVYPITTGGFRHPYPTALTVNASMSRFPPHMVPPHHTLHTTGIPHPAIVTPTVKQESSQSDVGSLHSSKHQDSKKEEEKKKPHIKKPLNAFMLYMKEMRAKVVAECTLKESAAINQILGRRWHALSREEQAKYYELARKERQLHMQLYPGWSARDNYGKKKKRKRDKQPGETNEHSECFLNPCLSLPPITGEKKSAFATYKVKAAASAHPLQMEAY

SEQ ID NO: 8009 - protein, 596 aa, Homo sapiens
MPQLNGGGGDDLGANDELISFKDEGEQEEKSSENSSAERDLADVKSSLVNESETNQNSSSDSEAERRPPPRSESFRDKSRESLEEAAKRQDGGLFKGPPYPGYPFIMIPDLTSPYLPNGSLSPTARTYLQMKWPLLDVQAGSLQSRQALKDARSPSPAHIVSNKVPVVQHPHHVHPLTPLITYSNEHFTPGNPPPHLPADVDPKTGIPRPPHPPDISPYYPLSPGTVGQIPHPLGWLVPQQGQPVYPITTGGFRHPYPTALTVNASMSRFPPHMVPPHHTLHTTGIPHPAIVTPTVKQESSQSDVGSLHSSKHQDSKKEEEKKKPHIKKPLNAFMLYMKEMRAKVVAECTLKESAAINQILGRRWHALSREEQAKYYELARKERQLHMQLYPGWSARDNYGKKKKRKRDKQPGETNEHSECFLNPCLSLPPITDLSAPKKCRARFGLDQQNNWCGPCRRKKKCVRYIQGEGSCLSPPSSDGSLLDSPPPSPNLLGSPPRDAKSQTEQTQPLSLSLKPDPLAHLSMMPPPPALLLAEATHKASALCPNGALDLPPAALQPAAPSSSIAQPSTSSLHSHSSLAGTQPQPLSLVTKSLE

SEQ ID NO: 8010 - protein, 602 aa, Homo sapiens
MPQLNGGGGDDLGANDELISFKDEGEQEEKSSENSSAERDLADVKSSLVNESETNQNSSSDSEAERRPPPRSESFRDKSRESLEEAAKRQDGGLFKGPPYPGYPFIMIPDLTSPYLPNGSLSPTARTLHFQSGSTHYSAYKTIEHQIAVQYLQMKWPLLDVQAGSLQSRQALKDARSPSPAHIVSNKVPVVQHPHHVHPLTPLITYSNEHFTPGNPPPHLPADVDPKTGIPRPPHPPDISPYYPLSPGTVGQIPHPLGWLVPQQGQPVYPITTGGFRHPYPTALTVNASMSRFPPHMVPPHHTLHTTGIPHPAIVTPTVKQESSQSDVGSLHSSKHQDSKKEEEKKKPHIKKPLNAFMLYMKEMRAKVVAECTLKESAAINQILGRRWHALSREEQAKYYELARKERQLHMQLYPGWSARDNYGKKKKRKRDKQPGETNDANTPKKCRALFGLDRQTLWCKPCRRKKKCVRYIQGEGSCLSPPSSDGSLLDSPPPSPNLLGSPPRDAKSQTEQTQPLSLSLKPDPLAHLSMMPPPPALLLAEATHKASALCPNGALDLPPAALQPAAPSSSIAQPSTSSLHSHSSLAGTQPQPLSLVTKSLE

SEQ ID NO: 8011 - protein, 619 aa, Homo sapiens
MPQLNGGGGDDLGANDELISFKDEGEQEEKSSENSSAERDLADVKSSLVNESETNQNSSSDSEAERRPPPRSESFRDKSRESLEEAAKRQDGGLFKGPPYPGYPFIMIPDLTSPYLPNGSLSPTARTLHFQSGSTHYSAYKTIEHQIAVQYLQMKWPLLDVQAGSLQSRQALKDARSPSPAHIVSNKVPVVQHPHHVHPLTPLITYSNEHFTPGNPPPHLPADVDPKTGIPRPPHPPDISPYYPLSPGTVGQIPHPLGWLVPQQGQPVYPITTGGFRHPYPTALTVNASMSRFPPHMVPPHHTLHTTGIPHPAIVTPTVKQESSQSDVGSLHSSKHQDSKKEEEKKKPHIKKPLNAFMLYMKEMRAKVVAECTLKESAAINQILGRRWHALSREEQAKYYELARKERQLHMQLYPGWSARDNYGKKKKRKRDKQPGETNEHSECFLNPCLSLPPITDLSAPKKCRARFGLDQQNNWCGPCRRKKKCVRYIQGEGSCLSPPSSDGSLLDSPPPSPNLLGSPPRDAKSQTEQTQPLSLSLKPDPLAHLSMMPPPPALLLAEATHKASALCPNGALDLPPAALQPAAPSSSIAQPSTSSLHSHSSLAGTQPQPLSLVTKSLE

SEQ ID NO: 8012 - protein, 465 aa, Homo sapiens
MPQLNGGGGDDLGANDELISFKDEGEQEEKSSENSSAERDLADVKSSLVNESETNQNSSSDSEAERRPPPRSESFRDKSRESLEEAAKRQDGGLFKGPPYPGYPFIMIPDLTSPYLPNGSLSPTARTLHFQSGSTHYSAYKTIEHQIAVQYLQMKWPLLDVQAGSLQSRQALKDARSPSPAHIVSNKVPVVQHPHHVHPLTPLITYSNEHFTPGNPPPHLPADVDPKTGIPRPPHPPDISPYYPLSPGTVGQIPHPLGWLVPQQGQPVYPITTGGFRHPYPTALTVNASMSRFPPHMVPPHHTLHTTGIPHPAIVTPTVKQESSQSDVGSLHSSKHQDSKKEEEKKKPHIKKPLNAFMLYMKEMRAKVVAECTLKESAAINQILGRRWHALSREEQAKYYELARKERQLHMQLYPGWSARDNYGKKKKRKRDKQPGETNGEKKSAFATYKVKAAASAHPLQMEAY

SEQ ID NO: 8013 - protein, 602 aa, Homo sapiens
MPQLNGGGGDDLGANDELISFKDEGEQEEKSSENSSAERDLADVKSSLVNESETNQNSSSDSEAERRPPPRSESFRDKSRESLEEAAKRQDGGLFKGPPYPGYPFIMIPDLTSPYLPNGSLSPTARTLHFQSGSTHYSAYKTIEHQIAVQYLQMKWPLLDVQAGSLQSRQALKDARSPSPAHIVSNKVPVVQHPHHVHPLTPLITYSNEHFTPGNPPPHLPADVDPKTGIPRPPHPPDISPYYPLSPGTVGQIPHPLGWLVPQQGQPVYPITTGGFRHPYPTALTVNASMSRFPPHMVPPHHTLHTTGIPHPAIVTPTVKQESSQSDVGSLHSSKHQDSKKEEEKKKPHIKKPLNAFMLYMKEMRAKVVAECTLKESAAINQILGRRWHALSREEQAKYYELARKERQLHMQLYPGWSARDNYGKKKKRKRDKQPGETNDLSAPKKCRARFGLDQQNNWCGPCRRKKKCVRYIQGEGSCLSPPSSDGSLLDSPPPSPNLLGSPPRDAKSQTEQTQPLSLSLKPDPLAHLSMMPPPPALLLAEATHKASALCPNGALDLPPAALQPAAPSSSIAQPSTSSLHSHSSLAGTQPQPLSLVTKSLE

SEQ ID NO: 8014 - protein, 477 aa, Homo sapiens
MPQLNGGGGDDLGANDELISFKDEGEQEEKSSENSSAERDLADVKSSLVNESETNQNSSSDSEAERRPPPRSESFRDKSRESLEEAAKRQDGGLFKGPPYPGYPFIMIPDLTSPYLPNGSLSPTARTLHFQSGSTHYSAYKTIEHQIAVQYLQMKWPLLDVQAGSLQSRQALKDARSPSPAHIVSNKVPVVQHPHHVHPLTPLITYSNEHFTPGNPPPHLPADVDPKTGIPRPPHPPDISPYYPLSPGTVGQIPHPLGWLVPQQGQPVYPITTGGFRHPYPTALTVNASMSRFPPHMVPPHHTLHTTGIPHPAIVTPTVKQESSQSDVGSLHSSKHQDSKKEEEKKKPHIKKPLNAFMLYMKEMRAKVVAECTLKESAAINQILGRRWHALSREEQAKYYELARKERQLHMQLYPGWSARDNYGKKKKRKRDKQPGETNDLSAPKKCRARFGLDQQNNWCGPCRCKYSKEVSGTVRA

SEQ ID NO: 8015 - protein, 455 aa, Homo sapiens
MPQLNGGGGDDLGANDELISFKDEGEQEEKSSENSSAERDLADVKSSLVNESETNQNSSSDSEAERRPPPRSESFRDKSRESLEEAAKRQDGGLFKGPPYPGYPFIMIPDLTSPYLPNGSLSPTARTYLQMKWPLLDVQAGSLQSRQALKDARSPSPAHIVSNKVPVVQHPHHVHPLTPLITYSNEHFTPGNPPPHLPADVDPKTGIPRPPHPPDISPYYPLSPGTVGQIPHPLGWQGQPVYPITTGGFRHPYPTALTVNASMSRFPPHMVPPHHTLHTTGIPHPAIVTPTVKQESSQSDVGSLHSSKHQDSKKEEEKKKPHIKKPLNAFMLYMKEMRAKVVAECTLKESAAINQILGRRWHALSREEQAKYYELARKERQLHMQLYPGWSARDNYGKKKKRKRDKQPGETNEHSECFLNPCLSLPPITGEKKSAFATYKVKAAASAHPLQMEAY

SEQ ID NO: 8016 - protein, 494 aa, Homo sapiens
MPQLNGGGGDDLGANDELISFKDEGEQEEKSSENSSAERDLADVKSSLVNESETNQNSSSDSEAERRPPPRSESFRDKSRESLEEAAKRQDGGLFKGPPYPGYPFIMIPDLTSPYLPNGSLSPTARTLHFQSGSTHYSAYKTIEHQIAVQYLQMKWPLLDVQAGSLQSRQALKDARSPSPAHIVSNKVPVVQHPHHVHPLTPLITYSNEHFTPGNPPPHLPADVDPKTGIPRPPHPPDISPYYPLSPGTVGQIPHPLGWLVPQQGQPVYPITTGGFRHPYPTALTVNASMSRFPPHMVPPHHTLHTTGIPHPAIVTPTVKQESSQSDVGSLHSSKHQDSKKEEEKKKPHIKKPLNAFMLYMKEMRAKVVAECTLKESAAINQILGRRWHALSREEQAKYYELARKERQLHMQLYPGWSARDNYGKKKKRKRDKQPGETNEHSECFLNPCLSLPPITDLSAPKKCRARFGLDQQNNWCGPCRCKYSKEVSGTVRA

SEQ ID NO: 8017 - protein, 619 aa, Homo sapiens
MPQLNGGGGDDLGANDELISFKDEGEQEEKSSENSSAERDLADVKSSLVNESETNQNSSSDSEAERRPPPRSESFRDKSRESLEEAAKRQDGGLFKGPPYPGYPFIMIPDLTSPYLPNGSLSPTARTLHFQSGSTHYSAYKTIEHQIAVQYLQMKWPLLDVQAGSLQSRQALKDARSPSPAHIVSNKVPVVQHPHHVHPLTPLITYSNEHFTPGNPPPHLPADVDPKTGIPRPPHPPDISPYYPLSPGTVGQIPHPLGWLVPQQGQPVYPITTGGFRHPYPTALTVNASMSRFPPHMVPPHHTLHTTGIPHPAIVTPTVKQESSQSDVGSLHSSKHQDSKKEEEKKKPHIKKPLNAFMLYMKEMRAKVVAECTLKESAAINQILGRRWHALSREEQAKYYELARKERQLHMQLYPGWSARDNYGKKKKRKRDKQPGETNEHSECFLNPCLSLPPITDANTPKKCRALFGLDRQTLWCKPCRRKKKCVRYIQGEGSCLSPPSSDGSLLDSPPPSPNLLGSPPRDAKSQTEQTQPLSLSLKPDPLAHLSMMPPPPALLLAEATHKASALCPNGALDLPPAALQPAAPSSSIAQPSTSSLHSHSSLAGTQPQPLSLVTKSLE

SEQ ID NO: 8018 - protein, 408 aa, Homo sapiens
MDMHCKADPFSAMHPGHGGVNQLGGVFVNGRPLPDVVRQRIVELAHQGVRPCDISRQLRVSHGCVSKILGRYYETGSIKPGVIGGSKPKVATPKVVDKIAEYKRQNPTMFAWEIRDRLLAEGICDNDTVPSVSSINRIIRTKVQQPFHPTPDGAGTGVTAPGHTIVPSTASPPVSSASNDPVGSYSINGILGIPRSNGEKRKRDEDVSEGSVPNGDSQSGVDSLRKHLRADTFTQQQLEALDRVFERPSYPDVFQASEHIKSEQGNEYSLPALTPGLDEVKSSLSASTNPELGSNVSGTQTYPVVTGRDMASTTLPGYPPHVPPTGQGSYPTSTLAGMVPGSEFSGNPYSHPQYTAYNEAWRFSNPALLMPPPGPPLPLLPLPMTATSYRGDHIKLQADSFGLHIVPV

SEQ ID NO: 8019 - protein, 393 aa, Homo sapiens
MDMHCKADPFSAMHPGHGGVNQLGGVFVNGRPLPDVVRQRIVELAHQGVRPCDISRQLRVSHGCVSKILGRYYETGSIKPGVIGGSKPKVATPKVVDKIAEYKRQNPTMFAWEIRDRLLAEGICDNDTVPSVSSINRIIRTKVQQPFHPTPDGAGTGVTAPGHTIVPSTASPPVSSASNDPVGSYSINGILGIPRSNGEKRKRDEDVSEGSVPNGDSQSGVDSLRKHLRADTFTQQQLEALDRVFERPSYPDVFQASEHIKSEQGNEYSLPALTPGLDEVKSSLSASTNPELGSNVSGTQTYPVVTGRDMASTTLPGYPPHVPPTGQGSYPTSTLAGMVPGSEFSGNPYSHPQYTAYNEAWRFSNPALLSSPYYYSAAPRSAPAARAAAYDRH

SEQ ID NO: 8020 - protein, 419 aa, Homo sapiens
MDMHCKADPFSAMHPGHGGVNQLGGVFVNGRPLPDVVRQRIVELAHQGVRPCDISRQLRVSHGCVSKILGRYYETGSIKPGVIGGSKPKVATPKVVDKIAEYKRQNPTMFAWEIRDRLLAEGICDNDTVPSVSSINRIIRTKVQQPFHPTPDGAGTGVTAPGHTIVPSTASPPVSSASNDPVGSYSINGILGIPRSNGEKRKRDEVEVYTDPAHIRGGGGLHLVWTLRDVSEGSVPNGDSQSGVDSLRKHLRADTFTQQQLEALDRVFERPSYPDVFQASEHIKSEQGNEYSLPALTPGLDEVKSSLSASTNPELGSNVSGTQTYPVVTGRDMASTTLPGYPPHVPPTGQGSYPTSTLAGMVPEAAVGPSSSLMSKPGRKLAEVPPCVQPTGASSPATRTATPSTRPTTRLGDSATPPY

SEQ ID NO: 8021 - protein, 431 aa, Homo sapiens
MDMHCKADPFSAMHPGHGGVNQLGGVFVNGRPLPDVVRQRIVELAHQGVRPCDISRQLRVSHGCVSKILGRYYETGSIKPGVIGGSKPKVATPKVVDKIAEYKRQNPTMFAWEIRDRLLAEGICDNDTVPSVSSINRIIRTKVQQPFHPTPDGAGTGVTAPGHTIVPSTASPPVSSASNDPVGSYSINGILGIPRSNGEKRKRDEVEVYTDPAHIRGGGGLHLVWTLRDVSEGSVPNGDSQSGVDSLRKHLRADTFTQQQLEALDRVFERPSYPDVFQASEHIKSEQGNEYSLPALTPGLDEVKSSLSASTNPELGSNVSGTQTYPVVTGRDMASTTLPGYPPHVPPTGQGSYPTSTLAGMVPGSEFSGNPYSHPQYTAYNEAWRFSNPALLMPPPGPPLPLLPLPMTATSYRGDHIKLQADSFGLHIVPV

SEQ ID NO: 8022 - protein, 417 aa, Homo sapiens
MDMHCKADPFSAMHPGHGGVNQLGGVFVNGRPLPDVVRQRIVELAHQGVRPCDISRQLRVSHGCVSKILGRYYETGSIKPGVIGGSKPKVATPKVVDKIAEYKRQNPTMFAWEIRDRLLAEGICDNDTVPSVSSINRIIRTKVQQPFHPTPDGAGTGVTAPGHTIVPSTASPPVSSASNDPVGSYSINGILGIPRSNGEKRKRDEVEVYTDPAHIRGGGGLHLVWTLRDVSEGSVPNGDSQSGVDSLRKHLRADTFTQQQLEALDRVFERPSYPDVFQASEHIKSEQGNEYSLPALTPGLDEVKSSLSASTNPELGSNVSGTQTYPVVTGRDMASTTLPGYPPHVPPTGQGSYPTSTLAGMVPGSEFSGNPYSHPQYTAYNEAWRFSNPALLSSPYYYSAAPRGSAPAAAAAAYDRH

SEQ ID NO: 8023 - protein, 396 aa, Homo sapiens
MDMHCKADPFSAMHPGHGGVNQLGGVFVNGRPLPDVVRQRIVELAHQGVRPCDISRQLRVSHGCVSKILGRYYETGSIKPGVIGGSKPKVATPKVVDKIAEYKRQNPTMFAWEIRDRLLAEGICDNDTVPSVSSINRIIRTKVQQPFHPTPDGAGTGVTAPGHTIVPSTASPPVSSASNDPVGSYSINGILGIPRSNGEKRKRDEDVSEGSVPNGDSQSGVDSLRKHLRADTFTQQQLEALDRVFERPSYPDVFQASEHIKSEQGNEYSLPALTPGLDEVKSSLSASTNPELGSNVSGTQTYPVVTGRDMASTTLPGYPPHVPPTGQGSYPTSTLAGMVPEAAVGPSSSLMSKPGRKLAEVPPCVQPTGASSPATRTATPSTRPTTRLGDSATPPY

SEQ ID NO: 8024 - protein, 828 aa, Homo sapiens [sequence omitted]

SEQ ID NO: 8025 - protein, 841 aa, Homo sapiens
MKGHGELQGHERRMSSKQATSPFACAADGEDAMTQDLTSREKEEGSDQHVASHLPLHPIMHNKPHSEELPTLVSTIQQDADWDSVLSSQQRMESENNKLCSLYSFRNTSTSPHKPDEGSRDREIMTSVTFGTPERRKGSLADVVDTLKQKKLEEMTRTEQEDSSCMEKLLSKDWKEKMERLNTSELLGEIKGTPESLAEKERQLSTMITQLISLREQLLAAHDEQKKLAASQIEKQRQQMDLARQQQEQIARQQQQLLQQQHKINLLQQQIQVQGHMPPLMIPIFPHDQRTLAAAAAAQQGFLFPPGITYKPGDNYPVQFIPSTMAAAAASGLSPLQLQKGHVSHPQINQRLKGLSDRFGRNLDTFEHGGGHSYNHKQIEQLYAAQLASMQVSPGAKMPSTPQPPNTAGTVSPTGIKNEKRGTSPVTQVKDEAAAQPLNLSSRPKTAEPVKSPTSPTQNLFPASKTSPVNLPNKSSIPSPIGGSLGRGSSLDILSSLNSPALFGDQDTVMKAIQEARKMREQIQREQQQQQPHGVDGKLSSINNMGLNSCRNEKERTRFENLGPQLTGKSNEDGKLGPGVIDLTRPEDAEGSKAMNGSAAKLQQYYCWPTGGATVAEARVYRDARGRASSEPHIKRPMNAFMVWAKDERRKILQAFPDMHNSNISKILGSRWKSMSNQEKQPYYEEQARLSKIHLEKYPNYKYKPRPKRTCIVDGKKLRIGEYKQLMRSRRQEMRQFFTVGQQPQIPITTGTGVVYPGAITMATTTPSPQMTSDCSSTSASPEPSLPVIQSTYGMKTDGGSLAGNEMINGEDEMEMYDDYEDDPKSDYSSENEAPEAVSAN

SEQ ID NO: 8026 - protein, 808 aa, Homo sapiens
MSSKQATSPFACAADGEDAMTQDLTSREKEEGSDQHVASHLPLHPIMHNKPHSEELPTLVSTIQQDADWDSVLSSQQRMESENNKLCSLYSFRNTSTSPHKPDEGSRDREIMTSVTFGTPERRKGSLADVVDTLKQKKLEEMTRTEQEDSSCMEKLLSKDWKEKMERLNTSELLGEIKGTPESLAEKERQLSTMITQLISLREQLLAAHDEQKKLAASQIEKQRQQMDLARQQQEQIARQQQQLLQQQHKINLLQQQIQVQGHMPPLMIPIFPHDQRTLAAAAAAQQGFLFPPGITYKPGDNYPVQFIPSTMAAAAASGLSPLQLQKGHASHPQINQRLKGLSDRFGRNLDTFEHGGGHSYNHKQIEQLYAAQLASMQVSPGAKMPSTPQPPNTAGTVSPTGIKNEKRGTSPVTQVKDEAAAQPLNLSSRPKTAEPVKSPTSPTQNLFPASKTSPVNLPNKSSIPSPIGGSLGRGSSLDILSSLNSPALFGDQDTVMKAIQEARKMREQIQREQQQQQPHGVDGKLSSINNMGLNSCRNEKERTRFENLGPQLTGKSNEDGKLGPGVIDLTRPEDAEGGATVAEARVYRDARGRASSEPHIKRPMNAFMVWAKDERRKILQAFPDMHNSNISKILGSRWKSMSNQEKQPYYEEQARLSKIHLEKYPNYKYKPRPKRTCIVDGKKLRIGEYKQLMRSRRQEMRQFFTVGQQPQIPITTGTGVVYPGAITMATTTPSPQMTSDCSSTSASPEPSLPVIQSTYGMKTDGGSLAGNEMINGEDEMEMYDDYEDDPKSDYSSENEAPEAVSAN

SEQ ID NO: 8027 - protein, 247 aa, Homo sapiens [sequence omitted]

SEQ ID NO: 8028 - protein, 1110 aa, Homo sapiens
RGPVAAAGTMDRAPTEQNVKLSAEVEPFIPQKKSPDTFMIPMALPNDNGSVSGVEPTPIPSYLITCYPFVQENQSNRQFPLYNNDIRWQQPNPNPTGPYFAYPIISAQPPVSTEYTYYQLMPAPCAQVMGFYHPFPTPYSNTFQAANTVNAITTECTERPSQLGQVFPLSSHRSRNSNRGSVVPKQQLLQQHIKSKRPLVKNVATQKETNAAGPDSRSKIVLLVDASQQTDFPSDIANKSLSETTATMLWKSKGRRRRASHPTAESSSEQGASEADIDSDSGYCSPKHSNNQPAAGALRNPDSGTMNHVESSMCAGGVNWSNVTCQATQKKPWMEKNQTFSRGGRQTEQRNNSQVGFRCRGHSTSSERRQNLQKRPDNKHLSSSQSHRSDPNSESLYFEDEDGFQELNENGNAKDENIQQKLSSKVLDDLPENSPINIVQTPIPITTSVPKRAKSQKKKALAAALATAQEYSEISMEQKKLQEALSKAAGKKNKTPVQLDLGDMLAALEKQQQAMKARQITNTRPLSYTVVTAASFHTKDSTNRKPLTKSQPCLTSFNSVDIASSKAKKGKEKEIAKLKRPTALKKVILKEREEKKGRLTVDHNLLGSEEPTEMHLDFIDDLPQEIVSQEDTGLSMPSDTSLSPASQNSPYCMTPVSQGSPASSGIGSPMASSTITKIHSKRFREYCNQVLCKEIDECVTLLLQELVSFQERIYQKDPVRAKARRRLVMGLREVTKHMKLNKIKCVIISPNCEKIQSKGGLDEALYNVIAMAREQEIPFVFALGRKALGRCVNKLVPVSVVGIFNYFGAESLFNKLVELTEEARKAYKDMVAAMEQEQAEEALKNVKKVPHHMGHSRNPSAASAISFCSVISEPISEVNEKEYETNWRNMVETSDGLEASENEKEVSCKHSTSEKPSKLPFDTPPIGKQPSLVATGSTTSATSAGKSTASDKEEVKPDDLEWASQQSTETGSLDGSCRDLLNSSITSTTSTLVPGMLEEEEDEDEEEEEDYTHEPISVEVQLNSRIESWVSETQRTMETLQLGKTLNGSEEDNVEQSGEEEAEAPEVLEPGMDSEAWTADQQASPGQQKSSNCSSLNKEHSDSNYTTQTT

SEQ ID NO: 8029 - protein, 345 aa, Homo sapiens
MEPLRVLELYSGVGGMHHALRESCIPAQVVAAIDVNTVANEVYKYNFPHTQLLAKTIEGITLEEFDRLSFDMILMSPPCQPFTRDLLIQTIENCGFQYQEFLLSPTSLGIPNSRLRYFLIAKLQSEPLPFQAPGQVLMEFPKIESVHPQKYAMDVENKIQEKNVEPNISFDGSIQCSGKDAILFKLETAEEIHRKNQQDSDLSVKMLKDFLEDDTDVNQYLLPPKSLLRYALLLDIVQPTCRRSVCFTKGYGSYIEGTGSVLQTAEDVQVENIYKSLTNLSQEEQITKLLILKLRYFTPKEIANLLGFPPEFGFPEKITVKQRYRLLGNSLNVHVVAKLIKILYE

SEQ ID NO: 8030 - protein, 367 aa, Homo sapiens
MEPLRVLELYSGVGGMHHALRESCIPAQVVAAIDVNTVANEVYKYNFPHTQLLAKTIEGITLEEFDRLSFDMILMSPPCQPFTRLQKLPKYILLENVKGFEVSSTRDLLIQTIENCGFQYQEFLLSPTSLGIPNSRLRYFLIAKLQSEPLPFQAPGQVLMEFPKIESVHPQKYAMDVENKIQEKNVEPNISFDGSIQCSGKDAILFKLETAEEIHRKNQQDSDLSVKMLKDFLEDDTDVNQYLLPPKSLLRYALLLDIVQPTCRRSVCFTKGYGSYIEGTGSVLQTAEDVQVENIYKSLTNLSQEEQITKLLILKLRYFTPKEIANLLGFPPEFGFPEKITVKQRYRLLGNSLNVHVVAKLIKILYE

SEQ ID NO: 8031 - protein, 391 aa, Homo sapiens
MEPLRVLELYSGVGGMHHALRESCIPAQVVAAIDVNTVANEVYKYNFPHTQLLAKTIEGITLEEFDRLSFDMILMSPPCQPFTRIGRQGDMTDSRTNSFLHILDILPRLQKLPKYILLENVKGFEVSSTRDLLIQTIENCGFQYQEFLLSPTSLGIPNSRLRYFLIAKLQSEPLPFQAPGQVLMEFPKIESVHPQKYAMDVENKIQEKNVEPNISFDGSIQCSGKDAILFKLETAEEIHRKNQQDSDLSVKMLKDFLEDDTDVNQYLLPPKSLLRYALLLDIVQPTCRRSVCFTKGYGSYIEGTGSVLQTAEDVQVENIYKSLTNLSQEEQITKLLILKLRYFTPKEIANLLGFPPEFGFPEKITVKQRYRLLGNSLNVHVVAKLIKILYE

SEQ ID NO: 8032 - protein, 291 aa, Homo sapiens
MEAPASAQTPHPHEPISFGIDQILNSPDQDSAPAPRGPDGASYLGGPPGGRPGATYPSLPASFAGLGAPFEDAGSYSVNLSLAPAGVIRVPAHRPLPGAVPPPLPSALPAMPSVPTVSSLGGLNFPWMESSRRFVKDRFTAAAALTPFTVTRRIGHPYQNRTPPKRKKPRTSFSRVQICELEKRFHRQKYLASAERAALAKSLKMTDAQVKTWFQNRRTKWRRQTAEEREADGQQASRLMLQLQHDAFQKSLNDSIQPDPLCLHNSSLFALQNLQPWEEDSSKVPAVTSLV

SEQ ID NO: 8033 - protein, 551 aa, Homo sapiens [sequence omitted]

SEQ ID NO: 8034 - protein, 538 aa, Homo sapiens
MSSPLASELSELAALRPGFRLSAPHARVAPRAATHARGRGRASHAGQPRLRSSCPGPSPGKRRVVPSGGAQPRVLPALSSRSHLFPMASHPQTRIQAYLEKNKIGPLFEELMTKLITETPDQPIPFLIDHLQSKQGNRGQLQRTLSGSAALWAESEKSESKGTRRDFRSYDKPWQLNAKKPKKSKSDLAVSNISPPSPDSKSLPRSVEHPKWNWRTKPQSRDFDELNHILQESKKLGKALENLSRSIAISDELDKETVTFNSSLLRPRVIGEWIGREENDADPLAAEMLQPPIPRSKNDQWESEDSGSSPAGSLKMEPKNKGLKQQQQQHKKLLAAMLSQDSFESIHSPTPSVTEEDIDNEDDAMELLEDLNDLRMEGVTTLVPSGSKFNQGRPTYPAEPQAKVTLNICSRCARLQGDNLEERTEESLPILHSPDEKIPDSFDSLPGTEEALMEEGDEFEKASKLTGPGEASSGVGHSLKNYMEEDESLKQLQVVHQPWILPSDTESEGVEAEQEKRSADLLLCVPCSSCPTLVYSGL

SEQ ID NO: 8035 - protein, 129 aa, Homo sapiens
MASHPQTRIQAYLEKNKIGPLFEELMTKLITETPDQPIPFLIDHLQSKQGNRGQLQRTLSGSAALWAESEKSESKGTRRDFRSYDKPWQLNAKKPKKSKSDLAVSNISPPSPDSKSCKEVSYSNAIQSM

SEQ ID NO: 8036 - protein, 427 aa, Homo sapiens
MTKLITETPDQPIPFLIDHLQSKQGNRGQLQRTLSGSAALWAESEKSESKGTRRDFRSYDKPWQLNAKKPKKSKSDLAVSNISPPSPDSKSLPRSVEHPKWNWRTKPQSRDFDELNHILQESKKLGKALENLSRSIAISDELDKETVTFNSSLLRPRVIGEWIGREENDADPLAAEMLQPPIPRSKNDQWESEDSGSSPAGSLKMEPKNKGLKQQQQQHKKLLAAMLSQDSFESIHSPTPSVTEEDIDNEDDAMELLEDLNDLRMEGVTTLVPSGSKFNQGRPTYPAEPQAKVTLNICSRCARLQGDNLEERTEESLPILHSPDEKIPDSFDSLPGTEEALMEEGDEFEKASKLTGPGEASSGVGHSLKNYMEEDESLKQLQVVHQPWILPSDTESEGVEAEQEKRSADLLLCVPCSSCPTLVYSGL

SEQ ID NO: 8037 - protein, 401 aa, Homo sapiens
MAHVSSETQDVSPKDELTASEASTRSPLCEHTFPGDSDLRSMIEEHAFQVLSQGSLLESPSYTVCVSEPDKDDDFLSLNFPRKLWKIVESDQFKSISWDENGTCIVINEELFKKEILETKAPYRIFQTDAIKSFVRQLNLYGFSKIQQNFQRSAFLATFLSEEKESSVLSKLKFYYNPNFKRGYPQLLVRVKRRIGVKNASPISTLFNEDFNKKHFRAGANMENHNSALAAEASEESLFSASKNLNMPLTRESSVRQIIANSSVPIRSGFPPPSPSTSVGPSEQIATDQHAILNQLTTIHMHSHSTYMQARGHIVNFITTTTSQYHIISPLQNGYFGLTVEPSAVPTRYPLVSVNEAPYRNMLPAGNPWLQMPTIADRSAAPHSRLALQPSPLDKYHPNYN

SEQ ID NO: 8038 - protein, 203 aa, Homo sapiens
MAHVSSETQDVSPKDELTASEASTRSPLCEHTFPGDSDLRSMIEEHAFQVLSQGSLLESPSYTVCVSEPDKDDDFLSLNFPRKLWKIVESDQFKSISWDENGTCIVINEELFKKEILETKAPYRIFQTDAIKSFVRQLNLYGFSKIQQNFQRSAFLATFLSEEKESSVLSKIRFTKMKLSRSSTYENRYLCCNLHLKDESNYS

SEQ ID NO: 8039 - protein, 214 aa, Homo sapiens
MAHVSSETQDVSPKDELTASEASTRSPLCEHTFPGDSDLRSMIEEHAFQVLSQGSLLESPSYTVCVSEPDKDDDFLSLNFPRKLWKIVESDQFKSISWDENGTCIVINEELFKKEILETKAPYRIFQTDAIKSFVRQLNLYGFSKIQQNFQRSAFLATFLSEEKESSVLSKLHVFVFHHSLFGATFGEHHFQPCPLPSGNKAPISTWSGDSWLL

SEQ ID NO: 8040 - protein, 1616 aa, Homo sapiens
MFPLIGKTIIFDNFPDPSDTWEITETIGKGTYGKVFKVLNKKNGQKAAVKILDPIHDIDEEIEAEYNILKALSDHPNVVRFYGIYFKKDKVNGDKLWLVLELCSGGSVTDLVKGFLKRGERMSEPLIAYILHEALMGLQHLHNNKTIHRDVKGNNILLTTEGGVKLVDFGVSAQLTSTRHRRNTSVGTPFWMAPEVIACEQQLDTTYDARCDTWSLGITAIELGDGDPPLADLHPMRALFKIPRNPPPKLRQPELWSAEFNDFISKCLTKDYEKRPTVSELLQHKFITQIEGKDVMLQKQLTEFIGIHQCMGGTEKARRERIHTKKGNFNRPLISNLKDVDDLATLEILDENTVSEQLEKCYSRDQIYVYVGDILIALNPFQSLGLYSTKHSKLYIGSKRTASPPHIFAMADLGYQSIITYNSDQCIVISGESGAGKTENAHLLVQQLTVLGKANNRTLQEKILQVNNLVEAFGNACTIINDNSSRFGKYLEMKFTSSGAVVGAQISEYLLEKSRVIHQAIGEKNFHIFYYIYAGLAEKKKLAHYKLPENKPPRYLQNDHLRTVQDIMNNSFYKSQYELIEQCFKVIGFTMEQLGSIYSILAAILNVGNIEFSSVATEHQIDKSHISNHTALENCVSLLCIRADELQEALTSHCVVTRGETIIRPNTVEKATDVRDAMAKTLYGRLFSWIVNCINSLLKHDSSPSGNGDELSIGILDIFGFENFKKNSFEQLCINIANEQIQYYYNQHVFAWEQNEYLNEDVDARVIEYEDNWPLLDMFLQKPMGLLSLLDEESRFPKATDQTLVEKFEGNLKSQYFWRPKRMELSFGIHHYAGKVLYNASGFLAKNRDTLPTDIVLLLRSSDNSVIRQLVNHPLTKTGNLPHSKTKNVINYQMRTSEKLINLAKGDTGEATRHARETTNMKTQTVASYFRYSLMDLLSKMVVGQPHFVRCIKPNSERQARKYDKEKVLLQLRYTGILETARIRRLGFSHRILFANFIKRYYLLCYKSSEEPRMSPDTCATILEKAGLDNWALGKTKVFLKYYHVEQLNLMRKEAIDKLILIQACVRAFLCSRRYQKIQEKRKESAIIIQSAARGHLVGKQRKEIVDMKNTAVTTIQTSDQEFDYKKNFENTRESFVKKQAENAISANERFISAPNNKGSVSVVKTSTFKPEEETTNAVESNNRVYQTPKKMNNVYEEEVKQEFYLVGPEVSPKQKFVKDLEENSNLRKVEKEEAMIQSYYQRYTEERNCEESKAAYLERKAISERPSYPVPWLAENETSFKKTLEPTLSQRSIYQNANSMEKEKKTSVVTQSAPICSQEEGRGRLRHETVKERQVEPVTQAQEEEDKAAVFIQSKYRGYKRRQQLRKDKMSSFKHQKIVTTPTEVARNTHNLYSYPTKHEEINNIKKKDNKDSKATSEREACGLAIFSKQISKLSEEYFILQKKLNEMILSQQLKSLYLGVSHHKPINRRVSSQQCLSGVCKGEEPKILRPPRRPRKPKTLNNPEDSTYYYLLHKSIQEEKRRPRKDSQGKLLDLEDFYYKEFLPSRSGPKEHSPSLRERRPQQELQNQCIKANERCWAAESPEKEEEREPAANPYDFRRLLRKTSQRRRLVQQS

SEQ ID NO: 8041 - protein, 837 aa, Homo sapiens
MNHLEGSAEVEVTDEAAGGEVNESVEADLEHPEVEEEQQQPPQQQHYVGRHQRGRALEDLRAQLGQEEEERGECLARSASTESGFHNHTDTAEGDVIAAARDGYDAERAQDPEDESAYAVQYRPEAEEYTEQAEAEHAEATHRRALPNHLHFHSLEHEEAMNAAYSGYVYTHRLFHRGEDEPYSEPYADYGGLQEHVYEEIGDAPELDARDGLRLYEQERDEAAAYRQEALGARLHHYDERSDGESDSPEKEAEFAPYPRMDSYEQEEDIDQIVAEVKQSMSSQSLDKAAEDMPEAEQDLERPPTPAGGRPDSPGLQAPAGQQRAVGPAGGGEAGQRYSKEKRDAISLAIKDIKEAIEEVKTRTIRSPYTPDEPKEPIWVMRQDISPTRDCDDQRPMDGDSPSPGSSSPLGAESSSTSLHPSDPVEVPINKESRKSLASFPTYVEVPGPCDPEDLIDGIIFAANYLGSTQLLSDKTPSKNVRMMQAQEAVSRIKMAQKLAKSRKKAPEGESQPMTEVDLFILTQRIKVLNADTQETMMDHPLRTISYIADIGNIVVLMARRRIPRSNSQENVEASHPSQDGKRQYKMICHVFESEDAQLIAQSIGQAFSVAYQEFLRANGINPEDLSQKEYSDLLNTQDMYNDDLIHFSKSENCKDVFIEKQKGEILGVVIVESGWGSILPTVIIANMMHGGPAEKSGKLNIGDQIMSINGTSLVGLPLSTCQSIIKGLENQSRVKLNIVRCPPVTTVLIRRPDLRYQLGFSVQNGIICSLMRGGIAERGGVRVGHRIIEINGQSVVATPHEKIVHILSNAVGEIHMKTMPAAMYRLLTAQEQPVYI

SEQ ID NO: 8042 - protein, 553 aa, Homo sapiens
MTSAMARGAYGRPGSDFCHGTEGKDLPSEHNVSVEGVAQDRSPEATLCPQKTCPCDICGLRLKDILHLAEHQTTHPRQKPFVCEAYVKGSEFSANLPQKQVQQNVHNPIRTEEGQASPVKTCRDHTSDQLSTCREGGKDFVATAGFLQCEVTPSDGEPHEATEGVVDFHIALRHNKCCESGDAFNNKSTLVQHQRIHSRERPYECSKCGIFFTYAADLTQHQKVHNRGKPYECCECGKFFSQHSSLVKHRRVHTGESPHVCGDCGKFFSRSSNLIQHKRVHTGEKPYECSDCGKFFSQRSNLIHHKRVHTGRSAHECSECGKSFNCNSSLIKHWRVHTGERPYKCNECGKFFSHIASLIQHQIVHTGERPHGCGECGKAFSRSSDLMKHQRVHTGERPYECNECGKLFSQSSSLNSHRRLHTGERPYQCSECGKFFNQSSSLNNHRRLHTGERPYECSECGKTFRQRSNLRQHLKVHKPDRPYECSECGKAFNQRPTLIRHQKIHIRERSMENVLLPCSQHTPEISSENRPYQGAVNYKLKLVHPSTHPGEVP

SEQ ID NO: 8043 - protein, 863 aa, Homo sapiens
KIIIKYISLGILFSLKYFLFFSNQQDATSVATESSESSTSDLPSFEVGIRALCEVNNAEGSCIEERNVDLKNNSLEIDQTENVKPMLRGRFQRPKPNLSRAGKKSVLSQGKTESESKNSHSKTSVEKNHVEKDKMNTLDILRMETTERENPEAETVSVLGEKNCLQEGSQLKALRPVQVRGRLQKPKPNAGKAAERKEILISQEEIGANVEKNENESCADRDTPQHMEDQSCKDFEEEDVILQPEKNDSFQNVQPDEPKVLNECLSVQENNKANKLNQVPILRTRFQKPKPNIGRGTGRREISSKEEVLEKILVSGEMAAALRETVRLDTSPKEMVPAEINTKEMQSDLKETGRRAISPREKILDVIDDTIEMETGLKAMGREICLREKTPEVIDATEEIDKDLEEAGRREISPQKNGPEEVKPLGEVETDLKATGNESSPREKTPEVTDATEEIDKNLEETGRRKISPRENGPEEVKPVDEMETDLNATGRESSPREKTPEVIDATEEIDLEETEREVSPQENGLEEVKPLGEMETDLKATGRDSFPRGKTPEVIDAIEEIEIDLEETEREISPQENGLEEVKPLGEMQTDLKATGREISPREKTPEVIDATEEIDKDLEETGRREISPEENGPEEVKPVDEMETDLKTTGREGSSREKTREVIDAAEVIETDLEETEREISPQENGPEEVKPVGKMETDLKEIREEISQREKVLAEFSAIREKEIDLKETGKRDIPMMEKVSGKMAVVEEMEADLKETGKENFRERGSEEICVTEEKVAELKQTGKTDISPRENELEETSTSRQTDTHLMQSGSNDFSAMPSLDIQVCIFLSFKSFLNAFSEEINNSMIILSLSPTTFKNL

SEQ ID NO: 8044 - protein, 4486 aa, Homo sapiens [sequence omitted]

SEQ ID NO: 8045 - protein, 693 aa, Homo sapiens
MAQGSHQIDFQVLHDLRQKFPEVPEVVVSRCMLQNNNNLDACCAVLSQESTRYLYGEGDLNFSDDSGISGLRNHMTSLNLDLQSQNIYHHGREGSRMNGSRTLTHSISDGQLQGGQSNSELFQQEPQTAPAQVPQGFNVFGMSSSSGASNSAPHLGFHLGSKGTSSLSQQTPRFNPIMVTLAPNIQTGRNTPTSLHIHGVPPPVLNSPQGNSIYIRPYITTPGGTTRQTQQHSGWVSQFNPMNPQQVYQPSQPGPWTTCPASNPLSHTSSQQPNQQGHQTSHVYMPISSPTTSQPPTIHSSGSSQSSAHSQYNIQNISTGPRKNQIEIKLEPPQRNNSSKLRSSGPRTSSTSSSVNSQTLNRNQPTVYIAASPPNTDELMSRSQPKVYISANAATGDEQVMRNQPTLFISTNSGASAASRNMSGQVSMGPAFIHHHPPKSRAIGNNSATSPRVVVTQPNTKYTFKITVSPNKPPAVSPGVVSPTFELTNLLNHPDHYVETENIQHLTDPTLAHVDRISETRKLSMGSDDAAYTQALLVHQKARMERLQRELEIQKKKLDKLKSEVNEMENNLTRRRLKRSNSISQIPSLEEMQQLRSCNRQLQIDIDCLTKEIDLFQARGPHFNPSAIHNFYDNIGFVGPVPPKPKDQRSIIKTPKTQDTEDDEGAQWNCTACTFLNHPALIRCEQCEMPRHF

SEQ ID NO: 8046 - protein, 404 aa, Homo sapiens
MNGYAEFPPSPSNPTKEPVEPQPSQVPLQEDVDMSSGSSGHETNENCSTGRDSQGSDCDDSGKELGMLVEPPDARQSPDTFSLMMAKSEHNPSTSGCSSDQSSKVDTHKELIKTLKELKVHLPADKKAKGKASTLATLKYALRSVKQVKANEEYYQLLMSSEGHPCGADVPSYTVEEMESVTSEHIVKNADMFAVAVSLVSGKILYISDQVASIFHCKRDAFSDAKFVEFLAPHDVGVFHSFTSPYKLPLWSMCSGADSFTQECMEEKSFFCRVSVRKSHENEIRYHPFRMTPYLVKVRDQQGAESQLCCLLLAERVHSGYEAPRIPPEKRIFTTTHTPNCLFQDVDESPAVRRAAFRLFSHSVSRPERRVHHVGHQLVQLHQPMEQENLLHHWEAQSQGGPFE

SEQ ID NO: 8047 - protein, 1255 aa, Homo sapiens
MNGYAEFPPSPSNPTKEPVEPQPSQVPLQEDVDMSSGSSGHETNENCSTGRDSQGSDCDDSGKELGMLVEPPDARQSPDTFSLMMAKSEHNPSTSGCSSDQSSKVDTHKELIKTLKELKVHLPADKKAKGKASTLATLKYALRSVKQVKANEEYYQLLMSSEGHPCGADVPSYTVEEMESVTSEHIVKNADMFAVAVSLVSGKILYISDQVASIFHCKRDAFSDAKFVEFLAPHDVGVFHSFTSPYKLPLWSMCSGADSFTQECMEEKSFFCRVSVRKSHENEIRYHPFRMTPYLVKVRDQQGAESQLCCLLLAERVHSGYEAPRIPPEKRIFTTTHTPNCLFQDVDERAVPLLGYLPQDLIETPVLVQLHPSDRPLMLAIHKKILQSGGQPFDYSPIRFRARNGEYITLDTSWSSFINPWSRKISFIIGRHKVRVGPLNEDVFAAHPCTEEKALHPSIQELTEQIHRLLLQPVPHSGSSGYGSLGSNGSHEHLMSQTSSSDSNGHEDSRRRRAEICKNGNKTKNRSHYSHESGEQKKKSVTEMQTNPPAEKKAVPAMEKDSLGVSFPEELACKNQPTCSYQQISCLDSVIRYLESCNEAATLKRKCEFPANVPALRSSDKRKATVSPGPHAGEAEPPSRVNSRTGVGTHLTSLALPGKAESVASLTSQCSYSSTIVHVGDKKPQPELEMVEDAASGPESLDCLAGPALACGLSQEKEPFKKLGLTKEVLAAHTQKEEQSFLQKFKEIRKLSIFQSHCHYYLQERSKGQPSERTAPGLRNTSGIDSPWKKTGKNRKLKSKRVKPRDSSESTGSGGPVSARPPLVGLNATAWSPSDTSQSSCPAVPFPAPVPAAYSLPVFPAPGTVAAPPAPPHASFTVPAVPVDLQHQFAVQPPPFPAPLAPVMAFMLPSYSFPSGTPNLPQAFFPSQPQFPSHPTLTSEMASASQPEFPSRTSIPRQPCACPATRATPPSAMGRASPPLFQSRSSSPLQLNLLQLEEAPEGGTGAMGTTGATETAAVGADCKPGTSRDQQPKAPLTRDEPSDTQNSDALSTSSGLLNLLLNEDLCSASGSAASESLGSGSLGCDASPSGAGSSDTSHTSKYFGSIDSSENNHKAKMNTGMEESEHFIKCVLQDPIWLLMADADSSVMMTYQLPSRNLEAVLKEDREKLKLLQKLQPRFTESQKQELREVHQWMQTGGLPAAIDVAECVYCENKEKGNICIPYEEDIPSLGLSEVSDTKEDENGSPLNHRIEEQT

SEQ ID NO: 8048 - protein, 605 aa, Homo sapiens [sequence omitted]

SEQ ID NO: 8049 - protein, 1227 aa, Homo sapiens
NIRVIGERYHLSYKIVRTDSRLVRSILTAHGFHEVHPSSTDYNLMWTGSHLKPFLLRTLSEAQKVNHFPRSYELTRKDRLYKNIIRMQHTHGFKAFHILPQTFLLPAEYAEFCNSYSKDRGPWIVKPVASSRGRGVYLINNPNQISLEENILVSRYINNPLLIDDFKFDVRLYVLVTSYDPLVIYLYEEGLARFATVRYDQGAKNIRNQFMHLTNYSVNKKSGDYVSCDDPEVEDYGNKWSMSAMLRYLKQEGRDTTALMAHVEDLIIKTIISAELAIATACKTFVPHRSSCFELYGFDVLIDSTLKPWLLEVNLSPSLACDAPLDLKIKASMISDMFTVVGFVCQDPAQRASTRPIYPTFESSRRNPFQKPQRCRPLSASDAEMKNLVGSAREKGPGKLGGSVLGLSMEEIKVLRRVKEENDRRGGFIRIFPTSETWEIYGSYLEHKTSMNYMLATRLFQDRMTADGAPELKIESLNSKAKLHAALYERKLLSLEVRKRRRRSSRLRAMRPKYPVITQPAEMNVKTETESEEEEEVALDNEDEEQEASQEESAGFLRENQAKYTPSLTALVENTPKENSMKVREWNNKGGHCCKLETQELEPKFNLMQILQDNGNLSKMQARIAFSAYLQHVQIRLMKDSGGQTFSASWAAKEDEQMELVVRFLKRASNNLQHSLRMVLPSRRLALLERRRILAHQLGDFIIVYNKETEQMAEKKSKKKVEEEEEDGVNMENFQEFIRQASEAELEEVLTFYTQKNKSASVFLGTHSKISKNNNNYSDSGAKGDHPETIMEEVKIKPPKQQQTTEIHSDKLSRFTTSAEKEAKLVYSNSSSGPTATLQKIPNTHLSSVTTSDLSPGPCHHSSLSQIPSAIPSMPHQPTILLNTVSASASPCLHPGAQNIPSPTGLPRCRSGSHTIGPFSSFQSAAHIYSQKLSRPSSAKAGSCYLNKHHSGIAKTQKEGEDASLYSKRYNQSMVTAELQRLAEKQAARQYSPSSHINLLTQQVTNLNLATGIINRSSASAPPTLRPIISPSGPTWSTQSDPQAPENHSSSPGSRSLQTGGFAWEGEVENNVYSQATGVVPQHKYHPTAGSYQLQFALQQLEQQKLQSRQLLDQSRARHQAIFGSQTLPNSNLWTMNNGAGCRISSATASGQKPTTLPQKVVPPPSSCASLVPKPPPNHEQVLRRATSQKASKGSSAEGQLNGLQSSLNPAAFVPITSSTDPAHTKI

SEQ ID NO: 8050 - protein, 817 aa, Homo sapiens
MEEIKVLRRVKEENDRRGGFIRIFPTSETWEIYGSYLEHKTSMNYMLATRLFQDRGNPRRSLLTGRTRMTADGAPELKIESLNSKAKLHAALYERKLLSLEVRKRRRRSSRLRAMRPKYPVITQPAEMNVKTETESEEEEEVALDNEDEEQEASQEESAGFLRENQAKYTPSLTALVENTPKENSMKVREWNNKGGHCCKLETQELEPKFNLMQILQDNGNLSKMQARIAFSAYLQHVQIRLMKDSGGQTFSASWAAKEDEQMELVVRFLKRASNNLQHSLRMVLPSRRLALLERRRILAHQLGDFIIVYNKETEQMAEKKSKKKVEEEEEDGVNMENFQEFIRQASEAELEEVLTFYTQKNKSASVFLGTHSKISKNNNNYSDSGAKGDHPETIMEEVKIKPPKQQQTTEIHSDKLSRFTTSAEKEAKLVYSNSSSGPTATLQKIPNTHLSSVTTSDLSPGPCHHSSLSQIPSAIPSMPHQPTILLNTVSASASPCLHPGAQNIPSPTGLPRCRSGSHTIGPFSSFQSAAHIYSQKLSRPSSAKAGSCYLNKHHSGIAKTQKEGEDASLYSKRYNQSMVTAELQRLAEKQAARQYSPSSHINLLTQQVTNLNLATGIINRSSASAPPTLRPIISPSGPTWSTQSDPQAPENHSSSPGSRSLQTGGFAWEGEVENNVYSQATGVVPQHKYHPTAGSYQLQFALQQLEQQKLQSRQLLDQSRARHQAIFGSQTLPNSNLWTMNNGAGCRISSATASGQKPTTLPQKVVPPPSSCASLVPKPPPNHEQVLRRATSQKASNTRFRSSFQNYLWYFFQAVS

SEQ ID NO: 8051 - protein, 106 aa, Homo sapiens
MKLISPRDFVDLVLVKRYEDGTISSNATHVEHPLCPPKPGFVRGFNHPCGCFCEPLPGEPTKTNLVTFFHTDLSGYLPQNVVDSFFPRSMTRFYANLQKAVKQFHE

SEQ ID NO: 8052 - protein, 213 aa, Homo sapiens
MDPALAAQMSEAVAEKMLQYRRDTAGWKICREGNGVSVSWRPSVEFPGNLYRGEGIVYGTLEEVWDCVKPAVGGLRVKWDENVTGFEIIQSITDTLCVSRTSTPSAAMKLISPRDFVDLVLVKRYEDGTISSNATHVEHPLCPPKPGFVRGFNHPCGCFCEPLPGEPTKTNLVTFFHTDLSGYLPQNVVDSFFPRSMTRFYANLQKAVKQFHE

SEQ ID NO: 8053 - protein, 902 aa, Homo sapiens
MFPALETHLKQTIPDPYEDFMYRHLQYYGYFKAQRGSLPNSATHQHVRKNNPQCLLNGSLGEKDDLIPDTLQKEKLLWPISLSSAVHRQIEAINRDFHSCLGWMQWRGLSSLQPPPPRFKDSPASAFRVAGITDSHMLSLPHLRSRQLLYDELDEVNPRLREPQELFSILSTKRPLQAPRWPIECEVIKENIHHIEWAPPQPEYFYQPKGNEKVPEIVGEKKGTVVYQLDSVPIEGSYFTSSRVGGKRGIVKELAVTLQGPEDNTLLFESRFESGNLQKAVRVDTYEYELTLRTDLYTNKHTQWFYFRVQNTRKDATYRFTIVNLLKPKSLYTVGMKPLLYSQLDANTRNIGWRREGNEIKYYKNNTDDGQQPFYCLTWTIQFPYDQDTCFFAHFYPYTYTDLQCYLLSVANNPIQSQFCKLQTLCRSLAGNTVYLLTITNPSQTPQEAAAKKAVVLSARVHPGESNGSWVMKGFLDFILSNSPDAQLLRDIFVFKVLPMLNPDGVIVGNYRCSLAGRDLNRHYKTILKESFPCIWYTRNMIKRLLEEREVLLYCDFHGHSRKNNIFLYGCNNNNRKYWLHERVFPLMLCKNAPDKFSFHSCNFKVQKCKEGTGRVVMWRMGILNSYTMESTFGGSTLGNKRDTHFTIEDLKSLGYHVCDTLLDFCDPDQMKFTQCLAELKELLRQEIHKKFHELGQDVDLEGSWSDISLSDIESSTSGSDSSLSDGLPVHLANIADELTQKKKMFKKKKKKSLQTRKQRNEQYQKKNLMQKLKLTEDTSEKAGFASTLQKQPTFFKNSENSSFLPMKNENPRLNETNLNRRDKDTPLDPSMATLILPKNKGRMQNKKPGFTVSCSPKRTINSSQEPAPGMKPNWPRSRYPATKRGCAAMAAYPSLHIYTYP

SEQ ID NO: 8054 - protein, 285 aa, Homo sapiens [sequence omitted]

SEQ ID NO: 8055 - protein, 1314 aa, Homo sapiens
MLDPSSSEEESDEIVEEESGKEVLGSAPSGARLSPSRTSEGSAGSAGLGGGGAGAGAGVGAGGGGGSGASSGGGAGGLQPSSRAGGGRPSSPSPSVVSEKEKEELERLQKEEEERKKRLQLYVFVMRCIAYPFNAKQPTDMARRQQKISKQQLQTVKDRFQAFLNGETQIMADEAFMNAVQSYYEVFLKSDRVARMVQSGGCSANDSREVFKKHIEKRVRSLPEIDGLSKETVLSSWMAKFDAIYRGEEDPRKQQARMTASAASELILSKEQLYEMFQNILGIKKFEHQLLYNACQLDNPDEQAAQIRRELDGRLQMADQIARERKFPKFVSKEMENMYIEELKSSVNLLMANLESMPVSKGGEFKLQKLKRSHNASIIDMGEESENQLSKSDVVLSFSLEVVIMEVQGLKSLAPNRIVYCTMEVEGGEKLQTDQAEASKPTWGTQGDFSTTHALPAVKVKLFTESTGVLALEDKELGRVILHPTPNSPKQSEWHKMTVSKNCPDQDLKIKLAVRMDKPQNMKHSGYLWAIGKNVWKRWKKRFFVLVQVSQYTFAMCSYREKKAEPQELLQLDGYTVDYTDPQPGLEGGRAFFNAVKEGDTVIFASDDEQDRILWVQAMYRATGQSHKPVPPTQVQKLNAKGGNVPQLDAPISQFYADRAQKHGMDEFISSNPCNFDHASLFEMVQRLTLDHRLNDSYSCLGWFSPGQVFVLDEYCARNGVRGCHRHLCYLRDLLERAENGAMIDPTLLHYSFAFCASHVHGNRPDGIGTVTVEEKERFEEIKERLRVLLENQITHFRYCFPFGRPEGALKATLSLLERVLMKDIVTPVPQEEVKTVIRKCLEQAALVNYSRLSEYAKIEGKKREMYEHPVFCLASQVMDLTIQNVGRLITPAKKLEDTIRLAELVIEVLQQNEEHHAEAFAWWSDLMVEHAETFLSLFAVDMDAALEVQPPDTWDSFPLFQLLNDFLRTDYNLCNGKFHKHLQDLFAPLVVRYVDLMESSIAQSIHRGFERESWEPVNNGSGTSEDLFWKLDALQTFIRDLHWPEEEFGKHLEQRLKLMASDMIESCVKRTRIAFEVKLQKTSRSTDFRVPQSICTMFNVMVDAKAQSTKLCSMEMGQEHQYHSKIDELIEETVKEMITLLVAKFVTILEGVLAKLSRYDEGTLFSSFLSFTVKAASKYVDVPKPGMDVADAYVTFVRHSQDVLRDKVNEEMYIERLFDQWYNSSMNVICTWLTDRMDLQLHIYQLKTLIRMVKKTYRDFRLQGVLDSTLNSKTYETIRNRLTVEEATASVSEGGGLQGISMKDSDEEDEEDD

SEQ ID NO: 8056 - protein, 1390 aa, Homo sapiens
PGEKRPPGRADPRLPPAPPTFCTPSRGLQRPRSPGATMLDPSSSEEESDEIVEEESGKEVLGSAPSGARLSPSRTSEGSAGSAGLGGGGAGAGAGVGAGGGGGSGASSGGGAGGLQPSSRAGGGRPSSPSPSVVSEKEKEELERLQKEEEERKKRLQLYVFVMRCIAYPFNAKQPTDMARRQQKISKQQLQTVKDRFQAFLNGETQIMADEAFMNAVQSYYEVFLKSDRVARMVQSGGCSANDSREVFKKHIEKRVRSLPEIDGLSKETVLSSWMAKFDAIYRGEEDPRKQQARMTASAASELILSKEQLYEMFQNILGIKKFEHQLLYNACQLDNPDEQAAQIRRELDGRLQMADQIARERKFPKFVSKEMENMYIEELKSSVNLLMANLESMPVSKGGEFKLQKLKRSHNASIIDMGEESENQLSKSDVVLSFSLEVVIMEVQGLKSLAPNRIVYCTMEVEGGEKLQTDQAEASKPTWGTQGDFSTTHALPAVKVKLFTESTGVLALEDKELGRVILHPTPNSPKQSEWHKMTVSKNCPDQDLKIKLAVRMDKPQNMKHSGYLWAIGKNVWKRWKKRFFVLVQVSQYTFAMCSYREKKAEPQELLQLDGYTVDYTDPQPGLEGGRAFFNAVKEGDTVIFASDDEQDRILWVQAMYRATGQSHKPVPPTQVQKLNAKGGNVPQLDAPISQFYADRAQKHGMDEFISSNPCNFDHASLFEMVQRLTLDHRLNDSYSCLGWFSPGQVFVLDEYCARNGVRGCHRHLCYLRDLLERAENGAMIDPTLLHYSFAFCASHVHGNRPDGIGTVTVEEKERFEEIKERLRVLLENQITHFRYCFPFGRPEGALKATLSLLERVLMKDIVTPVPQEEVKTVIRKCLEQAALVNYSRLSEYAKIEENQKDAENVGRLITPAKKLEDTIRLAELVIEVLQQNEEHHAEPHVDKGEAFAWWSDLMVEHAETFLSLFAVDMDAALEVQPPDTWDSFPLFQLLNDFLRTDYNLCNGKFHKHLQDLFAPLVVRYVDLMESSIAQSIHRGFERESWEPVKSLTSNLPNVNLPNVNLPKVPNLPVNIPLGIPQMPTFSAPSWMAAIYDADNGSGTSEDLFWKLDALQTFIRDLHWPEEEFGKHLEQRLKLMASDMIESCVKRTRIAFEVKLQKTSRSTDFRVPQSICTMFNVMVDAKAQSTKLCSMEMGQEHQYHSKIDELIEETVKEMITLLVAKFVTILEGVLAKLSRYDEGTLFSSFLSFTVKAASKYVDVPKPGMDVADAYVTFVRHSQDVLRDKVNEEMYIERLFDQWYNSSMNVICTWLTDRMDLQLHIYQLKTLIRVVKKTYRDFRLQGVLDSTLNSKTYETIRNRLTVEEATASVSEGGGLQGISMKDSDEEDEEDD

SEQ ID NO: 8057 - protein, 1274 aa, Homo sapiens [sequence omitted]

SEQ ID NO: 8058 - protein, 138 aa, Homo sapiens
QIARERKFPKFVSKEMENMYIEELKSSVNLLMANLESMPVSKGGEFKLQKLKRSHNASIIDMGEESENQLSKSDVVLSFSLEVVIMEVQGLKSLAPNRIVYCTMEVEGGEKLQTDQAEASKPTVIRRNRREQLPHSAI

SEQ ID NO: 8059 - protein, 634 aa, Homo sapiens
MESPTKEIEEFESNSLKYLQPEQIEKIWLRLRGLRKYKKTSQRLRSLVKQLERGEASVVDLKKNLEYAATVLESVYIDETRRLLDTEDELSDIQSDAVPSEVRDWLASTFTRQMGMMLRRSDEKPRFKSIVHAVQAGIFVERMYRRTSNMVGLSYPPAVIEALKDVDKWSFDVFSLNEASGDHALKFIFYELLTRYDLISRFKIPISALVSFVEALEVGYSKHKNPYHNLMHAADVTQTVHYLLYKTGVANWLTELEIFAIIFSAAIHDYEHTGTTNNFHIQTRSDPAILYNDRSVLENHHLSAAYRLLQDDEEMNILINLSKDDWREFRTLVIEMVMATDMSCHFQQIKAMKTALQQPEAIEKPKALSLMLHTADISHPAKAWDLHHRWTMSLLEEFFRQGDREAELGLPFSPLCDRKSTMVAQSQVGFIDFIVEPTFTVLTDMTEKIVSPLIDETSQTGGTGQRRSSLNSISSSDAKRSGVKTSGSEGSAPINNSVISVDYKSFKATWTEVVHINRERWRAKVPKEEKAKKEAEEKARLAAEEQQKEMEAKSQAEEGASGKAEKKTSGETKNQVNGTRANKSDNPRGKNSKAEKSSGEQQQNGDFKDGKNKTDKKDHSNIGNDSKKTDDSQE

SEQ ID NO: 8060 - protein, 895 aa, Homo sapiens
MTAWTMGARGLDKRGSFFKLIDTIASEIGELKQEMVRTDVNLENGLEPAETHSMVRHKDGGYSEEEDVKTCARDSGYDSLSNRLSILDRLLHTHPIWLQLSLSEEEAAEVLQAQPPGIFLVHKSTKMQKKVLSLRLPCEFGAPLKEFAIKESTYTFSLEGSGISFADLFRLIAFYCISRDVLPFTLKLPYAISTAKSEAQLEELAQMGLNFWSSPADSKPPNLPPPHRPLSSDGVCPASLRQLCLINGVHSIKTRTPSELECSQTNGALCFINPLFLKVHSQDLSGGLKRPSTRTPNANGTERTRSPPPRPPPPAINSLHTSPRLARTETQTSMPETVNHNKHGNVALPGTKPTPIPPPRLKKQASFLEAEGGAKTLSGGRPGAGPELELGTAGSPGGAPPEAAPGDCTRAPPPSSESRPPCHGGRQRLSDMSISTSSSDSLEFDRSMPLFGYEADTNSSLEDYEGESDQETMAPPIKSKKKRSSSFVLPKLVKSQLQKVSGVFSSFMTPEKRMVRRIAELSRDKCTYFGCLVQDYVSFLQENKECHVSSTDMLQTIRQFMTQVKNYLSQSSELDPPIESLIPEDQIDVVLEKAMHKCILKPLKGHVEAMLKDFHMADGSWKQLKENLQLVRQRNPQELGVFAPTPDFVDVEKIKVKFMTMQKMYSPEKKVMLLLRVCKLIYTVMENNSGRMYGADDFLPVLTYVIAQCDMLELDTEIEYMMELLDPSLLHGEGGYYLTSAYGALSLIKNFQEEQAARLLSSETRDTLRQWHKRRTTNRTIPSVDDFQNYLRVAFQEVNSGCTGKTLLVRPYITTEDVCQICAEKFKVGDPEEYSLFLFVDETWQQLAEDTYPQKIKAELHSRPQPHIFHFVYKRIKNDPYGIIFQNGEEDLTTS

SEQ ID NO: 8061 - protein, 375 aa, Homo sapiens
EVLQHQKLSANAPATAYRNCCRLESTSLPRHCTSVGNQVIAVVMDLFTDGDIFQDIVDAACKRRVPVYIILDEAGVKYFLEMCQDLQLTDFRIRNIRVRSVTGVGFYMPMGRIKGTLSSRFLMVDGDKVATGSYRFTWSSSHVDRNLLLLLTGQNVEPFDTEFRELYAISEEVDLYRQLSLAGRVGLHYSSTVARKLINPKYALVSGCRHPPGEMMRWAARQQREAGGNPEGQEEGASGGESAWRLESFLKDLVTVEQVLPPVEPIPLGELSQKDGRMVSHMHRDLKPKSREAPSRNGMGEAARGEAAPARRFSSRLFSRRAKRPAAPNGMASSVSTETSEVEFLTGKRPNENSSADISGKTSPSSAKPSNCVIS

SEQ ID NO: 8062 - protein, 500 aa, Homo sapiens
MAESQLNCLDEAHVNEKVTEAQAAFYYCERRRAALEALLGGGEQAYRERLKEEQLRDFLSSPERQALRAAWSPYEDAVPAANARGKSKAKAKAPAPAPAESGESLAYWPDRSDTEVPPLDLGWTDTGFYRGVSRVTLFTHPPKDEKAPHLKQVVRQMIQQAQKVIAVVMDLFTDGDIFQDIVDAACKRRVPVYIILDEAGVKYFLEMCQDLQLTDFRIRNIRVRSVTGVGFYMPMGRIKGTLSSRFLMVDGDKVATGSYRFTWSSSHVDRNLLLLLTGQNVEPFDTEFRELYAISEEVDLYRQLSLAGRVGLHYSSTVARKLINPKYALVSGCRHPPGEMMRWAARQQREAGGNPEGQEEGASGGESAWRLESFLKDLVTVEQVLPPVEPIPLGELSQKDGRMVSHMHRDLKPKSREAPSRNGMGEAARGEAAPARRFSSRLFSRRAKRPAAPNGMASSVSTETSEVEFLTGKRPNENSSADISGKTSPSSAKPSNCVIS

SEQ ID NO: 8063 - protein, 1048 aa, Homo sapiens
MQSKVTGNMPTQSLLMYMDGPEVIGSSLGSPMEMEDALSMKGTAVVPFRATQEKNVIQIEGYMPLDCMFCSQTFTHSEDLNKHVLMQHRPTLCEPAVLRVEAEYLSPLDKSQVRTEPPKEKNCKENEFSCEVCGQTFRVAFDVEIHMRTHKDSFTYGCNMCGRRFKEPWFLKNHMRTHNGKSGARSKLQQGLESSPATINEVVQVHAAESISSPYKICMVCGFLFPNKESLIEHRKVHTKKTAFGTSSAQTDSPQGGMPSSREDFLQLFNLRPKSHPETGKKPVRCIPQLDPFTTFQAWQLATKGKVAICQEVKESGQEGSTDNDDSSSEKELGETNKGSCAGLSQEKEKCKHSHGEAPSVDADPKLPSSKEKPTHCSECGKAFRTYHQLVLHSRVHKKDRRAGAESPTMSVDGRQPGTCSPDLAAPLDENGAVDRGEGGSEDGSEDGLPEGIHLDKNDDGGKIKHLTSSRECSYCGKFFRSNYYLNIHLRTHTGEKPYKCEFCEYAAAQKTSLRYHLERHHKEKQTDVAAEVKNDGKNQDTEDALLTADSAQTKNLKRFFDGAKDVTGSPPAKQLKEMPSVFQNVLGSAVLSPAHKDTQDFHKNAADDSADKVNKNPTPAYLDLLKKRSAVETQANNLICRTKADVTPPPDGSTTHNLEVSPKEKQTETAADCRYRPSVDCHEKPLNLSVGALHNCPAISLSKSLIPSITCPFCTFKTFYPEVLMMHQRLEHKYNPDVHKNCRNKSLLRSRRTGCPPALLGKDVPPLSSFCKPKPKSAFPAQSKSLPSAKGKQSPPGPGKAPLTSGIDSSTLAPSNLKSHRPQQNVGVQGAATRQQQSEMFPKTSVSPAPDKTKRPETKLKPLPVAPSQPTLGSSNINGSIDYPAKNDSPWAPPGRDYFCNRSASNTAAEFGEPLPKRLKSSVVALDVDQPGANYRRGYDLPKYHMVRGITSLLPQDCVYPSQALPPKPRFLSSSEVDSPNVLTVQKPYGGSGPLYTCVPAGSPASSSTLEGKRPVSYQHLSNSMAQKRNYENFIGNAHYRPNDKKT

SEQ ID NO: 8064 - protein, 667 aa, Homo sapiens
METLESELTCPICLELFEDPLLLPCAHSLCFNCAHRILVSHCATNESVESITAFQCPTCRHVITLSQRGLDGLKRNVTLQNIIDRFQKASVSGPNSPSETRRERAFDANTMTSAEKVLCQFCDQDPAQDAVKTCVTCEVSYCDECLKATHPNKKPFTGHRLIEPIPDSHIRGLMCLEHEDEKVNMYCVTDDQLICALCKLVGRHRDHQVAALSERYDKLKQNLESNLTNLIKRNTELETLLAKLIQTCQHVEVNASRQEAKLTEECDLLIEIIQQRRQIIGTKIKEGKVMRLRKLAQQIANCKQCIERSASLISQAEHSLKENDHARFLQTAKNITERVSMATASSQVLIPEINLNDTFDTFALDFSREKKLLECLDYLTAPNPPTIREELCTASYDTITVHWTSDDEFSVVSYELQYTIFTGQANVVSLCNSADSWMIVPNIKQNHYTVHGLQSGTKYIFMVKAINQAGSRSSEPGKLKTNSQPFKLDPKSAHRKLKVSHDNLTVERDESSSKKSHTPERFTSQGSYGVAGNVFIDSGRHYWEVVISGSTWYAIGLAYKSAPKHEWIGKNSASWALCRCNNNWVVRHNSKEIPIEPAPHLRRVGILLDYDNGSIAFYDALNSIHLYTFDVAFAQPVCPTFTVWNKCLTIITGLPIPDHLDCTEQLP

SEQ ID NO: 8065 - protein, 552 aa, Homo sapiens
METLESELTCPICLELFEDPLLLPCAHSLCFNCAHRILVSHCATNESVESITAFQCPTCRHVITLSQRGLDGLKRNVTLQNIIDRFQKASVSGPNSPSETRRERAFDANTMTSAEKVLCQFCDQDPAQDAVKTCVTCEVSYCDECLKATHPNKKPFTGHRLIEPIPDSHIRGLMCLEHEDEKVNMYCVTDDQLICALCKLVGRHRDHQVAALSERYDKLKQNLESNLTNLIKRNTELETLLAKLIQTCQHVEVNASRQEAKLTEECDLLIEIIQQRRQIIGTKIKEGKVMRLRKLAQQIANCKQCIERSASLISQAEHSLKENDHARFLQTAKNITERVSMATASSQVLIPEINLNDTFDTFALDFSREKKLLECLDYLTAPNPPTIREELCTASYDTITVHWTSDDEFSVVSYELQYTIFTGQANVVSLCNSADSWMIVPNIKQNHYTVHGLQSGTKYIFMVKAINQAGSRSSEPGKLKTNSQPFKLDPKSAHRKLKVSHDNLTVERDESSSKKSHTPERFTSQGSYGVAGNVFIDSGRHYWEVVISGSTW

SEQ ID NO: 8066 - protein, 1224 aa, Homo sapiens
MLPYTVNFKVSARTLTGALNAHNKAAVDWGWQGLIAYGCHSLVVVIDSITAQTLQVLEKHKADVVKVKWARENYHHNIGSPYCLRLASADVNGKIIVWDVAAGVAQCEIQEHAKPIQDVQWLWNQDASRDLLLAIHPPNYIVLWNADTGTKLWKKSYADNILSFSFDPFDPSHLTLLTSEGIVFISDFSPSKPPSGPGKKVYISSPHSSPAHNKLATATGAKKALNKVKILITQEKPSAEFITLNDCLQLAYLPSKRNHMLLLYPREILILDLEVNQTVGVIAIERTGVPFLQVIPCFQRDGLFCLHENGCITLRVRRSYNNIFTTSNEEPDPDPVQELTYDLRSQCDAIRVTKTVRPFSMVCCPVNENAAALVVSDGRVMIWELKSAVCNRNSRNSSSGVSPLYSPVSFCGIPVGVLQNKLPDLSLDNMIGQSAIAGEEHPRGSILREVHLKFLLTGLLSGLPAPQFAIRMCPPLTTKNIKMYQPLLAVGTSNGSVLVYHLTSGLLHKELSIHSCEVKGIEWTSLTSFLSFATSTPNNMGLVRNELQLVDLPTGRSIAFRGERGNDESAIEMIKVSHLKQYLAVVFRDKPLELWDVRTCTLLREMSKNFPTITALEWSPSHNLKSLRKKQLATREAMARQTVVSDTELSIVESSVISLLQEAESKSELSQNISAREHFVFTDIDGQVYHLTVEGNSVKDSARIPPDGSMGSITCIAWKGDTLVLGDMDGNLNFWDLKGRVSRGIPTHRSWVRKIRFAPGKGNQKLIAMYNDGAEVWDTKEVQMVSSLRSGRNVTFRILDVDWCTSDKVILASDDGCIRVLEMSMKSACFRMDEQELTEPVWCPYLLVPRASLALKAFLLHQPWNGQYSLDISHVDYPENEEIKNLLQEQLNSLSNDIKKLLLDPEFTLLQRCLLVSRLYGDESELHFWTVAAHYLHSLSQEKSASTTAPKEAAPRDKLSNPLDICYDVLCENAYFQKFQLERVNLQEVKRSTYDHTRKCTDQLLLLGQTDRAVQLLLETSADNQHYYCDSLKACLVTTVTSSGPSQSTIKLVATNMIANGKLAEGVQLLCLIDKAADACRYLQTYGEWNRAAWLAKVRLNPEECADVLRRWVDHLCSPQVNQKSKALLVLLSLGCFFSVAETLHSMRYFDRAALFVEACLKYGAFEVTEDTEKLITAIYADYARSLKNLGFKQGAVLFASKAGAAGKDLLNELESPKEEPIEE

SEQ ID NO: 8067 - protein, 911 aa, Homo sapiens [sequence omitted]

SEQ ID NO: 8068 - protein, 471 aa, Homo sapiens
MIDLSFLTEEEQEAIMKVLQRDAALKRAEEERVRHLPEKIKDDQQLKNMSGQWFYEAKAKRHRDKIHGADIIRASMRKKRPQIAAEQSKDRENGAKESWVNNVNKDAFLPPELAGVVEEPEEDAAPASPSSSVVNPASSVIDMSQENTRKPNVSPEKRKNPFNSSKLPEGHSSQQTKNEQSKNGRTGLFQTSKEDELSESKEKSTVADTSIQKLEKSKQTLPGLSNGSQIKAPIPKARKMIYKSTDLNKDDNQSFPRQRTDSLKARGAPRGILKRNSSSSSTDSETLRYNHNFEPKSKIVSPGLTIHERISEKEHSLEDNSSPNSLEPLKHVRFSAVKDELPQSPGLIHGREVGEFSVLESDRLKNGMEDAGDTEEFQSDPKPSQYRKPSLFHQSTSSPYVSKSETHQPMTSGSFPINGLHSHSEVLTARPQSMENSPTINEPKDKSSELTRLESVLPRSPAGKRVVTTRL

SEQ ID NO: 8069 - protein, 1164 aa, Homo sapiens
MPEQDKDPRVQENPDDHRTVPEVTGDARSAFWPLRDNGGLSPFVPRPGPLQTDLHAQSSEIRYNQTSQTSWTSSSTKRNAISSSYSSTGGLPGLKQRRGPASSRCQLTLSYSKTVSEDRPQAVSSGHTRCEKAADTAPGQTLAPRGGSPRSQASRPRRRKIPLLPSRRGEPLMMPPPLELGYRVTAEDLHLEKQAAFQRINSALHVEDKAISDCRPSRPSHTLSSLATGASGGPPVSKAPTMDAQQDRPKSQDCLGLVAPLASAAEVSSTAPVSGKKQRPPGPLFSSSDPLPATSSHSRDSAQVTSMIPAPFTAASRDAGMRRTRSAPAAAAAAPPPSTLNPTSGSLLNAVDGGPSHFLASATAAARAQRSEVRYNQRSQISRTRSCLKRNASSSSHSSTEGLPELKRRRGPASSHCQLAHSSSKTVSEDGPQAVSSGHTRCEKRADTAPGQTLAPRGGSPRSQASRPHINSALHVEDKAISDCRPSRPSHTLSSLATGASRGPPVSKAPTMDAQQDRPKSQDCLGLLAPLASAAELPSTAPVSGKKHRPPGPLFSSSDPLPATSSHSRDSAQVTSMIPAPFTAASRDAGMRRTRSAPAAAAAAPPPSTLNPTSGSLLNAVDGGPSHFLASATAAARARRSQVRYNQRSQTSRTRYCLKRNASSSSHSSTEGLQELKRRRGPASSHCQLALSSSNTVSEDGPQAVSSRHTRCEKADTAPGQTLAPRGGSPRSQASRPRINSALHVEDKATSDCRPSRPSHTLSSLATGASGGPPVSKAPTMDAQPDKLKSQDCLGLVAALASATEVSSTAPMSGKKHRPPGPLFSSSDPLPATSSHSQDSAQVTSMIPAPFTAASRDASMRRTRPGTSAPAAAAAAPPPSTLNPTSGSLLNAVDEGPSHFLASATAAARARRSQVRYNQRSQTSRTRSCLKRNASSSSHSSTEGLQELKRRRGPASSHCQLALSSSNTVSEDGPQAVSSRDTRCEKADTAPGQTLAPRGGSPRSQASRPRINSALHVEDKAISDCRPSRPSHTLSSLATGASGGPPVSKAPTMDAQQDRPKSQDCLGLVAPLASAAEVSSTAPVSGKKHRPPGPLFSSSDPLPATSSHSGDSAQDTSLIPAPFTPASRDAGAREQQDALVLYQQDAFRVDPTATLAMGTCQSPM

SEQ ID NO: 8070 - protein, 1647 aa, Homo sapiens
MSTPDPPLGGTPRPGPSPGPGPSPGAMLGPSPGPSPGSAHSMMGPSPGPPSAGHPIPTQGPGGYPQDNMHQMHKPMESMHEKGMSDDPRYNQMKGMGMRSGGHAGMGPPPSPMDQHSQGYPSPLGGSEHASSPVPASGPSSGPQMSSGPGGAPLDGADPQALGQQNRGPTPFNQNQLHQLRAQIMAYKMLARGQPLPDHLQMAVQGKRPMPGMQQQMPTLPPPSVSATGPGPGPGPGPGPGPGPAPPNYSRPHGMGGPNMPPPGPSGVPPGMPGQPPGGPPKPWPEGPMANAAAPTSTPQKLIPPQPTGRPSPAPPAVPPAASPVMPPQTQSPGQPAQPAPMVPLHQKQSRITPIQKPRGLDPVEILQEREYRLQARIAHRIQELENLPGSLAGDLRTKATIELKALRLLNFQRQLRQEVVVCMRRDTALETALNAKAYKRSKRQSLREARITEKLEKQQKIEQERKRRQKHQEYLNSILQHAKDFKEYHRSVTGKIQKLTKAVATYHANTEREQKKENERIEKERMRRLMAEDEEGYRKLIDQKKDKRLAYLLQQTDEYVANLTELVPQHKAAQVAKEKKKKKKKKKAENAEGQTPAIGPDGEPLDETSQMSDLPVKVIHVESGKILTGTDAPKAGQLEAWLEMNPGYEVAPRSDSEESGSEEEEEEEEEEQPQAAQPPTLPVEEKKKIPDPDSDDVSEVDARHIIENAKQDVDDEYGVSQALARGLQSYYAVAHAVTERVDKQSALMVNGVLKQYQIKGLEWLVSLYNNNLNGILADEMGLGKTIQTIALITYLMEHKRINGPFLIIVPLSTLSNWAYEFDKWAPSVVKVSYKGSPAARRAFVPQLRSGKFNVLLTTYEYIIKDKHILAKIRWKYMIVDEGHRMKNHHCKLTQVLNTHYVAPRRLLLTGTPLQNKLPELWALLNFLLPTIFKSCSTFEQWFNAPFAMTGEKVDLNEEETILIIRRLHKVLRPFLLRRLKKEVEAQLPEKVEYVIKCDMSALQRVLYRHMQAKGVLLTDGSEKDKKGKGGTKTLMNTIMQLRKICNHPYMFQHIEESFSEHLGFTGGIVQGLDLYRASGKFELLDRILPKLRATNHKVLLFCQMTSLMTIMEDYFAYRGFKYLRLDGTTKAEDRGMLLKTFNEPGSEYFIFLLSTRAGGLGLNLQSADTVIIFDSDWNPHQDLQAQDRAHRIGQQNEVRVLRLCTVNSVEEKILAAAKYKLNVDQKVIQAGMFDQKSSSHERRAFLQAILEHEEQDESRHCSTGSGSASFAHTAPPPAGVNPDLEEPPLKEEDEVPDDETVNQMIARHEEEFDLFMRMDLDRRREEARNPKRKPRLMEEDELPSWIIKDDAEVERLTCEEEEEKMFGRGSRHRKEVDYSDSLTEKQWLKAIEEGTLEEIEEEVRQKKSSRKRKRDSDAGSSTPTTSTRSRDKDDESKKQKKRGRPPAEKLSPNPPNLTKKMKKIVDAVIKYKDSSSGRQLSEVFIQLPSRKELPEYYELIRKPVDFKKIKERIRNHKYRSLNDLEKDVMLLCQNAQTFNLEGSLIYEDSIVLQSVFTSVRQKIEKEDDSEGEESEEEEEGEEEGSESESRSVKVKIKLGRKEKAQDRLKGGRRRPSRGSRAKPVVSDDDSEEEQEEDRSGSGSEED

SEQ ID NO: 8071 - protein, 899 aa, Homo sapiens
LREHLERLRAALRGGPEDAEVEVEPCKFAGPRAQNNSAHGDYMQNNESSLIEQAPIPQDGLTVAPHRAQREAVHIEKIMLKGVQRKRADKYWEYTFKVNWSDLSVTTVTKTHQELQEFLLKLPKELSSETFDKTILRALNQGSLKREERRHPDLEPILRQLFSSSSQAFLQSQKVHSFFQSISSDSLHSINNLQSSLKTSKILEHLKEDSSEASSQEEDVLQHAIIHKRHTGKSPIVNNIGTSCSPLDGLTMQYSEQNGIVDWRKQSCTTIQHPEHCVTSADQHSAEKRSLSSINKKKGKPQTEKEKIKKTDNRLNSRINGIRLSTPQHAHGGTVKDVNLDIGSGHDTCGETSSESYSSPSSPRHDGRESFESEEEKDRDTDSNSEDSGNPSTTRFTGYGSVNQTVTVKPPVQIASLGNENGNLLEDPLNSPKYQHISFMPTLHCVMHNGAQKSEVVVPAPKPADGKTIGMLVPSPVAISAIRESANSTPVGILGPTACTGESEKHLELLASPLPIPSTFLPYSSTPALHLTVQRLKLPPPQGSSESCTVNIPQQPPGSLSIASPNTAFIPIHNPGSFPGSPVATTDPITKSASQVVGLNQMVPQIEGNTGTVPQPTNVKVVLPAAGLSAAQPPASYPLPGSPLAAGVLPSQNSSVLSTAATSPQPASAGISQAQATVPPAVPTHTPGPAPSPSPALTHSTAQSDSTSYISAVGNTNANGTVVPPQQMGSGPCGSCGRRCSCGTNGNLQLNSYYYPNPMPGPMYRVPSFFTLPSICNGSYLNQAHQSNGNQLPFFLPQTPYANGLVHDPVMGSQANYGMQQMAGFGRFYPVYPAPNVVANTSGSGPKKNGNVSCYNCGVSGHYAQDCKQSSMEANQQGTYRLRYAPPLPPSNDTLDSAD

SEQ ID NO: 8072 - protein, 739 aa, Homo sapiens
MAPQKHGGGGGGGSGPSAGSGGGGFGGSAAVAAATASGGKSGGGSCGGGGSYSASSSSSAAAAAGAAVLPVKKPKMEHVQADHELFLQAFEKPTQIYRFLRTRNLIAPIFLHRTLTYMSHRNSRTNIKRKTFKVDDMLSKVEKMKGEQESHSLSAHLQLTFTGFFHKNDKPSPNSENEQNSVTLEVLLVKVCHKKRKDVSCPIRQVPTGKKQVPLIPDLNQTKPGNFPSLAVSSNEFEPSNSHMVKSYSLLFRVTRPGRREFNGMINGETNENIDVNEELPARRKRNREDGEKTFVAQMTVFDKNRRLQLLDGEYEVAMQEMEECPISKKRATWETILDGKRLPPFETFSQGPTLQFTLRWTGETNDKSTAPIAKPLATRNSESLHQENKPGSVKPTQTIAVKESLTTDLQTRKEKDTPNENRQKLRIFYQFLYNNNTRQQTEARDDLHCPWCTLNCRKLYSLLKHLKLCHSRFIFNYVYHPKGARIDVSINECYDGSYAGNPQDIHRQPGFAFSRNGPVKRTPITHILVCRPKRTKASMSEFLESEDGEVEQQRTYSSGHNRLYFHSDTCLPLRPQEMEVDSEDEKDPEWLREKTITQIEEFSDVNEGEKEVMKLWNLHVMKHGFIADNQMNHACMLFVENYGQKIIKKNLCRNFMLHLVSMHDFNLISIMSIDKAVTKLREMQQKLEKGESASPANEEITEEQNGTANGFSEINSKEKALETDSVSGVSKQSKKQKL

SEQ ID NO: 8073 - protein, 1132 aa, Homo sapiens
MELFQAKDHYILQQGERALWCSRRDGGLQLRPATDLLLAWNPICLGLVEGVIGKIQLHSDLPWWLILIRQKALVGKLPGDHEVCKVTKIAVLSLSEMEPQDLELELCKKHHFGINKPEKIIPSPDDSKFLLKTFTHIKSNVSAPNKKKVKESKEKEKLERRLLEELLKMFMDSESFYYSLTYDLTNSVQRQSTGERDGRPLWQKVDDRFFWNKYMIQDLTEIGTPDVDFWIIPMIQGFVQIEELVVNYTESSDDEKSSPETPPQESTCVDDIHPRFLVALISRRSRHRAGMRYKRRGVDKNGNVANYVETEQLIHVHNHTLSFVQTRGSVPVFWSQVGYRYNPRPRLDRSEKETVAYFCAHFEEQLNIYKKQVIINLVDQAGREKIIGDAYLKQVLLFNNSHLTYVSFDFHEHCRGMKFENVQTLTDAIYDIILDMKWCWVDEAGVICKQEGIFRVNCMDCLDRTNVVQAAIARVVMEQQLKKLGVMPPEQPLPVKCNRIYQIMWANNGDSISRQYAGTAALKGDFTRTGERKLAGVMKDGVNSANRYYLNRFKDAYRQAVIDLMQGIPVTEDLYSIFTKEKEHEALHKENQRSHQELISQLLQSYMKLLLPDDEKFHGGWALIDCDPSLIDATHRDVDVLLLLSNSAYYVAYYDDEVDKVNQYQRLSLENLEKIEIGPEPTLFGKPKFSCMRLHYRYKEASGYFHTLRAVMRNPEEDGKDTLQCIAEMLQITKQAMGSDLPIIEKKLERKSSKPHEDIIGIRSQNQGSLAQGKNFLMSKFSSLNQKVKQTKSNVNIGNLRKLGNFTKPEMKVNFLKPNLKVNLWKSDSSLETMENTGVMDKVQAESDGDMSSDNDSYHSDEFLTNSKSDEDRQLANSLESVGPIDYVLPSCGIIASAPRLGSRSQSLSSTDSSVHAPSEITVAHGSGLGKGQESPLKKSPSAGDVHILTGFAKPMDIYCHRFVQDAQNKVTHLSETRSVSQQASQERNQMTNQVSNETQSESTEQTPSRPSQLDVSLSATGPQFLSVEPAHSVASQKTPTSASSMLELETGLHVTPSPSESSSSRAVSPFAKIRSSMVQVASITQAGLTHGINFAVSKVQKSPPEPEIINQVQQNELKKMFIQCQTRIIQI

SEQ ID NO: 8074 - protein, 2063 aa, Homo sapiens
MVLDDLPNLEDIYTSLCSSTMEDSEMDFDSGLEDDDTKSDSILEDSTIFVAFKGNIDDKDFKWKLDAILKNVPNLLHMESSKLKVQKVEPWNSVRVTFNIPREAAERLRILAQSNNQQLRDLGILSVQIEGEGAINLALAQNRSQDVRMNGPMGAGNSVRMEAGFPMASGPGIIRMNNPATVMIPPGGNVSSSMMAPGPNPELQPRTPRPASQSDAMDPLLSGLHIQQQSHPSGSLAPPHHPMQPVSVNRQMNPANFPQLQQQQQQQQQQQQQQQQQQQQQQQQQLQARPPQQHQQQQPQGIRPQFTAPTQVPVPPGWNQLPSGALQPPPAQGSLGTMTANQGWKKAPLPGPMQQQLQARPSLATVQTPSHPPPPYPFGSQQASQAHTNFPQMSNPGQFTAPQMKSLQGGPSRVPTPLQQPHLTNKSPASSPSSFQQGSPASSPTVNQTQQQMGPRPPQNNPLPQGFQQPVSSPGRNPMVQQGNVPPNFMVMQQQPPNQGPQSLHPGLGGMPKRLPPGFSAGQANPNFMQGQVPSTTATTPGNSGAPQLQANQNVQHAGGQGAGPPQNQMQVSHGPPNMMQPSLMGIHGNMNNQQAGTSGVPQVNLSNMQGQPQQGPPSQLMGMHQQIVPSQGQMVQQQGTLNPQNPMILSRAQLMPQGQMMVNPPSQNLGPSPQRMTPPKQMLSQQGPQMMAPHNQMMGPQGQVLLQQNPMIEQIMTNQMQGNKQQFNTQNQSNVMPGPAQIMRGPTPNMQGNMVQFTGQMSGQMLPQQGPVNNSPSQVMGIQGQVLRPPGPSPHMAQQHGDPATTANNDVSLSQMMPDVSIQQTNMVPPHVQAMQGNSASGNHFSGHGMSFNAPFSGAPNGNQMSCGQNPGFPVNKDVTLTSPLLVNLLQSDISAGHFGVNNKQNNTNANKPKKKKPPRKKKNSQQDLNTPDTRPAGLEEADQPPLPGEQGISLDNSGPKLPEFSNRPPGYPSQPVEQRPLQQMPPQLMQHVAPPPQPPQQQPQPQLPQQQQPPPPSQPQSQQQQQQQQQMMMMLMMQQDPKSVRLPVSQNVHPPRGPLNPDSQRMPMQQSGSVPVMVSLQGPASVPPSPDKQRMPMPVNTPLGSNSRKMVYQESPQNPSSSPLAEMASLPEASGSEAPSVPGGPNNMPSHVVLPQNQLMMTGPKPGPSPLSATQGATPQQPPVNSLPSSHGHHFPNVAAPTQTSRPKTPNRASPRPYYPQTPNNRPPSTEPSEISLSPERLNASIAGLFPPQINIPLPPRPNLNRGFDQQGLNPTTLKAIGQAPSNLTMNPSNFATPQTHKLDSVVVNSGKQSNSGATKRASPSNSRRSSPGSSRKTTPSPGRQNSKAPKLTLASQTNAALLQNVELPRNVLVSPTPLANPPVPGSFPNNSGLNPQNSTVSVAAVGGVVEDNKESLNVPQDSDCQNSQSRKEQVNIELKAVPAQEVKMVVPEDQSKKDGQPSDPNKLPSVEENKNLVSPAMREAPTSLSQLLDNSGAPNVTIKPPGLTDLEVTPPVVSGEDLKKASVIPTLQDLSSSKEPSNSLNLPHSNELCSSLVHPELSEVSSNVAPSIPPVMSRPVSSSSISTPLPPNQITVFVTSNPITTSANTSAALPTHLQSALMSTVVTMPNAGSKVMVSEGQSAAQSNARPQFITPVFINSSSIIQVMKGSQPSTIPAAPLTTNSGLMPPSVAVVGPLHIPQNIKFSSAPVPPNALSSSPAPNIQTGRPLVLSSRATPVQLPSPPCTSSPVVPSHPPVQQVKELNPDEASPQVNTSADQNTLPSSQSTTMVSPLLTNSPGSSGNRRSPVSSSKGKGKVDKIGQILLTKACKKVTGSLEKGEEQYGADGETEGQGLDTTAPGLMGTEQLSTELDSKTPTPPAPTLLKMTSSPVGPGTASAGPSLPGGALPTSVRSIVTTLVPSELISAVPTTKSNHGGIASESLAGGLVEEKVGSHPELLPSIAPSQNLVSKETSTTALQASVARPELEVNAAIVSGQSSEPKEIVEKSKIPGRRNSRTEEPTVASESVENGHRKRSSRPASASSSTKDITSAVQSKRRKSK

SEQ ID NO: 8075 - protein, 292 aa, Homo sapiens
MVDAGLRRVVPSHLCPLVFGFLCDNQLLEMAKKFAKVTGTTQQDANAFSLLDIYSFWLKSVKAPKRKLQANGPVTKKAKKKTSSCDSSEDSEDGDAQGPPAKKAAVPAMGASLPQHPGKAVAKASEAAVNNLVTVRRRRHKEKACPDGVKPQAKAAKAPPKKVKKSDSDSDSSSEDEAHHRTRRQRLHLWQLTWAKAIPGTPAPAAPKVANKKGRAAAIPKKTIPKKQVMAKLPVKAAANPTYSVPRPPAPQSKKSVGTQTPKKTAKKKQPVESSEDSTDDSNSSSGEEERP

SEQ ID NO: 8076 - protein, 291 aa, Homo sapiens
MDPSLLRERELFKKRALSTPVVEKRSASSESSSSSSKKKKTKVEHGGSSGSKQNSDHSNGSFNLKALSGSSGYKFGVLAKIVNYMKTRHQRGDTHPLTLDEILDETQHLDIGLKQKQWLMTEALVNNPKIEVIDGKYAFKPKYNVRDKKALLRLLDQHDQRGLGGILLEDIEEALPNSQKAVKALGDQILFVNRPDKKKILFFNDKSCQFSVDEEFQKLWRSVTVDSMDEEKIEEYLKRQGISSMQESGPKKVAPIQRRKKPASQKKRRFKTHNEHLAGVLKDYSDITSSK

SEQ ID NO: 8077 - protein, 486 aa, Homo sapiens
MSSSSPPAGAASAAISASEKVDGFTRKSVRKAQRQKRSQGSSQFRSQGSQAELHPLPQLKDATSNEQQELFCQKLQQCCILFDFMDSVSDLKSKEIKRATLNELVEYVSTNRGVIVESAYSDIVKMISANIFRTLPPSDNPDFDPEEDEPTLEASWPHIQLVYEFFLRFLESPDFQPSIAKRYIDQKFVQQLLELFDSEDPRERDFLKTVLHRIYGKFLGLRAFIRKQINNIFLRFIYETEHFNGVAELLEILGSIINGFALPLKAEHKQFLMKVLIPMHTAKGLALFHAQLAYCVVQFLEKDTTLTEPVIRGLLKFWPKTCSQKEVMFLGEIEEILDVIEPTQFKKIEEPLFKQISKCVSSSHFQVAERALYFWNNEYILSLIEENIDKILPIMFASLYKISKEHWNPTIVALVYNVLKTLMEMNGKLFDDLTSSYKAERQREKKKELEREELWKKLEELKLKKALEKQNSAYNMHSILSNTSAE

SEQ ID NO: 8078 - protein, 302 aa, Homo sapiens
MALHEMEDFTFDGTKRLSVNYVKGILQPTDTCDIWDKIWNFQAKPDDLLISTYPKAGTTWTQEIVELIQNEGDVEKSKRAPTHQRFPFLEMKIPSLGSGLEQAHAMPSPRILKTHLPFHLLPPSLLEKNCKIIYVARNPKDNMVSYYHFQRMNKALPAPGTWEEYFETFLAGKVCWGSWHEHVKGWWEAKDKHRILYLFYEDMKKNPKHEIQKLAEFIGKKLDDKVLDKIVHYTSFDVMKQNPMANYSSIPAEIMDHSISPFMRKGAVGDWKKHFTVAQNERFDEDYKKKMTDTRLTFHFQF

SEQ ID NO: 8079 - protein, 284 aa, Homo sapiens
IMEVDGVPTLILSKEWWEKVCNFQAKPDDLILATYPKSGTTWIQEIVDMIEQNGDVEKCQRAIIQHRHPFIEWARPPQPSGLEQAHAMPSPRILKTHLPFHLLPPSLLEKNCKIIYVARNPKDNMVSYYHFQRMNKALPAPGTWEEYFETFLAGKVCWGSWHEHVKGWWEAKDKHRILYLFYEDMKKNPKHEIQKLAEFIGKKLDDKVLDKIVHYTSFDVMKQNPMANYSSIPAEIMDHSISPFMRKGAVGDWKKHFTVAQNERFDEDYKKKMTDTRLTFHFQF

SEQ ID NO: 8080 - protein, 576 aa, Homo sapiens
MDDLKYGVYPLKEASGCPGAERNLLVYSYFEKETLTFRDVAIEFSLEEWECLNPAQQNLYMNVMLENYKNLVFLGVAVSKQDPVTCLEQEKEPWNMKRHEMVDEPPAMCSYFTKDLWPEQDIKDSFQQVILRRYGKCEHENLQLRKGSASVDEYKVHKEGYNELNQCLTTTQSKIFPCDKYVKVFHKFLNANRHKTRHTGKKPFKCKKCGKSFCMLLHLSQHKRIHIRENSYQCEECGKAFKWFSTLTRHKRIHTGEKPFKCEECGKAFKQSSTLTTHKIIHTGEKPYRCEECGKAFNRSSHLTTHKIIHTGEKPYKCEECGKAFNQSSTLSTHKFIHAGEKPYKCEECDKAFNRFSYLTKHKIIHTGEKSYKCEECGKGFNWSSTLTKHKRIHTGEKPYKCEVCGKAFNESSNLTTHKMIHTGEKPYKCEECGKAFNRSPQLTAHKIIHTGEKPYKCEECGKAFSQSSILTTHKRIHTGEKPYKCEECGKAFNRSSNLTKHKIIHTGEKSYKCEECGKAFNQSSTLTKHRKIHTRQKPYNCEECDNTFNQSSNLIKQNNSYWRETLQMSRMWESL

SEQ ID NO: 8081 - protein, 381 aa, Homo sapiens
TKYKEGAVDADMQGCEDMKADIMFLVDSSWSIGNENFRKMKIFMKNLLTKIQIGADKTQIGVVQFSDKTKEEFQLNRYFTQQEISDAIDRMDTGGNTYTAKALKHANALFTEEHGSRIKQNVKQMLIVITDGESHDHDQLNDTALELRNKGITIFAVGVGKANQKELEGMAGNKNNTIYVDNFDKLKDVFTLVQERMCTEAPEACKEMKADIMFLVDSSGSIGPENFSKMKTFMKNLVSKSQIGPDRVQIGVVQFSDINKEEFQLNRFMSQSDISNAIDQMAHIGQTTLTGSALSFVSQYFSPTKGARPNIRKFLILITDGEAQDIVKEPAVVLRQEGVIIYSVGVFGSNVTQLEEISGRPEMVFYVENFDILQRIEDDLV

SEQ ID NO: 8082 - protein, 386 aa, Homo sapiens
MNIMDFNVKKLAADAGTFLSRAVQFTEEKLGQAEKTELDAHLENLLSKAECTKIWTEKIMKQTEVLLQPNPNARIEEFVYEKLDRKAPSRINNPELLGQYMIDAGTEFGPGTAYGNALIKCGETQKRIGTADRELIQTSALNFLTPLRNFIEGDYKTIAKERKLLQNKRLDLDAAKTRLKKAKAAETRNSQLNSARLEGDNIMIWAEEVTKSEQELRITQSEFDRQAEITRLLLEGISSTHAHHLRCLNDFVEAQMTYYAQCYQYMLDLQKQLGSFPSNYLSNNNQTSVTPVPSVLPNAIGSSAMASTSGLVITSPSNLSDLKECSGSRKARVLYDYDAANSTELSLLADEVITVFSVVGMDSDWLMGERGNQKGKVPITYLELLN

SEQ ID NO: 8083 - protein, 365 aa, Homo sapiens
MNIMDFNVKKLAADAGTFLSRAVQFTEEKLGQAEKTELDAHLENLLSKAECTKIWTEKIMKQTEVLLQPNPNARIEEFVYEKLDRKAPSRINNPELLGQYMIDAGTEFGPGTAYGNALIKCGETQKRIGTADRELIQTSALNFLTPLRNFIEGDYKTIAKERKLLQNKRLDLDAAKTRLKKAKAAETRNSSEQELRITQSEFDRQAEITRLLLEGISSTHAHHLRCLNDFVEAQMTYYAQCYQYMLDLQKQLGSFPSNYLSNNNQTSVTPVPSVLPNAIGSSAMASTSGLVITSPSNLSDLKECSGSRKARVLYDYDAANSTELSLLADEVITVFSVVGMDSDWLMGERGNQKGKVPITYLELLN

SEQ ID NO: 8084 - protein, 3114 aa, Homo sapiens
MEEKQQIILANQDGGTVAGAAPTFFVILKQPGNGKTDQGILVTNQDACALASSVSSPVKSKGKICLPADCTVGGITVTLDNNSMWNEFYHRSTEMILTKQGRRMFPYCRYWITGLDSNLKYILVMDISPVDNHRYKWNGRWWEPSGKAEPHVLGRVFIHPESPSTGHYWMHQPVSFYKLKLTNNTLDQEGHIILHSMHRYLPRLHLVPAEKAVEVIQLNGPGVHTFTFPQTEFFAVTAYQNIQITQLKIDYNPFAKGFRDDGLNNKPQRDGKQKNSSDQEGNNISSSSGHRVRLTEGQGSEIQPGDLDPLSRGHETSGKGLEKTSLNIKRDFLGFMDTDSALSEVPQLKQEISECLIASSFEDDSRVASPLDQNGSFNVVIKEEPLDDYDYELGECPEGVTVKQEETDEETDVYSNSDDDPILEKQLKRHNKVDNPEADHLSSKWLPSSPSGVAKAKMFKLDTGKMPVVYLEPCAVTRSTVKISELPDNMLSTSRKDKSSMLAELEYLPTYIENSNETAFCLGKESENGLRKHSPDLRVVQKYPLLKEPQWKYPDISDSISTERILDDSKDSVGDSLSGKEDLGRKRTTMLKIATAAKVVNANQNASPNVPGKRGRPRKLKLCKAGRPPKNTGKSLISTKNTPVSPGSTFPDVKPDLEDVDGVLFVSFESKEALDIHAVDGTTEESSSLQASTTNDSGYRARISQLEKELIEDLKTLRHKQVIHPGLQEVGLKLNSVDPTMSIDLKYLGVQLPLAPATSFPFWNLTGTNPASPDAGFPFVSRTGKTNDFTKIKGWRGKFHSASASRNEGGNSESSLKNRSAFCSDKLDEYLENEGKLMETSMGFSSNAPTSPVVYQLPTKSTSYVRTLDSVLKKQSTISPSTSYSLKPHSVPPVSRKAKSQNRQATFSGRTKSSYKSILPYPVSPKQKYSHVILGDKVTKNSSGIISENQANNFVVPTLDENIFPKQISLRQAQQQQQQQQGSRPPGLSKSQVKLMDLEDCALWEGKPRTYITEERADVSLTTLLTAQASLKTKPIHTIIRKRAPPCNNDFCRLGCVCSSLALEKRQPAHCRRPDCMFGCTCLKRKVVLVKGGSKTKHFQRKAAHRDPVFYDTLGEEAREEEEGIREEEEQLKEKKKRKKLEYTICETEPEQPVRHYPLWVKVEGEVDPEPVYIPTPSVIEPMKPLLLPQPEVLSPTVKGKLLTGIKSPRSYTPKPNPVIREEDKDPVYLYFESMMTCARVRVYERKKEDQRQPSSSSSPSPSFQQQTSCHSSPENHNNAKEPDSEQQPLKQLTCDLEDDSDKLQEKSWKSSCNEGESSSTSYMHQRSPGGPTKLIEIISDCNWEEDRNKILSILSQHINSNMPQSLKVGSFIIELASQRKSRGEKNPPVYSSRVKISMPSCQDQDDMAEKSGSETPDGPLSPGKMEDISPVQTDALDSVRERLHGGKGLPFYAGLSPAGKLVAYKRKPSSSTSGLIQVNGKSYPQAKLLLGQMGALHPANRLAAYITGRLRPSVLDLSTLSTVISKVASNAKVAASRKPRTLLPSTSNSKMASSSGTATNRPGKNLKAFVPAKRPIAARPSPGGVFTQFVMSKVGALQQKIPGVSTPQTLAGTQKFSIRPSPVMVVTPVVSSEPVQVCSPVTAAVTTTTPQVFLENTTAVTPMTAISDVETKETTYSSGATTTGVVEVSETNTSTSVTSTQSTATVNLTKTTGITTPVASVAFPKSLVASPSTITLPVASTASTSLVVVTAAASSSMVTTPTSSLGSVPIILSGINGSPPVSQRPENAAQIPVATPQVSPNTVKRAGPRLLLIPVQQGSPTLRPVSNTQLQGHRMVLQPVRSPSGMNLFRHPNGQIVQLLPLHQLRGSNTQPNLQPVMFRNPGSVMGIRLPAPSKPSETPPSSTSSSAFSVMNPVIQAVGSSSAVNVITQAPSLLSSGASFVSQAGTLTLRISPPEPQSFASKTGSETKITYSSGGQPVGTASLIPLQSGSFALLQLPGQKPVPSSILQHVASLQMKRESQNPDQKDETNSIKREQETKKVLQSEGEAVDPEANVIKQNSGAATSEETLNDSLEDRGDHLDEECLPEEGCATVKPSEHSCITGSHTDQDYKDVNEEYGARNRKSSKEKVAVLEVRTISEKASNKTVQNLSKVQHQKLGDVKVEQQKGFDNPEENSSEFPVTFKEESKFELSGSKVMEQQSNLQPEAKEKECGDSLEKDRERWRKHLKGPLTRKCVGASQECKKEADEQLIKETKTCQENSDVFQQEQGISDLLGKSGITEDARVLKTECDSWSRISNPSAFSIVPRRAAKSSRGNGHFQGHLLLPGEQIQPKQEKKGGRSSADFTVLDLEEDDEDDNEKTDDSIDEIVDVVSDYQSEEVDDVEKNNCVEYIEDDEEHVDIETVEELSEEINVAHLKTTAAHTQSFKQPSCTHISADEKAAERSRKAPPIPLKLKPDYWSDKLQKEAEAFAYYRRTHTANERRRRGEMRDLFEKLKITLGLLHSSKVSKSLILTRAFSEIQGLTDQADKLIGQKNLLTRKRNILIRKVSSLSGKTEEVVLKKLEYIYAKQQALEAQKRKKKMGSDEFDISPRISKQQEGSSASSVDLGQMFINNRRGKPLILSRKKDQATENTSPLNTPHTSANLVMTPQGQLLTLKGPLFSGPVVAVSPDLLESDLKPQVAGSAVALPENDDLFMMPRIVNVTSLATEGGLVDMGGSKYPHEVPDSKPSDHLKDTVRNEDNSLEDKGRISSRGNRDGRVTLGPTQVFLANKDSGYPQIVDVSNMQKAQEFLPKKISGDMRGIQYKWKESESRGERVKSKDSSFHKLKMKDLKDSSIEMELRKVTSAIEEAALDSSELLTNMEDEDDTDETLTSLLNEIAFLNQQLNDDSVGLAELPSSMDTEFPGDARRAFISKVPPGSRATFQVEHLGTGLKELPDVQGESDSISPLLLHLEDDDFSENEKQLAEPASEPDVLKIVIDSEIKDSLLSNKKAIDGGKNTSGLPAEPESVSSPPTLHMKTGLENSNSTDTLWRPMPKLAPLGLKVANPSSDADGQSLKVMPCLAPIAAKVGSVGHKMNLTGNDQEGRESKVMPTLAPVVAKLGNSGASPSSAGK

SEQ ID NO: 8085 - protein, 192 aa, Homo sapiens
MSKRNQVSYVRPAEPAFLARFKERVGYREGPTVETKALCLSRRHLPSGNQQKNIGTTVQYMLPMSYAQCKKQEKRIQPQPPDEDGDHSDKEDEQPQVVVLKKGDLSVEEVMKIKAEIKAAKADEEPTPADGRIIYRKPVKHPSDEKYSGLTASSKKKKPNEDEVNQDSVKKNSQKQIKNSSLLSFDNEDENE

SEQ ID NO: 8086 - protein, 154 aa, Homo sapiens
MSKRNQVSYVRPAEPAFLARFKERVGYREGPTVETKRIQPQPPDEDGDHSDKEDEQPQVVVLKKGDLSVEEVMKIKAEIKAAKADEEPTPADGRIIYRKPVKHPSDEKYSGLTASSKKKKPNEDEVNQDSVKKNSQKQIKNSSLLSFDNEDENE

SEQ ID NO: 8087 - protein, 398 aa, Homo sapiens
QHSSSLGGLSHSEEIPNTTTTQHSSTLSTQQNTLSSSTSSGRTSTSTLLHTSVESEANLHSSSSTFSTTSSTVSAPPPVVSVSSSLNSGSSLGLSLGSNSTVTASTRSSVATTSGKAPPNLPPGVPPLLPNPYIMAPGLLHAYPPQVYGYDDLQMLQTRFPLDYYSIPFPTPTTPLTGRDGSLASNPYSGDLTKFGRGDASSPAPATTLAQPQQNQTQTHHTTQQTFLNPALPPGYSYTSLPYYTGVPGLPSTFQYGPAVFPVAPTSSKQHGVNVSVNASATPFQQPSGYGSHGYNTGVSVTSSNTGVPDISGSVYSKTQQSFEKQGFHSGTPAASFNLPSALGSGGPINPATAAAYPPAPFMHILTPHQQPHSQILHHHLQQDGQDILNFVDDQLGE

SEQ ID NO: 8088 - protein, 408 aa, Homo sapiens
SSLGLSLGSNSTVTASTRSSVATTSGKAPPNLPPGVPPLLPNPYIMAPGLLHAYPPQVYGYDDLQMLQTRFPLDYYSIPFPTPTTPLTGRDGSLASNPYSGDLTKFGRGDASSPAPATTLAQPQQNQTQTHHTTQQTFLNPALPPGYSYTSLPYYTGVPGLPSTFQYGPAVFPVAPTSSKQHGVNVSVNASATPFQQPSGYGSHGYNTGVSVTSSNTGVPDISGSVYSKTQQSFEKQGFHSGTPAASFNLPSALGSGGPINPATAAAYPPAPFMHILTPHQQPHSQILHHHLQQDGQLPYLQMILCCQRQQEEQTGSGQRSQTSSIPQKPQTNKSAYNSYSWGPTEALTLFSRSHLLRGLLSLETMETASKRKECGGFPLPPTPSGPPHASASCLSHSYTIPTLLYVL

SEQ ID NO: 8089 - protein, 889 aa, Homo sapiens
MEEGAPRQPGPSQWPPEDEKEVIRRAIQKELKIKEGVENLRRVATDRRHLGHVQQLLRSSNRRLEQLHGELRELHARILLPGPGPGPAEPVASGPRPWAEQLRARHLEALRRQLHVELKVKQGAENMTHTCASGTPKERKLLAAAQQMLRDSQLKVALLRMKISSLEASGSPEPGPELLAEELQHRLHVEAAVAEGAKNVVKLLSSRRTQDRKALAEAQAQLQESSQKLDLLRLALEQLLEQLPPAHPLRSRVTRELRAAVPGYPQPSGTPVKPTALTGTLQVRLLGCEQLLTAVPGRSPAAALASSPSEGWLRTKAKHQRGRGELASEVLAVLKVDNRVVGQTGWGQVAEQSWDQTFVIPLERARELEIGVHWRDWRQLCGVAFLRLEDFLDNACHQLSLSLVPQGLLFAQVTFCDPVIERRPRLQRQERIFSKRRGQDFLRRSQMNLGMAAWGRLVMNLLPPCSSPSTISPPKGCPRTPTTLREASDPATPSNFLPKKTPLGEEMTPPPKPPRLYLPQEPTSEETPRTKRPHMEPRTRRGPSPPASPTRKPPRLQDFRCLAVLGRGHFGKVLLVQFKGTGKYYAIKALKKQEVLSRDEIESLYCEKRILEAVGCTGHPFLLSLLVCFQTSSHARFVTEFVPGGDLMMQIHEDVFPEPQARFYVACVVLGLQFLHEKKIIYRDLKLDNLLLDAQGFLKIADFGLCKEGIGFGDRTSTFCGTPEFLAPEVLTQEAYTQAVDWWALGVLLYEMLVGECPFPGDTEEEVFDCIVNMDAPYPGFLSVQGLEFIQKLLQKCPEKRLGAGEQDAEEIKVQPFFRTTNWQALLARTIQPPFVPTLCGPADLRYFEGEFTGLPPALTPPAPHSLLTARQQAAFRDFDFVSERFLEP

SEQ ID NO: 8090 - protein, 231 aa, Homo sapiens
MSGRSVRAETRSRAKDDIKRVMAAIEKVRKWEKKWVTVGDTSLRIYKWVPVTEPKVDDKNKNKKKGKDEKCGSEVTTPENSSSPGMMDMHDDNSNQSSIADASPIKQENSSNSSPAPEPNSAVPSDGTEAKVDEAQADGKEHPGAEDASDEQNSQSSMEHSMNSSEKVDRQPSGDSGLAAETSAISQVPRSRSQRGSQIGREPIGLSGDLEGVPPSKKMKLEASQQNSEEM

SEQ ID NO: 8091 - protein, 1582 aa, Homo sapiens
MAGPGGWRDREVTDLGHLPDPTGIFSLDKTIGLGTYGRIYLGLHEKTGAFTAVKVMNARKTPLPEIGRRVRVNKYQKSVGWRYSDEEEDLRTELNLLRKYSFHKNIVSFYGAFFKLSPPGQRHQLWMVMELCAAGSVTDVVRMTSNQSLKEGWIAYICREILQGLAHLHAHRVIHRDIKGQNVLLTHNAEVKLVDFGVSAQVSRTNGRRNSFIGTPYWMAPEVIDCDEDPRRSYDYRSDVWSVGITAIEMAEGAPPLCNLQPLEALFVILRESAPTVKSSGWSRKFHNFMEKCTIKNFLFRPTSANMLQHPFVRDIKNERHVVESLTRHLTGIIKKRQKKGIPLIFEREEAIKEQYTVRRFRGPSCTHELLRLPTSSRCRPLRVLHGEPSQPRWLPDREEPQVQALQQLQGAARVFMPLQALDSAPKPLKGQAQAPQRLQGAARVFMPLQAQVKAKASKPLQMQIKAPPRLRRAARVLMPLQAQVRAPRLLQVQSQVSKKQQAQTQTSEPQDLDQVPEEFQSQDQVPEQQRQGQAPEQQQRHNQVPEQELEQNQAPEQPEVQEQAAEPAQAGTEAEEPESLRVNAQVFLPLLSQDHHVLLPLHLDTQVLIPVEGQTEGSPQAQAWTLEPPQAIGSVQALIEGLSRDLLRAPNSNNSKPLGPLQTLMENLSSNRFYSQPEQAREKKSKVSTLRQALAKRLSPKRFGAKSSWRPEKLELSDLEARRQRRQRRWEDIFNQHEEELRQVDKDKEDESSDNDEVFHSIQAEVQIEPLKPYISNPKKIEVQERSPSVPNNQDHAHHVKFSSSVPQRSLLEQAQKPIDIRQRSSQNRQNWLAASESSSEEESPVTGRRSQSSPPYSTIDQKLLVDIHVPDGFKVGKISPPVYLTNEWVGYNALSEIFRNDWLTPAPVIQPPEEDGDYVELYDASADTDGDDDDESNDTFEDTYDHANGNDDLDNQVDQANDVCKDHDDDNNKFVDDVNNNYYEAPSCPRASYGRDGSCKQDGYDGSRGKEEAYRGYGSHTANRSHGGSAASEDNAAIGDQEEHAANIGSERRGSEGDGGKGVVRTSEESGALGLNGEENCSETDGPGLKRPASQDFEYLQEEPGGGNEASNAIDSGAAPSAPDHESDNKDISESPTQSDFSANHSSPSKGSGMSADANFASAILYAGFVEVPEESPKQPSEVNVNPLYVSPACKKPLIHMYEKEFTSEICCGSLWGVNLLLGTRSNLYLMDRSGKADITKLIRRRPFRQIQVLEPLNLLITISGHKNRLRVYHLTWLRNKILNNDPESKRRQEEMLKTEEACKAIDKLTGCEHFSVLQHEETTYIAIALKSSIHLYAWAPKSFDESTAIKVCIDQSADSEGDYMSYQAYIRILAKIQAADPVNRFKRPDELLHLLKLKVFPTLDHKPVTVDLAIGSEKRLKIFFSSADGYHLIDAESEVMSDVTLPKNPLEIIIPQNIIILPDCLGIGMMLTFNAEALSVEANEQLFKKILEMWKDIPSSIAFECTQRTTGWGQKAIEVRSLQSRVLESELKRRSIKKLRFLCTRGDKLFFTSTLRNHHSRVYFMTLGKLEELQSNYDV

SEQ ID NO: 8092 - protein, 620 aa, Homo sapiens
DEEEDLRTELNLLRKYSFHKNIVSFYGAFFKLSPPGQRHQLWMVMELCAAGSVTDVVRMTSNQSLKEDWIAYICREILQGLAHLHAHRVIHRDIKGQNVLLTHNAEVKLVDFGVSAQVSRTNGRRNSFIGTPYWMAPEVIDCDEDPRRSYDYRSDVWSVGITAIEMAEGAPPLCNLQPLEALFVILRESAPTVKSSGWSRKFHNFMEKCTIKNFLFRPTSANMLQHPFVRDIKNERHVVESLTRHLTGIIKKRQKKVLHGEPSQPRWLPDREEPQVQALQQLQGAARVFMPLQALDSAPKPLKGQAQAPQRLQGAARVFMPLQAQVKAKASKPLQMQIKAPPRLRRAARVLMPLQAQVRAPRLLQVQSQVSKKQQAQTQTSEPQDLDQVPEEFQGQDQVPEQQRQGQAPEQQQRHNQVPEQELEQNQAPEQPEVQEQAAEPAQAETEAEEPESLRVNAQVFLPLLSQDHHVLLPLHLDTQVLIPVEGQTEGSPQAQAWTLEPPQAIGSVQALIEGLSRDLLRAPNSNNSKPLGPLQTLMENLSSNRFYSQPEQAREKKSKVSTLRQALAKRLSPKRFRAKSSWRPEKLELSDLEARRQRRQRRWEDIFNQHEEELRQVDK

SEQ ID NO: 8093 - protein, 1534 aa, Homo sapiens
MAGPGGWRDREVTDLGHLPDPTGIFSLDKTIGLGTYGRIYLGLHEKTGAFTAVKVMNARKTPLPEIGRRVRVNKYQKSVGWRYSDEEEDLRTELNLLRKYSFHKNIVSFYGAFFKLSPPGQRHQLWMVMELCAAGSVTDVVRMTSNQSLKEDWIAYICREILQGLAHLHAHRVIHRDIKGQNVLLTHNAEVKLVDFGVSAQVSRTNGRRNSFIGTPYWMAPEVIDCDEDPRRSYDYRSDVWSVGITAIEMAEGAPPLCNLQPLEALFVILRESAPTVKSSGWSRKFHNFMEKCTIKNFLFRPTSANMLQHPFVRDIKNERHVVESLTRHLTGIIKKRQKKGIPLIFEREEAIKEQYTVRRFRGPSCTHELLRLPTSSRCRPLRVLHGEPSQPRWLPDREEPQVQALQQLQGAARVFMPLQALDSAPKPLKGQAQAPQRLQGAARVFMPLQAQVKAKASKPLQMQIKAPPRLRRAARVLMPLQAQVRAPRLLQVQSQVSKKQQAQTQTSEPQDLDQVPEEFQGQDQVPEQQRQGQAPEQQQRHNQVPEQELEQNQAPEQPEVQEQAAEPAQAETEAEEPESLRVNAQVFLPLLSQDHHVLLPLHLDTQVLIPVEGQTEGSPQAQAWTLEPPQAIGSVQALIEGLSRDLLRAPNSNNSKPLGPLQTLMENLSSNRFYSQPEQAREKKSKVSTLRQALAKRLSPKRFRAKSSWRPEKLELSDLEARRQRRQRRWEDIFNQHEEELRQVDKDKEDESSDNDEVFHSIQAEVQIEPLKPYISNPKKIEVQERSPSVPNNQDHAHHVKFSSSVPQRSLLEQAQKPIDIRQRSSQNRQNWLAASESSSEEESPVTGRRSQSSPPYSTIDQKLLVDIHVPDGFKVGKISPPVYLTNEWVGYNALSEIFRNDWLTPAPVIQPPEEDGDYVELYDASADTDGDDDDESNDTFEDTYDHANGNDDLDNQVDQANDVCKDHDDDNNKFVDDVNNNYYEAPSCPRASYGRDGSCKQDGYDGSRGKEEAYRGYGSHTANRSHGGSAASEDNAAIGDQEEHAANIGSERRGSEGDGGKGVVRTSEESGALGLNGEENCSETDGPGLKRPASQDFEYLQEEPGGGNEASNAIDSGAAPSAPDHESDNKDISESSTQSDFSANHSSPSKGSGMSADANFASAILYAGFVEVPEESPKQPSEVNVNPLYVSPACKKPLIHMYEKEFTSEICCGSLWGVNLLLGTRSNLYLMDRSGKADITKLIRRRPFRQIQVLEPLNLLITISGHKNRLRVYHLTWLRNKILNNDPESKRRQEEMLKTEEACKAIDKLTGCEHFSVLQHEETTYIAIALKSSIHLYAWAPKSFDESTAIKVFPTLDHKPVTVDLAIGSEKRLKIFFSSADGYHLIDAESEVMSDVTLPKNPLEIIIPQNIIILPDCLGIGMMLTFNAEALSVEANEQLFKKILEMWKDIPSSIAFECTQRTTGWGQKAIEVRSLQSRVLESELKRRSIKKLRFLCTRGDKLFFTSTLRNHHSRVYFMTLGKLEELQSNYDV

SEQ ID NO: 8094 - protein, 430 aa, Homo sapiens
METFIPIDLTTENQEMDKEETKTKPRLLRYEEKKYEDVKPLETQPAEIAEKETLEYKTVRTFSESLKSEKTEDYLRESIIQQHMVSPEPASLKEKGKSRRKKDQTHACPNVRKARPVSYDRTEPKDDDVIRNIIRLREKLGWQTILPQHSLKYGSSKIAIQKITLKKPLEDDGEFVYCLPRKSPKSLYNPYDLQVINIVGSVKEVELIPTLEWLSERRHYYLLRQFKIFSDFRMNKAFVTWKLNVKRIKTEKSRSFLYHHLFLADDLFQTCLVYIRGLCEDAINLKNYNDHENNLSAICLVKLDSSRTYSLDEFCEEQLQQATQALKQLEDIRNKAISEMKSTFLKVAEKNEIKEYFESKLSEDDTTHFKLPKYRRLLETFFKFVMLVDYIFQELIRQLMNTAVTLLLELFNGSAGMPFSVEKKNENLIR

SEQ ID NO: 8095 - protein, 657 aa, Homo sapiens
MASARKASRPMRDVFGDFSDVSLEDSTMEEIRNFQISRNLTKIAPGHSRFLKRNQTLDEKHLLLKENPVLGSGPRLASCRPPTTASRIRANAALMKLAQLETRIMNRKLQRNLSDTESDSMTADAGLPKRADRILSGGALELASQNTDKTSQNQARELPVTENNAQNAKVSRFLKKKQAPVENISPEAPAGKERTLQTPKQKEPARTFDSPDSDEEEMKVLLGSLMDSSREKNTNQGFSSANVSEEEERKLFSVPSQLRAFTVPSVELSSAKPSQTSHLPTSLAADRTLHSTRSRADYPQSHVSSDTASHTPSVSITGAFSNSVSLKMGHVKLVSSPGRSEAETVDEPVSEGADDSLDEFRINILSLDGLAPAVSENSDLEQEEESAQRQKTAGKIFRAEASTGQDAPRQAQARSWASQGKAASAEGDESEVSEHLSASSASAIQQDSTSSMQPPSEAPMVNTVSSAYSEDFENSPSLTASEPTAHSKESLDRTLDALSESSSSVKTDLPQTAESRKKSGRHVTRVLVKDTAVQTPDPAFTYEWTKVASMAAMGPALGGAYVDPTPIANHVISADAIEALTAYSPAVLALHDVLKQQLSLTQQFIQASRHLHASLLRSLDADSFHYHTLEEAKEYIRCHRPAPLTMEDALEEVNKEL

SEQ ID NO: 8096 - protein, 618 aa, Homo sapiens
MASARKASRPMRDVFGDFSDVSLEDSTMEEIRNFQISRNLTKIAPGHSRFLKRNQTLDEKHLLLKENPVLGSGPRLASCRPPTTASRIRANAALMKLAQLETRIMNRKLQRNLSDTESDSMTADAGLPKRADRILSGGALELASQNTDKTSQNQARELPVTENNAQNAKVSRFLKKKQAPVENISPEAPAGKERTLQTPKQKEPARTFDSPDSDEEEMKVLLGSLMDSSREKNTNQGFSSANVSEEEERKLFSVPSQLRAFTVPSVELSSAKPSQTSHLPTSLAADRTLHSTRSRADYPQSHVSSDTASHTPSVSITGAFSNSVSLKMGHVKLVSSPGRSEAETVDEPVSEGADDSLDEFRINILSLDGLAPAVSENSDLEQEEESAQRQKTAGKIFRAEASTGQDAPRQAQARSWASQGKAASAEGDESEVSEHLSASSASAIQQDSTSSMQPPSEAPMVNTVSSAYSEDFENSPSLTASEPTAHSKESLDRTLDALSESSSSVKTDLPQTAESRKKSGRHVTRVLVKDTAVQTPDPAFTYEWTKVASMAAMGPALGGAYVDPTPIANHVISADAIEAAEPDAAVHPGQPAPARLPPALPGRGLLPLPHPGGSQRVH

SEQ ID NO: 8097 - protein, 1347 aa, Homo sapiens
MAEPRRVAFISLSPVRRREAEYPGPEREPEYPREPPRLEPQPYREPARAEPPAPREPAPRSDAQPPSREKPLPQREVSRAEPPMSLQREPPRPEPPPPFPPLPLQPPPPRESASRAEQPPRPPRETVRLELVLKDPTDESCVEFSYPELLLCGEQRKKLIHTEDPFNDEHQERQEVEMLAKKFEMKYGGKPRKHRKDRLQDLIDIGFGYDETDPFIDNSEAYDELVPASLTTKYGGFYINTGTLQFRQASDTEEDDITDNQKHKPPKVPKIKEDDIEMKKRKRKEEGEKEKKPRKKVPKQLGVVALNSHKSEKKKKRYKDSLSLAAMIRKFQKEKDALKKESNPKVPVTLSTPSLNKPPCAAAALGNDVPDLNLSSGDPDLPIFVSTNEHELFQEAENALEMLDDFDFDRLLDAASDGSPLSESGGENGTTTQPTYTSQVMPKVVPTLPEGLPVLLEKRIEDLRVAAKLFDEEGRKKFFTQDMNNILLDIELQLQELGPVIRSGVYSHLEAFVPCNKETLVKRLKKLHLNVQDDRLREPLQKLKLAVSNVMPEQLFKYQEDCQARSQAKCAKLQTDEEREKNGSEEDDDEKPGKRVIGPRKKFHWDDTIRTLLCNLVEIKLGCYELEPNKSQSAEDYLKSFMETEVKPLWPKGWMQARMLFKESRSVHNHLTSAPAKKKVIPAPKPKVKEVMVKTLPLHSFPTMLKECSPKKDQKTPTSLVASVSGPPTSSSTAAIAAASSSSAPAQETICLDDSLDEDLSFHSPSLDLVSEALAVINNGNKGPPVGSRISMPTTKPRPGLREEKLASIMSKLPLATPKKLDSTQTTHSSSLIAGHTGPVPKKPQDLAHTGISSGLIAGSSIQNPKVSLEPLPARLLQQGLQRSSQIHTSSSSQTHVSSSSQAQIAASSHALGTSEAQDASSLTQVTKVHQHSAVQQNYVSPLQATISKSQTNPVVKLSNNPQLSCSSSLIKTSDKPLMYRLPLSTPSPGNGSQGSHPLVSRTVPSTTTSSNYLAKAMVSQISTQGFKSPFSMAASPKLAASPKPATSPKPLPSPKPSASPKPSLSAKPSVSTKLISKSNPTPKPTVSPSSSSPNALVAQGSHSSTNSPVHKQPSGMNISRQSPTLNLLPSSRTSGLPPTKNLQAPSKLTNSSSTGTVGKNSLSGIAMNVPASRGSNLNSSGANRTSLSGGTGSGTQGATKPLSTPHRPSTASGSSVVTASVQSTAGASLLANASPLTLMTSPLSVTNQNVTPFGMLGGLVPVTMPFQFPLEIFGFGTDTAGVTTTSGSTSAAFHHSLTQNLLKGLQPGGAQHAATLSHSPLPAHLQQAFHDGGQSKGDTKLPRKSQ

SEQ ID NO: 8098 - protein, 326 aa, Homo sapiens
MEFLSEKFALKSPPSKNSDFYMGAGGPLEHVMETLDNESFYSKASAGKCVQAFGPLPRAEHHVRLERTSPCQDSSVNYGITKVEGQPLHTELNRAMDNCNSLRMSPVKGMQEKGELDELGDKCDTNVSSSKKRRHRTTFTSLQLEELEKVFQKTHYPDVYVREQLALRTELTEARVQVWFQNRRAKWRKRERYGQIQQAKSHFAATYDISVLPRTDSYPQIQNNLWAGNASGGSVVTSCMLPRDTSSCMTPYSHSPRTDSSYTGFSNHQNQFSHVPLNNFFTDSLLTGATNGHAFETKPEFERRSSSIAVLRMKAKEHTANISWAM

SEQ ID NO: 8099 - protein, 341 aa, Homo sapiens
MHSKSQGSPGSCSQLCGDSGTDAGADHPLVEIVLDADNQQGPGYIDIPKGKGKQFDAQGHCLPDGRTENTPGVETKGLNLKIPRVIALENPRTRSLHRALEETPKGMPKDLNVGQQALSNSGISEVEGLSQHQVPELSCTSAADAINRNSTGQQSQSGSPCIMDDTAFNRGVNAFPEAKHKAGTVCPTVTHSVHSQVLKNQELKAGTSIMGSHLTSAETVTLDSLKAVEVVNLSVSCTATCLPFSSVPKETPARAGFSSKQTLFPITHQPLGSFGVVSTHSSTLDEEVSERMFRGRGRKFGRWNSPGCLCPWPGWEQCRPPAGKDFHRTGAPWRKTGLPNV

SEQ ID NO: 8100 - protein, 517 aa, Homo sapiens
MEDSASASLSSAAATGTSTSTPAAPTARKQLDKEQVRKAVDALLTHCKSRKNNYGLLLNENESLFLMVVLWKIPSKELRVRLTLPHSIRSDSEDICLFTKDEPNSTPEKTEQFYRKLLNKHGIKTVSQIISLQTLKKEYKSYEAKLRLLSSFDFFLTDARIRRLLPSLIGRHFYQRKKVPVSVNLLSKNLSREINDCIGGTVLNISKSGSCSAIRIGHVGMQIEHIIENIVAVTKGLSEKLPEKWESVKLLFVKTEKSAALPIFSSFVSNWDEATKRSLLNKKKKEARRKRRERNFEKQKERKKKRQQARKTASVLSKDDVAPESGDTTVKKPESKKEQTPEHGKKKRGRGKAQVKATNESEDEIPQLVPIGKKTPANEKVEIQKHATGKKSPAKSPNPSTPRGKKRKALPASETPKAAESETPGKSPEKKPKIKEEAVKEKSPSLGKKDARQTPKKPEAKFFTTPSKSVRKASHTPKKWPKKPKYPSRPKVSDSTGRKPQCCLQSFLEILRSWPPL

SEQ ID NO: 8101 - protein, 202 aa, Homo sapiens
GGTRSQQWGCTRASSRGGNKMEDSASASLSSAAATGTSTSTPAAPTARKQLDKEQVRKAVDALLTHCKSRKNNYGLLLNENESLFLMVVLWKIPSKELRVRLTLPHSIRSDSEDICLFTKDEPNSTPEKTEQFYRKLLNKHGIKTVSQIISLQTLKKEYKSYEAKLRLLSSFDFFLTDARIRRLLPSLIGRHFYQRKKFQYL

SEQ ID NO: 8102 - protein, 1709 aa, Homo sapiens
MKKIFSKKGESPLGSFARRRRSSAGGGGEPGEGAYSQPGYHVRDRDLGKIHKAASAGNVAKVQQILLLRKNGLNDRDKMNRTALHLACANGHPEVVTLLVDRKCQLNVCDNENRTALMKAVQCQEEKCATILLEHGADPNLADVHGNTALHYAVYNEDISVATKLLLYDANIEAKNKDDLTPLLLAVSGKKQQMVEFLIKKKANVNAVDKLESSHQLISEYKEERIPKHSSQNSNSVDESSEDSLSRLSGKPGVDDSWPTSDDEDLNFDTKNVPKPSLAKLMTASQQSRKNLEATYGTVRTGNRTLFEDRDSDSQDEVVVESLPTTSIKVQCFSHPTYQSPDLLPKPSHKSLANPGLMKEEPTKPGIAKKENGIDIIESAPLEQTNNDNLTYVDEVHKNNRSDMMSALGLGQEEDIESPWDSESISENFPQKYVDPLAGAADGKEKNIGNEQAEDVFYIPSCMSGSRNFKMAKLEDTRNVGMPVAHMESPERYLHLKPTIEMKDSVPNKAGGMKDVQTSKAAEHDLEVASEEEQEREGSENNQPQVEEERKKHRNNEMEVSANIHDGATDDAEDDDDDDGLIQKRKSGETDHQQFPRKENKEYASGPALQMKEVKSTEKEKRTSKESVNSPVFGKASLLTGGLLQVDDDSSLSEIDEDEGRPTKKTSNEKNKVKNQIQSMDDVDDLTQSSETASEDCELPHSSYKNFMLLIEQLGMECKDSVSLLKIQDAALSCERLLELKKNHCELLTVKIKKMEDKVNVLQRELSETKEIKSQLEHQKVEWERELCSLRFSLNQEEEKRRNADTLYEKIREQLRRKEEQYRKEVEVKQQLELSLQTLEMELRTVKSNLNQVVQERNDAQRQLSREQNARMLQDGILTNHLSKQKEIEMAQKKMNSENSHSHEEEKDLSHKNSMLQEEIAMLRLEIDTIKNQNQEKEKKCFEDLKIVKEKNEDLQKTIKQNEETLTQTISQYNGRLSVLTAENAMLNSKLENEKQSKERLEAEVESYHSRLAAAIHDRDQSETSKRELELAFQRARDECSRLQDKMNFDVSNLKDNNEILSQQLFKTESKLNSLEIEFHHTRDALREKTLGLERVQKDLSQTQCQMKEMEQKYQNEQVKVNKYIGKQESVEERLSQLQSENMLLRQQLDDAHNKADNKEKTVINIQDQFHAIVQKLQAESEKQSLLLEERNKELISECNHLKERQYQYENEKAEREVVVRQLQQELADTLKKQSMSEASLEVTSRYRINLEDETQDLKKKLGQIRNQLQEAQDRHTEAVRCAEKMQDHKQKLEKDNAKLKVTVKKQMDKIEELQKNLLNANLSEDEKEQLKKLMELKQSLECNLDQEMKKNVELEREITGFKNLLKMTRKKLNEYENGEFSFHGDLKTSQFEMDIQINKLKHKIDDLTAELETAGSKCLHLDTKNQILQEELLSMKTVQKKCEKLQKNKKKLEQEVINLRSHIERNMVELGQVKQYKQEIEERARQEIAEKLKEVNLFLQAQAASQENLEQFRENNFASMKSQMELRIKDLESELSKIKTSQEDFNKTELEKYKQLYLEELKVRKSLSSKLTKTNERLAEVNTKLLVEKQQSRSLFTTLTTRPVMEPPCVGNLNNSLDLNRKLIPRENLVISTSNPRASNNSMENYLSKMQQELEKNITRELKEAAAELESGSIASPLGSTDESNLNQDLVWKASREYVQVLKKNYMI

SEQ ID NO: 8103 - protein, 1269 aa, Homo sapiens
MEATGVLPFVRGVDLSGNDFKGGYFPENVKAMTSLRWLKLNRTGLCYLPEELAALQKLEHLSVSHNNLTTLHGELSSLPSLRAIVARANSLKNSGVPDDIFKLDDLSVLDLSHNQLTECPRELENAKNMLVLNLSHNSIDTIPNQLFINLTDLLYLDLSENRLESLPPQMRRLVHLQTLVLNGNPLLHAQLRQLPAMTALQTLHLRSTQRTQSNLPTSLEGLSNLADVDLSCNDLTRVPECLYTLPSLRRLNLSSNQITELSLCIDQWVHVETLNLSRNQLTSLPSAICKLSKLKKLYLNSNKLDFDGLPSGIGKLTNLEEFMAANNNLELVPESLCRCPKLRKLVLNKNHLVTLPEAIHFLTEIEVLDVRENPNLVMPPKPADRAAEWYNIDFSLQNQLRLAGASPATVAAAAAAGSGPKDPMARKMRLRRRKDSAQDDQAKQVLKGMSDVAQEKNKKQEESADARAPSGKVRRWDQGLEKPRLDYSEFFTEDVGQLPGLTIWQIENFVPVLVEEAFHGKFYEADCYIVLKTFLDDSGSLNWEIYYWIGGEATLDKKACSAIHAVNLRNYLGAECRTVREEMGDESEEFLQVFDNDISYIEGGTASGFYTVEDTHYVTRMYRVYGKKNIKLEPVPLKGTSLDPRFVFLLDRGLDIYVWRGAQATLSSTTKARLFAEKINKNERKGKAEITLLVQGQELPEFWEALGGEPSEIKKHVPEDFWPPQPKLYKVGLGLGYLELPQINYKLSVEHKQRPKVELMPRMRLLQSLLDTRCVYILDCWSDVFIWLGRKSPRLVRAAALKLGQELCGMLHRPRHATVSRSLEGTEAQVFKAKFKNWDDVLTVDYTRNAEAVLQSPGLSGKVKRDAEKKDQMKADLTALFLPRQPPMSLAEAEQLMEEWNEDLDGMEGFVLEGKKFARLPEEEFGHFYTQDCYVFLCRYWVPVEYEEEEKKEDKEEKAEGKEGEEATAEAEEKQPEEDFQCIVYFWQGREASNMGWLTFTFSLQKKFESLFPGKLEVVRMTQQQENPKFLSHFKRKFIIHRGKRKAVQGAQQPSLYQIRTNGSALCTRCIQINTDSSLLNSEFCFILKVPFESEDNQGIVYAWVGRASDPDEAKLAEDILNTMFDTSYSKQVINEGEEPENFFWVGIGAQKPYDDDAEYMKHTRLFRCSNEKGYFAVTEKCSDFCQDDLADDDIMLLDNGQEVYMWVGTQTSQVEIKLSLKACQVYIQHMRSKEHERPRRLRLVRKGNEQHAFTRCFHAWSAFCKALA

SEQ ID NO: 8104 - protein, 179 aa, Homo sapiens
MGMVGTQTWQKNMAQETNQTPGPMLCSTGCGFYGNPRTNGMCSVCYKEHLQRQQNSGRMSPMGTASGSNSPTSDSASVQRADTSLNNCEGAAGSPSVFQPSTSQSKEKAPELPKPKKNRCFMCRKKVGLTGLTADVEICFVDFTVNSDKHNCPYDYKAEAAAKIRKENPVVVAEKIQRI

SEQ ID NO: 8105 - protein, 365 aa, Homo sapiens
MHAVPRGFGKKVRVGVQSCPSPFSGQACPQPSSVFWSLLKNLPFLEHLELIGSNFSSAMPRNEPAIRNSLPPCSRAQSVGDSEVAAIGQLAFLRHLTLAQLPSVLTGSGLVNIGPQCQQLRSLSLANLGMMGKVVYMPALSDMLKHCKRLRDLRLEQPYFSANAQFFQALSQCPSLQRLCLVSRSGTLQPDAVLAFMARCLQVVMCHLFTGESLATCKSLQQSLLRRWGEVTGRRPQLFTELREEPSARTSRATGRRQPCLPDSGVVCCPCGRPLAVSGIILVGVSPSLVVKTTCVYRVLFKNLDYASIFFLVCLFETESHSVVQAGVQWRDLSSLQPLLSGLQPQPPEQLENELEIGFSYCFVI

SEQ ID NO: 8106 - protein, 243 aa, Homo sapiens
WSLLKNLPFLEHLELIGSNFSSAMPRNEPAIRNSLPPCSRAQSVGDSEVAAIGQLAFLRHLTLAQLPSVLTGSGLVNIGLQCQQLRSLSLANLGMMGKVVYMPALSDMLKHCKRLRDLRLEQPYFSANAQFFQALSQCPSLQRLCLVSRSGTLQPDAVLAFMARCLQVVMCHLFTGESLATCKSLQQSLLRSFQAERPALNVVIFPLLHEGLTDVIRDVPLVHLDEITLFKSRVAEEPPNLWW

SEQ ID NO: 8107 - protein, 695 aa, Homo sapiens
RLRASLAGQVGGTGLRIPRPRFGPAGDMASSGEDISNDDDDMHPAAAGMADGVHLLGFSDEILLHILSHVPSTDLILNVRRTCRKLAALCLDKSLIHTVLLQKDYQASEDKVRQLVKEIGREIQQLSMAGCYWLPGSTVEHVARCRSLVKVNLSGCHLTSLRLSKMLSALQHLRSLAIDVSPGFDASQLSSECKATLSRVRELKQTLFTPSYGVVPCCTSLEKLLLYFEILDRTREGAILSGQLMVGQSNVPHYQNLRVFYARLAPGYINQEVVRLYLAVLSDRTPQNLHAFLISVPGSFAESGATKNLLDSMARNVVLDALQLPKSWLNGSSLLQHMKFNNPFYFSFSRCTLSGGHLIQQVINGGKDLRSLASLNLSGCVHCLSPDSLLRKAEDDIDSSILETLVASCCNLRHLNLSAAHHHSSEGLGRHLCQLLARLRHLRSLSLPVCSVADSAPRADRAPAQPAMHAVPRGFGKKVRVGVQSCPSPFSGQACPQPSSVFWSLLKNLPFLEHLELIGSNFSSAMPRNEPAIRNSLPPCSRAQSVGDSEVAAIGQLAFLRHLTLAQLPSVLTGSGLVNIGLQCQQLRSLSLANLGMMGKVVYMPALSDMLKHCKRLRDLRLEQPYFSANAQFFQALSQCPSLQRLCLVSRSGTLQPDAVLAFMARCLQVVMCHLFTGESLATCKSLQQSLLRSR

SEQ ID NO: 8108 - protein, 1561 aa, Homo sapiens
RQICSMASELGARDDGGCTELAKPLYLQYLERALRLDHFLRQTSAIFNRNISSDDSEDGLDDSNPLLPQSGDPLIQVKEEPPNSLLGETSGAGSSGMLNTYSLNGVLQSESKCDKGNLYNFSKLKKSRKWLKSILLSDESSEADSQSEDDDEEELNLSREELHNMLRLHKYKKLHQNKYSKDKELQQYQYYSAGLLSTYDPFYEQQRHLLGPKKKKFKEEKKLKAKLKKVKKKRRRDEELSSEESPRRHHHQTKVFAKFSHDAPPPGTKKKHLSIEQLNARRRKVWLSIVKKELPKANKQKASARNLFLTNSRKLAHQCMKEVRRAALQAQKNCKETLPRARRLTKEMLLYWKKYEKVEKEHRKRAEKEALEQRKLDEEMREAKRQQRKLNFLITQTELYAHFMSRKRDMGHDGIQEEILRKLEDSSTQRQIDIGGGVVVNITQEDYDSNHFKAQALKNAENAYHIHQARTRSFDEDAKESRAAALRAANKSGTGFGESYSLANPSIRAGEDIPQPTIFNGKLKGYQLKGMNWLANLYEQGINGILADEMGLGKTVQSIALLAHLAERENIWGPFLIISPASTLNNWHQEFTRFVPKFKVLPYWGNPHDRKVIRRFWSQKTLYTQDAPFHVVITSYQLVVQDVKYFQRVKWQYMVLDEAQALKSSSSVRWKILLQFQCRNRLLLTGTPIQNTMAELWALLHFIMPTLFDSHEEFNEWFSKDIESHAENKSAIDENQLSRLHMILKPFMLRRIKKDVENELSDKIEILMYCQLTSRQKLLYQALKNKISIEDLLQSSMGSTQQAQNTTSSLMNLVMQFRKVCNHPELFERQETWSPFHISLKPYHISKFIYRHGQIRVFNHSRDRWLRVLSPFAPDYIQRSLFHRKGINEESCFSFLRFIDISPAEMANLMLQGLLARWLALFLSLKASYRLHQLRSWGAPEGESHQRYLRNKDFLLGVNFPLSFPNLCSCPLLKSLVFSSHCKAVSGYSDQVVHQRRSATSSLRRCLLTELPSFLCVASPRVTAVPLDSYCNDRSAEYERRVLKEGGSLAAKQCLLNGAPELAADWLNRRSQFFPEPAGGLWSIRPQNGWSFIRIPGKESLITDSGKLYALDVLLTRLKSQGHRVLIYSQMTRMIDLLEEYMVYRKHTYMRLDGSSKISERRDMVADFQNRNDIFVFLLSTRAGGLGINLTAADTVIFYDSDWNPTVDQQAMDRAHRLGQTKQVTVYRLICKGTIEERILQRAKEKSEIQRMVISGGNFKPDTLKPKEVVSLLLDDEELEKKLRLRQEEKRQQEETNRVKERKRKREKYAEKKKKEDELDGKRRKEGVNLVIPFVPSADNSNLSADGDDSFISVDSAMPSPFSEISISSELHTGSIPLDESSSDMLVIVDDPASSAPQSRATNSPASITGSVSDTVNGISIQEMPAAGRGHSARSRGRPKGSGSTAKGAGKGRSRKSTAGSAAAMAGAKAGAAAASAAAYAAYGYNVSKGISASSPLQTSLVRPAGLADFGPSSASSPLSSPLSKGNNVPGNPKNLHMTSSLAPDSLVRKQGKGTNPSGGR

SEQ ID NO: 8109 - protein, 509 aa, Homo sapiens
AQSKLMSPETTLGTRTKDSLNPEQGLPPAHPLGSGDSCSPWSQDGRAQRGDPSLPRGVGSRGTDPCSSAFSNTAWGVSPKQKGEEGAPRERVHREEERTAFHLSDTVPASSASKNKAQNITAPESEAICWQLLSRCFRSWRHLVKRQREPAAAAVALGRWQLLQKCLQALWLREAQLEAAWGQYTKVLLVQSFREWRNLALQQKQVQPHMQAGPGSPPSRRAQGKGLSLGRSTVVDPAQRSRLEHTSPGSLREEEIAQWLLSHPRQRTDSRHERVQILQALQLAVFFLWCQQKKRARQERETLRKATRATQRTGSFPQAWHSTAAGVAWVAPLSPQHQRAWLCRCFGAWQQFVQRGSRYRDHLADRRTGTLRKCLEQWVRMKQLRESDGAKVTQLSLCRQKAGREAVYTAGPGACGLGAVGQAQGQQEQGRGSLQDACRTLALCWALLLWKMRLFQCQWAKETEAQRAGAACCKSQWESGARRSCVETWVLPPHKMVTAGIRSPEEGCR

SEQ ID NO: 8110 - protein, 149 aa, Homo sapiens
MPPKFDPNEIKVIYLRCTGDATSALAPKIGPLGLSPKNVGGDIAKATGDWKGLRITVKLTIQNRQAQIEVVPSASALIIKALKEPPETERNRKNIKHSGNITFDEIVNLARQMEHRSLARELSGTIKEILGTAQSLWVVMLMAATLMTS

SEQ ID NO: 8111 - protein, 320 aa, Homo sapiens
MAFPKKKLQGLVAATITPMTENGEINFSVIGQYVDYLVKEQGVKNIFVNGTTGEGLSLSVSERRQVAEEWVTKGKDKLDQVIIHVGALSLKESQELAQHAAEIGADGIAVIAPFFLKPWTKDILINFLKEVAAAAPALPFYYYHIPALTGVKIRAEELLDGILDKIPTFQGLKFSDTDLLDFGQCVDQNRQQQFAFLFGVDEQLLSALVMGATGAVGSTYNYLGKKTNQMLEAFEQKDFSLALNYQFCIQRFINFVVKLGFGVSQTKAIMTLVSGIPMGPPRLPLQKASREFTDSAEAKLKSLDFLSFTDLKDGNLEAGS

SEQ ID NO: 8112 - protein, 303 aa, Homo sapiens
MLGRSLREVSAALKQGQITPTELCQKCLSLIKKTKFLNAYITVSEEVALKQAEESEKRYKNGQSLGDLDGIPIAVKDNFSTSGIETTCASNMLKGYIPPYNATVVQKLLDQGALLMGKTNLDEFAMGSGSTDGVFGPVKNPWSYSKQYREKRKQNPHSENEDSDWLITGGSSGGSAAAVSAFTCYAALGSDTGGSTRNPAAHCGLVGFKPSYGLVSRHGLIPLVNSMDVPGILTRCVDDAAIVLGALAGPDPRDSTTVHEPINKPFMLPSLADVSKLCIGIPKVTFSFHYFTEILSSPIESTD

SEQ ID NO: 8113 - protein, 528 aa, Homo sapiens
MLGRSLREVSAALKQGQITPTELCQKCLSLIKKAKFLNAYITVSEEVALKQAEESEKRYKNGQSLGDLDGIPIAVKDNFSTSGIETTCASNMLKGYIPPYNATVVQKLLDQGALLMGKTNLDEFAMGSGSTDGVFGPVKNPWSYSKRYREKRKQNPHSENEDSDWLITGGSPGGSAAAVSAFTCYAALGSDTGGSTRNPAAHCGLVGFKPSYGLVSRHGLIPLVNSMDVPGILTRCVDDAAIVLGALAGPDPRDSTTVHEPINKPFMLPSLADVSKLCIGIPKEYLVPELSSEVQSLWSKAADLFESEGAKVIEVSLPHTSYSIVCYHVLCTSEVASNMARFDGLQYGHRCDIDVSTEAMYAATRREGFNDVVRGRILSGNFFLLKENYENYFVKAQKVRRLIANDFVNAFNSGVDVLLTPTTLSEAVPYLEFIKEDNRTRSAQDDIFTQAVNMAGLPAVSIPVALSNQGLPIGLQFIGRAFCDQQLLTVAKWFEKQVQFPVIQLQELMDDCSAVLENEKLASVSLKQ

SEQ ID NO: 8114 - protein, 513 aa, Homo sapiens
MAMEIDSRPGGLPGSSCNLGAAREHMQAVTRNYITHPRVTYRTVCSVNGPLVVLDRVKFAQYAEIVHFTLPDGTQRSGQVLEVAGTKAIVQVFEGTSGIDARKTTCEFTGDILRTPVSEDMLGRVFNGSGKPIDKGPVVMAEDFLDINGQPINPHSRIYPEEMIQTGISPIDVMNSIARGQKIPIFSAAGLPHNEIAAQICRQAGLVKKSKAVLDYHDDNFAIVFAAMGVNMETARFFKSDFEQNGTMGNVCLFLNLANDPTIERIITPRLALTTAEFLAYQCEKHVLVILTDMSSYAEALREVSAAREEVPGRRGFPGYMYTDLATIYERAGRVEGRGGSITQIPILTMPNDDITHPIPDLTGFITEGQIYVDRQLHNRQIYPPINVLPSLSRLMKSAIGEGMTRKDHGDVSNQLYACYAIGKDVQAMKAVVGEEALTSEDLLYLEFLQKFEKNFINQGPYENRSMFESLDLSWKLLRIFPKEMLKRIPQAVIDEFYSREGRLQDLAPDTAL

SEQ ID NO: 8115 - protein, 673 aa, Homo sapiens
MAKLETLPVRADPGRDPLLAFAPRPSELGPPDPRLAMGSVGSGVAHAQEFAMKSVGTRTGGGGSQGSFPGPRGSGSGASRERPGRYPSEDKGLANSLYLNGELRGSDHTDVCGNVVGSSGGSSSSGGSDKAPPQYREPSHPPKLLATSGKLDQCSEPLVRPSAFKPVVPKNFHSMQNLCPPQTNGTPEGRQGPGGLKGGLDKSRTMTPAGGSGSGLSDSGRNSLTSLPTYSSSYSQHLAPLSASTSHINRIGTASYGSGSGGSSGGGSGYQDLGTSDSGRASSKSGSSSSMGRPGHLGSGEGGGGGLPFAACSPPSPSALIQELEERLWEKEQEVAALRRSLEQSEAAVAQVLEERQKAWERELAELRQGCSGKLQQVARRAQRAQQGLQLQVLRLQQDKKQLQEEAARLMRQREELEDKVAACQKEQADFLPRIEETKWEVCQKAGEISLLKQQLKDSQADVSQKLSEIVGLRSQLREGRASLREKEEQLLSLRDSFSSKQASLELGEGELPAACLKPALTPVDPAEPQDALATCESDEAKMRRQAGVAAAASLVSVDGEAEAGGESGTRALRREVGRLQAELAAERRARERQGASFAEERRVWLEEKEKVIEYQKQLQLSYVEMYQRNQQLERRLRERGAAGGASTPTPQHGEEKKAWTPSRLERIESTEI

SEQ ID NO: 8116 - protein, 627 aa, Homo sapiens
MAKLETLPVRADPGRDPLLAFAPRPSELGPPDPRLAMGSVGSGVAHAQEFAMKSVGTRTGGGGSQGSFPGPRGSGSGASRERPGRYPSEDKGLANSLYLNGELRGSDHTDVCGNVVGSSGGSSSSGGSDKAPPQYREPSHPPKLLATSGKLDQCSEPLVRPSAFKPVVPKNFHSMQNLCPPQTNGTPEGRQGPGGLKGGLDKSRTMTPAGGSGSGLSDSGRNSLTSLPTYSSSYSQHLAPLSASTSHINRIGTASYGSGSGGSSGGGSGYQDLGTSDSGRASSKSGSSSSMGRPGHLGSGEGGGGGLPFAACSPPSPSALIQELEERLWEKEQEVAALRRSLEQSEAAVAQQDKKQLQEEAARLMRQREELEDKVAACQKEQADFLPRIEETKWEVCQKAGEISLLKQQLKDSQADVSQKLSEIVGLRSQLREGRASLREKEEQLLSLRDSFSSKQASLELGEGELPAACLKPALTPVDPAEPQDALATCESDEAKMRRQAGVAAAASLVYVDGEAEAGGESGTRALRREVGRLQAELAAERRARERQGASFAEERRVWLEEKEKVIEYQKQLQLSYVEMYQRNQQLERRLRERGAAGGASTPTPQHGEEKKAWTPSRLERIESTEI

SEQ ID NO: 8117 - protein, 1967 aa, Homo sapiens
LEFKISDEEADDADAAGRDSPSNTSQSEQQESVDAEGPVVEKIMSSRSVKKQKESGEEVEIEEFYVKYKNFSYLHCQWASIEDLEKDKRIQQKIKRFKAKQGQNKFLSEIEDELFNPDYVEVDRIMDFARSTDDRGEPVTHYLVKWCSLPYEDSTWERRQDIDQAKIEEFEKLMSREPETERVERPPADDWKKSESSREYKNNNKLREYQLEGVNWLLFNWYNMRNCILADEMGLGKTIQSITFLYEIYLKGIHGPFLVIAPLSTIPNWEREFRTWTELNVVVYHGSQASRRTIQLYEMYFKDPQGRVIKGSYKFHAIITTFEMILTDCPELRNIPWRCVVIDEAHRLKNRNCKLLEGLKMMDLEHKVLLTGTPLQNTVEELFSLLHFLEPSRFPSETTFMQEFGDLKTEEQVQKLQAILKPMMLRRLKEDVEKNLAPKEETIIEVELTNIQKKYYRAILEKNFTFLSKGGGQANVPNLLNTMMELRKCCNHPYLINGAEEKILEEFKETHNAESPDFQLQAMIQAAGKLVLIDKLLPKLKAGGHRVLIFSQMVRCLDILEDYLIQRRYPYERIDGRVRGNLRQAAIDRFSKPDSDRFVFLLCTRAGGLGINLTAADTCIIFDSDWNPQNDLQAQARCHRIGQSKSVKIYRLITRNSYEREMFDKASLKLGLDKAVLQSMSGRENATNGVQQLSKKEIEDLLRKGAYGALMDEEDEGSKFCEEDIDQILLRRTHTITIESEGKGSTFAKASFVASGNRTDISLDDPNFWQKWAKKAELDIDALNGRNNLVIDTPRVRKQTRLYSAVKEDELMEFSDLESDSEEKPCAKPRRPQDKSQGYARSECFRVEKNLLVYGWGRWTDILSHGRYKRQLTEQDVETICRTILVYCLNHYKGDENIKSFIWDLITPTADGQTRALVNHSGLSAPVPRGRKGKKVKAQSTQPVVQDADWLASCNPDALFQEDSYKKHLKHHCNKVLLRVRMLYYLRQEVIGDQADKILEGADSSEADVWIPEPFHAEVPADWWDKEADKSLLIGVFKHGYEKYNSMRADPALCFLERVGMPDAKAIAAEQRGTDMLADGGDGGEFDREDEDPEYKPTRTPFKDEIDEFANSPSEDKEESMEIHATGKHSESNAELGQLYWPNTSTLTTRLRRLITAYQRSYKRQQMRQEALMKTDRRRRRPREEVRALEAEREAIISEKRQKWTRREEADFYRVVSTFGVIFDPVKQQFDWNQFRAFARLDKKSDESLEKYFSCFVAMCRRVCRMPVKPDDEPPDLSSIIEPITEERASRTLYRIELLRKIREQVLHHPQLGERLKLCQPSLDLPEWWECGRHDRDLLVGAAKHGVSRTDYHILNDPELSFLDAHKNFAQNRGAGNTSSLNPLAVGFVQTPPVISSAHIQDERVLEQAEGKVEEPENPAAKEKCEGKEEEEETDGSGKESKQECEAEASSVKNELKGVEVGADTGSKSISEKGSEEDEEEKLEDDDKSEESSQPEAGAVSRGKNFDEESNASMSTARDETRDGFYMEDGDPSVAQLLHERTFAFSFWPKDRVMINRLDNICEAVLKGKWPVNRRQMFDFQGLIPGYTPTTVDSPLQKRSFAELSMVGQASISGSEDITTSPQLSKEDALNLSVPRQRRRRRRKIEIEAERAAKRRNLMEMVAQLRESQVVSENGQEKVVDLSKASREATSSTSNFSSLSSKFILPNVSTPVSDAFKTQMELLQAGLSRTPTRHLLNGSLVDGEPPMKRRRGRRKNVEGLDLLFMSHKRTSLSAEDAEVTKAFEEDIETPPTRNIPSPGQLDPDTRIPVINLEDGTRLVGEDAPKNKDLVEWLKLHPTYTVDMPSYVPKNADVLFSSFQKPKQKRHRCRNPNKLDINTLTGEERVPVVNKRNGKKMGGAMAPPMKDLPRWLEENPEFAVAPDWTDIVKQSGFVPESMFDRLLTGPVVRGEGASRRGRRPKSEIARAA

SEQ ID NO: 8118 - protein, 1837 aa, Homo sapiens
MGDSKVKVAVRIRPMNRRETDLHTKCVVDVDANKVILNPVNTNLSKGDARNVEVFLTHTYVHFQQVFAYDHCFWSMDESVKEKYAGQDIVFKCLGENILQNAFDGYNACIFAYGQTGSGKSYTMMGTADQPGLIPRLCSGLFERTQKEENEEQSFKVEVSYMEIYNEKVRDLLDPKGSRQTLKVREHSVLGPYVDGLSKLAVTSYKDIESLMSEGNKSRTVAATNMNEESSRSHAVFKITLTHTLYDVKSGTSGEKVGKLSLVDLAGSERATKTGAAGDRLKEGSNINKSLTTLGLVISALADQSAGKNKNKFVPYRDSVLTWLLKDSLGGNSKTAMVATVSPAADNYDETLSTLRYADRAKHIVNHAVVNEDPNARIIRDLREEVEKLREQLTKAEAMKSPELKDRLEESEKLIQEMTVTWEEKLRKTEEIAQERQKQLESLGISLQSSGIKVGDDKCFLVNLNADPALNELLVYYLKEHTLIGSANSQDIQLCGMGILPEHCIIDITSEGQVMLTPQKNTRTFVNGSSVSSPIQLHHGDRILWGNNHFFRLNLPKKKKKAEREDEDQDPSMKNENSSEQLDVDGDSSSEVSSEVNFNYEYAQMEVTMKALGSNDPMQSILNSLEQQHEEEKRSALERQRLMYEHELEQLRRRLSPEKQNCRSMDRFSFHSPSAQQRLRQWAEEREATLNNSLMRLREQIVKANLLVREANYIAEELDKRTEYKVTLQIPASSLDANRKRGSLLSEPAIQVRRKGKGKQIWSLEKLDNRLLDMRDLYQEWKECEEDNPVIRSYFKRADPFYDEQENHSLIGVANVFLESLFYDVKLQYAVPIINQKGEVAGRLHVEVMRLSGDVGERIAGGDEVAEVSFEKETQENKLVCMVKILQATGLPQHLSHFVFCKYSFWDQQEPVIVAPEVDTSSSSVSKEPHCMVVFDHCNEFSVNITEDFIEHLSEGALAIEVYGHKINDPRKNPALWDLGIIQAKTRSLRDRWSEVTRKLEFWVQILEQNENGEYCPVEVISAKDVPTGGIFQLRQGQSRRVQVEVKSVQESGTLPLMEECILSVGIGCVKVRPLRAPRTHETFHEEEEDMDSYQDRDLERLRRKWLNALTKRQEYLDQQLQKLVSKRDKTEDDADREAQLLEMRLTLTEERNAVMVPSAGSGIPGAPAEWTPVPGMETHIPVIFLDLNADDFSSQDNLDDPEAGGWDATLTGEEEEEFFELQIVKQHDGEVKAEASWDSAVHGCPQLSRGTPVDERLFLIVRVTVQLSHPADMQLVLRKRICVNVHGRQGFAQSLLKKMSHRSSIPGCGVTFEIVSNIPEDAQGVEEREALARMAANVENPASADSEAYIEKYLRSVLAVENLLTLDRLRQEVAVKEQLTGKGKLSRRSISSPNVNRLSGSRQDLIPSYSLGSNKGRWESQQDVSQTTVSRGIAPAPALSVSPQNNHSPDPGLSNLAASYLNPVKSFVPQMPKLLKSLFPVRDEKRGKRPSPLAHQPVPRIMVQSASPDIRVTRMEEAQPEMGPDVLVQTMGAPALKICDKPAKVPSPPPVIAVTAVTPAPEAQDGPPSPLSEASSGYFSHSVSTATLSDALGPGLDAAAPPGSMPTAPEAEPEAPISHPPPPTAVPAEEPPGPQQLVSPGRERPDLEAPAPGSPFRVRRVRASELRSFSRMLAGDPGCSPGAEGNAPAPGAGGQALASDSEEADEVPEWLREGEFVTVGAHKTGVVRYVGPADFQEGTWVGVELDLPSGKNDGSIGGKQYFRCNPGYGLLVRPSRVRRATGPVRRRSTGLRLGAPEARRSATLSGSATNLASLTAALAKADRSHKNPENRKSWAS

SEQ ID NO: 8119 - protein, 3997 aa, Homo sapiens [sequence omitted]

SEQ ID NO: 8120 - protein, 4022 aa, Homo sapiens [sequence omitted]

SEQ ID NO: 8121 - protein, 863 aa, Homo sapiens [sequence omitted]

SEQ ID NO: 8122 - protein, 1427 aa, Homo sapiens [sequence omitted]

SEQ ID NO: 8123 - protein, 1188 aa, Homo sapiens
MKAADEPAYLTVGTDVSAKYRGAFCEAKIKTVKRLVKVKVLLKQDNTTQLVQDDQVKGPLRVGAIVETRTSDGSFQEAIISKLTDASWYTVVFDDGDERTLRRTSLCLKGERHFAESETLDQLPLTNPEHFGTPVIAKKTNRGRRSSLPVTEDEKEEESSEEEDEDKRRLNDELLGKVVSVVSATERTEWYPALVISPSCNDDITVKKDQCLVRSFIDSKFYSIARKDIKEVDILNLPESELSTKPGLQKASIFLKTRVVPDNWKMDISEILESSSSDDEDGPAEENDEEKEKEAKKTEEEVPEEELDPEERDNFLQQLYKFMEDRGTPINKPPVLGYKDLNLFKLFRLVYHQGGCDNIDSGAVWKQIYMDLGIPILNSAASYNLKTAYRKYLYGFEEYCRSANIQFRTVHHHEPKVKEEKKDLEESMEEALKLDQEMPLTEVKSEPEENIDSNSESEREEIELKSPRGRRRIARDVNSIKKEIEEEKTEDKLKDNDTENKDVDDDYETAEKKENELLLGRKNTPKQKEKKIKKQEDSDKDSDEEEEKSQEREETESKCDSEGEEDEEDMEPCLTGTKVKVKYGRGKTQKIYEASIKSTEIDDGEVLYLVHYYGWNVSYDEWVKADRIIWPLDKGGPKKKQKKKAKNKEDSEKDEKRDEERQKSKRGRPPLKSTLSSNMPYGLSKTANSEGKSDSCSSDSETEDALEKNLINEELSLKDELEKNENLNDDKLDEENPKISAHILKENDRTQMQPLETLKLEVGENEQIVQIFGNKMEKAEEVKKEAEKSPKGKGRRSKTKDLSLEIIKISSFGQNEAGSEPHIEAHSLELSSLDNKNFSSATEDEIDQCVKEKKLKRKILGQSSPEKKIRIENGMEMTNTVSQERTSDCIGSEGMKNLNFEQHFERENEGMPSLIAESNQCIQQLTSERFDSPAEETVNIPLKEDEDAMPLIGPETLVCHEVDLDDLDEKDKTSIEDVAVESSESNSLVSIPPALPPVVQHNFSVASPLTLSQDESRSVKSESDITIEVDSIAEESQEGLCERESANGFETNVASGTCSIIVQERESREKGQKRPSDGNSGLMAKKQKRTPKRTSAAAKNEKNGTDELDNMNSTERISFLQEKLQEIRKYYMSLKSEVATIDRRRKRLKKKDREVSHAGASMSSASSDTGMSPSSSSPPQNVLAVECR

SEQ ID NO: 8124 - protein, 39 aa, Homo sapiens
MEPQVTLNVTFKNEIQSFLVSDPENTTWADIEAMVSVTL

SEQ ID NO: 8125 - protein, 713 aa, Homo sapiens
MATGQDRVVALVDMDCFFVQVEQRQNPHLRNKPCAVVQYKSWKGGGIIAVSYEARAFGVTRSMWADDAKKLCPDLLLAQVRESRGKANLTKYREASVEVMEIMSRFAVIERASIDEAYVDLTSAVQERLQKLQGQPISADLLPSTYIEGLPQGPTTAEETVQKEGMRKQGLFQWLDSLQIDNLTSPDLQLTVGAVIVEEMRAAIERETGFQCSAGISHNKVLAKLACGLNKPNRQTLVSHGSVPQLFSQMPIRKIRSLGGKLGASVIEILGIEYMGELTQFTESQLQSHFGEKNGSWLYAMCRGIEHDPVKPRQLPKTIGCSKNFPGKTALATREQVQWWLLQLAQELEERLTKDRNDNDRVATQLVVSIRVQGDKRLSSLRRCCALTRYDAHKMSHDAFTVIKNCNTSGIQTEWSPPLTMLFLCATKFSASAPSSSTDITSFLSSDPSSLPKVPVTSSEAKTQGSGPAVTATKKATTSLESFFQKAAERQKVKEASLSSLTAPTQAPMSNSPSKPSLPFQTSQSTGTEPFFKQKSLLLKQKQLNNSSVSSPQQNPWSNCKALPNSLPTEYPGCVPVCEGVSKLEESSKATPAEMDLAHNSQSMHASSASKSVLEVTQKATPNPSLLAAEDQVPCEKCGSLVPVWDMPEHMDYHFALELQKSFLQPHSSNPQVVSAVSHQGKRNPKSPLACTNKRPRPEGMQTLESFFKPLTH

SEQ ID NO: 8126 - protein, 353 aa, Homo sapiens
MSTLLLNLDFGEPPPKKALEGNAKHRNFVKKRRLLERRGFLSKKNQPPSKAPKLHSEPSKKGETPTVDGTWKTPSFPKKKTAASSNGSGQPLDKKAAVSWLTPAPSKKADSVAAKVDLLGEFQSALPKINSHPTRSQKKSSQKKSSKKNHPQKNAPQNSTQAHSENKCSGASQKLPRKMVAIDCEMVGTGPKGHVSSLARCSIVNYNGDVLYDEYILPPCHIVDYRTRWSGIRKQHMVNATPFKIARGQILKILTGKIVVGHAIHNDFKALQYFHPKSLTRDTSHIPPLNRKADCPENATMSLKHLTKKLLNRDIQVGKSGHSSVEDAQATMELYKLVEVEWEEHLARNPPTD

SEQ ID NO: 8127 - protein, 548 aa, Homo sapiens
  VARIANT 218, 220, 295, 468: Xaa = Any Amino Acid
MEVRAEEPKEATEVKDQVETQGQEDNKTGPCSNGKAASTSRPLETQGNLTSSWYNPRPLEGNVHLKSLTEKNQTDKAQVHAVSFYSKGHGVTSSHSPAGGILPFGKPDPLPAVLPAPVPDCSLWPEKAALKVLGKDHLPSSPGLLMVGEDMQPKDPAALRSSRSSPPRAAGHRPRKRKLSGPPLQLQQTPPLQLRSTLLLNLDLVDSPPKKTLEGDAXHXNFVKKWRLLEWRDFLSKKKQPPCKSPKLHSEPPEKGETPRVDGTWKTPPFLKKKKITASSNGSGQSLDKKAAVFXLIPAYLKKADSVAAKLDLLGEIWSALPKINSHPTHSQKKGSRKKSSKKNHPQKNAPQNSTQAHSENKCSRASQKLPRKMMVAIDSEMVGTGPKGHVSFLAQCSIVNYNGDVLYDEYILPPCHTVDYWTRWSGIQKQHMVNATPFKIARGQILKILTGKIVVGHAIHDDLKALXYFHPKSLTHDTTHIPTSSTGMSHIPRHDHPENATMSLKHLSKKLLNWDIQVRKSGYSSVENAQATRELYKLGEVQNPPKD

SEQ ID NO: 8128 - protein, 454 aa, Homo sapiens
MCAAQMPPLAHIFRGTFVHSTWTCPMEVLRDHLLGVSDSGKIVFLEEASQQEKLAKEWCFKPCEIRELSHHEFFMPGLVDTHIHASQYSFAGSSIDLPLLEWLTKYTFPAEHRFQNIDFAEEVYTRVVRRTLKNGTTTACYFATIHTDSSLLLADITDKFGQRAFVGKVCMDLNDTFPEYKETTEESIKETERFVSEMLQKNYSRVKPIVTPRFSLSCSETLMGELGNIAKTRDLHIQSHISENRDEVEAVKNLYPSYKNYTSVYDKNNLLTNKTVMAHGCYLSAEELNVFHERGASIAHCPNSNLSLSSGFLNVLEVLKHEVKIGLGTDVAGGYSYSMLDAIRRAVMVSNILLINKVNEKSLTLKEVFRLATLGGSQALGLDGEIGNFEVGKEFDAILINPKASDSPIDLFYGDFFGDISEAVIQKFLYLGDDRNIEEVYVGGKQVVPFSSSV

SEQ ID NO: 8129 - protein, 862 aa, Homo sapiens
MERAESSSTEPAKAIKPIDRKSVHQICSGQVVLSLSTAVKELVENSLDAGATNIDLKLKDYGVDLIEVSDNGCGVEEENFEGLTLKHHTSKIQEFADLTQVETFGFRGEALSSLCALSDVTISTCHASAKVGTRLMFDHNGKIIQKTPYPRPRGTTVSVQQLFSTLPVRHKEFQRNIKKEYAKMVQVLHAYCIISAGIRVSCTNQLGQGKRQPVVCTGGSPSIKENIGSVFGQKQLQSLIPFVQLPPSDSVCEEYGLSCSDALHNLFYISGFISQCTHGVGRSSTDRQFFFINRRPCDPAKVCRLVNEVYHMYNRHQYPFVVLNISVDSECVDINVTPDKRQILLQEEKLLLAVLKTSLIGMFDSDVNKLNVSQQPLLDVEGNLIKMHAADLEKPMVEKQDQSPSLRTGEEKKDVSISRLREAFSLRHTTENKPHSPKTPEPRRSPLGQKRGMLSSSTSGAISDKGVLRPQKEAVSSSHGPSDPTDRAEVEKDSGHGSTSVDSEGFSIPDTGSHCSSEYAASSPGDRGSQEHVDSQEKAPETDDSFSDVDCHSNQEDTGCKFRVLPQPTNLATPNTKRFKKEEILSSSDICQKLVNTQDMSASQVDVAVKINKKVVPLDFSMSSLAKRIKQLHHEAQQSEGEQNYRKFRAKICPGENQAAEDELRKEISKTMFAEMEIIGQFNLGFIITKLNEDIFIVDQHATDEKYNFEMLQQHTVLQGQRLIAPQTLNLTAVNEAVLIENLEIFRKNGFDFVIDENAPVTERAKLISLPTSKNWTFGPQDVDELIFMLSDSPGVMCRPSRVKQMFASRACRKSVMIGTALNTSEMKKLITHMGEMDHPWNCPHGRPTMRHIANLGVISQN

SEQ ID NO: 8130 - protein, 1564 aa, Homo sapiens
AEMAAGSGGSGGSGGGPGPGPGGGGGPSGSGSGPGSNGGLGSGGELHPRTGRLVSLSACGRTARRQQPGQEFNHGLVLSREPLRDGRVFTVRIDRKVNSWSGSIEIGVTALDPSVLDFPSSATGLKGGSWVVSGCSVLRDGRSVLEEYGQDLDQLGEGDRVGVERTVAGELRLWVNGRDCGVAATGLPPRVWAVVDLYGKCTQITVLPPEPGFSPPTPIPTPPLEPLAPTEDSALAEQGTSADEAFMVSPAQARPETFPNSLESHNDFANMELSEVVSNTILSAYNGGLLNVNLSSPPAGEGLGSSGAATSPILTSNDALLFHEKCGTLIKLSNNNKTAERRRPLDEFNNGVVMTNRPLRDNEMFEIRIDKLVDKWSGSIEIGVTTHNPNSLEYPATMTNLQSGTIMMSGCGILTNGKGTRREYCEFSLDELQEGDHIGLTRKSNSALHFFINGIDQGVATPLTPPVVYGVVDLYGMAVKVTIVHNNNHSDRLRRNNAILRALSPEGALRRAAPAAQAEPERLLFHPNCGQKAAITHEGRTALRPHATDDFNHGVVLSSRALRDGEVFQVRIDKMVDKWAGSIEIGVTTHNPAYLQLPSTMTNLRSGTWMMTGNGVMHNGTTILDEYGHNLDRLKAGDTVGVVRREDGTLHFFVNGMTQGPAAWNVPPGVYAVVDLYGQAAQATIVDDVEVAPVPEPLPEGNNQVSPSSPSSGAGGSDLRFHQLHGSNAVITNGGRTALRHNCRSEFNDAIVISNRALRDGELFEIVIQKMVDRWSGSIEAGVTAIRPEDLEFPNTMTDIDYDTWMLSGTAIMQDGNTMRNNYGCDLDALGTGARIGMMRTAKGDLHYFINGQDQGAACSGLPPGKEVYAVVDLYGQCVQVSITNATGPMDNSLATSNTATEKSFPLHSPVAGVAHRFHSTCGKNVTLEEDGTRAVRAAGYAHGLVFSTKELRAEEVFEVKVEELDEKWAGSLRLGLTTLAPGEMGPGAGGGGPGLPPSLPELRTKTTWMVSSCEVRRDGQLQRMNYGRNLERLGVGSRVGVRRGADDTMHILVDGEDMGPAATGIAKNVWAVLDLYGPVRGVSIVSSTRLEESEGTQPPSPSSDTGSEGEEDDEGEEHGLGGQNEVGIIPTTLEFLENHGKNILLSNGNRTATRVASYNQGIVVINQPLVPQLLVQVRIDFLNRQWTSSLVLGVITCAPERLNFPASACALKRAAWLLRGRGVFHNGLKICEKFGPNLDTCPEGTILGLRLDSSGGLHLHVNGVDQGVAVPDVPQPCHALVDLYGQCEQVTIVNPEPGAASGKSAGTQGDMEKADMVDGIKESVCWGPPPAASPLKSCEYHALCSRFQELLLLPEDYFMPPPKRSLCYCESCRKLRGDEAHRRRGEPPREYALPFGWCRFNLRVNPRLEAGTLTKKWHMAYHGSNVAAVRRVLDRGELGAGTASILSCRPLKGEPGVGFEEPGENCAPPREEQPPPVLLSPSLQYAGAETLASKVQFRDPKSQRTHQAQVAFQVCVRPGSYTPGPPSAALGEPPDPHFSPAELEWVTKEKGATLLCALLVRVE

SEQ ID NO: 8131 - protein, 1743 aa, Homo sapiens
MATDSGDPASTEDSEKPDGISFENRVPQVAATLTVEARLKEKNSTFSASGETVERKRFFRKSVEMTEDDKVAESSPKDERIKAAMNIPRVDKLPSNVLRGGQEVKYEQCSKSTSEISKDCFKEKNEKEMEEEAEMKAVATSPSGRFLKFDIELGRGAFKTVYKGLDTETWVEVAWCELQDRKLTKAEQQRFKEEAEMLKGLQHPNIVRFYDSWESILKGKKCIVLVTELMTSGTLKTYLKRFKVMKPKVLRSWCRQILKGLQFLHTRTPPIIHRDLKCDNIFITGPTGSVKIGDLGLATLMRTSFAKSVIGTPEFMAPEMYEEHYDESVDVYAFGMCMLEMATSEYPYSECQNAAQIYRKVTSGIKPASFNKVTDPEVKEIIEGCIRQNKSERLSIRDLLNHAFFAEDTGLRVELAEEDDCSNSSLALRLWVEDPKKLKGKHKDNEAIEFSFNLETDTPEEVAYEMVKSGFFHESDSKAVAKSIRDRVTPIKKTREKKPAGCLEERRDSQCKSMGNVFPQPQNTTLPLAPAQQTGAECEETEVDQHVRQQLLQRKPQQHCSSVTGDNLSEAGAASVIHSDTSSQPSVAYSSNQTMGSQMVSNIPQAEVNVPGQIYSSQQLVGHYQQVSGLQKHSKLTQPQILPLVQGQSTVLPVHVLGPTVVSQPQVSPLTVQKVPQIKPVSQPVGAEQQAALLKPDLVRSLNQDVATTKENVSSPDNPSGNGKQDRIKQRRASCPRPEKGTKFQLTVLQVSTSGDNMVECQLETHNNKMVTFKFDVDGDAPEDIADYMVEDNFVLESEKEKFVEELRAIVGQAQEILHVHFATERATGVDSITVDSNSSQTGSSEQVQINSTSTQTSNESAPQSSPVGRWRFCINQTIRNRETQSPPSLQHSMSAVPGRHPLPSPKNTSNKEISRDTLLTIENNPCHRALFTSKSEHKDVVDGKISECASVETKQPAILYQVEDNRQIMAPVTNSSSYSTTSVRAVPAECEGLTKQASIFIPVYPCHQTASQADALMSHPGESTQTSGNSLTTLAFDQKPQTLSVQQPAMDAEFISQEGETTVNTEASSPKTVIPTQTPGLEPTTLQPTTVLESDGERPPKLEFADNRIKTLDEKLRNLLYQEHSISSIYPESQKDTQSIDSPFSSSAEDTLSCPVTEVIAISHCGIKDSPVQSPNFQQTGSKLLSNVAASQPANISVFKRDLNVITSVPSELCLHEMSSDASLPGDPEAYPAAVSSGGAIHLQTGVETEEMRSAIAPDPIPLTRESTADTRALNRCKAMSGSFQRGRFQVITIPQQQSAKMTSFGIEHISVFSETNHSSEEAFIKTAKSQLVEIEPATQNPKTSFSYEKLQALQETCKENKGVPKQGDNFLSFSAACETDVSSVTPEKEFEETSATGSSMQSGSELLLKEREILTAGKQPSSDSEFSASLAGSGKSVAKTGPESNQCLPHHEEQAYAQTQSSLFYSPSSPMSSDDESEIEDEDLKVELQRLREKHIQEVVNLQTQQNKELQELYERLRSIKDSKTQSTEIPLPPASPRRPRSFKSKLRSRPQSLTHVDNGIVATDPLCVESNAASCQQSPASKKGMFTDDLHKLVDDWTKEAVGNSLIKPSLNQLKQSQHKLETENWNKVSENTPSTMGYTSTWISSLSQIRGAVPTSLPQGLSLPSFPGPLSSYGMPHVCQYNAVAGAGYPVQWVGISGTTQQSVVIPAQSGGPFQPGMNMQAFPTSSVQNPATIPPGPK

SEQ ID NO: 8132 - protein, 1800 aa, Homo sapiens
MATDSGDPANTEDSEKPDGISFENRVPQVAATLTVEARLKEKNSTFSASGETVERKRFFRKSVEMTEDDKVAESSPKDERIKAAMNIPRVDKLPSNVLRGGQEVKYEQCSKSTSEISKDCFKEKNEKEMEEEAEMKAVATSPSGRFLKFDIELGRGAFKTVYKGLDTETWVEVAWCELQDRKLTKAEQQRFKEEAEMLKGLQHPNIVRFYDSWESILKGKKCIVLVTELMTSGTLKTYLKRFKVMKPKVLRSWCRQILKGLQFLHTRTPPIIHRDLKCDNIFITGPTGSVKIGDLGLATLMRTSFAKSVIGTPEFMAPEMYEEHYDESVDVYAFGMCMLEMATSEYPYSECQNAAQIYRKVTSGIKPASFNKVTDPEVKEIIEGCIRQNKSERLSIRDLLNHAFFAEDTGLRVELAEEDDCSNSSLALRLWVEDPKKLKGKHKDNEAIEFSFNLETDTPEEVAYEMVKSGFFHESDSKAVAKSIRDRVTPIKKTREKKPAGCLEERRDSQCKSMGNVFPQPQNTTLPLAPAQQTGAECEETEVDQHVRQQLLQRKPQQHCSSVTGDNLSEAGAASVIHSDTSSQPSVAYSSNQTMGSQMVSNIPQAEVNVPGQIYSSQQLVGHYQQVSGLQKHSKLTQPQILPLVQGQSTVLPVHVLGPTVVSQPQVSPLTVQKVPQIKPVSQPVGAEQQAALLKPDLVRSLNQDVATTKENVSSPDNPSGNGKQDRIKQRRASCPRPEKGTKFQLTVLQVSTSGDNMVECQLETHNNKMVTFKFDVDGDAPEDIADYMVEDNFVLESEKEKFVEELRAIVGQAQEILHVHFATERATGVDSITVDSNSSQTGSSEQVQINSTSTQTSNESAPQSSPVGRWRFCINQTIRNRETQSPPSLQHSMSAVPGRHPLPSPKNTSNKEISRDTLLTIENNPCHRALFTSKSEHKDVVDGKISECASVETKQPAILYQVEDNRQIMAPVTNSSSYSTTSVRAVPAECEGLTKQASIFIPVYPCHQTASQADALMSHPGESTQTSGNSLTTLAFDQKPQTLSVQQPAMDAEFISQEGETTVNTEASSPKTVIPTQTPGLEPTTLQPTTVLESDGERPPKLEFADNRIKTLDEKLRNLLYQEHSISSIYPESQKDTQSIDSPFSSSAEDTLSCPVTEVIAISHCGIKDSPVQSPNFQQTGSKLLSNVAASQPANISVFKRDLNVITSVPSELCLHEMSSDASLPGDPEAYPAAVSSGGAIHLQTGGGYFGLSFTCPSLKNPISKKSWTRKLKSWAYRLRQSTSFFKRSKVRQVETEEMRSAIAPDPIPLTRESTADTRALNRCKAMSGSFQRGRFQVITIPQQQSAKMTSFGIEHISVFSETNHSSEEAFIKTAKSQLVEIEPATQNPKTSFSYEKLQALQETCKENKGVPKQGDNFLSFSAACETDVSSVTPEKEFEETSATGSSMQSGSELLLKEREILTAGKQPSSDSEFSASLAGSGKSVAKTGPESNQCLPHHEEQAYAQTQSSLFYSPSSPMSSDDESEIEDEDLKVELQRLREKHIQEVVNLQTQQNKELQELYERLRSIKDSKTQSTEIPLPPASPRRPRSFKSKLRSRPQSLTHVDNGIVATGKSCLINELENPLCVESNAASCQQSPASKKGMFTDDLHKLVDDWTKEAVGNSLIKPSLNQLKQSQHKLETENWNKVSENTPSTMGYTSTWISSLSQIRGAVPTSLPQGLSLPSFPGPLSSYGMPHVCQYNAVAGAGYPVQWVGISGTTQQSVVIPAQSGGPFQPGMNMQAFPTSSVQNPATIPPGPK

SEQ ID NO: 8133 - protein, 454 aa, Homo sapiens
MELATRYQIPKEVADIFNAPSDDEEFVGFRDDVPMETLSSEESCDSFDSLESGKQQDVRFHSKYFTEELRRIFIEDTDSETEDFAGFTQSDLNGKTNPEVMVVESDLSDDGKASLVSEEEEDEEEDKATPRRSRSRRSSIGLRVAFQFPTKKLANKPDKNSSSEQLFSSARLQNEKKTILERKKDCRQVIQREDSTSESEDDSRDESQESSDALLKRTMNIKENKAMLAQLLAELNSMPDFFPVRTPTSASRKKTVRRAFSEGQITRRMNPTRSARPPEKFALENFTVSAAKFAEEFYSFRRRKTIGGKCREYRRRHRISSFRPVEDITEEDLENVAITVRDKIYDKVLGNTCHQCRQKTIDTKTVCRNQGCCGVRGQFCGPCLRNRYGEDVRSALLDPDWVCPPCRGICNCSYCRKRDGRCATGILIHLAKFYGYDNVKEYLESLQKELVEDN

SEQ ID NO: 8134 - protein, 461 aa, Homo sapiens
GTRRLGRMELATRYQIPKEVADIFNAPSDDEEFVGFRDDVPMETLSSEESCDSFDSLESGKQQDVRFHSKYFTEELRRIFIEDTDSETEDFAGFTQSDLNGKTNPEVMVVESDLSDDGKASLVSEEEEDEEEDKATPRRSRSRRSSIGLRVAFQFPTKKLANKPDKNSSSEQLFSSARLQNEKKTILERKKDCRQVIQREDSTSESEDDSRDESQESSDALLKRTMNIKENKAMLAQLLAELNSMPDFFPVRTPTSASRKKTVRRAFSEGQITRRMNPTRSARPPEKFALENFTVSAAKFAEEFYSFRRRKTIGGKCREYRRRHRISSFRPVEDITEEDLENVAITVRDKIYDKVLGNTCHQCRQKTIDTKTVCRNQGCCGVRGQFCGPCLRNRYGEDVRSALLDPDWVCPPCRGICNCSYCRKRDGRCATGILIHLAKFYGYDNVKEYLESLQKELVEDN

SEQ ID NO: 8135 - protein, 1275 aa, Homo sapiens [sequence omitted]

SEQ ID NO: 8136 - protein, 489 aa, Homo sapiens
MYSAMSPFSKATLDTSKLYVSSSFTNKIPDEGDTTPEKPEDPSALSKQSSEVSMREESDIDQNQSDDGDTETSPTKSPTTPKSVKNKNSSEFPLFSYNNGVVMTSCRELDNNRSALSAASAFAIATAGANEGTPNKEKYRRMSLASAGFPPDQRNGDKEFVIRRAATNRVLNVLRHWVSKHSQDFETNDELKCKVIGFLEEVMHDPELLTQERKAAANIIRTLTQEDPGDNQITLEEITQMAEGVKAEPFENHSALEIAEQLTLLDHLVFKKIPYEEFFGQGWMKLEKNERTPYIMKTTKHFNDISNLIASEIIRNEDINARVSAIEKWVAVADICRCLHNYNAVLEITSSMNRSAIFRLKKTWLKVSKQTKALIDKLQKLVSSEGRFKNLREALKNCDPPCVPYLGMYLTDLAFIEEGTPNYTEDGLVNFSKMRMISHIIREIRQFQQTAYKIEHQAKVTQYLLDQSFVMDEESLYESSLRIEPKLPT

SEQ ID NO: 8137 - protein, 97 aa, Homo sapiens
MGKKQSRKAENYKNQSASPPPKDRSSSPATEQSWTQNDFDELREEGFRESDFSELKEEVRTHRKEAKNLEKRLDKWLTRVTSVEKSLNDLMELKTMA

SEQ ID NO: 8138 - protein, 224 aa, Homo sapiens
MGRIDRRRCGCTKGMLRNHGPPVHTAAWVDLNISVLSEKGWFRFWYLVPELSNHHVEQKGKTTKKRPQCATSKVFATFDQSQIQEFKEAFNMIDQNRDGFISKEDLHGMLASLGKNPTDACLDAVMNEAPGPINFTMLLAMFGKKLNGTDPEDVIRNAFACFDEEATGTIQEDYLRELLTTVGDQFTDEEVDELYTEAPIDKKGNFNYIEFTSILKHGVKDKDD

SEQ ID NO: 8139 - protein, 764 aa, Homo sapiens
MSDTRRRVKVYTLNEDRQWDDRGTGHVSSTYVEELKGMSLLVRAESDGSLLLESKINPNTAYQKQQDTLIVWSEAENYDLALSFQEKAGCDEIWEKICQVQGKDPSVEVTQDLIDESEEERFEEMPETSHLIDLPTCELNKLEEIADLVTSVLSSPIRREKLALALENEGYIKKLLQLFQACENLENTEGLHHLYEIIRGILFLNKATLFEVMFSDECIMDVVGCLEYDPALAQPKRHREFLTKTAKFKEVIPITDSELRQKIHQTYRVQYIQDIILPTPSVFEENFLSTLTSFIFFNKVEIVSMLQEDEKFLSEVFAQLTDEATDDDKRRELVNFFKEFCAFSQTLQPQNRDAFFKTLAKLGILPALEIVMGMDDLQVRSAATDIFSYLVEFSPSMVREFVMQEAQQSDDDILLINVVIEQMICDTDPELGGAVQLMGLLRTLIDPENMLATTNKTEKSEFLNFFYNHCMHVLTAPLLTNTSEDKCEKDNIVGSNKNNTICPGALRFMRRIIGLKDEFYNRYITKGNLFEPVINALLDNGTRYNLLNSAVIELFEFIRVEDIKSLTAHIVENFYKALESIEYVQTFKGLKTKYEQEKDRQNQKLNSVPSILRSNRFRRDAKALEEDEEMWFNEDEEEEGKAVVAPVEKPKPEDDFPDNYEKFMETKKAKESEDKENLPKRTSPGGFKFTFSHSASAANGTNSKSVVAQIPPATSNGSSSKTTNLPTSVTATKGSLVGLVDYPDDEEEDEEEESSPRKRPRLGS

SEQ ID NO: 8140 - protein, 611 aa, Homo sapiens
SIPKMEVKSYTKNNTIAPKKASHRILSDTSDEEDASVTVGTGEKLRLSAHTILPGSKTREPSNAKQQKEKNKVKKKRKKETKGREVRFGKRSDKFCSSESESESSESGEDDRDSLGSSGCLKGSPLVLKDPSLFSSLSASSTSSHGSSAAQKQNPSHTDQHTKHWRTDNWKTISSPAWSEVSSLSDSTRTRLTSESDYSSEGSSVESLKPVRKRQEHRKRASLSEKKSPFLSSAEGAVPKLDKEGKVVKKHKTKHKHKNKEKGQCSISQELKLKSFTYEYEDSKQKSDKAILLENDLSTENKLKVLKHDRDHFKKEEKLSKMKLEEKEWLFKDEKSLKRIKDTNKDISRSFREEKDRSNKAEKERSLKEKSPKEEKLRLYKEERKKKSKDRPSKLEKKNDLKEDKISKEKEKIFKEDKEKLKKEKVYREDSAFDEYCNKNQFLENEDTKFSLSDDQRDRWFSDLSDSSFDFKGEDSWDSPVTDYRDMKSDSVAKLILETVKEDSKERRRDSRAREKRDYREPFFRKKDRDYLDKNSEKRKEQTEKHKSVPGYLSEKDERRRRRMAPIRKGRRRQNQKDTKRNPVTRTKVRNQSWKNVRRTKNLINVLKRKK

SEQ ID NO: 8141 - protein, 290 aa, Homo sapiens
MFRLLSSCCSCLRTTEETRRNVTIPIIGLNNSGKTVLVEAFQKLLPSKTDHCMKSELTTLLLDEYELSIYDLNGDLKGREAWPNYYAQAHGLVFVLDSSDIRRMQEVKIILTHLLSDKRVAGKPILILANKQDKKKALMPCDIIDYLLLKKLVKENKCPCRVEPCSAIRNLERRNHQPIVEGLRWLLAVIDTCQLPPTSSISISKNNTGSGERCSSHSFSTRTGMSKEKRQHLEQCSIEAKPLKSILQKEGTRLWSKKNMSVTFALDEPMKEGECSRRMRAQNTTKLCYN

SEQ ID NO: 8142 - protein, 1275 aa, Homo sapiens
MTGSNSHITILTLNINGLNSAIKRHRLASWIKSQDPSVCCIQETHLTCRDTHRLKIKGWRKIYQANGKQKKAGVAILVSDKTDFKPTKIKRDKEGHYIMVKGSIQQEELTILNIYAPNTGAPRFIKQVLSDLQRDLDSHTLIMGDFNTPLSTLDRSTRQKVNKDTQELNSALHQADLIDIYRTLHPKSTEYTFFSAPHHTYSKIDHIVGSKALLSKCKRTEIITNYLSDHSAIKLELRIKNLTQSHSTTWKLNNLLLNDYWVHNEMKAEIKMFFETNENKDTTYQNLWDAFKAVCRGKFIALNAYKRKQERSKIDTLTSQLKELEKQEQTHSKASRRQEITKIRAELKEIETQKTLQKINESRSWFFERINKIDRPLARLIKKKREKNQIDTVKNDKGDITTDPTEIQTTIREYYKHLYANKLENLEEMDTFLDTYTLPRLNQEEVESLNRPITGSEIVAIINSLPTKKSPGPDGFTAEFYQRYMEELVPFLLKLFQSIEKEGILPNSFYEASIILIPKPGRDTTKKENFRPISLMNIDAKILNKILANRIQQHIKKLIHHDQVGFIPGMQGWFNIRKSINVIQHINRAKDKNHMIISIDAEKAFDKIQQPFMLKTLNKLGIDGTYFKIIRAIYYKPTANIILNGQKLEAFPLKTGTRQGCPLSPLLFNIVLEVLARAIRQEKEIKGIQLGKEEVKLSLFADDMIVYLENPIVSAQNLLKLISNFSKVSGYKINVQKSQAFLYTNNRQTESQIMGELPFTIASKRIKYLGIQLTRDVKDLFKENYKPLLKEIKEDTNKWKNIPCSWVGRINIVKMAILPKVIYRFNAIPIKLPMTFFTELEKTTLKFIWNQKRARIAKSILSQKNKAGGITLPDFKLYYKPTVTKTAWYWYQNRDIDQWNRTEPSEIMPHIYNYLIFDKPEKNKQWGKDSLFNKWCWENWLAICRKLKLDPFLTPYTKINSRWIKDLNVKPKTIKTLEENLGITIQDIGVGKDFMSKTPKAMATKDKIDKWDLIKLKSFCTAKETTIRVNRQPTTWEKIFATYSSDKGLISRIYNELKQIYKKKTNNPIKKWAKDMNRHFSKEDIYAAKKHMKKCSSSLAIREMQIKTTMRYHLTPVRMAIIKKSGNNRCWRGCGEIGTLLHCWWDCKLVQPLWKSVWRFLRDLELEIPFDPAIPLLGIYPNEYKSCCYKDTCTRMFIAALFTIAKTWNQPKCPTMIDWIKKMWHIYTMEYYAAIKNDEFISFVGTWMKLETIILSKLSQEQKTKHRIFSLIGGN

SEQ ID NO: 8143 - protein, 1275 aa, Homo sapiens [sequence omitted]

SEQ ID NO: 8144 - protein, 1275 aa, Homo sapiens
MTGSNSHITILTLNINGLNSAIKRHRLASWIKSQDPSVCCIQETHLTCRDTHRLKIKGWRKIYQANGKQKKAGVAILVSDKTDFKPTKIKRDKEGHYIMVKGSIQQEELTILNIYAPNTGAPRFIKQVLSDLQRDLDSHTLIMGDFNTPLSTLDRSTRQKVNKDTQELNSALHQADLIDIYRTLHPKSTEYTFFSAPHHTYSKIDHRVGSKALLSKCKRTEIITNYLSDHSAIKLELRIKNLTQSHSTTWKLNNLLLNDYWVHNEMKAEIKMFFETNENNDTTYQNLWDAFKAVCRGKFIALNAYKRKQERSKIDTLTSQLKELEKQEQTHSKASRRQEITKIRAELKEIETQKTLQKINESRSWFFERINKIDRPLARLIKKKREKNQIDTIKIDKGDITTDPTEIQTTIREYYKHLYANKLENLEEMDTFLDTYTLPRLNQEEVESLNRPITGSEIVAIINSLPTKKSPGPDGFTAEFYQRYKEELVPFLLKLFQSIEKEGILPNSFYEASIILIPKLGRDTTKKENFRPISLMNIDAKILTKILANRIQQHIKKLIHHDQVGFIPGMQGWFNIRKSINVIQHINRAKDKNHMIISIDAEKAFDKIQQPFMLKTLNKLGIDGTYFKIIRAIYDKPTANIILNGQKLEAFPLKTGTRQGCPLSPLLFNIVLEVLARAIRQEKEIKGIQLGKEEVKLSLFADDMIVCLENPIVSAQNLLKLISNFSKVSGYKINVQKSQAFLYTNNRQTESQIMGELPFTIASKRIKYLGIQLTRDVKDLFKENYKPLLKEIKEDTNKWKNIPCSWVGRINIVKMAILPKVIYRFNAIPIKLPMTFFTELEKTTLKFMWNQKRARIAKSILSQKNKAGGITLPDFKLYYKATVTKTAWYWYQNRDIDQWNRTEPSEIMPHIYNYLIFDKPEKNKQWGKDSLFNKWCWENWLAICRRLKLDPFLTPYTKINSRWIKDLNVRPKTIKTLEENLGITIQDIGVGKDFMSKTPKAMATKAKIDKWDLIKLKSFCTAKETTIRVNRQPTTWEKIFATYSSDKGLISRIYNELKQIYKKKTNNPIKKWAKDMNRHFSKEDIYAAKKHMKKCSSSLAIREMQIKTTMRYHLTPVRMAIIKKSGNNRCWRGCGEIGTLLHCWWDCKLVQPLWKSVWRFLRDLELEIPFDPAIPLLGIYPNEYKSCCYKDTCTRMFIAALFTIAKTWNQLKCPTMIDWIKKMWHIYTMEYYAAIKNDEFISFVGTWMKLETIILSKLSQEQKTKHRIFSLIAGN

SEQ ID NO: 8145 - protein, 1064 aa, Homo sapiens
MASESETLNPSARIMTFYPTMEEFRNFSRYIAYIESQGAHRAGLAKVVPPKEWKPRASYDDIDDLVIPAPIQQLVTGQSGLFTQYNIQKKAMTVREFRKIANSDKYCTPRYSEFEELERKYWKNLTFNPPIYGADVNGTLYEKHVDEWNIGRLRTILDLVEKESGITIEGVNTPYLYFGMWKTSFAWHTEDMDLYSINYLHFGEPKSWYSVPPEHGKRLERLAKGFFPGSAQSCEAFLRHKMTLISPLMLKKYGIPFDKVTQEAGEFMITFPYGYHAGFNHGFNCAESTNFATRRWIEYGKQAVLCSCRKDMVKISMDVFVRKFQPERYKLWKAGKDNTVIDHTLPTPEAAEFLKESELPPRAGNEEECPEEDMEGVEDGEEGDLKTSLAKHRIGTKRHRVCLEIPQEVSQSELFPKEDLSSEQYEMTECPAALAPVRPTHSSVRQVEDGLTFPDYSDSTEVKFEELKNVKLEEEDEEEEQEAAALDLSVNPASVGGRLVFSGSKKKSSSSLGSGSSRDSISSDSETSEPLSCRAQGQTGVLTVHSYAKGDGRVTVGEPCTRKKGSAARSFSERELAEVADEYMFSLEENKKSKGRRQPLSKLPRHHPLVLQECVSDDETSEQLTPEEEAEETEAWAKPLSQLWQNRPPNFEAEKEFNETMAQQAPHCAVCMIFQTYHQVEFGGFNQNCGNASDLAPQKQRTKPLIPEMCFTSTGCSTDINLSTPYLEEDGTSILVSCKKCSVRVHASCYGVPPAKASEDWMCSRCSANALEEDCCLCSLRGGALQRANDDRWVHVSCAVAILEARFVNIAERSPVDVSKIPLPRFKLKCIFCKKRRKRTAGCCVQCSHGRCPTAFHVSCAQAAGVMMQPDDWPFVVFITCFRHKIPNLERAKGALQSITAGQKVISKHKNGRFYQCEVVRLTTETFYEVNFDDGSFSDNLYPEDIVSQDCLQFGPPAEGEVVQVRWTDGQVYGAKFVASHPIQMYQVEFEDGSQLVVKRDDVYTLDEELPKRVKSRLSVASDMRFNEIFTEKEVKQEKKRQRVINSRYREDYIEPALYRAIME

SEQ ID NO: 8146 - protein, 251 aa, Homo sapiens
QCQKKEIEQMCQNEQSRVNKYTGVETYEDRFSQLQSENNLLWQQLDDADKKAESQEKTISTIQEQFHAVVRNLLAESIKLLLEEENEEIINVRNPLKERIYQCEKETVGKKIMRQLLQEPADTLKKNLSEPSLEATPHCHINLEETQDSKKELATALSSCIISFMQFDDLTAELEAVSLQCVYLAENNQVTQQELSMKKVQQECEKLEENKKMLEEGIVNLMTHMENMVELGKVQEYKLELEEKAMPAIEK

SEQ ID NO: 8147 - protein, 106 aa, Homo sapiens
MMTLVPRARTRAGQDHYSHPCPRFSQVLLTEGIMTYCLTKNLSDVNILHRLLKNGNVRNTLLQSKVGLLTYYVKLYPGEVTLLTRPSIQMRLCCITGSVSKPRSQK

SEQ ID NO: 8148 - protein, 677 aa, Homo sapiens
MKKFSRMPKSEGGSGGGAAGGGAGGAGAGAGCGSGGSSVGVRVFAVGRHQVTLEESLAEGGFSTVFLVRTHGGIRCALKRMYVNNMPDLNVCKREITIMKELSGHKNIVGYLDCAVNSISDNVWEVLILMEYCRAGQVVNQMNKKLQTGFTEPEVLQIFCDTCEAVARLHQCKTPIIHRDLKVENILLNDGGNYVLCDFGSATNKFLNPQKDGVNVVEEEIKKYTTLSYRAPEMINLYGGKPITTKADIWALGCLLYKLCFFTLPFGESQVAICDGNFTIPDNSRYSRNIHCLIRFMLEPDPEHRPDIFQVSYFAFKFAKKDCPVSNINKCCKQLLRHGALLTEILLFLQLFLNRMTASEAAARKSQIKARITDTIGPTETSIAPRQRPKANSATTATPSVLTIQSSATPVKVLAPGEFGNHRPKGALRPGNGPEILLGQGPPQQPPQQHRVLQQLQQGDWRLQQLHLQHRHPHQQQQQQQQQQQQQQQQQQQQQQQQQQQHHHHHHHHLLQDAYMQQYQHATQQQQMLQQQFLMHSVYQPQPSASQYPTMMPQYQQAFFQQQMLAQHQPSQQQASPEYLTSPQEFSPALVSYTSSLPAQVGTIMDSSYSANRSVADKEAIANFTNQKNISNPPDMSGWNPFGEDNFSKLTEEELLDREFDLLRSSKGHLKAYFASQ

SEQ ID NO: 8149 - protein, 662 aa, Homo sapiens
MKKFSRMPKSEGGSGGGAAGGGAGGAGAGAGCGSGGSSVGVRVFAVGRHQVTLEESLAEGGFSTVFLVRTHGGIRCALKRMYVNNMPDLNVCKREITIMKELSGHKNIVGYLDCAVNSISDNVWEVLILMEYCRAGQVVNQMNKKLQTGFTEPEVLQIFCDTCEAVARLHQCKTPIIHRDLKVENILLNDGGNYVLCDFGSATNKFLNPQKDGVNVVEEEIKKYTTLSYRAPEMINLYGGKPITTKADIWALGCLLYKLCFFTLPFGESQVAICDGNFTIPDNSRYSRNIHCLIRFMLEPDPEHRPDIFQVSYFAFKFAKKDCPVSNINNSSIPSALPEPMTASEAAARKSQIKARITDTIGPTETSIAPRQRPKANSATTATPSVLTIQSSATPVKVLAPGEFGNHRPKGALRPGNGPEILLGQGPPQQPPQQHRVLQQLQQGDWRLQQLHLQHRHPHQQQQQQQQQQQQQQQQQQQQQQQQQQQHHHHHHHHLLQDAYMQQYQHATQQQQMLQQQFLMHSVYQPQPSASQYPTMMPQYQQAFFQQQMLAQHQPSQQQASPEYLTSPQEFSPALVSYTSSLPAQVGTIMDSSYSANRSVADKEAIANFTNQKNISNPPDMSGWNPFGEDNFSKLTEEELLDREFDLLRSSKGHLKAYFASQ

SEQ ID NO: 8150 - protein, 1161 aa, Homo sapiens
MKKFSRMPKSEGGSGGGAAGGGAGGAGAGAGCGSGGSSVGVRVFAVGRHQVTLEESLAEGGFSTVFLVRTHGGIRCALKRMYVNNMPDLNVCKREITIMKELSGHKNIVGYLDCAVNSISDNVWEVLILMEYCRAGQVVNQMNKKLQTGFTEPEVLQIFCDTCEAVARLHQCKTPIIHRDLKVENILLNDGGNYVLCDFGSATNKFLNPQKDGVNVVEEEIKKYTTLSYRAPEMINLYGGKPITTKADIWALGCLLYKLCFFTLPFGESQVAICDGNFTIPDNSRYSRNIHCLIRFMLEPDPEHRPDIFQVSYFAFKFAKKDCPVSNINNSSIPSALPEPMTASEAAARKSQIKARITDTIGPTETSIAPRQRPKANSATTATPSVLTIQSSATPVKVLAPGEFGNHRPKGALRPGNGPEILLGQGPPQQPPQQHRVLQQLQQGDWRLQQLHLQHRHPHQQQQQQQQQQQQQQQQQQQQQQQQQQQHHHHHHHHLLQDAYMQQYQHATQQQQMLQQQFLMHSVYQPQPSASQYPTMMPQYQQAFFQQQMLAQHQPSQQQASPEYLTSPQEFSPALVSYTSSLPAQVGTIMDSSYSANRSVADKEAIANFTNQKNISNPPDMSGWNPFGEDNFSKLTEEELLDREFDLLRSNRLEERASSDKNVDSLSAPHNHPPEDPFGSVPFISHSGSPEKKAEHSSINQENGTANPIKNGKTSPASKDQRTGKKTSVQGQVQKGNDESESDFESDPPSPKSSEEEEQDDEEVLQGEQGDFNDDDTEPENLGHRPLLMDSEDEEEEEKHSSDSDYEQAKAKYSDMSSVYRDRSGSGPTQDLNTILLTSAQLSSDVAVETPKQEFDVFGAVPFFAVRAQQPQQEKNEKNLPQHRFPAAGLEQEEFDVFTKAPFSKKVNVQECHAVGPEAHTIPGYPKSVDVFGSTPFQPFLTSTSKSESNEDLFGLVPFDEITGSQQQKVKQRSLQKLSSRQRRTKQDMSKSNGKRHHGTPTSTKKTLKPTYRTPERARRHKKVGRRDSQSSNEFLTISDSKENISVALTDGKDRGNVLQPEESLLDPFGAKPFHSPDLSWHPPHQGLSDIRADHNTVLPGRPRQNSLHGSFHSADVLKMDDFGAVPFTELVVQSITPHQSQQSQPVELDPFGAAPFPSKQ

SEQ ID NO: 8151 - protein, 257 aa, Homo sapiens
MKRVKRFLEKREPKLNENIKNAMLIKGGNANATVTQVLKDVCALKKPYGVLYKKKNVTRPFEDQTSLELLSKKSDCSLFMFGSYNKKRPNNLVIGHMYDYHVLDMIELGIENFVSLKDIKNSKCPEGTKPMLIFAGDDFNVTEDYRRLKSLLTDFFRGPTVSNICLAGLEYVLHFTALNGKIYFRRYKLLLKKSGCRTPRIELEEIGPSLNLVLRRTHLASDDLYTLSMKMPKALKPKKKKNISNDTFGTTYGRIHM

SEQ ID NO: 8152 - protein, 160 aa, Homo sapiens
MSDNDDIEVESDEEQPRFQSAADKRAHHNALERKRRDHIKDSFHSLRDSVPSLQGEKASRAQILDKATEYIQYMRRKNHTHQQDIDDLKRQNALLEQQVRALEKARSSAQLQTNYPSSDNSLYTNAKGSTISAFDGGSDSSSESEPEEPQSRKKLRMEAS

SEQ ID NO: 8153 - protein, 151 aa, Homo sapiens
MSDNDDIEVESDADKRAHHNALERKRRDHIKDSFHSLRDSVPSLQGEKASRAQILDKATEYIQYMRRKNHTHQQDIDDLKRQNALLEQQVRALEKARSSAQLQTNYPSSDNSLYTNAKGSTISAFDGGSDSSSESEPEEPQSRKKLRMEAS

SEQ ID NO: 8154 - protein, 484 aa, Homo sapiens
MFPNSILGHPPFTPNHQQHNNFFTLSPTVYSHQQLIDAQFNFQNADLSRAVSLQQLTYGNVSPIQTSASPLFRGRKRLSDEKNLPLDGKRQRFHSPHQEPTVVNQIVPLSGERRYSMPPLFHTHYVPDIVRCVPPFREIAFLEPREITLPEAKDKLSQQILELFETCQQQISDLKKKELCRTQLQREIQLLFPQSRLFLVGSSLNGFGTRSSDGDLCLVVKEEPCFFQVNQKTEARHILTLVHKHFCTRLSGYIERPQLIRAKVPIVKFRDKVSCVEFDLNVNNIVGIRNTFLLRTYAYLENRVRPLVLVIKKWASHHQINDASRGTLSSYSLVLMVLHYLQTLPEPILPSLQKIYPESFSPAIQLHLVHQAPCNVPPYLSKNESNLGDLLLGFLKYYATEFDWNSQMISVREAKAIPRPDGIEWRNKYICVEEPFDGTNTARAVHEKQKFDMIKDQFLKSWHRLKNKRDLNSILPVRAAVLKR

SEQ ID NO: 8155 - protein, 546 aa, Homo sapiens
MANNSPALTGNSQPQHQAAAAAAQQQQQCGGGGATKPAVSGKQGNVLPLWGSEKTMNLNPMILTNILSSPYFKVQLYELKTYHEVVDEIYFKVTHVEPWEKGSRKTAGQTGMCGGVRGVGTGGIVSTAFCLLYKLFTLKLTRKQVMGLITHTDSPYIRALGFMYIRYTQPPTDLWDWFESFLDDEEDLDVKAGGGCVMTIGEMLRSFLTKLEWFSTLFPRIPVPVQKNIDQQIKTRPRKIKKDGKEGAEEIDRHVERRRSRSPRRSLSPRRSPRRSRSRSHHREGHGSSSFDRELEREKERQRLEREAKEREKERRRSRSIDRGLERRRSRSRERHRSRSRSRDRKGDRRDRDREREKENERGRRRDRDYDKERGNEREKERERSRERSKEQRSRGEVEEKKHKEDKDDRRHRDDKRDSKKEKKHSRSRSRERKHRSRSRSRNAGKRSRSRSKEKSSKHKNESKEKSNKRSRSGSQGRTDSVEKSKKREHSPSKEKSRKRSRSKERSHKRDHSDSKDQSDKHDRRRSQSIEQESQEKQHKNKDETV

SEQ ID NO: 8156 - protein, 860 aa, Homo sapiens
MLGKLDPFYQPSVSKQKTSAEIISEARNALRTVRTQRPFTPQEAQRKLFGPASSRTSENRPPSSFSLHASSFESSDSRPISGTRLSPLELKPKVPASPTREEDSCFSFPKPPVDPAKIRRVSNARARLFRAASQRALLPDRSLPPSDSKKTVESKETVMMGDSMVKINGIYLTKSNAICHLKSHPLQLTDDGGFSEIKEQEMFKGTTSLPSHLKNGGDQGKRHARASSCPSSSDLSRLQTKAVPKADLQEEDAEIEVDEVFWNTRIVPILRELEKEENIETVCAACTQLHHALEEGNMLGNKFKGRSILLKTLCKLVDVGSDSLSLKLAKIILALKVSRKNLLNVCKLIFKISRNEKNDSLIQNDSILESLLEVLRSEDLQTNMEAFLYCMGSIKFISGNLGFLNEMISKGAVEILINLIKQINEDIKKCGTFLPNSGHLLVQVTATLRNLVDSSLVRSKFLNISALPQLCTAMEQYKGDKDVCTNIARIFSKLTSYRDCCTALASYSRCYALFLNLINKYQKKQDLVVRVVFILGNLTAKNNQAREQFSKEKGSIQTLLSLFQTFHQLDLHSQKPVGQRGEQHRAQRPPSEAEDVLIKLTRVLANIAIHPGVGPVLAANPGIVGLLLTTLEYKSLDDCEELVINATATINNLSYYQVKNSIIQDKKLYIAELLLKLLVSNNMDGILEAVRVFGNLSQDHDVCDFIVQNNVHRFMMALLDAQHQDICFSACGVLLNLTVDKDKRVILKEGGGIKKLVDCLRDLGPTDWQLACLVCKTLWNFSENITNASSCFGNEDTNTLLLLLSSFLDEELALDGSFDPDLKNYHKLHWETEFKPVAQQLLNRIQRHHTFLEPLPIPSF

SEQ ID NO: 8157 - protein, 794 aa, Homo sapiens
LLESGRAGGRGGRSGAAAAEVPESPLGAALRRRDPGLWPRRLRPPGGPGPPGHGASRTPSPPPLSSPAAPGLGRPSGKMFSALKKLVGSDQAPGRDKNIPAGLQSMNQALQRRFAKGVQYNMKIVIRGDRNTGKTALWHRLQGRPFVEEYIPTQEIQVTSIHWSYKTTDDIVKVEVWDVVDKGKCKKRGDGLKMENDPQEAESEMALDAEFLDVYKNCNGVVMMFDITKQWTFNYILRELPKVPTHVPVCVLGNYRDMGEHRVILPDDVRDFIDNLDSRPPGSSYFRYAESSMKNSFGLKYLHKFFNIPFLQLQRETLLRQLETNQLDMDATLEELSVQQETEDQNYGIFLEMMEARSRGHASPLAANGQSPSPGSQSPVVPAGAVSTGSSSPGTPQPAPQLPLNAAPPSSVPPVPPSEALPPPACPSAPAPRRSIISRLFGTSPATEAAPPPPEPVPAAEGPATVQSVEDFVPDDRLDRSFLEDTTPARDEKKVGAKAAQQDSDSDGEALGGNPMVAGFQDDVDLEDQPRGSPPLPAGPVPSQDITLSSEEEAEVAAPTKGPAPAPQQCSEPETKWSSIPASKPRRGTAPTRTAAPPWPGGVSVRTGPEKRSSTRPPAEMEPGKGEQASSSESDPEGPIAAQMLSFVMDDPDFESEGSDTQRRADDFPVRDDPSDVTDEDEGPAEPPPPPKLPLPAFRLKNDSDLFGLGLEEAGPKESSEEGKEGKTPSKEKKKKKKKGKEEEEKAAKKKSKHKKSKDKEEGKEERRRRQQRPPRSRERTAADELEAFLGGGA

SEQ ID NO: 8158 - protein, 476 aa, Homo sapiens
MSDFDEFERQLNENKQERDKENRHRKRSHSRSRSRDRKRRSRSRDRRNRDQRSASRDRRRRSKPLTRGAKEEHGGLIRSPRHEKKKKVRKYWDVPPPGFEHITPMQYKAMQAAGQIPATALLPTMTPDGLAVTPTPVPVVGSQMTRQARRLYVGNIPFGITEEAMMDFFNAQMRLGGLTQAPGNPVLAVQINQDKNFAFLEFRSVDETTQAMAFDGIIFQGQSLKIRRPHDYQPLPGMSENPSVYVPGVVSTVVPDSAHKLFIGGLPNYLNDDQVKELLTSFGPLKAFNLVKDSATGLSKGYAFCEYVDINVTDQAIAGLNGMQLGDKKLLVQRASVGAKNATLVSPPAQTINQTPVTLQVPGLMSSQVQMGGHPTEVLCLMNMVLPEELLDDEEYEEIVEDVRDECSKYGLVKSIEIPRPVDGVEVPGCGKIFVEFTSVFDCQKAMQGLTGRKFANRVVVTKYCDPDSYHRRDFW

SEQ ID NO: 8159 - protein, 948 aa, Homo sapiens
MILVLVKALSDVCAGTSGFLLDFSSQTSPGTDNGEALPESIPSAPGTLPHFIEEPDDAYIIKSNPIALRCKARPAMQIFFKCNGEWVHQNEHVSEETLDESSGLKVREVFINVTRQQVEDFHGPEDYWCQCVAWSHLGTSKSRKASVRIAYLRKNFEQDPQGREVPIEGMIVLHCRPPEGVPAAEVEWLKNEEPIDSEQDENIDTRADHNLIIRQARLSDSGNYTCMAANIVAKRRSLSATVVVYVNGGWSSWTEWSACNVRCGRGWQKRSRTCTNPAPLNGGAFCEGMSVQKITCTSLCPVDGSWEVWSEWSVCSPECEHLRIRECTAPPPRNGGKFCEGLSQESENCTDGLCILDKKPLHEIKPQSIENASDIALYSGLGAAVVAVAVLVIGVTLYRRSQSDYGVDVIDSSALTGGFQTFNFKTVRQGNSLLLNSAMQPDLTVSRTYSGPICLQDPLDKELMTESSLFNPLSDIKVKVQSSFMVSLGVSERAEYHGKNHSRTFPHGNNHSFSTMHPRNKMPYIQNLSSLPTRTELRTTGVFGHLGGRLVMPNTGVSLLIPHGAIPEENSWEIYMSINQGEPSLQSDGSEVLLSPEVTCGPPDMIVTTPFALTIPHCADVSSEHWNIHLKKRTQQGKWEEVMSVEDESTSCYCLLDPFACHVLLDSFGTYALTGEPITDCAVKQLKVAVFGCMSCNSLDYNLRVYCVDNTPCAFQEVVSDERHQGGQLLEEPKLLHFKGNTFSLQISVLDIPPFLWRIKPFTACQEVPFSRVWCSNRQPLHCAFSLERYTPTTTQLSCKICIRQLKGHEQILQVQTSILESERETITFFAQEDSTFPAQTGPKAFKIPYSIRQRICATFDTPNAKGKDWQMLAQKNSINRNLSYFATQSSPSAVILNLWEARHQHDGDLDSLACALEEIGRTHTKLSNISESQLDEADFNYSRQNGL

SEQ ID NO: 8160 - protein, 925 aa, Homo sapiens [sequence omitted]

SEQ ID NO: 8161 - protein, 854 aa, Homo sapiens
MDFSMVAGAAAYNEKSGRITSLSLLFQKVFAQIFPQWRKGNTEECLPYKCSETGALGENYSWQIPINHNDFKILKNNERQLCEVLQNKFGCISTLVSPVQEGNSKSLQVFRKMLTPRIELSVWKDDLTTHAVDAVVNAANEDLLHGGGLALALVKAGGFEIQEESKQFVARYGKVSAGEIAVTGAGRLPCKQIIHAVGPRWMEWDKQGCTGKLQRAIVSILNYVIYKNTHIKTVAIPALSSGIFQFPLNLCTKTIVETIRVSLQGKPMMSNLKEIHLVSNEDPTVAAFKAASEFILGKSELGQETTPSFNAMVVNNLTLQIVQGHIEWQTADVIVNSVNPHDITVGPVAKSILQQAGVEMKSEFLATKAKQFQRSQLVLVTKGFNLFCKYIYHVLWHSEFPKPQILKHAMKECLEKCIEQNITSISFPALGTGNMEIKKETAAEILFDEVLTFAKDHVKHQLTVKFVIFPTDLEIYKAFSSEMAKRSKMLSLNNYSVPQSTREEKRENGLEARSPAINLMGFNVEEMYEAHAWIQRILSLQNHHIIENNHILYLGRKEHDILSQLQKTSSVSITEIISPGRTELEIEGARADLIEVVMNIEDMLCKVQEEMARKKERGLWRSLGQWTIQQQKTQDEMKENIIFLKCPVPPTQELLDQKKQFEKCGLQVLKVEKIDNEVLMAAFQRKKKMMEEKLHRQPVSHRLFQQVPYQFCNVVCRVGFQRMYSTPCDPKYGAGIYFTKNLKNLAEKAKKISAADKLIYVFEAEVLTGFFCQGHPLNIVPPPLSPGAIDGHDSVVDNVSSPETFVIFSGMQAIPQYLWTCTQEYVQSQDYSSGPMRPFAQHPWRGFASGSPVD

SEQ ID NO: 8162 - protein, 819 aa, Homo sapiens
MDFSMVAGAAAYNEKSETGALGENYSWQIPINHNDFKILKNNERQLCEVLQNKFGCISTLVSPVQEGNSKSLQVFRKMLTPRIELSVWKDDLTTHAVDAVVNAANEDLLHGGGLALALVKAGGFEIQEESKQFVARYGKVSAGEIAVTGAGRLPCKQIIHAVGPRWMEWDKQGCTGKLQRAIVSILNYVIYKNTHIKTVAIPALSSGIFQFPLNLCTKTIVETIRVSLQGKPMMSNLKEIHLVSNEDPTVAAFKAASEFILGKSELGQETTPSFNAMVVNNLTLQIVQGHIEWQTADVIVNSVNPHDITVGPVAKSILQQAGVEMKSEFLATKAKQFQRSQLVLVTKGFNLFCKYIYHVLWHSEFPKPQILKHAMKECLEKCIEQNITSISFPALGTGNMEIKKETAAEILFDEVLTFAKDHVKHQLTVKFVIFPTDLEIYKAFSSEMAKRSKMLSLNNYSVPQSTREEKRENGLEARSPAINLMGFNVEEMYEAHAWIQRILSLQNHHIIENNHILYLGRKEHDILSQLQKTSSVSITEIISPGRTELEIEGARADLIEVVMNIEDMLCKVQEEMARKKERGLWRSLGQWTIQQQKTQDEMKENIIFLKCPVPPTQELLDQKKQFEKCGLQVLKVEKIDNEVLMAAFQRKKKMMEEKLHRQPVSHRLFQQVPYQFCNVVCRVGFQRMYSTPCDPKYGAGIYFTKNLKNLAEKAKKISAADKLIYVFEAEVLTGFFCQGHPLNIVPPPLSPGAIDGHDSVVDNVSSPETFVIFSGMQAIPQYLWTCTQEYVQSQDYSSGPMRPFAQHPWRGFASGSPVD

SEQ ID NO: 8163 - protein, 449 aa, Homo sapiens
MLWKLVENVKYEDIYEDRHDGVPSHSSRLSQLGSVSQGPYSSAPPLSHTPSSDFQPPYFPPPYQPLPYHQSQDPYSHVNDPYSLNPLHQPQQHPWGQRQRQEVGSEAGSLLPQPRAALPQLSGLDPRRDYHSVRRPDVLLHSAHHGLDAGMGDSLSLHGLGHPGMEDVQSVEDANNSGMNLLDQSVIKKVPVPPKSVTSLMMNKDGFLGGMSVNTGEVFCSVPGRLSLLSSTSKYKVTVGEVQRRLSPPECLNASLLGGVLRRAKSKNGGRSLRERLEKIGLNLPAGRRKAANVTLLTSLVEGEAVHLARDFGYICETEFPAKAVSEYLNRQHTDPSDLHSRKNMLLATKQLCKEFTDLLAQDRTPIGNSRPSPILEPGIQSCLTHFSLITHGFGAPAICAALTALQNYLTEALKGMDKMFLNNTTTNRHTSGEGPGSKTGDKEEKHRK

SEQ ID NO: 8164 - protein, 458 aa, Homo sapiens
MLWKLVENVKYEDIYEMLVHTYSSMDRHDGVPSHSSRLSQLGSVSQGPYSSAPPLSHTPSSDFQPPYFPPPYQPLPYHQSQDPYSHVNDPYSLNPLHQPQQHPWGQRQRQEVGSEAGSLLPQPRAALPQLSGLDPRRDYHSVRRPDVLLHSAHHGLDAGMGDSLSLHGLGHPGMEDVQSVEDANNSGMNLLDQSVIKKVPVPPKSVTSLMMNKDGFLGGMSVNTGEVFCSVPGRLSLLSSTSKYKVTVGEVQRRLSPPECLNASLLGGVLRRAKSKNGGRSLRERLEKIGLNLPAGRRKAANVTLLTSLVEGEAVHLARDFGYICETEFPAKAVSEYLNRQHTDPSDLHSRKNMLLATKQLCKEFTDLLAQDRTPIGNSRPSPILEPGIQSCLTHFSLITHGFGAPAICAALTALQNYLTEALKGMDKMFLNNTTTNRHTSGEGPGSKTGDKEEKHRK

SEQ ID NO: 8165 - protein, 121 aa, Homo sapiens
MVDMMDLPRSRINAGMLAQFIDKPVCFVGRLEKIHPTGKMFILSDGEGKNGTIELMEPLDEEISGIVEVVGRVTAKATILCTSYVQFKEDSHPFDLGLYNEAVKIIHDFPQFYPLGIVQHD

SEQ ID NO: 8166 - protein, 336 aa, Homo sapiens
MSFFGFGQSVEVEILLNDAESRKRAEHKTEDGKKEKYFLFYDGETVSGKVSLALKNPNKRLEHQGIKIEFIGQIELYYDRGNHHEFVSLVKDLARPGEITQSQAFDFEFTHVEKPYESYTGQNVKLRYFLRATISRRLNDVVKEMDIVVHTLSTYPELNSSIKMEVGIEDCLHIEFEYNKSKYHLKDVIVGKIYFLLVRIKIKHMEIDIIKRETTGTGPNVYHENDTIAKYEIMDGAPVRGESIPIRLFLAGYELTPTMRDINKKFSVRYYLNLVLIDEEERRYFKQQEVVLWRKGDIVRKSMSHQAAIASQRFEGTTSLGEVRTPSQLSDNNCRQ

SEQ ID NO: 8167 - protein, 366 aa, Homo sapiens
RVRGGPRSRDGAPERREPGLGVLLREEEWSRGDAAAALTMSFLGGFFGPICEIDIVLNDGETRKMAEMKTEDGKVEKHYLFYDGESVSGKVNLAFKQPGKRLEHQGIRIEFVGQIELFNDKSNTHEFVNLVKELALPGELTQSRSYDFEFMQVEKPYESYIGANVRLRYFLKVTIVRRLTDLVKEYDLIVHQLATYPDVNNSIKMEVGIEDCLHIEFEYNKSKYHLKDVIVGKIYFLLVRIKIQHMELQLIKKEITGIGPSTTTETETIAKYEIMDGAPVKGESIPIRLFLAGYDPTPTMRDVNKKFSVRYFLNLVLVDEEDRRYFKQQEIILWRKAPEKLRKQRTNFHQRFESPESQASAEQPEM

SEQ ID NO: 8168 - protein, 222 aa, Homo sapiens
MSLKMDNRDVAGKANRWFGVAPPKSGKMNMNILHQEELIAQKKREIEAKMEQKAKQNQVASPQPPHPGEITNAHNSSCISNKFANDGSFLQQFLKLQKAQTSTDAPTSAPSAPPSTPTPSAGKRSLLISRRTGLGLASLPGPVKSYSHAKQLPVAHRPSVFQSPDEDEEEDYEQWLEIKVCLTKTVRPTPPSSWCFVPGLGTPDSLLHLTLFSPHPLCRCGP

SEQ ID NO: 8169 - protein, 645 aa, Homo sapiens [sequence omitted]

SEQ ID NO: 8170 - protein, 1010 aa, Homo sapiens
MYSQEDHIFQLCSTDLCASYVPVINQSVLVTHIVNYEDYLQIQASPLQTSQPTPPEELHTVGYVFTNDGQQTRSDEVNQVATGHQSKQKRSRESKRHSSSKRRKSMSRWLNKQEDAAVTHIVCEEKINNDQPAPDNVLSTAPPWLRDMAAAGISSTSTRDLYATVTHNVCDERMENDQLQLNNVLLTFPPERVNMAVADFSAMSPRDLYATINHNVYEVRMENNQPQFNNVLSTVKPGHINMAAAGIPAMSAKGLYAVVNLNVHGEKINKGQPAPDNFLSSVTPGLINVSGDGATVTHNAYEEKMENGQQAADNILSAVPPGLINTSEAGIPAMSTNDLYATITHDVSEKKIKNSQPATDNFLCTVTPGLINLAEAGILATSTRDLYDTATHNVHEEKMKNKHLITPCQQFHWDLLICQELLNFFIWIPDATVIHNIQEEEMENGQMPPDGFLSNSAPLELINMTEDCMPLNALDSFSYDFTSLSREELLYKHDSNEFAVGTKNYSVSAGDPPVTAMSSVETPQISPAMAKKINQDIKCQLMKEVQRFGQNYKRIFILLEELQGSMKVKRQFVEFTIREALNFFNWFPDATVNPNVHEEQMENGQTQPHNILSHVLSGLINMAGAGIPLMSTRHLYATITHNVGEERMENSQPQTDNVLSTIPPQVRHMAAAGIPSMSTIYQCMFVHQLYCPTWFPYACSVMQGRRCYRHSQCPQRENGKWPTPTDHDLSTGLTALINMAAADIPAMSTRDLYATVTHNVYEQKIENGQPAPDNVLLTLPPELINMTATDISSMNATITYYVPEEKMEDGQPQSDNVFSTAPTGLNMTGADIPAMSTNDLYATVTHNVCEERMENNRPQPNNVRSTLPLRLSYLATAGIPAMSTRDQYATVTHNVHEEKTKNGQPAPDNVIATVPPALTNMAAAGVSSMSTRDQYATFTHNVHEEKMENGQPAPQNILSNVLPGLINMEATGIPSMSTRDLYATITHDVHEEEMENWQCQLDNVFSTAAP

SEQ ID NO: 8171 - protein, 979 aa, Homo sapiens
MVFFSSQYRLHRKSQYLKMAAANLTFSQEVVWQRGLPSIPYSQYSFDHLYNTNDIIHTPQIRKARPQKPVSFKFLGSSSPLTGDTSLAVKTESSANPEKKLKKSKPASTVREAPRPLIHHPCMHPDMLGRPPSLDVNLEEREAWLLPPEKEARAWEATVLEKLNERTARWIQSKRPRRPGASPNKWQSFLRQQYDWSHIRDELTSASDLELLKQLEAEETAEFEDQSVILPPQEKKKPELLLPVYYRLPSYFQQAETVEIMPGNKSTEDIHEKTSLSQPQTQSYFRQVTPRAGKFAYSTDNTFEQEIYFDEVQIIHQIGAKRDQIVLENLNRYNKQLSKVFPETPEKWSAQAIPEASYRPVQGALRWTALPTPAKDMLLQVGEKDVPIKTRRLKKQAKSLQEDVTWELVVLRRMLKEWKTAWALIIEWHHETVENLLQSLGDLHDDVRIKAITTCATAALERPRIATSQRDSDKTIQDLPEVLLPALEAALCDKNAHVRMAAAICQYAIQSHNPLARNIMQTALLKGNSVDSWAAAQCLALEGTATYPVIKRILHQLFTKKNEDTEEQSYILLSYLSEKTTLIHTMLAVELNSCQWKNRIVACQAFSRISGNVCLDMKHKLIQLMWNDWNKEVRRAAAQALGQMSLGKEVHDIIRVKLGQGNSQERVEALYLIGELKLMTAKLLPSFLHCFSDDFTAVRRAACLAAGALQIRDKMVLECLLNLMQRDPYWKIKAFAIRALGQIGQVSPELTDLLLWAIHYEESPGVRLEACRSILALKLQGDRVRDTFLDVLLLENHDAVLKEMYQTMKILNLGNEGNQEMLQEIKNRIKTLSQKDLLTHKILKLEMVMGKVREEAKRVYLKPKGEQGPLTLQTLLQETFQDEMVLPRRPSEVCDTEAVIKPVKPRAPNPWLQSSVPGLTTRSKVRSSLVKDLRTSPEKRIAVGPFRSDYPALYLGKFSERTFFSPIMSSPSGKKGAHL

SEQ ID NO: 8172 - protein, 232 aa, Homo sapiens
EMREAFEQEAKHINKPRLMVTAAVAAGISNIQSGYEIPQLSQYPDYIHVMTYDLHGSWEGYTGENSPLYKYPTDTGSNAYLNVDYVMNYWKDNRAPAEKLVGFPAYGHSFLLSNPSNHGIDAPTTGPGPAGPYTRQSGFWAYYEICTFLKNGATEVWEASEDVPYAYKGNEWLGYDNTKSFQIKVDYWLKKNNFGGAMVWAIDLDDFTGTFCNQGKFPLITTLKDALGLQST

SEQ ID NO: 8173 - protein, 2265 aa, Homo sapiens
MVSIDLHQAGRVDSQASITQDSDSIKKPEEIKQCNDAPVSVLQEDIVGSLKSTPENHPETPKKKSDPELSKSEMKQSESRLAESKPNENRLVETKSSENKLETKVETQTEELKQNESRTTECKQNESTIVEPKQNENRLSDTKPNDNKQNNGRSETTKSRPETPKQKGESRPETPKQKSDGHPETPKQKGDGRPETPKQKGESRPETPKQKNEGRPETPKHRHDNRRDSGKPSTEKKPEVSKHKQDTKSDSPRLKSERAEALKQRPDGRSVSESLRRDHDNKQKSDDRGESERHRGDQSRVRRPETLRSSSRNEHGIKSDSSKTDKLERKHRHESGDSRERPSSGEQKSRPDSPRVKQGDSNKSRSDKLGFKSPTSKDDKRTEGNKSKVDTNKAHPDNKAEFPSYLLGGRSGALKNFVIPKIKRDKDGNVTQETKKMEMKGEPKDKVEKIGLVEDLNKGAKPVVVLQKLSLDDVQKLIKDREDKSRSSLKPIKNKPSKSNKGSIDQSVLKELPPELLAEIESTMPLCERVKMNKRKRSTVNEKPKYAEISSDEDNDSDEAFESSRKRHKKDDDKAWEYEERDRRSSGDHRRSGHSHEGRRSSGGGRYRNRSPSDSDMEDYSPPPSLSEVARKMKKKEKQKKRKAYEPKLTPEEMMDSSTFKRFTASIENILDNLEDMDFTAFGDDDEIPQELLLGKHQLNELGSESAKIKAMGIMDKLSTDKTVKVLNILEKNIQDGSKLSTLLNHNNDTEEEERLWRDLIMERVTKSADACLTTINIMTSPNMPKAVYIEDVIERVIQYTKFHLQNTLYPQYDPVYRLDPHGGGLLSSKAKRAKCSTHKQRVIVMLYNKVCDIVSSLSELLEIQLLTDTTILQVSSMGITPFFVENVSELQLCAIKLVTAVFSRYEKHRQLILEEIFTSLARLPTSKRSLRNFRLNSSDMDGEPMYIQMVTALVLQLIQCVVHLPSSEKDSNAEEDSNKKIDQDVVITNSYETAMRTAQNFLSIFLKKCGSKQGEEDYRPLFENFVQDLLSTVNKPEWPAAELLLSLLGRLLVHQFSNKSTEMALRVASLDYLGTVAARLRKDAVTSKMDQGSIERILKQVSGGEDEIQQLQKALLDYLDENTETDPSLVFSRKFYIAQWFRDTTLETEKAMKSQKDEESSEGTHHAKEIETTGQIMHRAENRKKFLRSIIKTTPSQFSTLKMNSDTVDYDDACLIVRYLASMRPFAQSFDIYLTQILRVLGENAIAVRTKAMKCLSEVVAVDPSILARLDMQRGVHGRLMDNSTSVREAAVELLGRFVLCRPQLAEQYYDMLIERILDTGISVRKRVIKILRDICIEQPTFPKITEMCVKMIRRVNDEEGIKKLVNETFQKLWFTPTPHNDKEAMTRKILNITDVVAACRDTGYDWFEQLLQNLLKSEEDSSYKPVKKACTQLVDNLVEHILKYEESLADSDNKGVNSGRLVACITTLFLFSKIRPQLMVKHAMTMQPYLTTKCSTQNDFMVICNVAKILELVVPLMEHPSETFLATIEEDLMKLIIKYGMTVVQHCVSCLGAVVNKVTQNFKFVWACFNRYYGAISKLKSQHQEDPNNTSLLTNKPALLRSLFTVGALCRHFDFDLEDFKGNSKVNIKDKVLELLMYFTKHSDEEVQTKAIIGLGFAFIQHPSLMFEQEVKNLYNNILSDKNSSVNLKIQVLKNLQTYLQEEDTRMQQADRDWKKVAKQEDLKEMGDVSSGMSSSIMQLYLKQVLEAFFHTQSSVRHFALNVIALTLNQGLIHPVQCVPYLIAMGTDPEPAMRNKADQQLVEIDKKYAGFIHMKAVAGMKMSYQVQQAINTCLKDPVRGFRQDESSSALCSHLYSMIRGNRQHRRAFLISLLNLFDDTAKTDVTMLLYIADNLACFPYQTQEEPLFIMHHIDITLSVSGSNLLQSFKESMVKDKRKERKSSPSKENESSDSEEEVSRPRKSRKRVDSDSDSDSEDDINSVMKCLPENSAPLIEFANVSQGILLLLMLKQHLKNLCGFSDSKIQKYSPSESAKVYDKAINRKTGVHFHPKQTLDFLRSDMANSKITEEVKRSIVKQYLDFKLLMEHLDPDEEEEEGEVSASTNARNKAITSLLGGGSPKNNTAAETEDDESDGEDRGGGTSGSLRRSKRNSDSTELAAQMNESVDVMDVIAICCPKYKDRPQIARVVQKTSSGFSVQWMAGSYSGSWTEAKRRDGRKLVPWVDTIKESDIIYKKIALTSANKLTNKVVQTLRSLYAAKDGTSS

SEQ ID NO: 8174 - protein, 2158 aa, Homo sapiens
MVSIDLHQAGRVDSQASITQDSDSIKKPEEIKQCNDAPVSVLQEDIVGSLKSTPENHPETPKKKSDPELSKSEMKQSESRLAESKPNENRLVETKSSENKLETKVETQTEELKQNESRTTECKQNESTIVEPKQNENRLSDTKPNDNKQNNGRSETTKSRPETPKQKGESRPETPKQKSDGHPETPKQKGDGRPETPKQKGESRPETPKQKNEGRPETPKHRHDNRRDSGKPSTEKKPEVSKHKQDTKSDSPRLKSERAEALKQRPDGRSVSESLRRDHDNKQKSDDRGESERHRGDQSRVRRPETLRSSSRNEHGIKSDSSKTDKLERKHRHESGDSRERPSSGEQKSRPDSPRVKQGDSNKSRSDKLGFKSPTSKDDKRTEGNKSKVDTNKAHPDNKAEFPSYLLGGRSGALKNFVIPKIKRDKDGNVTQETKKMEMKGEPKDKVEKIGLVEDLNKGAKPVVVLQKLSLDDVQKLIKDREDKSRSSLKPIKNKPSKSNKGSIDQSVLKELPPELLAEIESTMPLCERVKMNKRKRSTVNEKPKYAEISSDEDNDSDEAFESSRKRHKKDDDKAWEYEERDRRSSGDHRRSGHSHEGRRSSGGGRYRNRSPSDSDMEDYSPPPSLSEVARKMKKKEKQKKRKAYEPKLTPEEMMDSSTFKRFTASIENILDNLEDMDFTAFGDDDEIPQELLLGKHQLNELGSESAKIKAMGIMDKLSTDKTVKVLNILEKNIQDGSKLSTLLNHNNDTEEEERLWRDLIMERVTKSADACLTTINIMTSPNMPKAVYIEDVIERVIQYTKFHLQNTLYPQYDPVYRLDPHGGGLLSSKAKRAKCSTHKQRVIVMLYNKVCDIVSSLSELLEIQLLTDTTILQVSSMGITPFFVENVSELQLCAIKLVTAVFSRYEKHRQLILEEIFTSLARLPTSKRSLRNFRLNSSDMDGEPMYIQMVTALVLQLIQCVVHLPSSEKDSNAEEDSNKKIDQDVVITNSYETAMRTAQNFLSIFLKKCGSKQGEEDYRPLFENFVQDLLSTVNKPEWPAAELLLSLLGRLLVHQFSNKSTEMALRVASLDYLGTVAARLRKDAVTSKMDQGSIERILKQVSGGEDEIQQLQKALLDYLDENTETDPSLVFSRKFYIAQWFRDTTLETEKAMKSQKDEESSEGTHHAKEIETTGQIMHRAENRKKFLRSIIKTTPSQFSTLKMNSDTVDYDDACLIVRYLASMRPFAQSFDIYLTQILRVLGENAIAVRTKAMKCLSEVVAVDPSILARLDMQRGVHGRLMDNSTSVREAAVELLGRFVLCRPQLAEQYYDMLIERILDTGISVRKRVIKILRDICIEQPTFPKITEMCVKMIRRVNDEEGIKKLVNETFQKLWFTPTPHNDKEAMTRKILNITDVVAACRDTGYDWFEQLLQNLLKSEEDSSYKPVKKACTQLVDNLVEHILKYEESLADSDNKGVNSGRLVACITTLFLFSKIRPQLMVKHAMTMQPYLTTKCSTQNDFMVICNVAKILELVVPLMEHPSETFLATIEEDLMKLIIKYGMTVVQHCVSCLGAVVNKVTQNFKFVWACFNRYYGAISKLKSQHQEDPNNTSLLTNKPALLRSLFTVGALCRHFDFDLEDFKGNSKVNIKDKVLELLMYFTKHSDEEVQTKAIIGLGFAFIQHPSLMFEQEVKNLYNNILSDKNSSVNLKIQVLKNLQTYLQEEDTRMQQADRDWKKVAKQEDLKEMGDVSSGMSSSIMQLYLKQVLEAFFHTQSSVRHFALNVIALTLNQGLIHPVQCVPYLIAMGTDPEPAMRNKADQQLVEIDKKYAGFIHMKAVAGMKMSYQVQQAINTCLKDPVRGFRQDESSSALCSHLYSMIRGNRQHRRAFLISLLNLFDDTAKTDVTMLLYIADNLACFPYQTQEEPLFIMHHIDITLSVSGSNLLQSFKESMVKDKRKERKSSPSKENESSDSEEEVSRPRKSRKRVDSDSDSDSEDDINSVMKCLPENSAPLIEFANVSQGILLLLMLKQHLKNLCGFSDSKIQKYSPSESAKVYDKAINRKTGVHFHPKQTLDFLRSDMANSKITEEVKRSIVKQYLDFKLLMEHLDPDEEEEEGEVSASTNARNKAITSLLGGGSPKNNTAAETEDDESDGEDRGGGTSGVRRRRSQRISQRIT

SEQ ID NO: 8175 - protein, 1669 aa, Homo sapiens
MPKTHGAIRQSLGLQVAGAMRLGCWAFVKGYAKDMVTDFDEKHDEYLILLQQRNRILKHLKSKDPVQLRLEHLEQGFSVYVNGANSELKSSPRKAIHSDFSRSASHTEGTHDYGRRTLFREAEEALRRSSRTAPSKVQRRGWHQKSVQIRTEAGPRLHIEPPVDYSDDFELCGDVTLQANNTSEDRPQDTKSPTSTKPCGFNFSLLNACGHSDPSSSVDKERILLTIQDVMELRRSLELSVNLQRKQKDCSSDEYDSIEEDILSEPEPEDPALVGHPRHDRPPSSGDWTQKDVHGEQETEGRSSPGPDTLVVLEFNPASKSHKRERNLSAKRKDNAEVFVPTKPEPNLTPQAPAVFPDQERMCSRPGSRRERPLSATRKTLCEAEYPEEDASAVLQAIQVENAALQRALLSRKAEQPASPLQDAEGPPAKPWTSLLEEKEETLELLPITTATTTQEPAGAAGGARAINQAMDRIGLLGSRQQQKLLKVLQAVESDSAHLGRVVSPTKEQVSDTEDKQRMRADEIKDAIYVTMEILSNWGNSWWVGLTEVEFFDLNDTKLYVSPHDVDIRNTATPGELGRLVNRNLAGKKDSSPWTCPFHPPLQLFFVIRNTRQLGDFHLAKIKVRNYWTADGDLDIGAKNVKLYVNRNLIFNGKLDKGDREAPADHSILVDQKNEKSEQLEEAMNAHSEESKGTHEMAGASGDKELGLGCSPPAETLADAKLSSQGNVSGKRKNSTNCRKDSLSQLEEYLRLSAVPTSMGDMPSAPATSPPVKCPPVHEEPSLIQQLENLMGRKICEPPGKTPSWLQPSPTGKDRKQGGRKPKPLWLSPEKPLAWKGRLPSDDVIGEGPGETEARDKGLRHEPGWGTSRSVNTKERPQRATTKVHSDDSDIFNQPPNRERPASGRRGSRKDAGSSSHGDDQPASREDTWSSRTPSRSRWRSEQEHTLHESWSSLSAFDRSHRGRISNTELPGDILDELLQQKSSRHSDLPPSKKGEQPGLSRGQDGYSGETDAGGDFKIPVLPYGQRLVIDIKSTWGDRHYVGLNGIEIFSSKGEPVQISNIKADPPDINILPAYGKDPRVVTNLIDGVNRTQDDMHVWLAPFTRGRSHSITIDFTHPCHVALIRIWNYNKSRIHSFRGVKDITMLLDTQCIFEGEIAKASGTLAGAPEHFGDTILFTTDDDILEAIFYSDEMFDLDVGSLDSLQDEEAMRRPSTADGEGDERPFTQAGLGADERIPELELPSSSPVPQVTTPEPGIYHGICLQLNFTASWGDLHYLGLTGLEVVGKEGQALPIHLHQISASPRDLNELPEYSDDSRALDKLIDGTNITMEDEHMWLIPFSPGLDHVVTIRLDRAESIAGLRFWNYNKSPEDTYRGAKIVHVSLDGLCVSPPEGFLIRKGPGNCHFDFAQEILFVDYLRAQLLPQPARRLDMRSLECASMDYEAPLMPCGFIFQFQLLTSWGDPYYIGLTGLELYDERGEKIPLSENNIAAFPDSVNSLEGVGGDVRTPDKLIDQVNDTSDGRHMWLAPILPGLVNRVYVIFDLPTTVSMIKLWNYAKTPHRGVKEFGLLVDDLLVYNGILAMVSHLVGGILPTCEPTVPYHTILFTEDRDIRHQEKHTTISNQAEDQDVQMMNENQIITNAKRKQSVVDPALRPKTCISEKETRRRRC

SEQ ID NO: 8176 - protein, 899 aa, Homo sapiens
VFSKRPPHGFLMDRSSKRRQVKPLAASLLEALDYDSSDDSDFKVGDASDSEGSGNGSEDASKDSGEGSCSDSEENILEEELNEDIKVKEEQLKNSAEEEVLSSEKQLIKMEKKEEEENGERPRKKKEKEKEKEKEKEKEKEREKEKEKATVSENVAASAAATTPATSPPAVNTSPSVPTTTTATEEQVSEPKKWNLRRNRPLLDFVSMEELNDMDDYDSEDDNDWRPTVVKRKGRSASQKEGSDGDNEDDEDEGSGSDEDENDEGNDEDHSSPASEGGCKKKKSKVLSRNSADDEELTNDSLTLSQSKSNEDSLILEKSQNWSSQKMDHILICCVCLGDNSEDADEIIQCDNCGITVHEGCYGVDGESDSIMSSASENSTEPWFCDACKCGVSPSCELCPNQDGIFKETDAGRWVHIVCALYVPGVAFGDIDKLRPVTLTEMNYSKYGAKECSFCEDPRFARTGVCISCDAGMCRAYFHVTCAQKEGLLSEAAAEEDIADPFFAYCKQHADRLDRKWKRKNYLALQSYCKMSLQEREKQLSPEAQARINARLQQYRAKAELARSTRPQAWVPREKLPRPLTSSASAIRKLMRKAELMGISTDIFPVDNSDTSSSVDGRRKHKQPALTADFVNYYFERNMRMIQIQENMAEQKNIKDKLENEQEKLHVEYNKLCESLEELQNLNGKLRSEGQGIWALLGRITGQKLNIPAILRAPKERKPSKKEGGTQKTSTLPAVLYSCGICKKNHDQHLLLLCDTCKLHYHLGCLDPPLTRMPRKTKNSYWQCSECDQAGSSDMEADMAMETLPDGTKRSRRQIKEPVKFVPQDVPPEPKKIPIRNTRTRGRKRSFVPEEEKHEERVPRERRQRQSVLQKKPKAEDLRTECATCKGTGDNENLVRYPS

SEQ ID NO: 8177 - protein, 1005 aa, Homo sapiens
LLSRMPSTNRAGSLKDPEIAELFFKEDPEKLFTDLREIGHGSFGAVYFARDVRTNEVVAIKKMSYSGKQSTEKWQDIIKEVKFLQRIKHPNSIEYKGCYLREHTAWLVMEYCLGSASDLLEVHKKPLQEVEIAAITHGALQGLAYLHSHTMIHRDIKAGNILLTEPGQVKLADFGSASMASPANSFVGTPYWMAPEVILAMDEGQYDGKVDVWSLGITCIELAERKPPLFNMNAMSALYHIAQNESPTLQSNEWSDYFRNFVDSCLQKIPQDRPTSEELLKHIFVLRERPETVLIDLIQRTKDAVRELDNLQYRKMKKLLFQEAHNGPAVEAQEEEEEQDHGVGRTGTVNSVGSNQSIPSMSISASSQSSSVNSLPDVSDDKSELDMMEGDHTVMSNSSVIHLKPEEENYREEGDPRTRASDPQSPPQVSRHKSHYRNREHFATIRTASLVTRQMQEHEQDSELREQMSGYKRMRRQHQKQLMTLENKLKAEMDEHRLRLDKDLETQRNNFAAEMEKLIKKHQAAMEKEAKVMSNEEKKFQQHIQAQQKKELNSFLESQKREYKLRKEQLKEELNENQSTPKKEKQEWLSKQKENIQHFQAEEEANLLRRQRQYLELECRRFKRRMLLGRHNLEQDLVREELNKRQTQKDLEHAMLLRQHESMQELEFRHLNTIQKMRCELIRLQHQTELTNQLEYNKRRERELRRKHVMEVRQQPKSLKSKELQIKKQFQDTCKIQTRQYKALRNHLLETTPKSEHKAVLKRLKEEQTRKLAILAEQYDHSINEMLSTQALRLDEAQEAECQVLKMQLQQELELLNAYQSKIKMQAEAQHDRELRELEQRVSLRRALLEQKIEEEMLALQNERTERIRSLLERQAREIEAFDSESMRLGFSNMVLSNLSPEAFSHSYPGASGWSHNPTGGPGPHWGHPMGGPPQAWGHPMQGGPQPWGHPSGPMQGVPRGSSMGVRNSPQALRRTASGGRTEQGMSRSTSVTSQISNGSHMSYT

SEQ ID NO: 8178 - protein, 72 aa, Homo sapiens
MLLNDKWVNEEIKKKIEKCLETNDNGNTTYQNLWDTAKAVVRGKFIAISTYIKKEEKLQINNLTMNLIELEN

SEQ ID NO: 8179 - protein, 216 aa, Homo sapiens
MAGRGGAARPNGPAAGNKICQFKLVLLGESAVGKSSLVLRFVKGQFHEYQESTIGAAFLTQTVCLDDTTVKFEIWDTAGQERYHSLAPMYYRGAQAAIVVYDITNTDTFARAKNWVKELQRQASPNIVIALAGNKADLASKRAVEFQEAQAYADDNSLLFMETSAKTAMNVNEIFMAIAKKLPKNEPQNATGAPGRNRGVDLQENNPASRSQCCSN

SEQ ID NO: 8180 - protein, 1863 aa, Homo sapiens
MDLSALRVEEVQNVINAMQKILECPICLELIKEPVSTKCDHIFCKFCMLKLLNQKKGPSQCPLCKNDITKRSLQESTRFSQLVEELLKIICAFQLDTGLEYANSYNFAKKENNSPEHLKDEVSIIQSMGYRNRAKRLLQSEPENPSLQETSLSVQLSNLGTVRTLRTKQRIQPQKTSVYIELGSDSSEDTVNKATYCSVGDQELLQITPQGTRDEISLDSAKKAACEFSETDVTNTEHHQPSNNDLNTTEKRAAERHPEKYQGSSVSNLHVEPCGTNTHASSLQHENSSLLLTKDRMNVEKAEFCNKSKQPGLARSQHNRWAGSKETCNDRRTPSTEKKVDLNADPLCERKEWNKQKLPCSENPRDTEDVPWITLNSSIQKVNEWFSRSDELLGSDDSHDGESESNAKVADVLDVLNEVDEYSGSSEKIDLLASDPHEALICKSERVHSKSVESNIEDKIFGKTYRKKASLPNLSHVTENLIIGAFVTEPQIIQERPLTNKLKRKRRPTSGLHPEDFIKKADLAVQKTPEMINQGTNQTEQNGQVMNITNSGHENKTKGDSIQNEKNPNPIESLEKESAFKTKAEPISSSISNMELELNIHNSKAPKKNRLRRKSSTRHIHALELVVSRNLSPPNCTELQIDSCSSSEEIKKKKYNQMPVRHSRNLQLMEGKEPATGAKKSNKPNEQTSKRHDSDTFPELKLTNAPGSFTKCSNTSELKEFVNPSLPREEKEEKLETVKVSNNAEDPKDLMLSGERVLQTERSVESSSISLVPGTDYGTQESISLLEVSTLGKAKTEPNKCVSQCAAFENPKGLIHGCSKDNRNDTEGFKYPLGHEVNHSRETSIEMEESELDAQYLQNTFKVSKRQSFAPFSNPGNAEEECATFSAHSGSLKKQSPKVTFECEQKEENQGKNESNIKPVQTVNITAGFPVVGQKDKPVDNAKCSIKGGSRFCLSSQFRGNETGLITPNKHGLLQNPYRIPPLFPIKSFVKTKCKKNLLEENFEEHSMSPEREMGNENIPSTVSTISRNNIRENVFKEASSSNINEVGSSTNEVGSSINEIGSSDENIQAELGRNRGPKLNAMLRLGVLQPEVYKQSLPGSNCKHPEIKKQEYEEVVQTVNTDFSPYLISDNLEQPMGSSHASQVCSETPDDLLDDGEIKEDTSFAENDIKESSAVFSKSVQKGELSRSPSPFTHTHLAQGYRRGAKKLESSEENLSSEDEELPCFQHLLFGKVNNIPSQSTRHSTVATECLSKNTEENLLSLKNSLNDCSNQVILAKASQEHHLSEETKCSASLFSSQCSELEDLTANTNTQDPFLIGSSKQMRHQSESQGVGLSDKELVSDDEERGTGLEENNQEEQSMDSNLGEAASGCESETSVSEDCSGLSSQSDILTTQQRDTMQHNLIKLQQEMAELEAVLEQHGSQPSNSYPSIISDSSALEDLRNPEQSTSEKAVLTSQKSSEYPISQNPEGLSADKFEVSADSSTSKNKEPGVERSSPSKCPSLDDRWYMHSCSGSLQNRNYPSQEELIKVVDVEEQQLEESGPHDLTETSYLPRQDLEGTPYLESGISLFSDDPESDPSEDRAPESARVGNIPSSTSALKVPQLKVAESAQSPAAAHTTDTAGYNAMEESVSREKPELTASTERVNKRMSMVVSGLTPEEFMLVYKFARKHHITLTNLITEETTHVVMKTDAEFVCERTLKYFLGIAGGKWVVSYFWVTQSIKERKMLNEHDFEVRGDVVNGRNHQGPKRARESQDRKIFRGLEICCYGPFTNMPTDQLEWMVQLCGASVVKELSSFTLGTGVHPIVVVQPDAWTEDNGFHAIGQMCEAPVVTREWVLDSVALYQCQELDTYLIPQIPHSHY

SEQ ID NO: 8181 - protein, 1598 aa, Homo sapiens
MDLSALRVEEVQNVINAMQKILECPICLELIKEPVSTKCDHIFCKFCMLKLLNQKKGPSQCPLCKNDITKRSLQESTRFSQLVEELLKIICAFQLDTGLEYANSYNFAKKENNSPEHLKDEVSIIQSMGYRNRAKRLLQSEPENPSLQETSLSVQLSNLGTVRTLRTKQRIQPQKTSVYIELGSDSSEDTVNKATYCSVGDQELLQITPQGTRDEISLDSAKKAACEFSETDVTNTEHHQPSNNDLNTTEKRAAERHPEKYQGSSVSNLHVEPCGTNTHASSLQHENSSLLLTKDRMNVEKAEFCNKSKQPGLARSQHNRWAGSKETCNDRRTPSTEKKVDLNADPLCERKEWNKQKLPCSENPRDTEDVPWITLNSSIQKVNEWFSRSDELLGSDDSHDGESESNAKVADVLDVLNEVDEYSGSSEKIDLLASDPHEALICKSERVHSKSVESNIEDKIFGKTYRKKASLPNLSHVTENLIIGAFVTEPQIIQERPLTNKLKRKRRPTSGLHPEDFIKKADLAVQKTPEMINQGTNQTEQNGQVMNITNSGHENKTKGDSIQNEKNPNPIESLEKESAFKTKAEPISSSISNMELELNIHNSKAPKKNRLRRKSSTRHIHALELVVSRNLSPPNCTELQIDSCSSSEEIKKKKYNQMPVRHSRNLQLMEGKEPATGAKKSNKPNEQTSKRHDSDTFPELKLTNAPGSFTKCSNTSELKEFVNPSLPREEKEEKLETVKVSNNAEDPKDLMLSGERVLQTERSVESSSISLVPGTDYGTQESISLLEVSTLGKAKTEPNKCVSQCAAFENPKGLIHGCSKDNRNDTEGFKYPLGHEVNHSRETSIEMEESELDAQYLQNTFKVSKRQSFAPFSNPGNAEEECATFSAHSGSLKKQSPKVTFECEQKEENQGKNESNIKPVQTVNITAGFPVVGQKDKPVDNAKCSIKGGSRFCLSSQFRGNETGLITPNKHGLLQNPYRIPPLFPIKSFVKTKCKKNLLEENFEEHSMSPEREMGNENIPSTVSTISRNNIRENVFKEASSSNINEVGSSTNEVGSSINEIGSSDENIQAELGRNRGPKLNAMLRLGVLQPEVYKQSLPGSNCKHPEIKKQEYEEVVQTVNTDFSPYLISDNLEQPMGSSHASQVCSETPDDLLDDGEIKEDTSFAENDIKESSAVFSKSVQKGELSRSPSPFTHTHLAQGYRRGAKKLESSEENLSSEDEELPCFQHLLFGKVNNIPSQSTRHSTVATECLSKNTEENLLSLKNSLNDCSNQVILAKASQEHHLSEETKCSASLFSSQCSELEDLTANTNTQDPFLIGSSKQMRHQSESQGVGLSDKELVSDDEERGTGLEENNQEEQSMDSNLGEAASGCESETSVSEDCSGLSSQSDILTTQQRDTMQHNLIKLQQEMAELEAVLEQHGSQPSNSYPSIISDSSALEDLRNPEQSTSEKGVTQSIKERKMLNEHDFEVRGDVVNGRNHQGPKRARESQDRKIFRGLEICCYGPFTNMPTDQLEWMVQLCGASVVKELSSFTLGTGVHPIVVVQPDAWTEDNGFHAIGQMCEAPVVTREWVLDSVALYQCQELDTYLIPQIPHSHY

SEQ ID NO: 8182 - protein, 1567 aa, Homo sapiens
MNVEKAEFCNKSKQPGLARSQHNRWAGSKETCNDRRTPSTEKKVDLNADPLCERKEWNKQKLPCSENPRDTEDVPWITLNSSIQKVNEWFSRSDELLGSDDSHDGESESNAKVADVLDVLNEVDEYSGSSEKIDLLASDPHEALICKSERVHSKSVESNIEDKIFGKTYRKKASLPNLSHVTENLIIGAFVTEPQIIQERPLTNKLKRKRRPTSGLHPEDFIKKADLAVQKTPEMINQGTNQTEQNGQVMNITNSGHENKTKGDSIQNEKNPNPIESLEKESAFKTKAEPISSSISNMELELNIHNSKAPKKNRLRRKSSTRHIHALELVVSRNLSPPNCTELQIDSCSSSEEIKKKKYNQMPVRHSRNLQLMEGKEPATGAKKSNKPNEQTSKRHDSDTFPELKLTNAPGSFTKCSNTSELKEFVNPSLPREEKEEKLETVKVSNNAEDPKDLMLSGERVLQTERSVESSSISLVPGTDYGTQESISLLEVSTLGKAKTEPNKCVSQCAAFENPKGLIHGCSKDNRNDTEGFKYPLGHEVNHSRETSIEMEESELDAQYLQNTFKVSKRQSFAPFSNPGNAEEECATFSAHSGSLKKQSPKVTFECEQKEENQGKNESNIKPVQTVNITAGFPVVGQKDKPVDNAKCSIKGGSRFCLSSQFRGNETGLITPNKHGLLQNPYRIPPLFPIKSFVKTKCKKNLLEENFEEHSMSPEREMGNENIPSTVSTISRNNIRENVFKEASSSNINEVGSSTNEVGSSINEIGSSDENIQAELGRNRGPKLNAMLRLGVLQPEVYKQSLPGSNCKHPEIKKQEYEEVVQTVNTDFSPYLISDNLEQPMGSSHASQVCSETPDDLLDDGEIKEDTSFAENDIKESSAVFSKSVQKGELSRSPSPFTHTHLAQGYRRGAKKLESSEENLSSEDEELPCFQHLLFGKVNNIPSQSTRHSTVATECLSKNTEENLLSLKNSLNDCSNQVILAKASQEHHLSEETKCSASLFSSQCSELEDLTANTNTQDPFLIGSSKQMRHQSESQGVGLSDKELVSDDEERGTGLEENNQEEQSMDSNLGEAASGCESETSVSEDCSGLSSQSDILTTQQRDTMQHNLIKLQQEMAELEAVLEQHGSQPSNSYPSIISDSSALEDLRNPEQSTSEKAVLTSQKSSEYPISQNPEGLSADKFEVSADSSTSKNKEPGVERSSPSKCPSLDDRWYMHSCSGSLQNRNYPSQEELIKVVDVEEQQLEESGPHDLTETSYLPRQDLEGTPYLESGISLFSDDPESDPSEDRAPESARVGNIPSSTSALKVPQLKVAESAQSPAAAHTTDTAGYNAMEESVSREKPELTASTERVNKRMSMVVSGLTPEEFMLVYKFARKHHITLTNLITEETTHVVMKTDAEFVCERTLKYFLGIAGGKWVVSYFWVTQSIKERKMLNEHDFEVRGDVVNGRNHQGPKRARESQDRKIFRGLEICCYGPFTNMPTDQLEWMVQLCGASVVKELSSFTLGTGVHPIVVVQPDAWTEDNGFHAIGQMCEAPVVTREWVLDSVALYQCQELDTYLIPQIPHSHY

SEQ ID NO: 8183 - protein, 1822 aa, Homo sapiens
MDLSALRVEEVQNVINAMQKILECPICLELIKEPVSTKCDHIFCKFCMLKLLNQKKGPSQCPLCKNDITKRSLQESTRFSQLVEELLKIICAFQLDTGLEYANSYNFAKKENNSPEHLKDEVSIIQSMGYRNRAKRLLQSEPENPSLQETSLSVQLSNLGTVRTLRTKQRIQPQKTSVYIELAACEFSETDVTNTEHHQPSNNDLNTTEKRAAERHPEKYQGSSVSNLHVEPCGTNTHASSLQHENSSLLLTKDRMNVEKAEFCNKSKQPGLARSQHNRWAGSKETCNDRRTPSTEKKVDLNADPLCERKEWNKQKLPCSENPRDTEDVPWITLNSSIQKVNEWFSRSDELLGSDDSHDGESESNAKVADVLDVLNEVDEYSGSSEKIDLLASDPHEALICKSERVHSKSVESNIEDKIFGKTYRKKASLPNLSHVTENLIIGAFVTEPQIIQERPLTNKLKRKRRPTSGLHPEDFIKKADLAVQKTPEMINQGTNQTEQNGQVMNITNSGHENKTKGDSIQNEKNPNPIESLEKESAFKTKAEPISSSISNMELELNIHNSKAPKKNRLRRKSSTRHIHALELVVSRNLSPPNCTELQIDSCSSSEEIKKKKYNQMPVRHSRNLQLMEGKEPATGAKKSNKPNEQTSKRHDSDTFPELKLTNAPGSFTKCSNTSELKEFVNPSLPREEKEEKLETVKVSNNAEDPKDLMLSGERVLQTERSVESSSISLVPGTDYGTQESISLLEVSTLGKAKTEPNKCVSQCAAFENPKGLIHGCSKDNRNDTEGFKYPLGHEVNHSRETSIEMEESELDAQYLQNTFKVSKRQSFAPFSNPGNAEEECATFSAHSGSLKKQSPKVTFECEQKEENQGKNESNIKPVQTVNITAGFPVVGQKDKPVDNAKCSIKGGSRFCLSSQFRGNETGLITPNKHGLLQNPYRIPPLFPIKSFVKTKCKKNLLEENFEEHSMSPEREMGNENIPSTVSTISRNNIRENVFKEASSSNINEVGSSTNEVGSSINEIGSSDENIQAELGRNRGPKLNAMLRLGVLQPEVYKQSLPGSNCKHPEIKKQEYEEVVQTVNTDFSPYLISDNLEQPMGSSHASQVCSETPDDLLDDGEIKEDTSFAENDIKESSAVFSKSVQKGELSRSPSPFTHTHLAQGYRRGAKKLESSEENLSSEDEELPCFQHLLFGKVNNIPSQSTRHSTVATECLSKNTEENLLSLKNSLNDCSNQVILAKASQEHHLSEETKCSASLFSSQCSELEDLTANTNTQDPFLIGSSKQMRHQSESQGVGLSDKELVSDDEERGTGLEENNQEEQSMDSNLGEAASGCESETSVSEDCSGLSSQSDILTTQQRDTMQHNLIKLQQEMAELEAVLEQHGSQPSNSYPSIISDSSALEDLRNPEQSTSEKAVLTSQKSSEYPISQNPEGLSADKFEVSADSSTSKNKEPGVERSSPSKCPSLDDRWYMHSCSGSLQNRNYPSQEELIKVVDVEEQQLEESGPHDLTETSYLPRQDLEGTPYLESGISLFSDDPESDPSEDRAPESARVGNIPSSTSALKVPQLKVAESAQSPAAAHTTDTAGYNAMEESVSREKPELTASTERVNKRMSMVVSGLTPEEFMLVYKFARKHHITLTNLITEETTHVVMKTDAEFVCERTLKYFLGIAGGKWVVSYFWVTQSIKERKMLNEHDFEVRGDVVNGRNHQGPKRARESQDRKIFRGLEICCYGPFTNMPTDQLEWMVQLCGASVVKELSSFTLGTGVHPIVVVQPDAWTEDNGFHAIGQMCEAPVVTREWVLDSVALYQCQELDTYLIPQIPHSHY

SEQ ID NO: 8184 - protein, 1624 aa, Homo sapiens
MDLSALRVEEVQNVINAMQKILECPICLELIKEPVSTKCDHIFCKFCMLKLLNQKKGPSQCPLCKNDITKRSLQESTRFSQLVEELLKIICAFQLDTGLEYANSYNFAKKENNSPEHLKDEVSIIQSMGYRNRAKRLLQSEPENPSLQETSLSVQLSNLGTVRTLRTKQRIQPQKTSVYIELGSDSSEDTVNKATYCSVGDQELLQITPQGTRDEISLDSAKKAACEFSETDVTNTEHHQPSNNDLNTTEKRAAERHPEKYQGSSVSNLHVEPCGTNTHASSLQHENSSLLLTKDRMNVEKAEFCNKSKQPGLARSQHNRWAGSKETCNDRRTPSTEKKVDLNADPLCERKEWNKQKLPCSENPRDTEDVPWITLNSSIQKVNEWFSRSDELLGSDDSHDGESESNAKVADVLDVLNEVDEYSGSSEKIDLLASDPHEALICKSERVHSKSVESNIEDKIFGKTYRKKASLPNLSHVTENLIIGAFVTEPQIIQERPLTNKLKRKRRPTSGLHPEDFIKKADLAVQKTPEMINQGTNQTEQNGQVMNITNSGHENKTKGDSIQNEKNPNPIESLEKESAFKTKAEPISSSISNMELELNIHNSKAPKKNRLRRKSSTRHIHALELVVSRNLSPPNCTELQIDSCSSSEEIKKKKYNQMPVRHSRNLQLMEGKEPATGAKKSNKPNEQTSKRHDSDTFPELKLTNAPGSFTKCSNTSELKEFVNPSLPREEKEEKLETVKVSNNAEDPKDLMLSGERVLQTERSVESSSISLVPGTDYGTQESISLLEVSTLGKAKTEPNKCVSQCAAFENPKGLIHGCSKDNRNDTEGFKYPLGHEVNHSRETSIEMEESELDAQYLQNTFKVSKRQSFAPFSNPGNAEEECATFSAHSGSLKKQSPKVTFECEQKEENQGKNESNIKPVQTVNITAGFPVVGQKDKPVDNAKCSIKGGSRFCLSSQFRGNETGLITPNKHGLLQNPYRIPPLFPIKSFVKTKCKKNLLEENFEEHSMSPEREMGNENIPSTVSTISRNNIRENVFKEASSSNINEVGSSTNEVGSSINEIGSSDENIQAELGRNRGPKLNAMLRLGVLQPEVYKQSLPGSNCKHPEIKKQEYEEVVQTVNTDFSPYLISDNLEQPMGSSHASQVCSETPDDLLDDGEIKEDTSFAENDIKESSAVFSKSVQKGELSRSPSPFTHTHLAQGYRRGAKKLESSEENLSSEDEELPCFQHLLFGKVNNIPSQSTRHSTVATECLSKNTEENLLSLKNSLNDCSNQVILAKASQEHHLSEETKCSASLFSSQCSELEDLTANTNTQDPFLIGSSKQMRHQSESQGVGLSDKELVSDDEERGTGLEENNQEEQSMDSNLGEAASGCESETSVSEDCSGLSSQSDILTTQQRDTMQHNLIKLQQEMAELEAVLEQHGSQPSNSYPSIISDSSALEDLRNPEQSTSEKDAEFVCERTLKYFLGIAGGKWVVSYFWVTQSIKERKMLNEHDFEVRGDVVNGRNHQGPKRARESQDRKIFRGLEICCYGPFTNMPTDQLEWMVQLCGASVVKELSSFTLGTGVHPIVVVQPDAWTEDNGFHAIGQMCEAPVVTREWVLDSVALYQCQELDTYLIPQIPHSHY

SEQ ID NO: 8185 - protein, 1496 aa, Homo sapiens
MDLSALRVEEVQNVINAMQKILECPICLELIKEPVSTKCDHIFCKFCMLKLLNQKKGPSQCPLCKNDITKRSLQESTRFSQLVEELLKIICAFQLDTGLEYANSYNFAKKENNSPEHLKDEVSIIQSMGYRNRAKRLLQSEPENPSLQETSLSVQLSNLGTVRTLRTKQRIQPQKTSVYIELGSDSSEDTVNKATYCSVGDQELLQITPQGTRDEISLDSAKKAACEFSETDVTNTEHHQPSNNDLNTTEKRAAERHPEKYQGSSVSNLHVEPCGTNTHASSLQHENSSLLLTKDRMNVEKAEFCNKSKQPGLARSQHNRWAGSKETCNDRRTPSTEKKVDLNADPLCERKEWNKQKLPCSENPRDTEDVPWITLNSSIQKVNEWFSRSDELLGSDDSHDGESESNAKVADVLDVLNEVDEYSGSSEKIDLLASDPHEALICKSERVHSKSVESNIEDKIFGKTYRKKASLPNLSHVTENLIIGAFVTEPQIIQERPLTNKLKRKRRPTSGLHPEDFIKKADLAVQKTPEMINQGTNQTEQNGQVMNITNSGHENKTKGDSIQNEKNPNPIESLEKESAFKTKAEPISSSISNMELELNIHNSKAPKKNRLRRKSSTRHIHALELVVSRNLSPPNCTELQIDSCSSSEEIKKKKYNQMPVRHSRNLQLMEGKEPATGAKKSNKPNEQTSKRHDSDTFPELKLTNAPGSFTKCSNTSELKEFVNPSLPREEKEEKLETVKVSNNAEDPKDLMLSGERVLQTERSVESSSISLVPGTDYGTQESISLLEVSTLGKAKTEPNKCVSQCAAFENPKGLIHGCSKDNRNDTEGFKYPLGHEVNHSRETSIEMEESELDAQYLQNTFKVSKRQSFAPFSNPGNAEEECATFSAHSGSLKKQSPKVTFECEQKEENQGKNESNIKPVQTVNITAGFPVVGQKDKPVDNAKCSIKGGSRFCLSSQFRGNETGLITPNKHGLLQNPYRIPPLFPIKSFVKTKCKKNLLEENFEEHSMSPEREMGNENIPSTVSTISRNNIRENVFKEASSSNINEVGSSTNEVGSSINEIGSSDENIQAELGRNRGPKLNAMLRLGVLQPEVYKQSLPGSNCKHPEIKKQEYEEVVQTVNTDFSPYLISDNLEQPMGSSHASQVCSETPDDLLDDGEIKEDTSFAENDIKESSAVFSKSVQKGELSRSPSPFTHTHLAQGYRRGAKKLESSEENLSSEDEELPCFQHLLFGKVNNIPSQSTRHSTVATECLSKNTEENLLSLKNSLNDCSNQVILAKASQEHHLSEETKCSASLFSSQCSELEDLTANTNTQDPFLIGSSKQMRHQSESQGVGLSDKELVSDDEERGTGLEENNQEEQSMDSNLGEAASGCESETSVSEDCSGLSSQSDILTTQQRDTMQHNLIKLQQEMAELEAVLEQHGSQPSNSYPSIISDSSALEDLRNPEQSTSEKAVLTSQKSSEYPISQNPEGLSADKFEVSADSSTSKNKEPGVERC

SEQ ID NO: 8186 - protein, 662 aa, Homo sapiens
MALITLRKNLYRLSDFQMHRALAALKNKPLNHVHKVVKERLCPWLCSRQPEPFGVKFHHAHCKKFHSKNGNDLHPLGGPVFSQVSDCDRLEQNVKNEESQMFYRRLSNLTSSEEVLSFISTMETLPDTMAAGALQRICEVEKKDGDQGLPKEILENSIFQALCFQFEKEPSQLSNTSLVTALQALILLHVDPQSSLLLNLVAECQNRLRKGGMEVRNLCILGESLITLHSSGCVTLELIINQLQGEKLETFTPEDIVALYRILQACTEKVDEHQTFLNKINNFSLSIVSNLSPKLISQMLTALVVLDQSQAFPLIIKLGKYVVRHVPHFTNEELRRVLEAFIYFGHHDTFFTKALEHRVAAVCLTLDPEVVCRVMEYCSRELILSKPILNAVAETFVCQTEKFSPRQISALMEPFGKLNYLPPNASALFRKLENVLFTHFNYFPPKSLLKLLHSCSLNECHPVNFLAKIFKPLFLQRLQGKESHLDTLSRAQLTQLFLASVLECPFYKGPKLLPKYQVKSFLTPCCSLETPVDSQLYRYVKIGLTNLLGARLYFAPKVLTPYCYTIDVEIKLDEEGFVLPSTANEDIHKRIALCIDGPKRFCSNSKHLLGKEAIKQRHLQLLGYQVVQIPYHEIGMLKSRRELVEYLQRKLFSQNTVHWLQE

SEQ ID NO: 8187 - protein, 1030 aa, Homo sapiens
MALSPGANLVFHEDPKMTPSPPSCGAPGLGSGTIPQPHPDMAQVPMLNLLPSPGLALVPDLNDSLSPVSGEASGLVSENTPRPDDSRAIAPASLQITSSCSGEALDLDSKDVSRPDSQGRLCPASNPILSPSSTEAPRLSSGNHPQSNSEDAFKCLSSKIFKLGQRNSNPSRHELNPFIRHHSREGLVLGHCISRPSSKALLIPTSNSSLDLDSNPLLNMGSRNTSKLNLNVAPDSHGTLIPDTNETITLASHNISESVSKGAFSTTWSTSSKETMNVASSGHSRSDLSVTITQASYVTLIPGSSYGISLHSSTHGPNSTISPPSCMTLILGSNETLSLDSSLLFSDTSTLTLSSQQDDAKDNSIHTVPLEENLESWSEMASIKVGQFPLGFPISNPAGKDAVTLQGIPEGAFDEVTSCLVKVPEKTEGGNNMALVENVTTLQKSQDLLEAEGEKKTMIKKIMRQIQEEPLDSLSSSVRKQAMEILTQLSHTQPTLGMRERSELVNVCVHSVFSLPSVQAMQEKDEAKAETIQALYHQTLEALQTLLKALFIEDPTPAGLKSILEALGPWMNSGKAHERARAVNTNVSVLNHMLLTLPFFMPLGFPALGLLLGRLILHIGDPDEEIGCEALDGIIILYTILELQKRARDKEETNKKELYESNKHFLGPYNPVSPCQNILRVIEEFGDFLGPQQIKDLLLAALEGLKGSSEAPGKDSREMMQLASEVMLSSVLEWYRHRALEVIPEIMQGIYMQLSHIQEPRARQVALLPVSLLASSFMTEVVVALLMCPLPLNSNGAEMWRQLILCKPSCDVRDLLDLLLGSLKEKPVTKEGRASIVPLAAASGLCELLSVNSCMGRVRRIYPQLLLALLIQVHYHIGLNLPGCVAPPKDTKKGAQPSPFVPVRWVVKVVKTLLLRMGCSYETTFLEDQGGWELMEQVESHHRGVALLARAMVQYSCQELCRILYLLIPLLERGDEKHRITATAFFVEQPCEEGIVILMLRPQDLMGKATTSSHRGSELESDTLSFATWC

SEQ ID NO: 8188 - protein, 421 aa, Homo sapiens [sequence omitted]

SEQ ID NO: 8189 - protein, 2153 aa, Homo sapiens
MEPAGEEERPPPAAEGEDDEEEVAAAAQTSGPAHGRSASSLEDADDQEEEMEAMVIGGGCCKEQELTYELQQGYRILGEFLQEKHRGLTAPFLQPLGGVATAEEEVAEGPRSGGRGGRAFPQQPGQGMCLLQMEEKFASGQYGGITEFVADFRLMLETCYRLHGVDHWISKQGQKLEMMLEQKLALLSRHLREKTTIAVTSRGYYGLEDEKGTACTSTRRRSTPRSLAGLTSGVFESIMVQVLRQEEQLRAKEEKRASQNYSYYRKGGLMERGASQLVLTLAYQANCVSVSYTDLLGKPGGSYFTFLYVLNIRSRLREQERKEAEEASQKEIEEWERKLLAQAAPTCMETMWEIPAIGHFLCLAQQILNLPEIVFYELERCLLMPQCNAFLSKIMTSLLSPPHRRPTLHRRPTLPYRTWEAALRQKVQQWYTAVGQTENPDNCAEKLGLCPQFFKVLGEVNPLEEKPFHELPFYQKVWLLKGLCDFVYETQKEVQDAVLGQPIHECREVILGYDYLENAYVHFPQFCGADVRIYKQRPFQAPEFPIPPIKIQRVPRIKLEKLKCDYVSTSNGEHRCSRDSLPSSFKKEQENNFDPACCPAKMILDNHDISVEMGVKSNYEIRIRRPCEIKKTDCCKENLEKPRSPGEVTGFGEPLSPGEIRFIENQEKYGEASRIKIEPSPLKENTLKSCQIHVNGSHSDHPEINCHKVVRDILLEQSLQSHKKLKLTKMRAKKKKKKKKKLKDVLNENLQRKREGLHSLAFKSYKPEIQNKLLIIKKKAKHKKHKSGKKSVSKKAITKKRKTVIKSPTVPEFQLICTNLDELRELITKIENELKDLENSRKKSGKWYHRRQAVKELHSTLIRLLNELLPWEPKLMKAFQRNRSRLKKDYDDFRRQPDHDTFNRELWTTDEGEGDLGKDSPKGEISKSIDSTEPLDILEKDHFDSDDMKLSEIDFPMARSKLLKKELPSKDLPKTLLKTLKRQSKQTDYVDDSTKELSPRKKAKLSTNETTVENLESDVQIDCFSESKHTEPSFPESFASLDSVPVSTLQKGTKPIQALLAKNIGNKVTLTNQLPPSTGRNALAVEKPVLSPPEASPIKPALTCHTNTKGPLQMVYKMPCGQWLPIDLQNSSVKIQVQPMVDPKTGEKIMQQVLILPKNFVIQHKEGKAVAKEVPPLQQKGTEQHCSSFPQTTNINSSLASVFVNSPGTVSTQLPNTAFNKTITPLSNISSARPQPLSPVTSVSNLLTPSVKTSQSEAGKAKNAVSAATFSLPSASPTISSTGQPLSSTTTLNGSTNPGSSFNCFAQQTADSSEAKQELKTVCIRDSQSILVRTRGGNTGVVKVQTNPDQNSPNTVSSSSVFTFAPQLQAFLVPKSTTSSSAFSPVAGTTTTSSLSPFSQTPTSVSIPASFAPSMGKNLKLTLGHTTGSGDLGHVIDKTSHMPSSPLKSSICSSTLLPSTTSSSVSVISISAANFGQNNANIIHTPTKQQQVDYITKSYPVTRSEATAATNGDVISGTPVQKLMLVSAPSILSSGNGTAINMTPALTSTGVSAQKLVFINAPVPSGTSTPTLVAESLKQTLPPPLHKAYVKTPEQPQIVLIPSTVGTPIKINSSPAVSQIKDVKIGLNIGQAIVNTSGTVPAIPSINILQNVTPKGEDKSSKGYILPLSTSGNSVPVSSNFVSQNITPVNESVVSSARAVNVLSVTGANLSLGSFPVTSASASAGAQPPVLVSGNDTSSRIMPILSNRLCSSSLGNTVAISTVKTGHLASSVLISTTQPVVSPKCLTSALQIPVTVALPTPATTSPKIINTVPHSAAVPGATRSVSISKRQSRTSLQFHSPGISTTVPTNVNTNKPQTELSSLSTSPGKITNTSNFASLPNQQALVKTPSYSSAPGGTTIHTASAPSNVTSLVGSQFSEPCIQQKIVINTSTPLAPGTQIMINGTRFIVPPQGLGAGSHVLLISTNPKYGAPLVLNSGQGIQSTPIDNSAQKITLASNNSLSGQPLQHPLRSPTKFINSFGNASSIPTVHTSPQLINTTAKVPVPPPVPTVSLTSVIKSPATLLAKTSLVSAICPSNPPLPSSTSVFHLDPPVKKLLVSPEGAILNTINTPASKVSSLSPSLSQIVVSASRSPASVFPAFQSSGLEKPDRAAS

SEQ ID NO: 8190 - protein, 250 aa, Homo sapiens
MDMLQDLESLQFEYGVPEEDRIWLYLQGRSRGLMIEACAHATFFCKLLYNLRASLNKNQSSRHLSIGSLNSATPEEFKVGIIGGGHLGKQLAGTLLQLGPIPAESLRISTRRPETLGELQKLGIKCFYHNADLVSWADVIFLCCLPSQLPNICVEIYTSLEKASIVYSFVAAIPLPRLKLLLNHTNILRPQYQYDEDSVSVWGANKGVIAALQDPTILQATCPYSPAGHGSTYFWHSFENYFPVGPLLSY

SEQ ID NO: 8191 - protein, 584 aa, Homo sapiens
MDEGCGETIYVIGQGSDGTEYGLSEADMEASYATVKSMAEQIEADVILLRERQEAGGRVRDYLVRKRVGDNDFLEVRVAVVGNVDAGKSTLLGVLTHGELDNGRGFARQKLFRHKHEIESGRTSSVGNDILGFDSEGNVVNKPDSHGGSLEWTKICEKSTKVITFIDLAGHEKYLKTTVFGMTGHLPDFCMLMVGSNAGIVGMTKEHLGLALALNVPVFVVVTKIDMCPANILQETLKLLQRLLKSPGCRKIPVLVQSKDDVIVTASNFSSERMCPIFQISNVTGENLDLLKMFLNLLSPRTSYREEEPAEFQIDDTYSVPGVGTVVSGTTLRGLIKLNDTLLLGPDPLGNFLSIAVKSIHRKRMPVKEVRGGQTASFALKKIKRSSIRKGMVMVSPRLNPQASWEFEAEILVLHHPTTISPRYQAMVHCGSIRQTATILSMDKDCLRTGDKATVHFRFIKTPEYLHIDQRLVFREGRTKAVGTITKLLQTTNNSPMNSKPQQIKMQSTKKGPLTKRDEGGPSGGPAVGAPPPGDEASSVGAGQPAASSNLQPQPKPSSGGRRRGGQRHKVKSQGACVTPASGC

SEQ ID NO: 8192 - protein, 481 aa, Homo sapiens
QVTFSDVAIDFSHEEWACLDSAQRDLYKDVMVQNYENLVSVGLSVTKPYVIMLLEDGKEPWMMEKKLSKAYPFPLSHSVPASVNFGFSALFEHCSEVTEIFELSELCVFWVLHFLSNSPNSTVEAFRSKKKKKKKKKKKKKKKKRQCFAFLIYFRLGIKMGKQGIINKEGYLEDSPQPVTMEKVVKQSYEFSNSNKNLEYTECDTFRSTFHSKSTLSEPQNNSAEGNSHKYDILKKNLSKKSVIKSERINGGKKLLNSNKSGAAFNQSKSLTLPQTCNREKIYTCSECGKAFGKQSILSRHWRIHTGEKPYECRECGKTFSHGSSLTRHQISHSGEKPYKCIECGKAFSHGSSLTNHQSTHTGEKPYECMNCGKSFSRVSLLIQHLRIHTQEKRYECRICGKAFIHSSSLIHHQKSHTGEKPYECRECGKAFCCSSHLTQHQRIHSMKKKYECNKCLKVFSSFSFLVQHQSIHTEEKPFEV

SEQ ID NO: 8193 - protein, 411 aa, Homo sapiens
MSQVTFSDVAIDFSHEEWACLDSAQRDLYKDVMVQNYENLVSVGLSVTKPYVIMLLEDGKEPWMMEKKLSKDWESRWENKELSTKKDIYDEDSPQPVTMEKVVKQSYEFSNSNKNLEYTECDTFRSTFHSKSTLSEPQNNSAEGNSHKYDILKKNLSKKSVIKSERINGGKKLLNSNKSGAAFNQSKSLTLPQTCNREKIYTCSECGKAFGKQSILSRHWRIHTGEKPYECRECGKTFSHGSSLTRHQISHSGEKPYKCIECGKAFSHGSSLTNHQSTHTGEKPYECMNCGKSFSRVSLLIQHLRIHTQEKRYECRICGKAFIHSSSLIHHQKSHTGEKPYECRECGKAFCCSSHLTQHQRIHSMKKKYECHKCLKGFSSFSFLGQHQSIHTGEKPLKFRNAGNPSTSLNH

SEQ ID NO: 8194 - protein, 1304 aa, Homo sapiens
MAKIAKTHEDIEAQIREIQGKKAALDEAQGVGLDSTGYYDQEIYGGSDSRFAGYVTSIAATELEDDDDDYSSSTSLLGQKKPGYHAPVALLNDIPQSTEQYDPFAEHRPPKIADREDEYKKHRRTMIISPERLDPFADGGKTPDPKMNVRTYMDVMREQHLTKEEREIRQQLAEKAKAGELKVVNGAAASQPPSKRKRRWDQTADQTPGATPKKLSSWDQAETPGHTPSLRWDETPGRAKGSETPGATPGSKIWDPTPSHTPAGAATPGRGDTPGHATPGHGGATSSARKNRWDETPKTERDTPGHGSGWAETPRTDRGGDSIGETPTPGASKRKSRWDETPASQMGGSTPVLTPGKTPIGTPAMNMATPTPGHIMSMTPEQLQAWRWEREIDERNRPLSDEELDAMFPEGYKVLPPPAGYVPIRTPARKLTATPTPLGGMTGFHMQTEDRTMKSVNDQPSGNLPFLKPDDIQYFDKLLVDVDESTLSPEEQKERKIMKLLLKIKNGTPPMRKAALRQITDKAREFGAGPLFNQILPLLMSPTLEDQERHLLVKVIDRILYKLDDLVRPYVHKILVVIEPLLIDEDYYARVEGLEIISNLAKAAGLATMISTMRPDIDNMDEYVRNTTARAFAVVASALGIPSLLPFLKAVCKSKKSWQARHTGIKIVQQIAILMGCAILPHLRSLVEIIEHGLVDEQQKVRTISALAIAALAEAATPYGIESFDSVLKPLWKGIRQHRGKGLAAFLKAIGYLIPLMDAEYANYYTREVMLILIREFQSPDEEMKKIVLKVVKQCCGTDGVEANYIKTEILPPFFKHFWQHRMALDRRNYRQLVDTTVELANKVGAAEIISRIVDDLKDEAEQYRKMVMETIEKIMGNLGAADIDHKLEEQLIDGILYAFQEQTTEDSVMLNGFGTVVNALGKRVKPYLPQICGTVLWRLNNKSAKVRQQAADLISRTAVVMKTCQEEKLMGHLGVVLYEYLGEEYPEVLGSILGALKAIVNVIGMHKMTPPIKDLLPRLTPILKNRHEKVQENCIDLVGRIADRGAEYVSAREWMRICFELLELLKAHKKAIRRATVNTFGYIAKAIGPHDVLATLLNNLKVQERQNRVCTTVAIAIVAETCSPFTVLPALMNEYRVPELNVQNGVLKSLSFLFEYIGEMGKDYIYAVTPLLEDALMDRDLVHRQTASAVVQHMSLGVYGFGCEDSLNHLLNYVWPNVFETSPHVIQAVMGALEGLRVAIGPCRMLQYCLQGLFHPARKVRDVYWKIYNSIYIGSQDALIAHYPRIYNDDKNTYIRYELDYIL

SEQ ID NO: 8195 - protein, 280 aa, Homo sapiens
MRTRKVLADHPVQRLSNGKCERTTESHGFFSELLFSSDAIFYKTSCEGVEDGMYSHPNKLKMLTNPSTANSNLLLHQSDQHLISSSLEFIGLFGRSDLAIALYVLLIGSCPGGISSEASYWNTTMTVQKRYTFKPSELTNYRAKQNHPKRSRYCDMEVVGIGTSVSPPQSIGADARLQENRSGHRLFAHSGGVKQLTDQMQPAALCQPEDEGDTCWQDRGSSSCFSCYSLRSSGHVSHITCLSKKSSSYVERRSINPKEHKGEREQYTLYMCFILQSMPE

SEQ ID NO: 8196 - protein, 280 aa, Homo sapiens [sequence omitted]

SEQ ID NO: 8197 - protein, 1266 aa, Homo sapiens [sequence omitted]

SEQ ID NO: 8198 - protein, 101 aa, Homo sapiens
PGEAKMPSKGKDKKKGKSKGKDTKKLIKTDESVVDRAKANASLWEARLEVTELSRIKYRDTSRILAKSNEDLKKKQCKMEKDIMSVLSYLKKQDQEKDNMV

SEQ ID NO: 8199 - protein, 602 aa, Homo sapiens [sequence omitted]

SEQ ID NO: 8200 - protein, 207 aa, Homo sapiens
MRRTGAPAQADSRGRGRARGGCPGGEATLSQPPPRGGTRGQEPQMKETIMNQEKLAKLQAQVRIGGKGTARRKKKVVHRTATADDKKLQFSLKKLGVNNISGIEEASNMFTNQGTVIHFNNPKVQASLAANTFTITGHAETKQLTEMLPSILNQLGADSLTSLRRLAEALPKQSVDGKAPLATGEDDDDEVPDLVENFDEASKNEAN

SEQ ID NO: 8201 - protein, 2209 aa, Homo sapiens
MWNDIELLTNDDTGSGYLSVGSRKEHGTALYQVDLLVKISSEKASLNPKIQACSLSDGFIIVADQSVILLDSICRSLQLHLVFDTEVDVVGLCQEGKFLLVGERSGNLHLIHVTSKQTLLTNAFVQKANDENRRTYQNLVIEKDGSNEGTYYMLLLTYSGFFCITNLQLLKIQQAIENVDFSTAKKLQGQIKSSFISTENYHTLGCLSLVAGDLASEVPVIIGGTGNCAFSKWEPDSSKKGMTVKNLIDAEIIKGAKKFQLIDNLLFVLDTDNVLSLWDIYTLTPVWNWPSLHVEEFLLTTEADSPSSVTWQGITNLKLIALTASANKKMKNLMVYSLPTMEILYSLEVSSVSSLVQTGISTDTIYLLEGVCKNDPKLSEDSVSVLVLRCLTEALPENRLSRLLHKHRFAEAESFAIQFGLDVELVYKVKSNHILEKLALSSVDASEQTEWQQLVDDAKENLHKIQDDEFVVNYCLKAQWITYETTQEMLNYAKTRLLKKEDKTALIYSDGLKEVLRAHAKLTTFYGAFGPEKFSGSSWIEFLNNEDDLKDIFLQLKEGNLVCAQYLWLRHRANFESRFDVKMLESLLNSMSASVSLQKLCPWFKNDVIPFVRRTVPEGQIILAKWLEQAARNLELTDKANWPENGLQLAEIFFTAEKTDELGLASSWHWISLKDYQNTEEVCQLRTLVNNLRELITLHRKYNCKLALSDFEKENTTTIVFRMFDKVLAPELIPSILEKFIRVYMREHDLQEEELLLLYIEDLLNRCSSKSTSLFETAWEAKAMAVIACLSDTDLIFDAVLKIMYAAVVPWSAAVEQLVKQHLEMDHPKVKLLQESYKLMEMKKLLRGYGIREVNLLNKEIMRVVRYILKQDVPSSLEDALKVAQAFMLSDDEIYSLRIIDLIDREQGEDCLLLLKSLPPAEAEKTAERVIIWARLALQEEPDHSKEGKAWRMSVAKTSVDILKILCDIQKDNLQKKDECEEMLKLFKEVASLQENFEVFLSFEDYSNSSLVADLREQHIKAHEVAQAKHKPGSTPEPIAAEVRSPSMESKLHRQALALQMSKQELEAELTLRALKDGNIKTALKKCSDLFKYHCNADTGKLLFLTCQKLCQMLADNVPVTVPVGLNLPSMIHDLASQAATICSPDFLLDALELCKHTLMAVELSRQCQMDDCGILMKASFGTHKDPYEEWSYSDFFSEDGIVLESQMVLPVIYELISSLVPLAESKRYPLESTSLPYCSLNEGDGLVLPVINSISALLQNLQESSQWELALRFVVGSFGTCLQHSVSNFMNATLSEKLFGETTLVKSRHVVMELKEKAVIFIRENATTLLHKVFNCRLVDLDLALGYCTLLPQKDVFENLWKLIDKAWQNYDKILAISLVGSELASLYQEIEMGLKFRELSTDAQWGIRLGKLGISFQPVFRQHFLTKKDLIKALVENIDMDTSLILEYCSTFQLDCDAVLQLFIETLLHNTNAGQGQGDASMDSAKRRHPKLLAKALEMVPLLTSTKDLVISLSGILHKLDPYDYEMIEVVLKVIERADEKITNININQALSILKHLKSYRRISPPVDLEYQYMLEHVITLPSAAQTRLPFHLIFFGTAQNFWKILSTELSEESFPTLLLISKLMKFSLDTLYVSTAKHVFEKKLKPKLLKLTQAKSSTLINKEITKITQTIESCLLSIVNPEWAVAIAISLAQDIPEGSFKISALKFCLYLAERWLQNIPSQDEKREKAEALLKKLHIQYRRSGTEAVLIAHKLNTEEYLRVIGKPAHLIVSLYEHPSINQRIQNSSGTDYPDIHAAAKEIAEVNEINLEKVWDMLLEKWLCPSTKPGEKPSELFELQEDEALRRVQYLLLSRPIDYSSRMLFVFATSTTTTLGMHQLTFAHRTRALQCLFYLADKETIESLFKKPIEEVKSYLRCITFLASFETLNIPITYELFCSSPKEGMIKGLWKNHSHESMAVRLVTELCLEYKIYDLQLWNGLLQKLLGFNMIPYLRKVLKAISSIHSLWQVPYFSKAWQRVIQIPLLSASCPLSPDQLSDCSESLIAVLECPVSGDLDLIGVARQYIQLELPAFALACLMLMPHSEKRHQQIKNFLGSCDPQVILKQLEEHMNTGQLAGFSHQIRSLILNNIINKKEFGILAKTKYFQMLKMHAMNTNNITELVNYLANDLSLDEASVLITEYSKHCGKPVPPDTAPCEILKMFLSGLS

SEQ ID NO: 8202 - protein, 690 aa, Homo sapiens
MSAENNQLSGASPPHPPTTPQYSTQNLPSEKEDTEVELDEESLQDESPFSPEGESLEDKEYLEEEEDLEEEEYLGKEEYLKEEEYLGKEEHLEEEEYLEKVGYLEEEEYIEEEEYLGKEGYLEEEEYLGKEEHLGKEGYLEKEDYIEEVDYLGKKAYLEEEEYLGKKSYLEKEKALEKEENLEEEEALEKEENLDGKENLYKKYLKEPKASYSSQTMLLRDARSPDAGPSQVTTFLTVPLTFATPSPVSESATESSELLLTLYRRSQASQTDWCYDRTAVKSLKSKSETEQETTTKLAPEEHVNTKVQQKKEENVLEFASKENFWDGITDESIDKLEVEDLDENFLNSSYQTVFKTIIKEMAAHNELEEDFDIPLTKLLESENRWKLVIMLKKNYEKFKETILRIKRRREAQKLTEMTSFTFHLMSKPTPEKPETEEIQKPQRVVHHRKKLERDKEWIQKKTVVHQGDGKLILYPNKNVYQILFPDGTGQIHYPSGNLAMLILYAKMKKFTYIILEDSLEGRIRALINNSGNATFYDENSDIWLNLSSNLGYYFPKDKRQKAWNWWNLNIHVHAPPVQPISLKINEYIQVQIRSQDKIIFCFTYEQKQICLNLGTRYKFVIPEVLSEMKKKTILEAEPGPTAQKIRVLLGKMNRLLNYATTPDLENFIEAVSISLMDNKYLKKMLSKLWF

SEQ ID NO: 8203 - protein, 2136 aa, Homo sapiens
MSRSRHARPSRLVRKEDVNKKKKNSQLRKTTKGANKNVASVKTLSPGKLKQLIQERDVKKKTEPKPPVPVRSLLTRAGAARMNLDRTEVLFQNPESLTCNGFTMALRSTSLSRRLSQPPLVVAKSKKVPLSKGLEKQHDCDYKILPALGVKHSENDSVPMQDTQVLPDIETLIGVQNPSLLKGKSQETTQFWSQRVEDSKINIPTHSGPAAEILPGPLEGTRCGEGLFSEETLNDTSGSPKMFAQDTVCAPFPQRATPKVTSQGNPSIQLEELGSRVESLKLSDSYLDPIKSEHDCYPTSSLNKVIPDLNLRNCLALGGSTSPTSVIKFLLAGSKQATLGAKPDHQEAFEATANQQEVSDTTSFLGQAFGAIPHQWELPGADPVHGEALGETPDLPEIPGAIPVQGEVFGTILDQQETLGMSGSVVPDLPVFLPVPPNPIATFNAPSKWPEPQSTVSYGLAVQGAIQILPLGSGHTPQSSSNSEKNSLPPVMAISNVENEKQVHISFLPANTQGFPLAPERGLFHASLGIAQLSQAGPSKSDRGSSQVSVTSTVHVVNTTVVTMPVPMVSTSSSSYTTLLPTLEKKKRKRCGVCEPCQQKTNCGECTYCKNRKNSHQICKKRKCEELKKKPSVVVPLEVIKENKRPQREKKPKVLKADFDNKPVNGPKSESMDYSRCGHGEEQKLELNPHTVENVTKNEDSMTGIEVEKWTQNKKSQLTDHVKGDFSANVPEAEKSKNSEVDKKRTKSPKLFVQTVRNGIKHVHCLPAETNVSFKKFNIEEFGKTLENNSYKFLKDTANHKNAMSSVATDMSCDHLKGRSNVLVFQQPGFNCSSIPHSSHSIINHHASIHNEGDQPKTPENIPSKEPKDGSPVQPSLLSLMKDRRLTLEQVVAIEALTQLSEAPSENSSPSKSEKDEESEQRTASLLNSCKAILYTVRKDLQDPNLQGEPPKLNHCPSLEKQSSCNTVVFNGQTTTLSNSHINSATNQASTKSHEYSKVTNSLSLFIPKSNSSKIDTNKSIAQGIITLDNCSNDLHQLPPRNNEVEYCNQLLDSSKKLDSDDLSCQDATHTQIEEDVATQLTQLASIIKINYIKPEDKKVESTPTSLVTCNVQQKYNQEKGTMQQKPPSSVHNNHGSSLTKQKNPTQKKTKSTPSRDRRKKKPTVVSYQENDRQKWEKLSYMYGTICDIWIASKFQNFGQFCPHDFPTVFGKISSSTKIWKPLAQTRSIMQPKTVFPPLTQIKLQRYPESAEEKVKVEPLDSLSLFHLKTESNGKAFTDKAYNSQVQLTVNANQKAHPLTQPSSPPNQCANVMAGDDQIRFQQVVKEQLMHQRLPTLPGISHETPLPESALTLRNVNVVCSGGITVVSTKSEEEVCSSSFGTSEFSTVDSAQKNFNDYAMNFFTNPTKNLVSITKDSELPTCSCLDRVIQKDKGPYYTHLGAGPSVAAVREIMENRYGQKGNAIRIEIVVYTGKEGKSSHGCPIAKWVLRRSSDEEKVLCLVRQRTGHHCPTAVMVVLIMVWDGIPLPMADRLYTELTENLKSYNGHPTDRRCTLNENRTCTCQGIDPETCGASFSFGCSWSMYFNGCKFGRSPSPRRFRIDPSSPLHEKNLEDNLQSLATRLAPIYKQYAPVAYQNQVEYENVARECRLGSKEGRPFSGVTACLDFCAHPHRDIHNMNNGSTVVCTLTREDNRSLGVIPQDEQLHVLPLYKLSDTDEFGSKEGMEAKIKSGAIEVLAPRRKKRTCFTQPVPRSGKKRAAMMTEVLAHKIRAVEKKPIPRIKRKNNSTTTNNSKPSSLPTLGSNTETVQPEVKSETEPHFILKSSDNTKTYSLMPSAPHPVKEASPGFSWSPKTASATPAPLKNDATASCGFSERSSTPHCTMPSGRLSGANAAAADGPGISQLGEVAPLPTLSAPVMEPLINSEPSTGVTEPLTPHQPNHQPSFLTSPQDLASSPMEEDEQHSEADEPPSDEPLSDDPLSPAEEKLPHIDEYWSDSEHIFLDANIGGVAIAPAHGSVLIECARRELHATTPVEHPNRNHPTRLSLVFYQHKNLNKPQHGFELNKIKFEAKEAKNKKMKASEQKDQAANEGPEQSSEVNELNQIPSHKALTLTHDNVVTVSPYALTHVAGPYNHWV

SEQ ID NO: 8204 - protein, 1537 aa, Homo sapiens
MTTKRKIIGRLVPCRCFRGEEEIISVLDYSHCSLQQVPKEVFNFERTLEELYLDANQIEELPKQLFNCQALRKLSIPDNDLSNLPTTIASLVNLKELDISKNGVQEFPENIKCCKCLTIIEASVNPISKLPDGFTQLLNLTQLYLNDAFLEFLPANFGRLVKLRILELRENHLKTLPKSMHKLAQLERLDLGNNEFGELPEVLDQIQNLRELWMDNNALQVLPGSIGKLKMLVYLDMSKNRIETVDMDISGCEALEDLLLSSNMLQQLPDSIGLLKKLTTLKVDDNQLTMLPNTIGNLSLLEEFDCSCNELESLPSTIGYLHSLRTLAVDENFLPELPREIGSCKNVTVMSLRSNKLEFLPEEIGQMQKLRVLNLSDNRLKNLPFSFTKLKELAALWLSDNQSKALIPLQTEAHPETKQRVLTNYMFPQQPRGDEDFQSDSDSFNPTLWEEQRQQRMTVAFEFEDKKEDDENAGKVKDLSCQAPWERGQRGITLQPARLSGDCCTPWARCDQQIQDMPVPQNDPQLAWGCISGLQQERSMCTPLPVAAQSTTLPSLSGRQVEINLKRYPTPYPEDLKNMVKSVQNLVGKPSHGVRVENSNPTANTEQTVKEKYEHKWPVAPKEITVEDSFVHPANEMRIGELHPSLAETPLYPPKLVLLGKDKKESTDESEVDKTHCLNNSVSSGTYSDYSPSQASSGSSNTRVKVGSLQTTAKDAVHNSLWGNRIAPSFPQPLDSKPLLSQREAVPPGNIPQRPDRLPMSDTFTDNWTDGSHYDNTGFVAEETTAENANSNPLLSSKSRSTSSHGRRPLIRQDRIVGVPLELEQSTHRHTPETEVPPSNPWQNWTRTPSPFEDRTAFPSKLETTPTTSPLPERKEHIKESTEIPSPFSPGVPWEYHDSNPNRSLSNVFSQIHCRPESSKGVISISKSTERLSPLMKDIKSNKFKKSQSIDEIDIGTYKVYNIPLENYASGSDHLGSHERPDKMLGPEHGMSSMSRSQSVPMLDDEMLTYGSSKGPQQQKASMTKKVYQFDQSFNPQGSVEVKAEKRIPPPFQHNPEYVQQASKNIAKDLISPRAYRGYPPMEQMFSFSQPSVNEDAVVNAQFASQGARAGFLRRADSLVSATEMAMFRRVNEPHELPPTDRYGRPPYRGGLDRQSSVTVTESQFLKRNGRYEDEHPSYQEVKAQAGSFPVKNLTQRRPLSARSYSTESYGASQTRPVSARPTMAALLEKIPSDYNLGNYGDKPSDNSDLKTRPTPVKGEESCGKMPADWRQQLLRHIEARRLDRNAAYKHNTVNLGMLPYGGISAMHAGRSMTLNLQTKSKFDHQELPLQKTPSQQSNILDNGQEDVSPSGQWNPYPLGRRDVPPDTITKKAGSHIQTLMGSQSLQHRSREQQPYEGNINKVTIQQFQSPLPIQIPSSQATRGPQPGRCLIQTKGQRSMDGYPEQFCVRIEKNPGLGFSISGGISGQGNPFKPSDKGIFVTRVQPDGPASNLLQPGDKILQANGHSFVHMEHEKAVLLLKSFQNTVDLVIQRELTV

SEQ ID NO: 8205 - protein, 187 aa, Homo sapiens
MQFDDLTAEKEAVSSKCVDLAKDNQVLQQELLSMKKVQYEKQLEQLNKGNTASLNKKELTLKDVECKFSKMKTTYEEVTTKLEEYKEAFAVALKANNSMSKKLTKSNKKIAMISTKLLMEKERVKYFLSTLPTRRGPESPCVENLTSIGLNRKYIPQMPVRIPTSNPQTSNNCQNYLTEVRYMTVSL

SEQ ID NO: 8206 - protein, 279 aa, Homo sapiens
YKKLLEMTINVLSVFGNEDFDCHGDLKTDQLKMNILIKKLKHKFDDLTAEKEAVSSKCVDLAKDNQVLQQELLSMKKVQQQCEKLEKDKKMLEEEILNLKTHMEDNMVELSKLQEYKSELDERAMTAVEKLEEIHLQVSFLNQLNKGNTASLNKKELTLKDVECKFSKMKTTYEEVTTKLEEYKEAFAVALKANNSMSKKLTKSNKKIAMISTKLLMEKERVKYFLSTLPTRRGPESPCVENLTSIGLNRKYIPQMPVRIPTSNPQTSNNCQNYLTEVR

SEQ ID NO: 8207 - protein, 434 aa, Homo sapiens
MSIEKIWAREILDSRGNPTVEVDLYTAKGLFRAAVPSGASTGIYEALELRDGDKQRYLGKGVLKAVDHINSTIAPALISSGLSVVEQEKLDNLMLELDGTENKSKFGANAILGVSLAVCKAGAAERELPLYRHIAQLAGNSDLILPVPAFNVINGGSHAGNKLAMQEFMILPVGAESFRDAMRLGAEVYHTLKGVIKDKYGKDATNVGDEGGFAPNILENSEALELVKEAIDKAGYTEKIVIGMDVAASEFYRDGKYDLDFKSPTDPSRYITGDQLGALYQDFVRDYPVVSIEDPFDQDDWAAWSKFTANVGIQIVGDDLTVTNPKRIERAVEEKACNCLLLKVNQIGSVTEAIQACKLAQENGWGVMVSHRSGETEDTFIADLVVGLCTGQIKTGAPCRSERLAKYNQLMRIEEELGDEARFAGHNFRNPSVL

SEQ ID NO: 8208 - protein, 2325 aa, Homo sapiens
MKKGSQQKIFSKAKIPSSSHSPIPSSMSNMRSRSLSPLIGSETLPFHSGGQWCEQIEIADENNMLLDYQDHKGADSHAGVRYITEALIKKLTKQDNLALIKSLNLSLSKDGGKKFKYIENLEKCVKLEVLNLSYNLIGKIEKLDKLLKLRELNLSYNKISKIEGIENMCNLQKLNLAGNEIEHIPVWLGKKLKSLRVLNLKGNKISSLQDISKLKPLQDLISLILVENPVVTLPHYLQFTIFHLRSLESLEGQPVTTQDRQEAFERFSLEEVERLERDLEKKMIETEELKSKQTRFLEEIKNQDKLNKSLKEEAMLQKQSCEELKSDLNTKNELLKQKTIELTRACQKQYELEQELAFYKIDAKFEPLNYYPSEYAEIDKAPDESPYIGKSRYKRNMFATESYIIDSAQAVQIKKMEPDEQLRNDHMNLRGHTPLDTQLEDKEKKISAAQTRLSELHDEIEKAEQQILRATEEFKQLEEAIQLKKISEAGKDLLYKQLSGRLQLVNKLRQEALDLELQMEKQKQEIAGKQKEIKDLQIAIDSLDSKDPKHSHMKAQKSGKEQQLDIMNKQYQQLESRLDEILSRIAKETEEIKDLEEQLTEGQIAANEALKKDLEGVISGLQEYLGTIKGQATQAQNECRKLRDEKETLLQRLTEVEQERDQLEIVAMDAENMRKELAELESALQEQHEVNASLQQTQGDLSAYEAELEARLNLRDAEANQLKEELEKVTRLTQLEQSALQAELEKERQALKNALGKAQFSEEKEQENSELHAKLKHLQDDNNLLKQQLKDFQNHLNHVVDGLVRPEEVAARVDELRRKLKLGTGEMNIHSPSDVLGKSLADLQKQFSEILARSKWERDEAQVRERKLQEEMALQQEKLATGQEEFRQACERALEARMNFDKRQHEARIQQMENEIHYLQENLKSMEEIQGLTDLQLQEADEEKERILAQLRELEKKKKLEDAKSQEQVFGLDKELKKLKKAVATSDKLATAELTIAKDQLKSLHGTVMKINQERAEELQEAERFSRKAAQAARDLTRAEAEIELLQNLLRQKGEQFRLEMEKTGVGTGANSQVLEIEKLNETMERQRTEIARLQNVLDLTGSDNKGGFENVLEEIAELRREVSYQNDYISSMADPFKRRGYWYFMPPPPSSKVSSHSSQATKDSGVGLKYSASTPVRKPRPGQQDGKEGSQPPPASGYWVYSPIRSGLHKLFPSRDADSGGDSQEESELDDQEEPPFVPPPGYMMYTVLPDGSPVPQGMALYAPPPPLPNNSRPLTPGTVVYGPPPAGAPMVYGPPPPNFSIPFIPMGVLHCNVPEHHNLENEVSRLEDIMQHLKSKKREERWMRASKRQSEKEMEELHHNIDDLLQEKKSLECEVEELHRTVQKRQQQKDFIDGNVESLMTELEIEKSLKHHEDIVDEIECIEKTLLKRRSELREADRLLAEAESELSCTKEKTKNAVEKFTDAKRSLLQTESDAEELERRAQETAVNLVKADQQLRSLQADAKDLEQHKIKQEEILKEINKIVAAKDSDFQCLSKKKEKLTEELQKLQKDIEMAERNEDHHLQVLKESEVLLQAKRAELEKLKSQVTSQQQEMAVLDRQLGHKKEELHLLQGSMVQAKADLQEALRLGETEVTEKCNHIREVKSLLEELSFQKGELNVQISERKTQLTLIKQEIEKEEENLQVVLRQMSKHKTELKNILDMLQLENHELQGLKLQHDQRVSELEKTQVAVLEEKLELENLQQISQQQKGEIEWQKQLLERDKREIERMTAESRALQSCVECLSKEKEDLQEKCDIWEKKLAQTKRVLAAAEENSKMEQSNLEKLELNVRKLQQELDQLNRDKLSLHNDISAMQQQLQEKREAVNSLQEELANVQDHLNLAKQDLLHTTKHQDVLLSEQTRLQKDISEWANRFEDCQKEEETKQQQLQVLQNEIEENKLKLVQQEMMFQRLQKERESEESKLETSKVTLKEQQHQLEKELTDQKSKLDQVLSKVLAAEERVRTLQEEERWCESLEKTLSQTKRQLSEREQQLVEKSGELLALQKEADSMRADFSLLRNQFLTERKKAEKQVASLKEALKIQRSQLEKNLLEQKQENSCIQKEMATIELVAQDNHERARRLMKELNQMQYEYTELKKQMANQKDLERRQMEISDAMRTLKSEVKDEIRTSLKNLNQFLPELPADLEAILERNENLEGELESLKENLPFTMNEGPFEEKLNFSQVHIMDEHWRGEALREKLRHREDRLKAQLRHCMSKQAEVLIKGKRQTEGTLHSLRRQVDALGELVTSTSADSASSPSLSQLESSLTEDSQLGQNQEKNASAR

SEQ ID NO: 8209 - protein, 906 aa, Homo sapiens
LDRHWTGPAGVSTETIRMSYFGEHFWGEKNHGFEVLYHSVKQGPISTKELADFIRERATIEETYSKAMAKLSKLASNGTPMGTFAPLWEVFRVSSDKLALCHLELTRKLQDLIKDVLRYGEEQLKTHKKCKEEVVSTLDAVQVLSGVSQLLPKSRENYLNRCMDQERLRRESTSQKEMDKAETKTKKAAESLRRSVEKYNSARADFEQKMLDSALRFQAMEETHLRHMKALLGSYAHSVEDTHVQIGQVHEEFKQNIENVSVEMLLRKFAESKGTGREKPGPLDFEAYSAAALQEAMKRLRGAKAFRLPGLSRREREPEPPAAVDFLEPDSGTCPEVDEEGFTVRPDVTQNSTAEPSRFSSSDSDFDDEEPRKFYVHIKPAPARAPACSPEAAAAQLRATAGSLILPPGPGGTMKRHSSRDAAGKPQRPRSAPRTSSCAERLQSEEQVSKNLFGPPLESAFDHEDFTGSSSLGFTSSPSPFSSSSPENVEDSGLDSPSHAAPGPSPDSWVPRPGTPQSPPSCRAPPPEARGIRAPPLPDSPQPLASSPGPWGLEALAGGDLMPAPADPTAREGLAAPPRRLRSRKVSCPLTRSNGDLSRSLSPSPLGSSAASTALERPSFLSQTGHGVSRGPSPVVLGSQDALPIATAFTEYVHAYFRGHSPSCLARVTGELTMTFPAGIVRVFSGTPPPPVLSFRLVHTTAIEHFQPNADLLFSDPSQSDPETKDFWLNMAALTEALQRQAEQNPTASYYNVVLLRYQFSRPGPQSVPLQLSAHWQCGATLTQVSVEYGYRPGATAVPTPLTNVQILLPVGEPVTNVRLQPAATWNLEEKRLTWRLPDVSEAGGSGRLSASWEPLSGPSTPSPVAAQFTSEGTTLSGVDLELVGSGYRMSLVKRRFATGMYLVSC

SEQ ID NO: 8210 - protein, 889 aa, Homo sapiens
MSYFGEHFWGEKNHGFEVLYHSVKQGPISTKELADFIRERATIEETYSKAMAKLSKLASNGTPMGTFAPLWEVFRVSSDKLALCHLELTRKLQDLIKDVLRYGEEQLKTHKKCKEEVVSTLDAVQVLSGVSQLLPKSRENYLNRCMDQERLRRESTSQKEMDKAETKTKKAAESLRRSVEKYNSARADFEQKMLDSALRFQAMEETHLRHMKALLGSYAHSVEDTHVQIGQVHEEFKQNIENVSVEMLLRKFAESKGTGREKPGPLDFEAYSAAALQEAMKRLRGAKAFRLPGLSRREREPEPPAAVDFLEPDSGTCPEVDEEGFTVRPDVTQNSTAEPSRFSSSDSDFDDEEPRKFYVHIKPAPARAPACSPEAAAAQLRATAGSLILPPGPGGTMKRHSSRDAAGKPQRPRSAPRTSSCAERLQSEEQVSKNLFGPPLESAFDHEDFTGSSSLGFTSSPSPFSSSSPENVEDSGLDSPSHAAPGPSPDSWVPRPGTPQSPPSCRAPPPEARGIRAPPLPDSPQPLASSPGPWGLEALAGGDLMPAPADPTAREGLAAPPRRLRSRKVSCPLTRSNGDLSRSLSPSPLGSSAASTALERPSFLSQTGHGVSRGPSPVVLGSQDALPIATAFTEYVHAYFRGHSPSCLARVTGELTMTFPAGIVRVFSGTPPPPVLSFRLVHTTAIEHFQPNADLLFSDPSQSDPETKDFWLNMAALTEALQRQAEQNPTASYYNVVLLRYQFSRPGPQSVPLQLSAHWQCGATLTQVSVEYGYRPGATAVPTPLTNVQILLPVGEPVTNVRLQPAATWNLEEKRLTWRLPDVSEAGGSGRLSASWEPLSGPSTPSPVAAQFTSEGTTLSGVDLELVGSGYRMSLVKRRFATGMYLVSC

SEQ ID NO: 8211 - protein, 1783 aa, Homo sapiens
KQKDYSHVRHFLPNDLEKSNGSNALDMEKYLKKTEVSRYESALENFSRASMSDTWDLSLPKEQTTQDIHPVDLSATSVSVRAPEENTAAIVYVENGESENQESFRTINSSNSVTNRENNSAVVDVKTCSIDNKLQDVGNDEKATSISTPSDSYSSVRNPRITSLCLLKDCEEIRDNRENQRQNECVSEISNSEKHVTFENHRIVSPKNSDLKNTSPEHGGRGSEDEQESFRPSTSPLSHSSPSEISGTSSSGCALESFGSAAQQQQPPCEQELSPLVCSPAGVSRLTYVSEPESSYPTTATDDALEDRKSDITSELSTTIIQGSPAALEERAMEKLREKVPFQNRGKGTLSSIIQNNSDTRKATETTSLSSKPEYVKPDFRWSKDPSSKSGNLLETSEVGWTSNPEELDPIRLALLGKSGLSCQVGSATSHPVSCQEPIDEDQRISPKDKSTAGREFSGQVSHQTTSENQCTPIPSSTVHSSVADMQNMPAAVHALLTQPSLSAAPFAQRYLGTLPSTGSTTLPQCHAGNATVCGFSGGLPYPAVAGEPVQNSVAVGICLGSNIGSGWMGTSSLCNPYSNTLNQNLLSTTKPFPVPSVGTNCGIEPWDSGVTSGLGSVRVPEELKLPHACCVGIASQTLLSVLNPTDRWLQVSIGVLSISVNGEKVDLSTYRCLVFKNKAIIRPHATEEIKVLFIPSSPGVFRCTFSVASWPCSTDAETIVQAEALASTVTLTAIAESPVIEVETEKKDVLDFGDLTYGGWKALPLKLINRTHATVPIRLIINANAVAWRCFTFSKESVRAPVEVAPCADVVTRLAGPSVVNHMMPASYDGQDPEFLMIWVLFHSPKKQISSSDILDSAEEFSAKVDIEVDSPNPTPVLRSVSLRARAGIARIHAPRDLQTMHFLAKVASSRKQHLPLKNAGNIEVYLDIKVPEQGSHFSVDPKNLLLKPGEEHEVIVSFTPKDPEACEERILKIFVQPFGPQYEVVLKGEVISSGSKPLSPGPCLDIPSILSNKQFLAWGGVPLGRTQLQKLALRNNSASTTQHLRLLIRGQDQDCFQLQNTFGSEQRLTSNCEIRIHPKEDIFISVLFAPTRLSCMLARLEIKQLGNRSQPGIKFTIPLSGYGGTSNLILEGVKKLSDSYMVTVNGLVPGKESKIVFSVRNTGSRAAFVKAVGFKDSQKKVLLDPKVLRIFPDKFVLKERTQENVTLIYNPSDRGINNKTATELSTVYLFGGDEISRQQYRRALLHKPEMIKQILPEHSVLQNINFVEAFQDELLVTEVYDLPQRPNDVQLFYGSMCKIILSVIGEFRDCISSREFLQPSSKASLESTSDLGASGKHGGNVSLDVLPVKGPQGSPLLSRAARPPLDQLASEEPWTVLPEHLILVAPSPCDMAKTGRFQIVNNSVRLLRFELCWPAHCLTVTPQHGCVAPESKLQILVSPNSSLSTKQSMFPWSGLIYIHCDDGQKVLVKVQIREDLTQVELLTRLTSKPFGILSPVSEPSVSHLVKPMTKPPSTKVEIRNKSITFPTTEPGETSESCLELENHGTTDVKWHLSSLAPPYVKGVDESGDVFRATYAAFRCSPISGLLESHGIQKVSITFLPRGRGDYAQFWDVECHPLKEPHMKHTLRFQLSGQSIEAENEPENACLSTDSLIKIDHLVKPRRQAVSEASARIPEYLDVTARGVYAPEDVYRFRPTSVGESRTLKVNLRNNSFITHSLKFLSPREPFYVKHSKYSLRAQHYINMPVQFKPKSAGKFEALLVIQTDEGKSIAIRLIGEALGKN

SEQ ID NO: 8212 - protein, 1923 aa, Homo sapiens
MFSRRSHGDVKKSTQKVLDPKKDVLTRLKHLRALLDNVDANDLKQFFETNYSQIYFIFYENFIALENSLKLKGNNKSQREELDSILFLFEKILQFLPERIFFRWHYQSIGSTLKKLLHTGNSIKIRCEGIRLFLLWLQALQTNCAEEQVLIFACLVPGFPAVMSSRGPCTLETLINPSPSVADVKIYPEEITPLLPAISGEKIAEDQTCFFLQILLKYMVIQAASLEWKNKENQDTGFKFLFTLFRKYYLPHLFPSFTKLTNIYKPVLDIPHLRPKPVYITTTRDNENIYSTKIPYMAARVVFIKWIVTFFLEKKYLTATQNTKNGVDVLPKIIQTVGGGAVQERAPELDGGGPTEQDKSHSNSSTLSDRRLSNSSLCSIEEEHRMVYEMVQRILLSTRGYVNFVNEVFHQAFLLPSCEIAVTRKVVQVYRKWILQDKPVFMEEPDRKDVAQEDAEKLGFSETDSKEASSESSGHKRSSSWGRTYSFTSAMSRGCVTEEENTNVKAGVQALLQVFLTNSANIFLLEPCAEVPVLLKEQVDACKAVLIIFRRMIMELTMNKKTWEQMLQILLRITEAVMQKPKDKQIKDLFAQSLAGLLFRTLMVAWIRANLCVYISRELWDDFLGVLSSLTEWEELINEWANIMDSLTAVLARTVYGVEMTNLPLDKLSEQKEKKQRGKGCVLDPQKGTTVGRSFSLSWRSHPDVTEPMRFRSATTSGAPGVEKARNIVRQKATEVEECQQSENAPAAGSGHLTVGQQQQVLRSSSTSDIPEPLCSDSSQGQKAENTQNSSSSEPQPIQENKGHVKREHEGITILVRRSSSPAELDLKDDLQQTQGKCRERQKSESTNSDTTLGCTNEAELSMGPWQTCEEDPELNTPTDVVADADARHWLQLSPTDASNLTDSSECLTDDCSIIAGGSLTGWHPDSAAVLWRRVLGILGDVNNIQSPKIHARVFCYLYELWYKLAKIRDNLAISLDNQSSPSPPVLIPPLRMFASWLFKAATLPNEYKEGKLQAYRLICAMMTRRQDVLPNSDFLVHFYLVMHLGLTSEDQDILNTIIRHCPPRFFSLGFPGFSMLVGDFITAAARVLSTDILTAPRSEAVTVLGSLVCFPNTYQEIPLLQSVPEVNEAITGTEDVKHYLINILLKNATEEPNEYARCIAVCSLGVWICEELAQCTSHPQVKEAINVIGVTLKFPNKIVAQVACDVLQLLVSYWEKLQMFETSLPRKMAEILVATVAFLLPSAEYSSVETDKKFIVSLLLCLLDWCMALPVSVLLHPVSTAVLEEQHSARAPLLDYIYRVLHCCVCGSSTYTQQSHYILTLADLSSTDYDPFLPLANVKSSEPVQYHSSAELGNLLTVEEEKKRRSLELIPLTARMVMAHLVNHLGHYPLSGGPAILHSLVSENHDNAHVEGSELSFEVFRSPNLQLFVFNDSTLISYLQTPTEGPVGGSPVGSLSDVRVIVRDISGKYSWDGKVLYGPLEGCLAPNGRNPSFLISSWHRDTFGPQKDSSQVEEGDDVLDKLLENIGHTSPECLLPSQLNLNEPSLTPCGMNYDQEKEIIEVILRQNAQEDEYIQSHNFDSAMKVTSQGQPSPVEPRGPFYFCRLLLDDLGMNSWDRRKNFHLLKKNSKLLRELKNLDSRQCRETHKIAVFYIAEGQEDKCSILSNERGSQAYEDFVAGLGWEVDLSTHCGFMGGLQRNGSTGQTAPYYATSTVEVIFHVSTRMPSDSDDSLTKKLRHLGNDEVHIVWSEHSRDYRRGIIPTAFGDVSIIIYPMKNHMFFIAITKKPEVPFFGPLFDGAIVSGKLLPSLVCATCINASRAVKCLIPLYQSFYEERALYLEAIIQNHREVMTFEDFAAQVFSPSPSYSLSGTGALASSLSADLEEPLSEEETEHPLLPLPRATKPRISRKFRCCTSALSRSSH

SEQ ID NO: 8213 - protein, 236 aa, Homo sapiens
MVVREASAAQASLSQVLPQLRYLHIFLEQVHTHFQEQSVGERGAAIQLAEGLARQLCTDCQLNKLFYREEFVLATLLDPCFKGKIEAILPWGPTDIDHWKQVLVYKVKEIRVSEYSLNSPSPLQSPRGLCVDPTRVAKSSGVEGRSQGEPLQSSSHSGAFLLAQREKGLLESMGLLASERSGGSLSTKSHWASIIVKKYLWENETVGAQDDPLAYWEKKREAWPPSICLTPHRSLL

SEQ ID NO: 8214 - protein, 475 aa, Homo sapiens
MADMQNLVERLERAVGRLEAVSHTSDMHRGYADSPSKAGAAPYVQAFDSLLAGPVAEYLKISKEIGGDVQKHAEMVHTGLKLERALLVTASQCQQPAENKLSDLLAPISEQIKEVITFREKNRGSKLFNHLSAVSESIQALGWVAMAPKPGPYVKEMNDAAMFYTNRVLKEYKDVDKKHVDWVKAYLSIWTELQAYIKEFHTTGLAWSKTGPVAKELSGLPSGPSAGSGPPPPPPGPPPPPVSTSSGSDESASRSALFAQINQGESITHALKHVSDDMKTHKNPALKAQSGPVRSGPKPFSAPKPQTSPSPKRATKKEPAVLELEGKKWRVENQENVSNLVIEDTELKQVAYIYKCVNTTLQIKGKINSITVDNCKKLGLVFDDVVGIVEIINSKDVKVQVMGKVPTISINKTDGCHAYLSKNSLDCEIVSAKSSEMNVLIPTEGGDFNEFPVPEQFKTLWNGQKLVTTVTEIAG

SEQ ID NO: 8215 - protein, 1482 aa, Homo sapiens
MEPGCDEFLPPPECPVFEPSWAEFQDPLGYIAKIRPIAEKSGICKIRPPADWQPPFAVEVDNFRFTPRVQRLNELEAQTRVKLNYLDQIAKFWEIQGSSLKIPNVERKILDLYSLSKQCNTHPFDNEVKDKEYKPHSIPLRQSVQPSKFSSYSRRAKRLQPDPEPTEEDIEKHPELKKLQIYGPGPKMMGLGLMAKDKDKTVHKKVTCPPTVTVKDEQSGGGNVSSTLLKQHLSLEPCTKTTMQLRKNHSSAQFIDSYICQVCSRGDEDDKLLFCDGCDDNYHIFCLLPPLPEIPRGIWRCPKCILAECKQPPEAFGFEQATQEYSLQSFGEMADSFKSDYFNMPVHMVPTELVEKEFWRLVSSIEEDVTVEYGADIHSKEFGSGFPVSNSKQNLSPEEKEYATSGWNLNVMPVLDQSVLCHINADISGMKVPWLYVGMVFSAFCWHIEDHWSYSINYLHWGEPKTWYGVPSLAAEHLEEVMKMLTPELFDSQPDLLHQLVTLMNPNTLMSHGVPVVRTNQCAGEFVITFPRAYHSGFNQGYNFAEAVNFCTADWLPAGRQCIEHYRRLRRYCVFSHEELICKMAAFPETLDLNLAVAVHKEMFIMVQEERRLRKALLEKGVTEAEREAFELLPDDERQCIKCKTTCFLSALACYDCPDGLVCLSHINDLCKCSSSRQYLRYRYTLDELPTMLHKLKIRAESFDTWANKVRVALEVEDGRKRSFEELRALESEARERRFPNSELLQRLKNCLSEVEACIAQVLGLVSGQVARMDTPQLTLTELRVLLEQMGSLPCAMHQIGDVKDVLEQVEAYQAEAREALATLPSSPGLLRSLLERGQQLGVEVPEAHQLQQQVEQAQWLDEVKQALAPSAHRGSLVIMQGLLVMGAKIASSPSVDKARAELQELLTIAERWEEKAHFCLEARQKHPPATLEAIIRETENIPVHLPNIQALKEALTKAQAWIADVDEIQNGDHYPCLDDLEGLVAVGRDLPVGLEELRQLELQVLTAHSWREKASKTFLKKNSCYTLLEVLCPCADAGSDSTKRSRWMEKALGLYQCDTELLGLSAQDLRDPGSVIVAFKEGEQKEKEGILQLRRTNSAKPSPLAPSLMASSPTSICVCGQVPAGVGVLQCDLCQDWFHGQCVSVPHLLTSPKPSLTSSPLLAWWEWDTKFLCPLCMRSRRPRLETILALLVALQRLPVRLPEGEALQCLTERAIGWQDRARKALASEDVTALLRQLAELRQQLQAKPRPEEASVYTSATACDPIREGSGNNISKVQGLLENGDSVTSPENMAPGKGSDLELLSSLLPQLTGPVLELPEAIRAPLEELMMEGDLLEVTLDENHSIWQLLQAGQPPDLDRIRTLLELEKFEHQGSRTRSRALERRRRRQKVDQGRNVENLVQQELQSKRARSSGIMSQVGREEEHYQEKADRENMFLTPSTDHSPFLKGNQNSLQHKDSGSSAACPSLMPLLQLSYSDEQQL

SEQ ID NO: 8216 - protein, 1539 aa, Homo sapiens
MEPGCDEFLPPPECPVFEPSWAEFQDPLGYIAKIRPIAEKSGICKIRPPADWQPPFAVEVDNFRFTPRVQRLNELEAQTRVKLNYLDQIAKFWEIQGSSLKIPNVERKILDLYSLSKIVIEEGGYEAICKDRRWARVAQRLHYPPGKNIGSLLRSHYERIIYPYEMFQSGANHVQCNTHPFDNEVKDKEYKPHSIPLRQSVQPSKFSSYSRRAKRLQPDPEPTEEDIEKHPELKKLQIYGPGPKMMGLGLMAKDKDKTVHKKVTCPPTVTVKDEQSGGGNVSSTLLKQHLSLEPCTKTTMQLRKNHSSAQFIDSYICQVCSRGDEDDKLLFCDGCDDNYHIFCLLPPLPEIPRGIWRCPKCILAECKQPPEAFGFEQATQEYSLQSFGEMADSFKSDYFNMPVHMVPTELVEKEFWRLVSSIEEDVTVEYGADIHSKEFGSGFPVSNSKQNLSPEEKEYATSGWNLNVMPVLDQSVLCHINADISGMKVPWLYVGMVFSAFCWHIEDHWSYSINYLHWGEPKTWYGVPSLAAEHLEEVMKMLTPELFDSQPDLLHQLVTLMNPNTLMSHGVPVVRTNQCAGEFVITFPRAYHSGFNQGYNFAEAVNFCTADWLPAGRQCIEHYRRLRRYCVFSHEELICKMAAFPETLDLNLAVAVHKEMFIMVQEERRLRKALLEKGVTEAEREAFELLPDDERQCIKCKTTCFLSALACYDCPDGLVCLSHINDLCKCSSSRQYLRYRYTLDELPTMLHKLKIRAESFDTWANKVRVALEVEDGRKRSFEELRALESEARERRFPNSELLQRLKNCLSEVEACIAQVLGLVSGQVARMDTPQLTLTELRVLLEQMGSLPCAMHQIGDVKDVLEQVEAYQAEAREALATLPSSPGLLRSLLERGQQLGVEVPEAHQLQQQVEQAQWLDEVKQALAPSAHRGSLVIMQGLLVMGAKIASSPSVDKARAELQELLTIAERWEEKAHFCLEARQKHPPATLEAIIRETENIPVHLPNIQALKEALTKAQAWIADVDEIQNGDHYPCLDDLEGLVAVGRDLPVGLEELRQLELQVLTAHSWREKASKTFLKKNSCYTLLEVLCPCADAGSDSTKRSRWMEKALGLYQCDTELLGLSAQDLRDPGSVIVAFKEGEQKEKEGILQLRRTNSAKPSPLAPSLMASSPTSICVCGQVPAGVGVLQCDLCQDWFHGQCVSVPHLLTSPKPSLTSSPLLAWWEWDTKFLCPLCMRSRRPRLETILALLVALQRLPVRLPEGEALQCLTERAIGWQDRARKALASEDVTALLRQLAELRQQLQAKPRPEEASVYTSATACDPIREGSGNNISKVQGLLENGDSVTSPENMAPGKGSDLELLSSLLPQLTGPVLELPEAIRAPLEELMMEGDLLEVTLDENHSIWQLLQAGQPPDLDRIRTLLELEKFEHQGSRTRSRALERRRRRQKVDQGRNVENLVQQELQSKRARSSGIMSQVGREEEHYQEKADRENMFLTPSTDHSPFLKGNQNSLQHKDSGSSAACPSLMPLLQLSYSDEQQL

SEQ ID NO: 8217 - protein, 261 aa, Homo sapiens
MDRFLVKGAQGGLLRKQEEQEPTGEEPAVLGGDKESTRKRPRREAPGNGGHSAGPSWRHIRAEGLDCSYTVLFGKAEADEIFQELEKEVEYFTGALARVQVFGKWHSVPRKQATYGDAGLTYTFSGLTLSPKPWIPVLERIRDHVSGVTGQTFNFVLINRYKDGCDHIGEHRDDERELAPGSPIASVSFGACRDFVFRHKDSRGKSPSRRVAVVRLPLAHGSLLMMNHPTNTHWYHSLPVRKKVLAPRVNLTFRKILLTKK

SEQ ID NO: 8218 - protein, 664 aa, Homo sapiens
MVSVEGRAMSFQSIIHLSLDSPVHAVCVLGTEICLDLSGCAPQKCQCFTIHGSGRVLIDVANTVISEKEDATIWWPLSDPTYATVKMTSPSPSVDADKVSVTYYGPNEDAPVGTAVLYLTGIEVSLEVDIYRNGQVEMSSDKQAKPNCCDIAEGLDTWRGGKKWIWGPSGWGAILLVNCNPADVGQQLEDKKTKKVIFSEEITNLSQMTLNVQGPSCILKKYRLVLHTSKEESKKARVYWPQKDNSSTFELVLGPDQHAYTLALLGNHLKETFYVEAIAFPSAEFSGLISYSVSLVEESQDPSIPETVLYKDTVVFRVAPCVFIPCTQDEMAFCYTQAPHKTTSLILDTPQAADLDEFPMKYSLSPGIGYMIQDTEDHKVASMDSIGNLMVSPPVKVQGKEYPLGRVLIGSSFYPSAEGRAMSKTLRDFLYAQQVQAPVELYSDWLMTGHVDEFMCFIPTDDKNEGKKGFLLLLASPSACYKLFREKQKEGYGDALLFDELRADQLLSNGREAKTIDQLLADESLKKQNEYVEKCIHLNRDILKTELGLVEQDIIEIPQLFCLEKLTNIPSDQQPKRSFARPYFPDLLRMIVMGKNLGIPKPFGPQIKGTCCLEEKICCLLEPLGFKCTFINDFDCYLTEVGDICACANIRRVPFAFKWWKMVP

SEQ ID NO: 8219 - protein, 1249 aa, Homo sapiens
MGKDQELLEAARTGNVALVEKLLSGRKGGILGGGSGPLPLSNLLSIWRGPNVNCTDSSGYTALHHAALNGHKDIVLKLLQYEASTNVADNKGYFPIHLAAWKGDVEIVKILIHHGPSHSRVNEQNNENETALHCAAQYGHSEVVAVLLEELTDPTIRNSKLETPLDLAALYGRLRVVKMIISAHPNLMSCNTRKHTPLHLAARNGHKAVVQVLLEAGMDVSCQTEKGSALHEAALFGKVDVVRVLLETGIDANIKDSLGRTVLDILKEHPSQKSLQIATLLQEYLEGVGKYATVLEEPVQEDATQETHISSPVESPSQKTKSETVTGELSKLLDEIKLCQEKDYSFEDLCHTISDHYLDNLSKISEEELGKNGSQSVRTSSTINLSPGEVEEEDDDENTCGPSGLWEALTPCNGCRNLGFPMLAQESYPKKRNYTMEIVPSASLDTFPSENENFLCDLMDTAVTKKPCSLEIARAPSPRTDNASEVAVTTPGTSNHRNSSTGPTPDCSPPSPDTALKNIVKVIRPQPKQRTSIVSSLDFHRMNHNQEYFEINTSTGCTSFTASPPASPPTSSVGTTEVKNEGTNHTDDLSRQDDNDPPKEYDPGQFAGLLHGSSPACESPENPFHLYGKREQCEKGQDEVSLANSPLPFKQSPIENNSEPLVKKIKPKVVSRTIFHKKSNQLENHTIVGTRSTRSGSRNGDQWVMNAGGFVERACTLGRIRSLPKALIDMHLSKSVSKSDSDLIAYPSNEKTSRVNWSESSTAEHSSKGNSERTPSFTSEWEEIDKIMSSIDVGINNELKEMNGETTRPRCPVQTVGQWLESIGLPQYENHLMANGFDNVQFMGSNVMEDQDLLEIGILNSGHRQRILQAIQLLPKMRPIGHDGYHPTSVAEWLDSIELGDYTKAFLINGYTSMDLLKKIWEVELINVLKINLIGHRKRILASLGDRLHDDPPQKPPRSITLREPSGNHTPPQLSPSLSQSTYTTGGSLDVPHIIMQGDARRRRNENYFDDIPRSKLERQMAQTGDWGEPSITLRPPNEATASTPVQYWQHHPEKLIFQSCDYKAFYLGSMLIKELRGTESTQDACAKMRANCQKSTEQMKKVPTIILSVSYKGVKFIDATNKNIIAEHEIRNISCAAQDPEDLSTFAYITKDLKSNHHYCHVFTAFDVNLAYEIILTLGQAFEVAYQLALQARKGGHSSTLPESFENKPSKPIPKPRVSIRKSVDLLHASHTGQEPSERHTEEALRKF

SEQ ID NO: 8220 - protein, 3909 aa, Homo sapiens
MTGDLQPRQVASSPGHPSQPPLEDNTPATRTTKGAREAGGQAQAMELPEAQPRQARDGELKPPSLRGQAPSSTPGKRGSPQTPPGRSPLQAPSRLAGRAEGSPPQRYILGIASSRTKPTLDETPENPQLEAAQLPEVDTPQGPGTGAPLRPGLPRTEAQPAAEELGFHRCFQEPPSSFTSTNYTSPSATPRPPAPGPPQSRGTSPLQPGSYPEYQASGADSWPPAAENSFPGANFGVPPAEPEPIPKGSRPGGSPRGVSFQFPFPALHGASTKPFPADVAGHAFTNGPLVFAFHQPQGAWPEEAVGTGPAYPLPTQPAPSPLPCYQGQPGGLNRHSDLSGALSSPGAAHSAPRPFSDSLHKSLTKILPERPPSAQDGLGSTRGPPSSLPQRHFPGQAYRASGVDTSPGPPDTELAAPGPPPARLPQLWDPTAAPYPTPPGGPLAATRSMFFNGQPSPGQRLCLPQSAPLPWPQVLPTARPSPHGMEMLSRLPFPAGGPEWQGGSQGALGTAGKTPGPREKLPAVRSSQGGSPALFTYNGMTDPGAQPLFFGVAQPQVSPHGTPSLPPPRVVGASPSESPLPSPATNTAGSTCSSLSPMSSSPANPSSEESQLPGPLGPSAFFHPPTHPQETGSPFPSPEPPHSLPTHYQPEPAKAFPFPADGLGAEGAFQCLEETPFPHEGPEVGRGGLQGFPRAPPPYPTHHFSLSSASLDQLDVLLTCRQCDRNYSSLAAFLAHRQFCGLLLARAKDGHQRSPGPPGLPSPPAAPRVPADAHAGLLSHAKTFLLAGDAQAEGKDDPLRTGFLPSLAATPFPLPASDLDMEDDAKLDSLITEALNGMEYQSDNPEIDSSFIDVFADEEPSGPRGPSSGHPLKSKAGVTPESKAPPPLPAATPDPQTPRPGDRGCPARGRPKTRSLGLAPTEADAPSQGRQQRRGKQLKLFRKDLDSGGAAEGSGSGGGGRASGLRPRRNDGLGERPPPRPRRPRTQAPGSRADPAPRVPRAAALPEETRSSRRRRLPPRKDPRKRKARGGAWGKELILKIDRRLREYDFASESEEDEQPPPRGPGFRGRRGRGEKRKEVELTQGPREDEPQKPRKAARQEAGGDGAPANPEEPGGSRPGPGRSPQARGPSRSLETGAAAREGGPKCADRPSVAPKDPLQVPTNTETSEETRPSLDFPQEAKEPETAEESAPDSTEFTEALRSPPAACAGEMGASPGLLIPEQPPPSRHDTGTPKPSGSLANTAPHGSSPTPGVGSLLGGPGGTQAPVSHNSKDPPARQPGEFLAPVANPSSTACPKPSVLSSKISSFGCDPAGFNRDPLGVPVAKKGPQPYSSPHSELFLGPKDLAGCFLEELHPKPSARDAPPASSSCLCQDGEDAGSLEPQLPRSPPGTAETEPGRAASPPTLESSSLFPDLPVDRFDPPLYGSLSANRDSGLPFACADPPQKTVPSDPPYPSFLLLEEVSPMLPSHFPDLSGGKVLSKTCPPERTVVPGAAPSLPGKGSGCSVALMSHLSEDELEIQKLVTELESQLQRSKDTRGAPRELAEAESVGRVELGTGTEPPSQRRTCQATVPHEDTFSAADLTRVGESTAHREGAESAVATVEAVQGRPGGTWPCPASFHPGHAALLPCAQEDLVSGAPFSPRGANFHFQPVQKAGASKTGLCQAEGDSRPPQDVCLPEPSKQPGPQLDAGSLAKCSPDQELSFPKNKEAASSQESEDSLRLLPCEQRGGFLPEPGTADQPHRGAPAPEAFGSPAVHLAPDLAFQGDGAPPLDATWPFGASPSHAAQGHSAGRAGGHLHPTAGRPGFEGNEFAPAGASSLTAPRGREAWLVPVPSPACVSNTHPSRRSQDPALSPPIRQLQLPGPGVAKSKDGILGLQELTPAAQSPPRVNPSGLEGGTVEGGKVACGPAQGSPGGVQVTTLPAVAGHQLGLEADGHWGLLGQAEKTQGQGTANQLQPENGVSPGGTDNHASVNASPKTALTGPTEGAVLLEKCKGSRAAMSLQEEAEPTPSPPSPNRESLALALTAAHSRSGSEGRTPERASSPGLNKPLLATGDSPAPSVGDLAACAPSPTSAAHMPCSLGPLPREDPLTSPSRAQGGLGGQLPASPSCRDPPGPQQLLACSPAWAPLEEADGVQATTDTGAEDSPVAPPSLTTSPCDPKEALAGCLLQGEGSPLEDPSSWPPGSVSAVTCTHSGDTPKDSTLRIPEDSRKEKLWESPGRATSPPLAGAVSPSVAVRATGLSSTPTGDEAQAGRGLPGPDPQSRGAPPHTNPDRMPRGHSSYSPSNTARLGHREGQAVTAVPTEPPTLQGAGPDSPACLEGEMGTSSKEPEDPGTPETGRSGATKMPRVTCPSTGLGLGRTTAPSSTASDFQSDSPQSHRNASHQTPQGDPLGPQDLKQRSRGYKKKPASTENGQWKGQAPHGPVTCEVCAASFRSGPGLSRHKARKHRPHPGAPAEPSPAALPAQQPLEPLAQKCQPPRKKSHRVSGKERPNHSRGDPSHVTQPPPAQGSKEVLRAPGSPHSQQLHPPSPTEHEVDVKTPASKPRPDQAREDELHPKQAEKREGRRWRREPTVDSPSHSEGKSNKKRGKLRGRRLREESILPVSADVISDGRGSRPSPAMASYAASPSHCLSVEGGPEADGEQPPRLATLGPGVMEGAAETDQEALCAGETGAQKPPGDRMLCPGRMDGAALGEQPTGQKGASARGFWGPRETKALGVCKESGSEPAEDSSRAHSRSEEGVWEENTPPLGPLGFPETSSSPADSTTSSCLQGLPDNPDTQGGVQGPEGPTPDASGSSAKDPPSLFDDEVSFSQLFPPGGRLTRKRNPHVYGKRCEKPVLPLPTQPSFEEGGDPTLGPARLPTDLSDSSSLCLCHEDPWEDEDPAGLPESFLLDGFLNSRVPGIDPWAPGLSLWALEPSREAGAEKLPSHCPEDDRPEAIPELHMVPAAWRGLEMPAPADDSSSSLGDVSPEPPSLERERCDGGLPGNTHLLPLRATDFEVLSTKFEMQDLCFLGPFEDPVGLPGPSFLDFEGTASSQGPQSRRTEEAAGAGRAQGRGRPAKGRRASYKCKVCFQRFRSLGELDLHKLAHTPAPPPTCYMCVERRFGSRELLRGHLQERHAQSKAGPWACGMCLKEVADVWMYNEHLREHAVRFARRGQARRSLGDLPGGLEGSSAVAHLLNSITEPAPKHHRGKRSAGKAAGSPGDPWGQEGEAKKDSPGERAKPRARSTPSNPDGAATPDSASATALADAGSPGPPRTTPSPSPDPWAGGEPLLQATPVHEACKDPSRDCHHCGKRFPKPFKLQRHLAVHSPQRVYLCPRCPRVYPEHGELLAHLGGAHGLLERPELQHTPLYACELCATVMRIIKKSFACSSCNYTFAKKEQFDRHMNKHLRGGRQPFAFRGVRRPGAPGQKARALEGTLPSKRRRVAMPGSAPGPGEDRPPPRGSSPILSEGSLPALLHLCSEVAPSTTKGWPETLERPVDPVTHPIRGCELPSNHQECPPPSLSPFPAALADGRGDCALDGALERPENEASPGSPGPLLQQALPLGASLPRPGARGQDAEGKRAPLVFSGKRRAPGARGRCAPDHFQEDHLLQKEKEVSSSHMVSEGGPRGTFHKGSATKPAGCQSSSKDRSAASTPSKALKFPVHPRKAVGSLAPGELARGTENGMKPATPKAKPGPSSQGSGSPRPGTKTGGGSQPQPASGQLQSETATTPAKPSFPSRSPAPERLPARAQAKSCTKGPREAGEQGPHGSLGPKEKGESSTKRKKGQVPGPARSESVGSFGRAPSAPDKPPRTPRKQATPSRVLPTKPKPNSQNKPRPPPSEQRKAEPGHTQRKDRLGKAFPQGRPLLRPPKRGTAVHGAEPAEPHTHRTAEAQSDLLSQLFGQRLTGFKIPLKKDASE

SEQ ID NO: 8221 - protein, 936 aa, Homo sapiens
MLLAPQGRSFSKKRMGLNRWKRFTRKPSPKPTFGPDSVEHWIKRVEKASEFAVSNAFFTRNSDLPRSPWGQITDLKTSEQIEDHDEIYAEAQELVNDWLDTKLKQELASEEEGDAKNTVSSVTIMPEANGHLKYDKFDDLCGYLEEEEESTTVQKFIDHLLHKNVVDSAMMEDLGRKENQDKKQQKDPRLTMEMRHKQVKENRLRREKELEYQRIEKTLKKSAFLEAQCLVQEEKKRKALEAKKEEEEIQREMVKLRREIIERRRTVKAAWKIEKKRQEENSQNSSEKVMFQSTHILPDEEKMVKERKRKLKEVLIQTFKENQQCQKRYFAAWHKLILDHRIKLGKAGTLSDWKIQLKVLRAWRDYTRFQKLERETQALENDLREENRKQQLATEYNRKQVLRHCFTEWQHWHGAELLKRELALTKEETRKKMDALLQAASLGKLSANGLSGISLPEEATAMVGPPVKNGQETAVPPLWEKPPLGSSGCMLSPPLGRTTTGNLQGSLQNVSLSAPGNKQHKTLGAEPSQQPGSNETLRTTSQKAEPLCLGHFHNRHVFQQQLIEKQKKKLQEQQKTILELKKNLQLAEAQWAAEHALAVTEAQSHLLSKPREEEPRTCQMLVNSPVASPGTEGRSDSRNSLSGLRRKPKQLMTPHPILKAMEERAIQRAECRRILAEKKKKQEEEKLAQLKAQEEERQKREAEEKEAQLERKREEKRLKKMKELEKQKRIKRNQQLEAIAKEHYERVLLRKKGLEPWKRLRMQSKQNIQVAEEHYSLFLQRKYMLTWFQRSQESLARKMAQADQFYSQILLKRVIQSWLQYVIDLQEEVRKFCVHFLQKKIFRAWFNMVREVKIDSQGKHEIAAEHSDRRILWITLRTWKKFVKFMKEERVKEERRQQLRRKVVEILPDFQVPGRYHELYQQSDTWSLSKTSLVNE

SEQ ID NO: 8222 - protein, 398 aa, Homo sapiens [sequence omitted]

SEQ ID NO: 8223 - protein, 1821 aa, Homo sapiens
MSCERKGLSELRSELYFLIARFLEDGPCQQAAQVLIREVAEKELLPRRTDWTGKEHPRTYQNLVKYYRHLAPDHLLQICHRLGPLLEQEIPQSVPGVQTLLGAGRQSLLRTNKSCKHVVWKGSALAALHCGRPPESPVNYGSPPSIADTLFSRKLNGKYRLERLVPTAVYQHMKMHKRILGHLSSVYCVTFDRTGRRIFTGSDDCLVKIWATDDGRLLATLRGHAAEISDMAVNYENTMIAAGSCDKMIRVWCLRTCAPLAVLQGHSASITSLQFSPLCSGSKRYLSSTGADGTICFWLWDAGTLKINPRPAKFTERPRPGVQMICSSFSAGGMFLATGSTDHIIRVYFFGSGQPEKISELEFHTDKVDSIQFSNTSNRFVSGSRDGTARIWQFKRREWKSILLDMATRPAGQNLQGIEDKITKMKVTMVAWDRHDNTVITAVNNMTLKVWNSYTGQLIHVLMGHEDEVFVLEPHPFDPRVLFSAGHDGNVIVWDLARGVKIRSYFNMIEGQGHGAVFDCKCSPDGQHFACTDSHGHLLIFGFGSSSKYDKIADQMFFHSDYRPLIRDANNFVLDEQTQQAPHLMPPPFLVDVDGNPHPSRYQRLVPGRENCREEQLIPQMGVTSSGLNQVLSQQANQEISPLDSMIQRLQQEQDLRRSGEAGISNTSRLSRGSISSTSEVHSPPNVGLRRSGQIEGVRQMHSNAPRSEIATERDLVAWSRRVVVPELSAGVASRQEEWRTAKGEEEIKTYRSEEKRKHLTVPKENKIPTVSKNHAHEHFLDLGESKKQQTNQHNYRTRSALEETPRPSEEIENGSSSSDEGEVVAVSGGTSEEEERAWHSDGSSSDYSSDYSDWTADAGINLQPPKKVPKNKTKKAESSSDEEEESEKQKQKQIKKEKKKVNEEKDGPISPKKKKPKERKQKRLAVGELTENGLTLEEWLPSTWITDTIPRRCPFVPQMGDEVYYFRQGHEAYVEMARKNKIYSINPKKQPWHKMELREQELMKIVGIKYEVGLPTLCCLKLAFLDPDTGKLTGGSFTMKYHDMPDVIDFLVLRQQFDDAKYRRWNIGDRFRSVIDDAWWFGTIESQEPLQLEYPDSLFQCYNVCWDNGDTEKMSPWDMELIPNNAVFPEELGTSVPLTDGECRSLIYKPLDGEWGTNPRDEECERIVAGINQLMTLDIASAFVAPVDLQAYPMYCTVVAYPTDLSTIKQRLENRFYRRVSSLMWEVRYIEHNTRTFNEPGSPIVKSAKFVTDLLLHFIKDQTCYNIIPLYNSMKKKVLSDSEDEEKDADVPGTSTRKRKDHQPRRRLRNRAQSYDIQAWKKQCEELLNLIFQCEDSEPFRQPVDLLEYPDYRDIIDTPMDFATVRETLEAGNYESPMELCKDVRLIFSNSKAYTPSKRSRIYSMSLRLSAFFEEHISSVLSDYKSALRFHKRNTITKRRKKRNRSSSVSSSAASSPERKKRILKPQLKSESSTSAFSTPTRSIPPRHNAAQINGKTESSSVVRTRSNRVVVDPVVTEQPSTSSAAKTFITKANASAIPGKTILENSVKHSKALNTLSSPGQSSFSHGTRNNSAKENMEKEKPVKRKMKSSVLPKASTLSKSSAVIEQGDCKNNALVPGTIQVNGHGGQPSKLVKRGPGRKPKVEVNTNSGEIIHKKRGRKPKKLQYAKPEDLEQNNVHPIRDEVLPSSTCNFLSETNNVKEDLLQKKNRGGRKPKRKMKTQKLDADLLVPASVKVLRRSNRKKIDDPIDEEEEFEELKGSEPHMRTRNQGRRTAFYNEDDSEEEQRQLLFEDTSLTFGTSSRGRVRKLTEKAKANLIGW

SEQ ID NO: 8224 - protein, 341 aa, Homo sapiens
MMCDPLDQLATRTQKKKSATSKPPYSFSLLIYMAIEHSPNKCLPVKEIYSWILDHFPYFATAPTGWKNSVRHNLSLNKCFQKVERSHGKVNGKGSLWCVDPEYKPNLIQALKKQPFSSASSQNGSLSPHYLSSVIKQNQVRNLKESDIDAAAAMMLLNTSIEQGILECEKPLPLKTALQKKRSYGNAFHHPSAVRLQESDSLATSIDPKEDHNYSASSMAAQRCASRSSVSSLSSVDEVYEFIPKNSHVGSDGSEGFHSEEDTDVDYEDDPLGDSGYASQPCAKISEKGQSGKKMRKQTCQEIDEELKEAAGSLLHLAGIRTCLGSLISTAKTQNQKQRKK

SEQ ID NO: 8225 - protein, 407 aa, Homo sapiens
MLLSVTSRPGISTFGYNRNNKKPYVSLAQQMAPPSPSNSTPNSSSGSNGNDQLSKTNLYIRGLQPGTTDQDLVKLCQPYGKIVSTKAILDKTTNKCKGYGFVDFDSPSAAQKAVTALKASGVQAQMAKQQEQDPTNLYISNLPLSMDEQELEGMLKPFGQVISTRILRDTSGTSRGVGFARMESTEKCEAIITHFNGKYIKTPPGVPAPSDPLLCKFADGGPKKRQNQGKFVQNGRAWPRNADMGVMALTYDPTTALQNGFYPAPYNITPNRMLAQSALSPYLSSPVSSYQRVTQTSPLQVPNPSWMHHHSYLMQPSGSVLTPGMDHPISLQPASMMGPLTQQLGHLSLSSTGTYMPTAAAMQGAYISQYTPVPSSSVSVEESSGQQNQVAVDAPSEHGVYSFQFNK

SEQ ID NO: 8226 - protein, 439 aa, Homo sapiens
MSKTMAMNLLEDWCRGMEVDIHRSLLVTGIPEDCGQAEIEETLNGVLSPLGPYRVLNKIFVREENVKAALIEVGEGVNLSTIPREFPGRGGVWRVVCRDPTQDAEFLKNLNEFLDAEGRTWEDVVRLLQLNHPTLSQNQHQPPENWAEALGVLLGAVVQIIFCMDAEIRSREEARAQEAAEFEEMAAWALAAGRKVKKEPGLAAEVGSALKAETPNNWNATEDQHEPTKPLVRRAGAKSRSRRKKQKKNSRQEAVPWKKPKGINSNSTANLEDPEVGDAESMAISEPIKGSRKPCVNKEELALKKPMAKCAWKGPREPPQDARAEAESPGGASESDQDGGHESPPKKKAVAWVSAKNPAPMRKKKKVSLGPVSYVLVDSEDGRKKPVMPKKGPGSRREASDQKAPRGQQPAEATASTSRGPKAKPEGSPRRATNESRKV

SEQ ID NO: 8227 - protein, 121 aa, Homo sapiens
MASAATDKTVSKMTYRKSSTCGNGILEPTEQCDCGYKEATNSFKFLDTLTSDSLGNIPILTYQKKNTFNFTLISWHSGLKDRTLLHRVTGLSPSGDTKLPWHTNQPGVQGLRVQAAGFETS

SEQ ID NO: 8228 - protein, 593 aa, Homo sapiens [sequence omitted]

SEQ ID NO: 8229 - protein, 176 aa, Homo sapiens
GDEDGYLSEGIVRTDEEEEEEQDASSNDNFSVCPSNSVNHNSYNGKETKNRWKNNCPFSADENYRPLAKTRQQNISMQRQENLRWVSELSYVEEKEQWQEQINQLKKQLDFSVSICQTLKKALWMSRLPSRLTLRLLKKMNMMNRSYNVTLKRQQKAKMSHWNEKPLVKMTKITVL

SEQ ID NO: 8230 - protein, 428 aa, Homo sapiens
GKSTHNEDQASCEVLTVKKKAGAVTSTPNRNSSKRRSSLPNGEGLQLKENSESEGVSCHYWSLFDGHAGSGAAVVASRLLQHHITEQLQDIVDILKNSAVLPPTCLGEEPENTPANSRTLTRAASLRGGVGAPGSPSTPPTRFFTEKKIPHECLVIGALESAFKEMDLQIERERSSYNISGGCTALIVICLLGKLYVANAGDSRAIIIRNGEIIPMSSEFTPETERQRLQYLAFMQPHLLGNEFTHLEFPRRVQRKELGKKMLYRDFNMTGWAYKTIEDEDLKFPLIYGEGKKARVMATIGVTRGLGDHDLKVHDSNIYIKPFLSSAPEVRIYDLSKYDHGSDDVLILATDGLWDVLSNEEVAEAITQFLPNCDPDDPHRYTLAAQDLVMRARGVLKDRGWRISNDRLGSGDDISVYVIPLIHGNKLS

SEQ ID NO: 8231 - protein, 120 aa, Homo sapiens
MTTCEFEFIFLKEQVTRICNIAPLKAYFSVHKMGKILKKLSNFSFLTHRQSLTLSPRLECSGAISAHCNLHLLGSSNSAASASRVAGTTGACHHAQLIFVFLVETGFHHVGQDGLGLLTS

SEQ ID NO: 8232 - protein, 980 aa, Homo sapiens
MTSPQLEWTLQTLLEQLNEDELKSFKSLLWAFPLEDVLQKTPWSEVEEADGKKLAEILVNTSSENWIRNATVNILEEMNLTELCKMAKAEMMEDGQVQEIDNPELGDAEEDSELAKPGEKEGWRNSMEKQSLVWKNTFWQGDIDNFHDDVTLRNQRFIPFLNPRTPRKLTPYTVVLHGPAGVGKTTLAKKCMLDWTDCNLSPTLRYAFYLSCKELSRMGPCSFAELISKDWPELQDDIPSILAQAQRILFVVDGLDELKVPPGALIQDICGDWEKKKPVPVLLGSLLKRKMLPRAALLVTTRPRALRDLQLLAQQPIYVRVEGFLEEDRRAYFLRHFGDEDQAMRAFELMRSNAALFQLGSAPAVCWIVCTTLKLQMEKGEDPVPTCLTRTGLFLRFLCSRFPQGAQLRGALRTLSLLAAQGLWAQMSVFHREDLERLGVQESDLRLFLDGDILRQDRVSKGCYSFIHLSFQQFLTALFYALEKEEGEDRDGHAWDIGDVQKLLSGEERLKNPDLIQVGHFLFGLANEKRAKELEATFGCRMSPDIKQELLQCKAHLHANKPLSVTDLKEVLGCLYESQEEELAKVVVAPFKEISIHLTNTSEVMHCSFSLKHCQDLQKLSLQVAKGVFLENYMDFELDIEFERCTYLTIPNWARQDLRSLRLWTDFCSLFSSNSNLKFLEVKQSFLSDSSVRILCDHVTRSTCHLQKVEIKNVTPDTAYRDFCLAFIGKKTLTHLTLAGHIEWERTMMLMLCDLLRNHKCNLQYLRLGGHCATPEQWAEFFYVLKANQSLKHLRLSANVLLDEGAMLLYKTMTRPKHFLQMLSLENCRLTEASCKDLAAVLVVSKKLTHLCLAKNPIGDTGVKFLCEGLSYPDCKLQTLVLQQCSITKLGCRYLSEALQEACSLTNLDLSINQIARGLWILCQALENPNCNLKHLRLKTYETNLEIKKLLEEVKEKNPKLTIDCNASGATAPPCCDFFC

SEQ ID NO: 8233 - protein, 393 aa, Homo sapiens [sequence omitted]

SEQ ID NO: 8234 - protein, 257 aa, Homo sapiens
SDEEVEQVEEQYEEEEEAQEEEEVQEDTAEEDAEEEKPRPKLTAPKIPEGEKVDFDDIQKKRQNKDLMELQALIDSHFEARKKEEEELVALKERIEKRRAERAEQQRIRAEKERERQNRLAEEKARREEEDAKRRAEDDLKKKKALSSMGANYSSYLAKADQKRGKKQTAREMKKKILAERRKPLNIDHLGEDKLRDKAKELWETLHQLEIDKFEFGEKLKRQKYDITTLRSRIDQAQKHSKKAGTPAKGKVGGRWK

SEQ ID NO: 8235 - protein, 260 aa, Homo sapiens
SDEEVEQVEEQYEEEEEAQEEAAEVHEEVHEPEEVQEEEKPRPKLTAPKIPEGEKVDFDDIQKKRQNKDLMELQALIDSHFEARKKEEEELVALKERIEKRRAERAEQQRIRAEKERERQNRLAEEKARREEEDAKRRAEDDLKKKKALSSMGANYSSYLAKADQKRGKKQTAREMKKKILAERRKPLNIDHLGEDKLRDKAKELWETLHQLEIDKFEFGEKLKRQKYDITTLRSRIDQAQKHSKKAGTPAKGKVGGRWK

SEQ ID NO: 8236 - protein, 268 aa, Homo sapiens
SDEEVEQVEEQYEEEEEAQEEAAEVHEEVHEPEEVQEDTAEEDAEEEKPRPKLTAPKIPEGEKVDFDDIQKKRQNKDLMELQALIDSHFEARKKEEEELVALKERIEKRRAERAEQQRIRAEKERERQNRLAEEKARREEEDAKRRAEDDLKKKKALSSMGANYSSYLAKADQKRGKKQTAREMKKKILAERRKPLNIDHLGEDKLRDKAKELWETLHQLEIDKFEFGEKLKRQKYDITTLRSRIDQAQKHSKKAGTPAKGKVGGRWK

SEQ ID NO: 8237 - protein, 249 aa, Homo sapiens
SDEEVEQVEEQYEEEEEAQEEEEVQEEEKPRPKLTAPKIPEGEKVDFDDIQKKRQNKDLMELQALIDSHFEARKKEEEELVALKERIEKRRAERAEQQRIRAEKERERQNRLAEEKARREEEDAKRRAEDDLKKKKALSSMGANYSSYLAKADQKRGKKQTAREMKKKILAERRKPLNIDHLGEDKLRDKAKELWETLHQLEIDKFEFGEKLKRQKYDIMNVRARVQMLAKFSKKAGTPAKGKVGGRWK

SEQ ID NO: 8238 - protein, 244 aa, Homo sapiens
SDEEVEQVEEQYEEEEEAQEEEEKPRPKLTAPKIPEGEKVDFDDIQKKRQNKDLMELQALIDSHFEARKKEEEELVALKERIEKRRAERAEQQRIRAEKERERQNRLAEEKARREEEDAKRRAEDDLKKKKALSSMGANYSSYLAKADQKRGKKQTAREMKKKILAERRKPLNIDHLGEDKLRDKAKELWETLHQLEIDKFEFGEKLKRQKYDITTLRSRIDQAQKHSKKAGTPAKGKVGGRWK

SEQ ID NO: 8239 - protein, 398 aa, Homo sapiens
MSVSRTMEDSCELDLVYVTERIIAVSFPSTANEENFRSNLSERRPDITKLHAKVQEFGWPDLHTPALEKICSICKAMDTWLNADPHNVVVLHNKGNRGRIGVVIAAYMHYSNISASADQALDRFAMKRFYEDKIVPIGQPSQRRYVHYFSGLLSGSIKMNNKPLFLHHVIMHGIPNFESKGGCRPFLRIYQAMQPVYTSGIYNIPGDSQTSVCITIEPGLLLKGDILLKCYHKKFRSPARDVIFRVQFHTCAIHDLGVVFGKEDLDDAFKDDRFPEYGKVEFVFSYGPEKIQGMEHLENGPSVSVDYNTSDPLIRWDSYDNFSGHRDDGMEEVVGHTQGPLDGSLYAKVKKKDSLHGSTGAVNATRPTLSATPNHVEHTLSVYLYRWKYTLYFVSSCL

SEQ ID NO: 8240 - protein, 1735 aa, Homo sapiens [sequence omitted]

SEQ ID NO: 8241 - protein, 811 aa, Homo sapiens
MPLSSPNAAATASDMDKNSGSNSSSASSGSSKGQQPPRSASAGPAGESKPKSDGKNSSGSKRYNRKRELSYPKNESFNNQSRRSSSQKSKTFNKMPPQRGGGSSKLFSSSFNGGRRDEVAEAQRAEFSPAQFSGPKKINLNHLLNFTFEPRGQTGHFEGSGHGSWGKRNKWGHKPFNKELFLQANCQFVVSEDQDYTAHFADPDTLVNWDFVEQVRICSHEVPSCPICLYPPTAAKITRCGHIFCWACILHYLSLSEKTWSKCPICYSSVHKKDLKSVVATESHQYVVGDTITMQLMKREKGVLVALPKSKWMNVDHPIHLGDEQHSQYSKFLLASKEQVLHRVVLEEKVALEQQLAEEKHTPESCFIEAAIQELKTREEALSGLAGSRREVTGVVAALEQLVLMAPLAKESVFQPRKGVLEYLSAFDEETTEVCSLDTPSRPLALPLVEEEEAVSEPEPEGLPEACDDLELADDNLKEGTICTESSQQEPITKSGFTRLSSSPCYYFYQAEDGQHMFLHPVNVRCLVREYGSLERSPEKISATVVEIAGYSMSEDVRQRHRYLSHLPLTCEFSICELALQPPVVSKETLEMFSDDIEKRKRQRQKKAREERRRERRIEIEENKKQGKYPEVHIPLENLQQFPAFNSYTCSSDSALGPTSTEGHGALSISPLSRSPGSHADFLLTPLSPTASQGSPSFCVGSLEEDSPFPSFAQMLRVGKAKADVWPKTAPKKDENSLVPPAPVDSDGESDNSDRVPVPSFQNSFSQAIEAAFMKLDTPATSDPLSEEKGGKKRKKQKQKLLFSTSVVHTK

SEQ ID NO: 8242 - protein, 811 aa, Homo sapiens
MPLSSPNAAATASDMDKNSGSNSSSASSGSSKGQQPPRSASAGPAGESKPKSDGKNSSGSKRYNRKRELSYPKNESFNNQSRRSSSQKSKTFNKMPPQRGGGSSKLFSSSFNGGRRDEVAEAQRAEFSPAQFSGPKKINLNHLLNFTFEPRGQTGHFEGSGHGSWGKRNKWGHKPFNKELFLQANCQFVVSEDQDYTAHFADPDTLVNWDFVEQVRICSHEVPSCPICLYPPTAAKITRCGHIFCWACILHYLSLSEKTWSKCPICYSSVHKKDLKSVVATESHQYVVGDTITMQLMKREKGVLVALPKSKWMNVDHPIHLGDEQHSQYSKLLLASKEQVLHRVVLEEKVALEQQLAEEKHTPESCFIEAAIQELKTREEALSGLAGSRREVTGVVAALEQLVLMAPLAKESVFQPRKGVLEYLSAFDEETTEVCSLDTPSRPLALPLVEEEEAVSEPEPEGLPEACDDLELADDNLKEGTICTESSQQEPITKSGFTRLSSSPCYYFYQAEDGQHMFLHPVNVRCLVREYGSLERSPEKISATVVEIAGYSMSEDVRQRHRYLSHLPLTCEFSICELALQPPVVSKETLEMFSDDIEKRKRQRQKKAREERRRERRIEIEENKKQGKYPEVHIPLENLQQFPAFNSYTCSSDSALGPTSTEGHGALSISPLSRSPGSHADFLLTPLSPTASQGSPSFCVGSLEEDSPFPSFAQMLRVGKAKADVWPKTAPKKDENSLVPPAPVDSDGESDNSDRVPVPSFQNSFSQAIEAAFMKLDTPATSDPLSEEKGGKKRKKQKQKLLFSTSVVHTK

SEQ ID NO: 8243 - protein, 290 aa, Homo sapiens
MELPAVGEHVFAVESIEKKRIRKGRVEYLVKWRGWSPKYNTWEPEENILDPRLLIAFQNRERQEQLMGYRKRGPKPKPLVVQVPTFARRSNVLTGLQDSSTDNRAKLDLGAQGKGQGHQYELNSKKHHHHAVGLNLSHVRKRCLSETHGEREPCKKRLTARSISTPTCLGGSPAAERPADLPPAAALRQPEVILLDSDLDEPIDLRSVKSRSEAGEPPSSLQVKPETPASAAVAVAAAAAPTTTAEKPPAEAQDEPAESLSEFKPFFGNIIITDVTANCLTVTFKEYVTV

SEQ ID NO: 8244 - protein, 1063 aa, Homo sapiens
LDSRRLTFQSCAPDPALGICPRLQGCGAWKEAYRGGSKTIQGSRGAPLVIPLSAMSWMFKRDPVWKYLQTVQYGVHGNFPRLSYPTFFPRFEFQDVIPPDDFLTSDEEVDSVLFGSLRGHVVGLRYYTGVVNNNEMVALQRDPNNPYDKNAIKVNNVNGNQVGHLKKELAGALAYIMDNKLAQIEGVVPFGANNAFTMPLHMTFWGKEENRKAVSDQLKKHGFKLGPAPKTLGFNLESGWGSGRAGPSYSMPVHAAVQMTTEQLKTEFDKLFEDLKEDDKTHEMEPAEAIETPLLPHQKQALAWMVSRENSKELPPFWEQRNDLYYNTITNFSEKDRPENVHGGILADDMGLGKTLTAIAVILTNFHDGRPLPIERVKKNLLKKEYNVNDDSMKLGGNNTSEKADGLSKDASRCSEQPSISDIKEKSKFRMSELSSSRPKRRKTAVQYIESSDSEEIETSELPQKMKGKLKNVQSETKGRAKAGSSKVIEDVAFACALTSSVPTTKKKMLKKGACAVEGSKKTDVEERPRTTLIICPLSVLSNWIDQFGQHIKSDVHLNFYVYYGPDRIREPALLSKQDIVLTTYNILTHDYGTKGDSPLHSIRWLRVILDEGHAIRNPNAQQTKAVLDLESERRWVLTGTPIQNSLKDLWSLLSFLKLKPFIDREWWHRTIQRPVTMGDEGGLRRLQSLIKNITLRRTKTSKIKGKPVLELPERKVFIQHITLSDEERKIYQSVKNEGRATIGRYFNEGTVLAHYADVLGLLLRLRQICCHTYLLTNAVSSNGPSGNDTPEELRKKLIRKMKLILSSGSDEECAICLDSLTVPVITHCAHVFCKPCICQVIQNEQPHAKCPLCRNDIHEDNLLECPPEELARDSEKKSDMEWTSSSKINALMHALTDLRKKNPNIKSLVVSQFTTFLSLIEIPLKASGFVFTRLDGSMAQKKRVESIQCFQNTEAGSPTIMLLSLKAGGVGLNLSAASRVFLMDPAWNPAAEDQCFDRCHRLGQKQEVIITKFIVKDSVEENMLKIQNKKRELAAGAFGTKKPNADEMKQAKINEIRTLIDL

SEQ ID NO: 8245 - protein, 626 aa, Homo sapiens
MQRADSEQPSKRPRCDDSPRTPSNTPSAEADWSPGLELHPDYKTWGPEQVCSFLRRGGFEEPVLLKNIRENEITGALLPCLDESRFENLGVSSLGERKKLLSYIQRLVQIHVDTMKVINDPIHGHIELHPLLVRIIDTPQFQRLRYIKQLGGGYYVFPGASHNRFEHSLGVGYLAGCLVHALGEKQPELQISERDVLCVQIAGLCHDLGHGPFSHMFDGRFIPLARPEVKWTHEQGSVMMFEHLINSNGIKPVMEQYGLIPEEDICFIKEQIVGPLESPVEDSLWPYKGRPENKSFLYEIVSNKRNGIDVDKWDYFARDCHHLGIQNNFDYKRFIKFARVCEVDNELRICARDKEVGNLYDMFHTRNSLHRRAYQHKVGNIIDTMITDAFLKADDYIEITGAGGKKYRISTAIDDMEAYTKLTDNIFLEILYSTDPKLKDAREILKQIEYRNLFKYVGETQPTGQIKIKREDYESLPKEVASAKPKVLLDVKLKAEDFIVDVINMDYGMQEKNPIDHVSFYCKTAPNRAIRITKNQVSQLLPEKFAEQLIRVYCKKVDRKSLYAARQYFVQWCADRNFTKPQDGDVIAPLITPQKKEWNDSTSVQNPTRLREASKSRVQLFKDDPM

SEQ ID NO: 8246 - protein, 285 aa, Homo sapiens
MSKKPPNRPGITFEIGARLEALDYLQKWYPSRIEKIDYEEGKMLVHFERWSHRYDEWIYWDSNRLRPLERPALRKEGLKDEEDFFDFKAGEEVLARWTDCRYYPAKIEAINKEGTFTVQFYDGVIRCLKRMHIKAMPEDAKGQDWIALVKAAAAAAAKNKTGSKPRTSANSNKDKDKDERKWFKVPSKKEETSTCIATPDVEKKEDLPTSSETFGLHVENVPKMVFPQPESTLSNKRKNNQGNSFQAKRARLNKITGLLASKAVGVDGAEKKEDYNETAPMLEQV

SEQ ID NO: 8247 - protein, 150 aa, Homo sapiens [sequence omitted]

SEQ ID NO: 8248 - protein, 510 aa, Homo sapiens [sequence omitted]

SEQ ID NO: 8249 - protein, 407 aa, Homo sapiens
MIPKARESFLEKRPDGPHQKEKFIKHIALKTPGDVLRLEDISKEPSDETDGSSAGLAPSNSGNSGHHSTRNSDQIQVAGTKETKMQKPHLPLSQEKSAIKKASNLQKNKTASSTTKEKETKLPLLSRVPSAGSSLVPLNAKNCALPVSKKDKERSSSKECSGHSTESTKHKEHKAKTNKADSNVSSGKISGGPLRSEYGTPTKSPPAALEVVPCIPSPAAPSDKAPSEGESSGNSNAGSSALKRKLRGDFDSDEESLGYNLDSDEEEETLKSLEEIMALNFNQTPAATGKPPALSKGLRSQSSDYTGHVHPGTYTNTLERLVKEMEDTQRFVSIKINLLNLTFCLFVWLTFNLPFLKNHEKLACILDSVVNCVRIRYVGRTQWLMPVITTLWETQARLLEPRSSRLR

SEQ ID NO: 8250 - protein, 698 aa, Homo sapiens
MMRSRSKSPRRPSPTARGANCDVELLKTTTRDREELKCMLEKYERHLAEIQGNVKVLKSERDKIFLLYEQAQEEITRLRREMMKSCKSPKSTTAHAILRRVETERDVAFTDLRRMTTERDSLRERLKIAQETAFNEKAHLEQRIEELECTVHNLDDERMEQMSNMTLMKETISTVEKEMKSLARKAMDTESELGRQKAENNSLRLLYENTEKDLSDTQRHLAKKKYELQLTQEKIMCLDEKIDNFTRQNIAQREEISILGGTLNDLAKEKECLQACLDKKSENIASLGESLAMKEKTISGMKNIIAEMEQASRQCTEALIVCEQDVSRMRRQLDETNDELAQIARERDILAHDNDNLQEQFAKAKQENQALSKKLNDTHNELNDIKQKVQDTNLEVNKLKNILKSEESENRQMMEQLRKANEDAENWENKARQSEADNNTLKLELITAEAEGNRLKEKVDSLNREVEQHLNAERSYKSQISTLHKSVVKMEEELQKVQFEKVSALADLSSTRELCIKLDSSKELLNRQLVAKDQEIEMRENELDSAHSEIELLRSQMANERISMQNLEALLVANRDKEYQSQIALQEKESEIQLLKEHLCLAENKMAIQSRDVAQFRNVVTQLEADLDITKRQLGTERFERERAVQELRRQNYSSNAYHMSSTMKPNTKCHSPERAHHRSPDRGLDRSLEENLCYRDF

SEQ ID NO: 8251 - protein, 699 aa, Homo sapiens [sequence omitted]

SEQ ID NO: 8252 - protein, 5596 aa, Homo sapiens
MEHFLLEVAAAPLRLIAAKNEKSRSELGRFLAKQVWTPQDRQCVLSTLAQLLLDKDCTVLVGRQLRPLLLDLLERNAEAIKAGGQINHDLHERLCVSMSKLIGNHPDVLPFALRYFKDTSPVFQRLFLESSDANPVRYGRRRMKLRDLMEAAFKFLQQEQSVFRELWDWSVCVPLLRSHDTLVRWYTANCLALVTCMNEEHKLSFLKKIFNSDELIHFRLRLLEEAQLQDLEKALVLANPEVSLWRKQKELQYLQGHLVSSDLSPRVTAVCGVVLPGQLPAPGELGGNRSSSREQELALRSYVLVESVCKSLQTLAMAVASQNAVLLEGPIGCGKTSLVEYLAAVTGRTKPPQLLKVQLGDQTDSKMLLGMYRCTDVPGEFVWQPGTLTQAATMGHWILLEDIDYAPLDVVSVLIPLLENGELLIPGRGDCLKVAPGFQFFATRRLLSCGGNWYRPLNSHATLLDKYWTKIHLDNLDKRELNEVLQSRYPSLLAVVDHLLDIYIQLTGEKHHSWSDSSVGCEQAPEEVSEARRENKRPTLEGRELSLRDLLNWCNRIAHSFDSSSLSASLNIFQEALDCFTAMLSEHTSKLKMAEVIGSKLNISRKKAEFFCQLYKPEIVINELDLQVGRVRLLRKQSEAVHLQREKFTFAATRPSSVLIEQLAVCVSKGEPVLLVGETGTGKTSTIQYLAHITGHRLRVVNMNQQSDTADLLGGYKPVDHKLIWLPLREAFEELFAQTFSKKQNFTFLGHIQTCYRQKRWHDLLRLMQHVHKSAVNKDGKDSETGLLIKEKWEAFGLRLNHAQQQMKMTENTLLFAFVEGTLAQAVKKGEWILLDEINLAAPEILECLSGLLEGSSGSLVLLDRGDTEPLVRHPDFRLFACMNPATDVGKRNLPPGIRNRFTELYVEELESKEDLQVLIVDYLKGLSVNKNTVQGIINFYTALRKESGTKLVDGTGHRPHYSLRTLCRALRFAASNPCGNIQRSLYEGFCLGFLTQLDRASHPIVQKLICQHIVPGNVKSLLKQPIPEPKGGRLIQVEGYWIAVGDKEPTIDETYILTSSVKLNLRDIVRVVSAGTYPVLIQGETSVGKTSLIQWLAAATGNHCVRINNHEHTDIQEYIGCYTSDSSGKLVFKEGVLIDAMRKGYWIILDELNLAPTDVLEALNRLLDDNRELLVTETQEVVKAHPRFMLFATQNPPGLYGGRKVLSRAFRNRFVELHFDELPSSELETILHKRCSLPPSYCSKLVKVMLDLQSYRRSSSVFAGKQGFITLRDLFRWAERYRLAEPTEKEYDWLQHLANDGYMLLAGRVRKQEEIDVIQEVLEKHFKKKLCPQSLFSKENVLKLLGKLSTQISTLECNFGHIVWTEGMRRLAMLVGRALEFGEPVLLVGDTGCGKTTICQVFAALANQKLYSVSCHLHMETSDFLGGLRPVRQKPNDKEEIDTSRLFEWHDGPLVQAMKEDGFFLLDEISLADDSVLERLNSVLEVEKSLVLAEKGSPEDKDSEIELLTAGKKFRILATMNPGGDFGKKELSPALRNRFTEIWCPQSTSREDLIQIISHNLRPGLCLGRIDPKGSDIPEVMLDFIDWLTHQEFGRKCVVSIRDILSWVNFMNKMGEEAALKRPEIISTVTSFVHAACLVYIDGIGSGVTSSGFGTALLARKECLKFLIKRLAKIVRLTEYQKNELKIYDRMKAKEFTGIDNLWGIHPFFIPRGPVLHRNNIADYALSAGTTAMNAQRLLRATKLKKPILLEGSPGVGKTSLVGALAKASGNTLVRINLSEQTDITDLFGADLPVEGGKGGEFAWRDGPLLAALKAGHWVVLDELNLASQSVLEGLNACFDHRGEIYVPELGMSFQVQHEKTKIFGCQNPFRQGGGRKGLPRSFLNRFTQVFVDPLTVIDMEFIASTLFPAIEKNIVKKMVAFNNQIDHEVTVEKKWGQKGGPWEFNLRDLFRWCQLMLVDQSPGCYDPGQHVFLVYGERMRTEEDKKKVIAVFKDVFGSNSNPYMGTRLFRITPYDVQLGYSVLSRGSCVPHPSRHPLLLLHQSFQPLESIMKCVQMSWMVILVGPASVGKTSLVQLLAHLTGHTLKIMAMNSAMDTTELLGGFEQVDLIRPWRRLLEKVEGTVRALLRDSLLISADDAEVVLRAWSHFLLTYKPKCLGEGGKAITMEIVNKLEAVLLLMQRLNNKINSYCKAEFAKLVEEFRSFGVKLTQLASGHSHGTFEWVDSMLVQALKSGDWLLMDNVNFCNPSVLDRLNALLEPGGVLTISERGMIDGSTPTITPNPNFRLFLSMDPVHGDISRAMRNRGLEIYISGEGDASTPDNLDLKVLLHSLGLVGNSVCDILLALHTETRSTVVGSPTSSVSTLIQTAILIVQYLQRGLSLDRAFSEACWEVYVCSQHSPANRKLVQALLEKHVSSLRAHETWGDSILGMGLWPDSVPSALFATEDSHLSTVRRDGQILVYCLNRMSMKTSSWTRSQPFTLQDLEKIMQSPSPENLKFNAVEVNTYWIDEPDVLVMAVKLLIERATNQDWMLRVKWLYHLAKNIPQGLESIQIHLEASAASLRNFYSHSLSGAVSNVFKILQPNTTDEFVIPLDPRWNMQALDMIRNLMDFDPQTDQPDQLFALLESAANKTIIYLDREKRVFTEANLVSVGSKKLRESVLRMSFEFHQDPESYHTLPHEIVVNLAAFFELCDALVLLWVQSSQGMVSDASANEILGSLRWRDRFWTVADTVKVDAPGLALLALHWHWVLKHLVHQIPRLLMNYEDKYYKEVQTVSEHIQNCLGSQTGGFAGIKKLQKFLGRPFPFKDKLVVECFSQLKVLNKVLAIREQMSALGESGWQEDINRLQVVASQWTLKKSLLQAWGLILRANILEDVSLDELKNFVHAQCLELKAKGLSLGFLEKKHDEASSLSHPDLTSVIHLTRSVQLWPAMEYLAMLWRYKVTADFMAQACLRRCSKNQQPQINEEISHLISFCLYHTPVTPQELRDLWSLLHHQKVSPEEITSLWSELFNSMFMSFWSSTVTTNPEYWLMWNPLPGMQQREAPKSVLDSTLKGPGNLNRPIFSKCCFEVLTSSWRASPWDVSGLPILSSSHVTLGEWVERTQQLQDISSMLWTNMAISSVAEFRRTDSQLQGQVLFRHLAGLAELLPESRRQEYMQNCEQLLLGSSQAFQHVGQTLGDMAGQEVLPKELLCQLLTSLHHFVGEGESKRSLPEPAQRGSLWVSLGLLQIQTWLPQARFDPAVKREYKLNYVKEELHQLQCEWKTRNLSSQLQTGRDLEDEVVVSYSHPHVRLLRQRMDRLDNLTCHLLKKQAFRPQLPAYESLVQEIHHYVTSIAKAPAVQDLLTRLLQALHIDGPRSAQVAQSLLKEEASWQQSHHQFRKRLSEEYTFYPDAVSPLQASILQLQHGMRLVASELHTSLHSSMVGADRLGTLATALLAFPSVGPTFPTYYAHADTLCSVKSEEVLRGLGKLILKRSGGKELEGKGQKACPTREQLLMNALLYLRSHVLCKGELDQRALQLFRHVCQEIISEWDEQERIAQEKAEQESGLYRYRSRNSRTALSEEEEEEREFRKQFPLHEKDFADILVQPTLEENKGTSDGQEEEAGTNPALLSQNSMQAVMLIHQQLCLNFARSLWYQQTLPPHEAKHYLSLFLSCYQTGASLVTHFYPLMGVELNDRLLGSQLLACTLSHNTLFGEAPSDLMVKPDGPYDFYQHPNVPEARQCQPVLQGFSEAVSHLLQDWPEHPALEQLLVVMDRIRSFPLSSPISKFLNGLEILLAKAQDWEENASRALSLRKHLDLISQMIIRWRKLELNCWSMSLDNTMKRHTEKSTKHWFSIYQMLEKHMQEQTEEQEDDKQMTLMLLVSTLQAFIEGSSLGEFHVRLQMLLVFHCHVLLMPQVEGKDSLCSVLWNLYHYYKQFFDRVQAKIVELRSPLEKELKEFVKISKWNDVSFWSIKQSVEKTHRTLFKFMKKFEAVLSEPCRSSLVESDKEEQPDFLPRPTDGAASELSSIQNLNRALRETLLAQPAAGQATIPEWCQGAAPSGLEGELLRRLPKLRKRMRKMCLTFMKESPLPRLVEGLDQFTGEVISSVSELQSLKVEPSAEKEKQRSEAKHILMQKQRALSDLFKHLAKIGLSYRKGLAWARSKNPQEMLHLHPLDLQSALSIVSSTQEADSRLLTEISSSWDGCQKYFYRSLARHARLNAALATPAKEMGMGNVERCRGFSAHLMKMLVRQRRSLTTLSEQWIILRNLLSCVQEIHSRLMGPQAYPVAFPPQDGVQQWTERLQHLAMQCQILLEQLSWLLQCCPSVGPAPGHGNVQVLGQPPGPCLEGPELSKGQLCGVVLDLIPSNLSYPSPIPGSQLPSGCRMRKQDHLWQQSTTRLTEMLKTIKTVKADVDKIRQQSCETLFHSWKDFEVCSSALSCLSQVSVHLQGLESLFILPGMEVEQRDSQMALVESLEYVRGEISKAMADFTTWKTHLLTSDSQGGNQMLDEGFVEDFSEQMEIAIRAILCAIQNLEERKNEKAEENTDQASPQEDYAGFERLQSGHLTKLLEDDFWADVSTLHVQKIISAISELLERLKSYGEDGTAAKHLFFSQSCSLLVRLVPVLSSYSDLVLFFLTMSLATHRSTAKLLSVLAQVFTELAQKGFCLPKEFMEDSAGEGATEFHDYEGGGIGEGEGMKDVSDQIGNEEQVEDTFQKGQEKDKEDPDSKSDIKGEDNAIEMSEDFDGKMHDGELEEQEEDDEKSDSEGGDLDKHMGDLNGEEADKLDERLWGDDDEEEDEEEEDNKTEETGPGMDEEDSELVAKDDNLDSGNSNKDKSQQDKKEEKEEAEADDGGQGEDKINEQIDERDYDENEVDPYHGNQEKVPEPEALDLPDDLNLDSEDKNGGEDTDNEEGEEENPLEIKEKPEEAGHEAEERGETETDQNESQSPQEPEEGPSEDDKAEGEEEMDTGADDQDGDAAQHPEEHSEEQQQSVEEKDKEADEEGGENGPADQGFQPQEEEEREDSDTEEQVPEALERKEHASCGQTGVENMQNTQAMELAGAAPEKEQGKEEHGSGAADANQAEGHESNFIAQLASQKHTRKNTQSFKRKPGQADNERSMGDHNERVHKRLRTVDTDSHAEQGPAQQPQAQVEDADAFEHIKQGSDAYDAQTYDVASKEQQQSAKDSGKDQEEEEIEDTLMDTEEQEEFKAADVEQLKPEEIKSGTTAPLGFDEMEVEIQTVKTEEDQDPRTDKAHKETENEKPERSRESTIHTAHQFLMDTIFQPFLKDVNELRQELERQLEMWQPRESGNPEEEKVAAEMWQSYLILTAPLSQRLCEELRLILEPTQAAKLKGDYRTGKRLNIRKVIPYIASQFRKDKIWLRRTKPSKRQYQICLAIDDSSSMVDNHTKQLAFESLAVIGNALTLLEVGQIAVCSFGESVKLLHPFHEQFSDYSGSQILRLCKFQQKKTKIAQFLESVANMFAAAQQLSQNISSETAQLLLVVSDGRGLFLEGKERVLAAVQAARNANIFVIFVVLDNPSSRDSILDIKVPIFKGPGEMPEIRSYMEEFPFPYYIILRDVNALPETLSDALRQWFELVTASDHP

SEQ ID NO: 8253 - protein, 389 aa, Homo sapiens
MAPLDIVLLPAKAKDDRTHLQNLMQFSGRKKDQQEEHGAGGPIKFPAGVSPKGDIGGTQSTQILANGKPLSSNHKQRTPYCSSSESQPLQPQKIKLAQKSEIPKCSNSPGPLGKSTVCSATSSQKASLLLEVTQSNVEIITKEKVMVANSFRNKLWNWEKVSSQKSEMSSALLLANYGSKAIHLEGQKGMGLTPEEPRKKLETKGAQTLPSQKHVVAPKILHNVSEDPSFVISQHIRKSWENPPPERSPASSPCQPIYECELASQAPEKQPDVRHHHLPKTKPLPSIDSLGPPPPKPSRPPIVNLQAFQRQPAAVPKTQGEVTVEEGSLSPERLFNAEFEEPHNYEATISYLRHSGNSINLCTAKEIADRKSAKPINSVTLCGMKMCQK

SEQ ID NO: 8254 - protein, 288 aa, Homo sapiens
MKLPIFIADAFTARAFRGNPAAVCLLENELDEDMHQKIAREMNLSETAFIRKLHPTDNFAQSSCFGLRWFTPASEVPLCGHATLASAAVLFHKIKNMNSTLTFVTLSGELRARRAEDGIVLDLPLYPAHPQDFHEVEDLIKTAIGNTLVQDICYSPDTQKLLVRLSDVYNRSFLENLKVNTENLLQVENTGKVKGLILTLKGEPGGQTQAFDFYSRYFAPWVGVAEDPVTGSAHAVLSSYWSQHLGKKEMHAFQCSHRGGELGISLRPDGRVDIRGGAAVVLEGTLTA

SEQ ID NO: 8255 - protein, 255 aa, Homo sapiens
MHQKIAREMNLSETAFIRKLHPTDNFAQSSCFGLRWFTPASEVPLCGHATLASAAVLFHKIKNMNSTLTFVTLSGELRARRAEDGIVLDLPLYPAHPQDFHEVEDLIKTAIGNTLVQDICYSPDTQKLLVRLSDVYNRSFLENLKVNTENLLQVENTGKVKGLILTLKGEPGGQTQAFDFYSRYFAPWVGVAEDPVTGSAHAVLSSYWSQHLGKKEMHAFQCSHRGGELGISLRPDGRVDIRGGAAVVLEGTLTA

SEQ ID NO: 8256 - protein, 433 aa, Homo sapiens
MLELIEVNGTPGSQLSTPRSGKSPSPSPTSPGSLRKQRSSQHGGSSTSLASTKVCSSMDENDGPGEEVSEEGFQIPATITERYKVGRTIGDGNFAVVKECVERSTAREYALKIIKKSKCRGKEHMIQNEVSILRRVKHPNIVLLIEEMDVPTELYLVMELVKGGDLFDAITSTNKYTERDASGMLYNLASAIKYLHSLNIVHRDIKPENLLVYEHQDGSKSLKLGDFGLATIVDGPLYTVCGTPTYVAPEIIAETGYGLKVDIWAAGVITYILLCGFPPFRGSGDDQEVLFDQILMGQVDFPSPYWDNVSDSAKELITMMLLVDVDQRFSAVQVLEHPWVNDDGLPENEHQLSVAGKIKKHFNTGPKPNSTAAGVSVIATTALDKERQVFRRRRNQDVRSRYKAQPAPPELNSESEDYSPSSSETVRSPNSPF

SEQ ID NO: 8257 - protein, 374 aa, Homo sapiens
MAKERRRAVLELLQRPGNARCADCGAPDPDWASYTLGVFICLSCSGIHRNIPQVSKVKSVRLDAWEEAQVEFMASHGNDAARARFESKVPSFYYRPTPSDCQLLREQWIRAKYERQEFIYPEKQEPYSAGYREGFLWKRGRDNGQFLSRKFVLTEREGALKYFNRNDAKEPKAVMKIEHLNATFQPAKIGHPHGLQVTYLKDNSTRNIFIYHEDGKEIVDWFNALRAARFHYLQVAFPGASDADLVPKLSRNYLKEGYMEKTGPKQTEGFRKRWFTMDDRRLMYFKDPLDAFARGEVFIGSKESGYTVLHGFPPSTQGHHWPHGITIVTPDRKFLFACETESDQREWVAAFQKAVDRPMLPQEYAVEAHFKHKP

SEQ ID NO: 8258 - protein, 1943 aa, Homo sapiens
MEENESQKCEPCLPYSADRRQMQEQGKGNLHVTSPEDAECRRTKERLSNGNSRGSVSKSSRNIPRRHTLGGPRSSKEILGMQTSEMDRKREAFLEHLKQKYPHHASAIMGHQERLRDQTRSPKLSHSPQPPSLGDPVEHLSETSADSLEAMSEGDAPTPFSRGSRTRASLPVVRSTNQTKERSLGVLYLQYGDETKQLRMPNEITSADTIRALFVSAFPQQLTMKMLESPSVAIYIKDESRNVYYELNDVRNIQDRSLLKVYNKDPAHAFNHTPKTMNGDMRMQRELVYARGDGPGAPRPGSTAHPPHAIPNSPPSTPVPHSMPPSPSRIPYGGTRSMVVPGNATIPRDRISSLPVSRPISPSPSAILERRDVKPDEDMSGKNIAMYRNEGFYADPYLYHEGRMSIASSHGGHPLDVPDHIIAYHRTAIRSASAYCNPSMQAEMHMEQSLYRQKSRKYPDSHLPTLGSKTPPASPHRVSDLRMIDMHAHYNAHGPPHTMQPDRASPSRQAFKKEPGTLVYIEKPRSAAGLSSLVDLGPPLMEKQVFAYSTATIPKDRETRERMQAMEKQIASLTGLVQSALFKGPITSYSKDASSEKMMKTTANRNHTDSAGTPHVSGGKMLSALESTVPPSQPPPVGTSAIHMSLLEMRRSVAELRLQLQQMRQLQLQNQELLRAMMKKAELEISGKVMETMKRLEDPVQRQRVLVEQERQKYLHEEEKIVKKLCELEDFVEDLKKDSTAASRLVTLKDVEDGAFLLRQVGEAVATLKGEFPTLQNKMRAILRIEVEAVRFLKEEPHKLDSLLKRVRSMTDVLTMLRRHVTDGLLKGTDAAQAAQYMAMEKATAAEVLKSQEEAAHTSGQPFHSTGAPGDAKSEVVPLSGMMVRHAQSSPVVIQPSQHSVALLNPAQNLPHVASSPAVPQEATSTLQMSQAPQSPQIPMNGSAMQSLFIEEIHSVSAKNRAVSIEKAEKKWEEKRQNLDHYNGKEFEKLLEEAQANIMKSIPNLEMPPATGPLPRGDAPVDKVELSEDSPNSEQDLEKLGGKSPPPPPPPPRRSYLPGSGLTTTRSGDVVYTGRKENITAKASSEDAGPSPQTRATKYPAEEPASAWTPSPPPVTTSSSKDEEEEEEEGDKIMAELQAFQKCSFMDVNSNSHAEPSRADSHVKDTRSGATVPPKEKKNLEFFHEDVRKSDVEYENGPQMEFQKVTTGAVRPSDPPKWERGMENSISDASRTSEYKTEIIMKENSISNMSLLRDSRNYSQETVPKASFGFSGISPLEDEINKGSKISGLQYSIPDTENQTLNYGKTKEMEKQNTDKCHVSSHTRLTESSVHDFKTEDQEVITTDFGQVVLRPKEARHANVNPNEDGESSSSSPTEENAATDNIAFMITETTVQVLSSGEVHDIVSQKGEDIQTVNIDARKEMTPRQEGTDNEDPVVCLDKKPVIIIFDEPMDIRSAYKRLSTIFEECDEELERMMMEEKIEEEEEEENGDSVVQNNNTSQMSHKKVAPGNLRTGQQVETKSQPHSLATETRNPGGQEMNRTELNKFSHVDSPNSECKGEDATDDQFESPKKKFKFKFPKKQLAALTQAIRTGTKTGKKTLQVVVYEEEEEDGTLKQHKEAKRFEIARSQPEDTPENTVRRQEQPSIESTSPISRTDEIRKNTYRTLDSLEQTIKQLENTISEMSPKALVDTSCSSNRDSVASSSHIAQEASPRPLLVPDEGPTALEPPTSIPSASRKGSSGAPQTSRMPVPMSAKNRPGTLDKPGKQSKLQDPRQYRQANGSAKKSGGDFKPTSPSLPASKIPALSPSSGKSSSLPSSSGDSSNLPNPPATKPSIASNPLSPQTGPPAHSASLIPSVSNGSLKFQSLTHTGKGHHLSFSPQSQNGRAPPPLSFSSSPPSPASSVSLNQGAKGTRTIHTPSLTSYKAQNGSSSKATPSTAKETS

SEQ ID NO: 8259 - protein, 268 aa, Homo sapiens
AAAAVEEVSSAGQFEELLRLKAKSLLVPQCAQMNEVMAELAKEHPQVSFVKLEAEGVPEVSEKYEIGSVPTFLFFNNSQKIDRLDGTPQEPLCGFSKQMVEIVHKHNISLAVLMSLDQEVRQGLKAYSNWPTYPQLYVSGELIGGLDIIKEIHASEELDIICPKAPKLEERLKVLTNEASMMLFMKGNKQEAKCGFSKQILEILNSTGGEYETFDILEDEGDRQGLKAYSNWPTYPQLYVKGELVGGLDIVKELKENGELLPILRGEN

SEQ ID NO: 8260 - protein, 1956 aa, Homo sapiens
GDRRRAASGGGPGPAVSEMSRWLWPWSNCVKERVCRYLLHHYLGHFFQEHLSLDQLSLDLYKGSVALRDIHLEIWSVNEVLESMESPLELVEGFVGSIEVAVPWAALLTDHCTVRVSGLQLTLQPRRGPAPGAADSQSWASCMTTSLQLAQECLRDGLPEPSEPPQPLEGLEMFAQTIETVLRRIKVTFLDTVVRVEHSPGDGERGVAVEVRVQRLEYCDEAVRDPSQAPPVDVHQPPAFLHKLLQLAGVRLHYEELPAQEEPPEPPLQIGSCSGYMELMVKLKQNEAFPGPKLEVAGQLGSLHLLLTPRQLQQLQELLSAVSLTDHEGLADKLNKSRPLGAEDLWLIEQDLNQQLQAGAVAEPLSPDPLTNPLLNLDNTDLFFSMAGLTSSVASALSELSLSDVDLASSVRSDMASRRLSAQAHPAGKMAPNPLLDTMRPDSLLKMTLGGVTLTLLQTSAPSSGPPDLATHFFTEFDATKDGPFGSRDFHHLRPRFQRACPCSHVRLTGTAVQLSWELRTGSRGRRTTSMEVHFGQLEVLECLWPRGTSEPEYTEILTFPGTLGSQASARPCAHLRHTQILRRVPKSRPRRSVACHCHSELALDLANFQADVELGALDRLAALLRLATVPAEPPAGLLTEPLPAMEQQTVFRLSAPRATLRLRFPIADLRPERDPWAGQAVRAEQLRLELSEPQFRSELSSGPGPPVPTHLELTCSDLHGIYEDGGKPPVPCLRVSKALDPKSTGRKYFLPQVVVTVNPQSSSTQWEVAPEKGEELELSVESPCELREPEPSPFSSKRTMYETEEMVIPGDPEEMRTFQSRTLALSRCSLEVILPSVHIFLPSKEVYESIYNRINNDLLMWEPADLLPTPDPAAQPSGFPGPSGFWHDSFKMCKSAFKLANCFDLTPDSDSDDEDAHFFSVGASGGPQAAAPEAPSLHLQSTFSTLVTVLKGRITALCETKDEGGKRLEAVHGELVLDMEHGTLFSVSQYCGQPGLGYFCLEAEKATLYHRAAVDDYPLPSHLDLPSFAPPAQLAPTIYPSEEGVTERGASGRKGQGRGPHMLSTAVRIHLDPHKNVKEFLVTLRLHKATLRHYMALPEQSWHSQLLEFLDVLDDPVLGYLPPTVITILHTHLFSCSVDYRPLYLPVRVLITAETFTLSSNIIMDTSTFLLRFILDDSALYLSDKCEVETLDLRRDYVCVLDVDLLELVIKTWKGSTEGKLSQPLFELRCSNNVVHVHSCADSCALLVNLLQYVMSTGDLHPPPRPPSPTEIAGQKLSESPASLPSCPPVETALINQRDLADALLDTERSLRELAQPSGGHLPQASPISVYLFPGERSGAPPPSPPVGGPAGSLGSCSEEKEDEREEEGDGDTLDSDEFCILDAPGLGIPPRDGEPVVTQLHPGPIVVRDGYFSRPIGSTDLLRAPAHFPVPSTRVVLREVSLVWHLYGGRDFGPHPGHRARTGLSGPRSSPSRCSGPNRPQNSWRTQGGSGRQHHVLMEIQLSKVSFQHEVYPAEPATGPAAPSQELEERPLSRQVFIVQELEVRDRLASSQINKFLYLHTSERMPRRAHSNMLTIKALHVAPTTNLGGPECCLRVSLMPLRLNVDQDALFFLKDFFTSLVAGINPVVPGETSAEARPETRAQPSSPLEGQAEGVETTGSQEAPGGGHSPSPPDQQPIYFREFRFTSEVPIWLDYHGKHVTMDQVGTFAGLLIGLAQLNCSELKLKRLCCRHGLLGVDKVLGYALNEWLQDIRKNQLPGLLGGVGPMHSVVQLFQGFRDLLWLPIEQYRKDGRLMRGLQRGAASFGSSTASAALELSNRLVQAIQATAETVYDILSPAAPVSRSLQDKRSARRLRRGQQPADLREGVAKAYDTVREGILDTAQTICDVASRGHEQKGLTGAVGGVIRQLPPTVVKPLILATEATSSLLGGMRNQIVPDAHKDHALKWRSDSAQD

SEQ ID NO: 8261 - protein, 133 aa, Homo sapiens
NPTPSISWLKNGREFRGEHRIGGIKLRHQQWSLVMESVVPSDRGNYTCVVENKFGSIRQTYTLDVLERSPHRPILQAGLPANQTAVLGSDVEFHCKVYSDAQPHIQWLKHVEVNGSKTAGANTTDKELEVLSL

SEQ ID NO: 8262 - protein, 160 aa, Homo sapiens
MVNPTVFFDTEPLGRISFELFADKFPKTAGNFHALSTGEKGFGYKGSCFHRIVPGFMCQGGDFTCHDGTGGKSIYREKFDDKNFIRKHTVSGILSMANAGPNANSSQFFICAAKTEWLDGKHVVFSKVKEGMNIVETMECFGSRNGKTSKKITIADCGQL

SEQ ID NO: 8263 - protein, 945 aa, Homo sapiens
MSERAADDVRGEPRRAAAAAGGAAAAAARQQQQQQQQQQPPPPQPQRQQHPPPPPRRTRPEDGGPGAASTSAAAMATVGERRPLPSPEVMLGQSWNLWVEASKLPGKDGTELDESFKEFGKNREVMGLCREDMPIFGFCPAHDDFYLVVCNDCNQVVKPQAFQSHYERRHSSSSKPPLAVPPTSVFSFFPSLSKSKGGSASGSNRSSSGGVLSASSSSSKLLKSPKEKLQLRGNTRPMHPIQQSRVPHGRIMTPSVKVEKIHPKMDGTLLKSAVGPTCPATVSSLVKPGLNCPSIPKPTLPSPGQILNGKGLPAPPTLEKKPEDNSNNRKFLNKRLSEREFDPDIHCGVIDLDTKKPCTRSLTCKTHSLTQRRAVQGRRKRFDVLLAEHKNKTREKELIRHPDSQQPPQPLRDPHPAPPRTSQEPHQNPHGVIPSESKPFVASKPKPHTPSLPRPPGCPAQQGGSAPIDPPPVHESPHPPLPATEPASRLSSEEGEGDDKEESVEKLDCHYSGHHPQPASFCTFGSRQIGRGYYVFDSRWNRLRCALNLMVEKHLNAQLWKKIPPVPSTTSPISTRIPHRTNSVPTSQCGVSYLAAATVSTSPVLLSSTCISPNSKSVPAHGTTLNAQPAASGAMDPVCSMQSRQVSSSSSSPSTPSGLSSVPSSPMSRKPQKLKSSKSLRPKESSGNSTNCQNASSSTSGGSGKKRKNSSPLLVHSSSSSSSSSSSSHSMESFRKNCVAHSGPPYPSTVTSSHSIGLNCVTNKANAVNVRHDQSGRGPPTGSPAESIKRMSVMVNSSDSTLSLGPFIHQSNELPVNSHGSFSHSHTPLDKLIGKKRKCSPSSSSINNSSSKPTKVAKVPAVNNVHMKHTGTIPGAQGLMNSSLLHQDISSPCLRTGISATSPQSPDLKSKGTSLTAENSTGRNNADTFEDKLHLHSALWTPRCL

SEQ ID NO: 8264 - protein, 466 aa, Homo sapiens
MERTKAKTVSFPGSPKALASAQTRLRPWESVVGTENDVALPLAANVSHRARHLCGRRLACRMLSCQGHAACPPLPGRGDLLSNSPVAMEEGLSGGGGGGGGGTRGEGGEQEREEEDLDPFPPARTRAAPATATRRRCPLSISPPAPTRDPGLSAQKVPKTAENFHALNFHAFMERTDLVIRVPAFTEIFQGFMCQGGDFTYHNDTGGKSIYREKFDDENFILKHTGPGILSMANAGPNMNGSQFFICTAKTEWLDGKHVVFGKVKEGMKIMEAMERFGAASQQRQSFDISSGKLDRQLKSSCPQCDKYRGKQVCNSEHKWRNMKQVHHDGSTGLVGAFISPLGETEHDSPKISQTIWLPGDAHALLSVGGHRGFRILGTNPELARDGRRKASCWVREGELENKTAQRQFGSHGIPAPTRGKEKIEDVFFTEASSPWMHLAADPQPALSTSVSASGLSSCFLSILLV

SEQ ID NO: 8265 - protein, 179 aa, Homo sapiens
MQTLIRKVNKNYYASMVNPTVFFDIAVNSEPLGCVSFELFADKLPKTAENFHALSTGEKGFDYEGYCFHRIIPGFVCQGGDFTCHNGTGSKSIYREKFDDENFILKHTGPGILSMANAGPNANGSQFFMCPAKTKWLDGKQVVFGRVKEGMDIVEAMERFVFRNGKTSKKVTIADCGQL

SEQ ID NO: 8266 - protein, 101 aa, Homo sapiens
MWLLENLDSGNCELPFSIYVEKFNNENFILKHTGPGILSMANAGPITNSSQFFICTAKTQWLHGKDVVFGKVKEGMNIVEAMKRFGSSGKTSKKITIADCG

SEQ ID NO: 8267 - protein, 158 aa, Homo sapiens
MVNPTVFFDIAVIDEPLGRVSFKLFADKFPKTTENFHALSTGEKGYGYKGSCFHSIIPGFMCQGGDFTLLNGTGGKSIYREKFDDENFILKHTGPGILSMANAGLNTNGSQFFICTAKTEWWMAACGLWQGERRHEDCGGHGALSVQEWQDQQEDHHC

SEQ ID NO: 8268 - protein, 228 aa, Homo sapiens [sequence omitted]

SEQ ID NO: 8269 - protein, 182 aa, Homo sapiens
MPSPRLQHSKPPRRLSRAQKHSSGSSNTSTANRRAHLRLCLERLKVLIPLGPDCTRHTTLGLLNKAKAHIKKLEEAERKSQHQLENLEREQRFLKWRLEQLQGPQEMERIRMDSIGSTISSDRSDSEREEIEVDVESTEFSHGEVDNISTTSISDIDDHSSLPSIGSDEGYSSASVKLSFTS

SEQ ID NO: 8270 - protein, 3899 aa, Homo sapiens
MEDEERQKKLEAGKAKLAQFRQRKAQSDGQSPSKKQKKKRKTSSSKHDVSAHHDLNIDQSQCNEMYINSSQRVESTVIPESTIMRTLHSGEITSHEQGFSVELESEISTTADDCSSEVNGCSFVMRTGKPTNLLREEEFGVDDSYSEQGAQDSPTHLEMMESELAGKQHEIEELNRELEEMRVTYGTEGLQQLQEFEAAIKQRDGIITQLTANLQQARREKDETMREFLELTEQSQKLQIQFQQLQASETLRNSTHSSTAADLLQAKQQILTHQQQLEEQDHLLEDYQKKKEDFTMQISFLQEKIKVYEMEQDKKVENSNKEEIQEKETIIEELNTKIIEEEKKTLELKDKLTTADKLLGELQEQIVQKNQEIKNMKLELTNSKQKERQSSEEIKQLMGTVEELQKRNHKDSQFETDIVQRMEQETQRKLEQLRAELDEMYGQQIVQMKQELIRQHMAQMEEMKTRHKGEMENALRSYSNITVNEDQIKLMNVAINELNIKLQDTNSQKEKLKEELGLILEEKCALQRQLEDLVEELSFSREQIQRARQTIAEQESKLNEAHKSLSTVEDLKAEIVSASESRKELELKHEAEVTNYKIKLEMLEKEKNAVLDRMAESQEAELERLRTQLLFSHEEELSKLKEDLEIEHRINIEKLKDNLGIHYKQQIDGLQNEMSQKIETMQFEKDNLITKQNQLILEISKLKDLQQSLVNSKSEEMTLQINELQKEIEILRQEEKEKGTLEQEVQELQLKTELLEKQMKEKENDLQEKFAQLEAENSILKDEKKTLEDMLKIHTPVSQEERLIFLDSIKSKSKDSVWEKEIEILIEENEDLKQQCIQLNEEIEKQRNTFSFAEKNFEVNYQELQEEYACLLKVKDDLEDSKNKQELEYKSKLKALNEELHLQRINPTTVKMKSSVFDEDKTFVAETLEMGEVVEKDTTELMEKLEVTKREKLELSQRLSDLSEQLKQKHGEISFLNEEVKSLKQEKEQVSLRCRELEIIINHNRAENVQSCDTQVSSLLDGVVTMTSRGAEGSVSKVNKSFGEESKIMVEDKVSFENMTVGEESKQEQLILDHLPSVTKESSLRATQPSENDKLQKELNVLKSEQNDLRLQMEAQRICLSLVYSTHVDQVREYMENEKDKALCSLKEELIFAQEEKIKELQKIHQLELQTMKTQETGDEGKPLHLLIGKLQKAVSEECSYFLQTLCSVLGEYYTPALKCEVNAEDKENSGDYISENEDPELQDYRYEVQDFQENMHTLLNKVTEEYNKLLVLQTRLSKIWGQQTDGMKLEFGEENLPKEETEFLSIHSQMTNLEDIDVNHKSKLSSLQDLEKTKLEEQVQELESLISSLQQQLKETEQNYEAEIHCLQKRLQAVSESTVPPSLPVDSVVITESDAQRTMYPGSCVKKNIDGTIEFSGEFGVKEETNIVKLLEKQYQEQLEEEVAKVIVSMSIAFAQQTELSRISGGKENTASSKQAHAVCQQEQHYFNEMKLSQDQIGFQTFETVDVKFKEEFKPLSKELGEHGKEILLSNSDPHDIPESKDCVLTISEEMFSKDKTFIVRQSIHDEISVSSMDASRQLMLNEEQLEDMRQELVRQYQEHQQATELLRQAHMRQMERQREDQEQLQEEIKRLNRQLAQRSSIDNENLVSERERVLLEELEALKQLSLAGREKLCCELRNSSTQTQNGNENQGEVEEQTFKEKELDRKPEDVPPEILSNERYALQKANNRLLKILLEVVKTTAAVEETIGRHVLGILDRSSKSQSSASLIWRSEAEASVKSCVHEEHTRVTDESIPSYSGSDMPRNDINMWSKVTEEGTELSQRLVRSGFAGTEIDPENEELMLNISSRLQAAVEKLLEAISETSSQLEHAKVTQTELMRESFRQKQEATESLKCQEELRERLHEESRAREQLAVELSKAEGVIDGYADEKTLFERQIQEKTDIIDRLEQELLCASNRLQELEAEQQQIQEERELLSRQKEAMKAEAGPVEQQLLQETEKLMKEKLEVQCQAEKVRDDLQKQVKALEIDVEEQVSRFIELEQEKNTELMDLRQQNQALEKQLEKMRKFLDEQAIDREHERDVFQQEIQKLEQQLKVVPRFQPISEHQTREVEQLANHLKEKTDKCSELLLSKEQLQRDIQERNEEIEKLEFRVRELEQALLVEDRKHFGAVEAKPELSLEVQLQAERDAIDRKEKEITNLEEQLEQFREELENKNEEVQQLHMQLEIQKKESTTRLQELEQENKLFKDDMEKLGLAIKESDAMSTQDQHVLFGKFAQIIQEKEVEIDQLNEQVTKLQQQLKITTDNKVIEEKNELIRDLETQIECLMSDQECVKRNREEEIEQLNEVIEKLQQELANIGQKTSMNAHSLSEEADSLKHQLDVVIAEKLALEQQVETANEEMTFMKNVLKETNFKMNQLTQELFSLKRERESVEKIQSIPENSVNVAIDHLSKDKPELEVVLTEDALKSLENQTYFKSFEENGKGSIINLETRLLQLESTVSAKDLELTQCYKQIKDMQEQGQFETEMLQKKIVNLQKIVEEKVAAALVSQIQLEAVQEYAKFCQDNQTISSEPERTNIQNLNQLREDELGSDISALTLRISELESQVVEMHTSLILEKEQVEIAEKNVLEKEKKLLELQKLLEGNEKKQREKEKKRSPQDVEVLKTTTELFHSNEESGFFNELEALRAESVATKAELASYKEKAEKLQEELLVKETNMTSLQKDLSQVRDHLAEAKEKLSILEKEDETEVQESKKACMFEPLPIKLSKSIASQTDGTLKISSSNQTPQILVKNAGIQINLQSECSSEEVTEIISQFTEKIEKMQELHAAEILDMESRHISETETLKREHYVAVQLLKEECGTLKAVIQCLRSKEGSSIPELAHSDAYQTREICSSDSGSDWGQGIYLTHSQGFDIASEGRGEESESATDSFPKKIKGLLRAVHNEGMQVLSLTESPYSDGEDHSIQQVSEPWLEERKAYINTISSLKDLITKMQLQREAEVYDSSQSHESFSDWRGELLLALQQVFLEERSVLLAAFRTELTALGTTDAVGLLNCLEQRIQEQGVEYQAAMECLQKADRRSLLSEIQALHAQMNGRKITLKREQESEKPSQELLEYNIQQKQSQMLEMQVELSSMKDRATELQEQLSSEKMVVAELKSELAQTKLELETTLKAQHKHLKELEAFRLEVKDKTDEVHLLNDTLASEQKKSRELQWALEKEKAKLGRSEERDKEELEDLKFSLESQKQRNLQLNLLLEQQKQLLNESQQKIESQRMLYDAQLSEEQGRNLELQVLLESEKVRIREMSSTLDRERELHAQLQSSDGTGQSRPPLPSEDLLKELQKQLEEKHSRIVELLNETEKYKLDSLQTRQQMEKDRQVHRKTLQTEQEANTEGQKKMHELQSKVEDLQRQLEEKRQQVYKLDLEGQRLQGIMQEFQKQELEREEKRESRRILYQNLNEPTTWSLTSDRTRNWVLQQKIEGETKESNYAKLIEMNGGGTGCNHELEMIRQKLQCVASKLQVLPQKASERLQFETADDEDFIWVQENIDEIILQLQKLTGQQGEEPSLVSPSTSCGSLTERLLRQNAELTGHISQLTEEKNDLRNMVMKLEEQIRWYRQTGAGRDNSSRFSLNGGANIEAIIASEKEVWNREKLTLQKSLKRAEAEVYKLKAELRNDSLLQTLSPDSEHVTLKRIYGKYLRAESFRKALIYQKKYLLLLLGGFQECEDATLALLARMGGQPAFTDLEVITNRPKGFTRFRSAVRVSIAISRMKFLVRRWHRVTGSVSININRDGFGLNQGAEKTDSFYHSSGGLELYGEPRHTTYRSRSDLDYIRSPLPFQNRYPGTPADFNPGSLACSQLQNYDPDRALTDYITRLEALQRRLGTIQSGSTTQFHAGMRR

SEQ ID NO: 8271 - protein, 3911 aa, Homo sapiens
MEDEERQKKLEAGKAKIEELSLAFLVRQLAQFRQRKAQSDGQSPSKKQKKKRKTSSSKHDVSAHHDLNIDQSQCNEMYINSSQRVESTVIPESTIMRTLHSGEITSHEQGFSVELESEISTTADDCSSEVNGCSFVMRTGKPTNLLREEEFGVDDSYSEQGAQDSPTHLEMMESELAGKQHEIEELNRELEEMRVTYGTEGLQQLQEFEAAIKQRDGIITQLTANLQQARREKDETMREFLELTEQSQKLQIQFQQLQASETLRNSTHSSTAADLLQAKQQILTHQQQLEEQDHLLEDYQKKKEDFTMQISFLQEKIKVYEMEQDKKVENSNKEEIQEKETIIEELNTKIIEEEKKTLELKDKLTTADKLLGELQEQIVQKNQEIKNMKLELTNSKQKERQSSEEIKQLMGTVEELQKRNHKDSQFETDIVQRMEQETQRKLEQLRAELDEMYGQQIVQMKQELIRQHMAQMEEMKTRHKGEMENALRSYSNITVNEDQIKLMNVAINELNIKLQDTNSQKEKLKEELGLILEEKCALQRQLEDLVEELSFSREQIQRARQTIAEQESKLNEAHKSLSTVEDLKAEIVSASESRKELELKHEAEVTNYKIKLEMLEKEKNAVLDRMAESQEAELERLRTQLLFSHEEELSKLKEDLEIEHRINIEKLKDNLGIHYKQQIDGLQNEMSQKIETMQFEKDNLITKQNQLILEISKLKDLQQSLVNSKSEEMTLQINELQKEIEILRQEEKEKGTLEQEVQELQLKTELLEKQMKEKENDLQEKFAQLEAENSILKDEKKTLEDMLKIHTPVSQEERLIFLDSIKSKSKDSVWEKEIEILIEENEDLKQQCIQLNEEIEKQRNTFSFAEKNFEVNYQELQEEYACLLKVKDDLEDSKNKQELEYKSKLKALNEELHLQRINPTTVKMKSSVFDEDKTFVAETLEMGEVVEKDTTELMEKLEVTKREKLELSQRLSDLSEQLKQKHGEISFLNEEVKSLKQEKEQVSLRCRELEIIINHNRAENVQSCDTQVSSLLDGVVTMTSRGAEGSVSKVNKSFGEESKIMVEDKVSFENMTVGEESKQEQLILDHLPSVTKESSLRATQPSENDKLQKELNVLKSEQNDLRLQMEAQRICLSLVYSTHVDQVREYMENEKDKALCSLKEELIFAQEEKIKELQKIHQLELQTMKTQETGDEGKPLHLLIGKLQKAVSEECSYFLQTLCSVLGEYYTPALKCEVNAEDKENSGDYISENEDPELQDYRYEVQDFQENMHTLLNKVTEEYNKLLVLQTRLSKIWGQQTDGMKLEFGEENLPKEETEFLSIHSQMTNLEDIDVNHKSKLSSLQDLEKTKLEEQVQELESLISSLQQQLKETEQNYEAEIHCLQKRLQAVSESTVPPSLPVDSVVITESDAQRTMYPGSCVKKNIDGTIEFSGEFGVKEETNIVKLLEKQYQEQLEEEVAKVIVSMSIAFAQQTELSRISGGKENTASSKQAHAVCQQEQHYFNEMKLSQDQIGFQTFETVDVKFKEEFKPLSKELGEHGKEILLSNSDPHDIPESKDCVLTISEEMFSKDKTFIVRQSIHDEISVSSMDASRQLMLNEEQLEDMRQELVRQYQEHQQATELLRQAHMRQMERQREDQEQLQEEIKRLNRQLAQRSSIDNENLVSERERVLLEELEALKQLSLAGREKLCCELRNSSTQTQNGNENQGEVEEQTFKEKELDRKPEDVPPEILSNERYALQKANNRLLKILLEVVKTTAAVEETIGRHVLGILDRSSKSQSSASLIWRSEAEASVKSCVHEEHTRVTDESIPSYSGSDMPRNDINMWSKVTEEGTELSQRLVRSGFAGTEIDPENEELMLNISSRLQAAVEKLLEAISETSSQLEHAKVTQTELMRESFRQKQEATESLKCQEELRERLHEESRAREQLAVELSKAEGVIDGYADEKTLFERQIQEKTDIIDRLEQELLCASNRLQELEAEQQQIQEERELLSRQKEAMKAEAGPVEQQLLQETEKLMKEKLEVQCQAEKVRDDLQKQVKALEIDVEEQVSRFIELEQEKNTELMDLRQQNQALEKQLEKMRKFLDEQAIDREHERDVFQQEIQKLEQQLKVVPRFQPISEHQTREVEQLANHLKEKTDKCSELLLSKEQLQRDIQERNEEIEKLEFRVRELEQALLVSADTFQKVEDRKHFGAVEAKPELSLEVQLQAERDAIDRKEKEITNLEEQLEQFREELENKNEEVQQLHMQLEIQKKESTTRLQELEQENKLFKDDMEKLGLAIKESDAMSTQDQHVLFGKFAQIIQEKEVEIDQLNEQVTKLQQQLKITTDNKVIEEKNELIRDLETQIECLMSDQECVKRNREEEIEQLNEVIEKLQQELANIGQKTSMNAHSLSEEADSLKHQLDVVIAEKLALEQQVETANEEMTFMKNVLKETNFKMNQLTQELFSLKRERESVEKIQSIPENSVNVAIDHLSKDKPELEVVLTEDALKSLENQTYFKSFEENGKGSIINLETRLLQLESTVSAKDLELTQCYKQIKDMQEQGQFETEMLQKKIVNLQKIVEEKVAAALVSQIQLEAVQEYAKFCQDNQTISSEPERTNIQNLNQLREDELGSDISALTLRISELESQVVEMHTSLILEKEQVEIAEKNVLEKEKKLLELQKLLEGNEKKQREKEKKRSPQDVEVLKTTTELFHSNEESGFFNELEALRAESVATKAELASYKEKAEKLQEELLVKETNMTSLQKDLSQVRDHLAEAKEKLSILEKEDETEVQESKKACMFEPLPIKLSKSIASQTDGTLKISSSNQTPQILVKNAGIQINLQSECSSEEVTEIISQFTEKIEKMQELHAAEILDMESRHISETETLKREHYVAVQLLKEECGTLKAVIQCLRSKEVFGFYNMCFSTLCDSGSDWGQGIYLTHSQGFDIASEGRGEESESATDSFPKKIKGLLRAVHNEGMQVLSLTESPYSDGEDHSIQQVSEPWLEERKAYINTISSLKDLITKMQLQREAEVYDSSQSHESFSDWRGELLLALQQVFLEERSVLLAAFRTELTALGTTDAVGLLNCLEQRIQEQGVEYQAAMECLQKADRRSLLSEIQALHAQMNGRKITLKREQESEKPSQELLEYNIQQKQSQMLEMQVELSSMKDRATELQEQLSSEKMVVAELKSELAQTKLELETTLKAQHKHLKELEAFRLEVKDKTDEVHLLNDTLASEQKKSRELQWALEKEKAKLGRSEERDKEELEDLKFSLESQKQRNLQLNLLLEQQKQLLNESQQKIESQRMLYDAQLSEEQGRNLELQVLLESEKVRIREMSSTLDRERELHAQLQSSDGTGQSRPPLPSEDLLKELQKQLEEKHSRIVELLNETEKYKLDSLQTRQQMEKDRQVHRKTLQTEQEANTEGQKKMHELQSKVEDLQRQLEEKRQQVYKLDLEGQRLQGIMQEFQKQELEREEKRESRRILYQNLNEPTTWSLTSDRTRNWVLQQKIEGETKESNYAKLIEMNGGGTGCNHELEMIRQKLQCVASKLQVLPQKASERLQFETADDEDFIWVQENIDEIILQLQKLTGQQGEEPSLVSPSTSCGSLTERLLRQNAELTGHISQLTEEKNDLRNMVMKLEEQIRWYRQTGAGRDNSSRFSLNGGANIEAIIASEKEVWNREKLTLQKSLKRAEAEVYKLKAELRNDSLLQTLSPDSEHVTLKRIYGKYLRAESFRKALIYQKKYLLLLLGGFQECEDATLALLARMGGQPAFTDLEVITNRPKGFTRFRSAVRVSIAISRMKFLVRRWHRVTGSVSININRDGFGLNQGAEKTDSFYHSSGGLELYGEPRHTTYRSRSDLDYIRSPLPFQNRYPGTPADFNPGSLACSQLQNYDPDRALTDYITRLEALQRRLGTIQSGSTTQFHAGMRR

SEQ ID NO: 8272 - protein, 3929 aa, Homo sapiens
MEDEERQKKLEAGKAKIEELSLAFLVRQLAQFRQRKAQSDGQSPSKKQKKKRKTSSSKHDVSAHHDLNIDQSQCNEMYINSSQRVESTVIPESTIMRTLHSGEITSHEQGFSVELESEISTTADDCSSEVNGCSFVMRTGKPTNLLREEEFGVDDSYSEQGAQDSPTHLEMMESELAGKQHEIEELNRELEEMRVTYGTEGLQQLQEFEAAIKQRDGIITQLTANLQQARREKDETMREFLELTEQSQKLQIQFQQLQASETLRNSTHSSTAADLLQAKQQILTHQQQLEEQDHLLEDYQKKKEDFTMQISFLQEKIKVYEMEQDKKVENSNKEEIQEKETIIEELNTKIIEEEKKTLELKDKLTTADKLLGELQEQIVQKNQEIKNMKLELTNSKQKERQSSEEIKQLMGTVEELQKRNHKDSQFETDIVQRMEQETQRKLEQLRAELDEMYGQQIVQMKQELIRQHMAQMEEMKTRHKGEMENALRSYSNITVNEDQIKLMNVAINELNIKLQDTNSQKEKLKEELGLILEEKCALQRQLEDLVEELSFSREQIQRARQTIAEQESKLNEAHKSLSTVEDLKAEIVSASESRKELELKHEAEVTNYKIKLEMLEKEKNAVLDRMAESQEAELERLRTQLLFSHEEELSKLKEDLEIEHRINIEKLKDNLGIHYKQQIDGLQNEMSQKIETMQFEKDNLITKQNQLILEISKLKDLQQSLVNSKSEEMTLQINELQKEIEILRQEEKEKGTLEQEVQELQLKTELLEKQMKEKENDLQEKFAQLEAENSILKDEKKTLEDMLKIHTPVSQEERLIFLDSIKSKSKDSVWEKEIEILIEENEDLKQQCIQLNEEIEKQRNTFSFAEKNFEVNYQELQEEYACLLKVKDDLEDSKNKQELEYKSKLKALNEELHLQRINPTTVKMKSSVFDEDKTFVAETLEMGEVVEKDTTELMEKLEVTKREKLELSQRLSDLSEQLKQKHGEISFLNEEVKSLKQEKEQVSLRCRELEIIINHNRAENVQSCDTQVSSLLDGVVTMTSRGAEGSVSKVNKSFGEESKIMVEDKVSFENMTVGEESKQEQLILDHLPSVTKESSLRATQPSENDKLQKELNVLKSEQNDLRLQMEAQRICLSLVYSTHVDQVREYMENEKDKALCSLKEELIFAQEEKIKELQKIHQLELQTMKTQETGDEGKPLHLLIGKLQKAVSEECSYFLQTLCSVLGEYYTPALKCEVNAEDKENSGDYISENEDPELQDYRYEVQDFQENMHTLLNKVTEEYNKLLVLQTRLSKIWGQQTDGMKLEFGEENLPKEETEFLSIHSQMTNLEDIDVNHKSKLSSLQDLEKTKLEEQVQELESLISSLQQQLKETEQNYEAEIHCLQKRLQAVSESTVPPSLPVDSVVITESDAQRTMYPGSCVKKNIDGTIEFSGEFGVKEETNIVKLLEKQYQEQLEEEVAKVIVSMSIAFAQQTELSRISGGKENTASSKQAHAVCQQEQHYFNEMKLSQDQIGFQTFETVDVKFKEEFKPLSKELGEHGKEILLSNSDPHDIPESKDCVLTISEEMFSKDKTFIVRQSIHDEISVSSMDASRQLMLNEEQLEDMRQELVRQYQEHQQATELLRQAHMRQMERQREDQEQLQEEIKRLNRQLAQRSSIDNENLVSERERVLLEELEALKQLSLAGREKLCCELRNSSTQTQNGNENQGEVEEQTFKEKELDRKPEDVPPEILSNERYALQKANNRLLKILLEVVKTTAAVEETIGRHVLGILDRSSKSQSSASLIWRSEAEASVKSCVHEEHTRVTDESIPSYSGSDMPRNDINMWSKVTEEGTELSQRLVRSGFAGTEIDPENEELMLNISSRLQAAVEKLLEAISETSSQLEHAKVTQTELMRESFRQKQEATESLKCQEELRERLHEESRAREQLAVELSKAEGVIDGYADEKTLFERQIQEKTDIIDRLEQELLCASNRLQELEAEQQQIQEERELLSRQKEAMKAEAGPVEQQLLQETEKLMKEKLEVQCQAEKVRDDLQKQVKALEIDVEEQVSRFIELEQEKNTELMDLRQQNQALEKQLEKMRKFLDEQAIDREHERDVFQQEIQKLEQQLKVVPRFQPISEHQTREVEQLANHLKEKTDKCSELLLSKEQLQRDIQERNEEIEKLEFRVRELEQALLVQDRKHFGAVEAKPELSLEVQLQAERDAIDRKEKEITNLEEQLEQFREELENKNEEVQQLHMQLEIQKKESTTRLQELEQENKLFKDDMEKLGLAIKESDAMSTQDQHVLFGKFAQIIQEKEVEIDQLNEQVTKLQQQLKITTDNKVIEEKNELIRDLETQIECLMSDQECVKRNREEEIEQLNEVIEKLQQELANIGQKTSMNAHSLSEEADSLKHQLDVVIAEKLALEQQVETANEEMTFMKNVLKETNFKMNQLTQELFSLKRERESVEKIQSIPENSVNVAIDHLSKDKPELEVVLTEDALKSLENQTYFKSFEENGKGSIINLETRLLQLESTVSAKDLELTQCYKQIKDMQEQGQFETEMLQKKIVNLQKIVEEKVAAALVSQIQLEAVQEYAKFCQDNQTISSEPERTNIQNLNQLREDELGSDISALTLRISELESQVVEMHTSLILEKEQVEIAEKNVLEKEKKLLELQKLLEGNEKKQREKEKKRSPQDVEVLKTTTELFHSNEESGFFNELEALRAESVATKAELASYKEKAEKLQEELLVKETNMTSLQKDLSQVRDHLAEAKEKLSILEKEDETEVQESKKACMFEPLPIKLSKSIASQTDGTLKISSSNQTPQILVKNAGIQINLQSECSSEEVTEIISQFTEKIEKMQELHAAEILDMESRHISETETLKREHYVAVQLLKEECGTLKAVIQCLRSKEGSSIPELAHSDAYQTREICSSDSGSDWGQGIYLTHSQGFDIASEGRGEESESATDSFPKKIKGLLRAVHNEGMQVLSLTESPYSDGEDHSIQQVSEPWLEERKAYINTISSLKDLITKMQLQREAEVYDSSQSHESFSDWRGELLLALQQVFLEERSVLLAAFRTELTALGTTDAVGLLNCLEQRIQEQGVEYQAAMECLQKADRRSLLSEIQALHAQMNGRKITLKREQESEKPSQELLEYNIQQKQSQMLEMQVELSSMKDRATELQEQLSSEKMVVAELKSELAQTKLELETTLKAQHKHLKELEAFRLEVKDKTDEVHLLNDTLASEQKKSRELQWALEKEKAKLGRSEERDKEELEDLKFSLESQKQRNLQLNLLLEQQKQLLNESQQKIESQRMLYDAQLSEEQGRNLELQVLLESEKVRIREMSSTLDRERELHAQLQSSDGTGQSRPPLPSEDLLKELQKQLEEKHSRIVELLNETEKYKLDSLQTRQQMEKDRQVHRKTLQTEQEANTEGQKKMHELQSKVEDLQRQLEEKRQQVYKLDLEGQRLQGIMQEFQKQELEREEKRESRRILYQNLNEPTTWSLTSDRTRNWVLQQKIEGETKESNYAKLIEMNGGGTGCNHELEMIRQKLQCVASKLQVLPQKASERLQFETADDEDFIWVQENIDEIILQLQKLTGQQGEEPSLVSPSTSCGSLTERLLRQNAELTGHISQLTEEKNDLRNMVMKLEEQIRWYRQTGAGRDNSSRFSLNGGANIEAIIASEKEVWNREKLTLQKSLKRAEAEVYKLKAELRNDSLLQTLSPDSEHVTLKRIYGKYLRAESFRKALIYQKKYLLLLLGGFQECEDATLALLARMGGQPAFTDLEVITNRPKGFTRFRSAVRVSIAISRMKFLVRRWHRVTGSVSININRDGFGLNQGAEKTDSFYHSSGGLELYGEPRHTTYRSRSDLDYIRSPLPFQNRYPGTPADFNPGSLACSQLQNYDPDRALTDYITRLEALQRRLGTIQSGALSLTTSWQHHSARPTAPLFFEILSHSLG

SEQ ID NO: 8273 - protein, 3907 aa, Homo sapiens
MEDEERQKKLEAGKAKLAQFRQRKAQSDGQSPSKKQKKKRKTSSSKHDVSAHHDLNIDQSQCNEMYINSSQRVESTVIPESTIMRTLHSGEITSHEQGFSVELESEISTTADDCSSEVNGCSFVMRTGKPTNLLREEEFGVDDSYSEQGAQDSPTHLEMMESELAGKQHEIEELNRELEEMRVTYGTEGLQQLQEFEAAIKQRDGIITQLTANLQQARREKDETMREFLELTEQSQKLQIQFQQLQASETLRNSTHSSTAADLLQAKQQILTHQQQLEEQDHLLEDYQKKKEDFTMQISFLQEKIKVYEMEQDKKVENSNKEEIQEKETIIEELNTKIIEEEKKTLELKDKLTTADKLLGELQEQIVQKNQEIKNMKLELTNSKQKERQSSEEIKQLMGTVEELQKRNHKDSQFETDIVQRMEQETQRKLEQLRAELDEMYGQQIVQMKQELIRQHMAQMEEMKTRHKGEMENALRSYSNITVNEDQIKLMNVAINELNIKLQDTNSQKEKLKEELGLILEEKCALQRQLEDLVEELSFSREQIQRARQTIAEQESKLNEAHKSLSTVEDLKAEIVSASESRKELELKHEAEVTNYKIKLEMLEKEKNAVLDRMAESQEAELERLRTQLLFSHEEELSKLKEDLEIEHRINIEKLKDNLGIHYKQQIDGLQNEMSQKIETMQFEKDNLITKQNQLILEISKLKDLQQSLVNSKSEEMTLQINELQKEIEILRQEEKEKGTLEQEVQELQLKTELLEKQMKEKENDLQEKFAQLEAENSILKDEKKTLEDMLKIHTPVSQEERLIFLDSIKSKSKDSVWEKEIEILIEENEDLKQQCIQLNEEIEKQRNTFSFAEKNFEVNYQELQEEYACLLKVKDDLEDSKNKQELEYKSKLKALNEELHLQRINPTTVKMKSSVFDEDKTFVAETLEMGEVVEKDTTELMEKLEVTKREKLELSQRLSDLSEQLKQKHGEISFLNEEVKSLKQEKEQVSLRCRELEIIINHNRAENVQSCDTQVSSLLDGVVTMTSRGAEGSVSKVNKSFGEESKIMVEDKVSFENMTVGEESKQEQLILDHLPSVTKESSLRATQPSENDKLQKELNVLKSEQNDLRLQMEAQRICLSLVYSTHVDQVREYMENEKDKALCSLKEELIFAQEEKIKELQKIHQLELQTMKTQETGDEGKPLHLLIGKLQKAVSEECSYFLQTLCSVLGEYYTPALKCEVNAEDKENSGDYISENEDPELQDYRYEVQDFQENMHTLLNKVTEEYNKLLVLQTRLSKIWGQQTDGMKLEFGEENLPKEETEFLSIHSQMTNLEDIDVNHKSKLSSLQDLEKTKLEEQVQELESLISSLQQQLKETEQNYEAEIHCLQKRLQAVSESTVPPSLPVDSVVITESDAQRTMYPGSCVKKNIDGTIEFSGEFGVKEETNIVKLLEKQYQEQLEEEVAKVIVSMSIAFAQQTELSRISGGKENTASSKQAHAVCQQEQHYFNEMKLSQDQIGFQTFETVDVKFKEEFKPLSKELGEHGKEILLSNSDPHDIPESKDCVLTISEEMFSKDKTFIVRQSIHDEISVSSMDASRQLMLNEEQLEDMRQELVRQYQEHQQATELLRQAHMRQMERQREDQEQLQEEIKRLNRQLAQRSSIDNENLVSERERVLLEELEALKQLSLAGREKLCCELRNSSTQTQNGNENQGEVEEQTFKEKELDRKPEDVPPEILSNERYALQKANNRLLKILLEVVKTTAAVEETIGRHVLGILDRSSKSQSSASLIWRSEAEASVKSCVHEEHTRVTDESIPSYSGSDMPRNDINMWSKVTEEGTELSQRLVRSGFAGTEIDPENEELMLNISSRLQAAVEKLLEAISETSSQLEHAKVTQTELMRESFRQKQEATESLKCQEELRERLHEESRAREQLAVELSKAEGVIDGYADEKTLFERQIQEKTDIIDRLEQELLCASNRLQELEAEQQQIQEERELLSRQKEAMKAEAGPVEQQLLQETEKLMKEKLEVQCQAEKVRDDLQKQVKALEIDVEEQVSRFIELEQEKNTELMDLRQQNQALEKQLEKMRKFLDEQAIDREHERDVFQQEIQKLEQQLKVVPRFQPISEHQTREVEQLANHLKEKTDKCSELLLSKEQLQRDIQERNEEIEKLEFRVRELEQALLVSADTFQKVEDRKHFGAVEAKPELSLEVQLQAERDAIDRKEKEITNLEEQLEQFREELENKNEEVQQLHMQLEIQKKESTTRLQELEQENKLFKDDMEKLGLAIKESDAMSTQDQHVLFGKFAQIIQEKEVEIDQLNEQVTKLQQQLKITTDNKVIEEKNELIRDLETQIECLMSDQECVKRNREEEIEQLNEVIEKLQQELANIGQKTSMNAHSLSEEADSLKHQLDVVIAEKLALEQQVETANEEMTFMKNVLKETNFKMNQLTQELFSLKRERESVEKIQSIPENSVNVAIDHLSKDKPELEVVLTEDALKSLENQTYFKSFEENGKGSIINLETRLLQLESTVSAKDLELTQCYKQIKDMQEQGQFETEMLQKKIVNLQKIVEEKVAAALVSQIQLEAVQEYAKFCQDNQTISSEPERTNIQNLNQLREDELGSDISALTLRISELESQVVEMHTSLILEKEQVEIAEKNVLEKEKKLLELQKLLEGNEKKQREKEKKRSPQDVEVLKTTTELFHSNEESGFFNELEALRAESVATKAELASYKEKAEKLQEELLVKETNMTSLQKDLSQVRDHLAEAKEKLSILEKEDETEVQESKKACMFEPLPIKLSKSIASQTDGTLKISSSNQTPQILVKNAGIQINLQSECSSEEVTEIISQFTEKIEKMQELHAAEILDMESRHISETETLKREHYVAVQLLKEECGTLKAVIQCLRSKEGSSIPELAHSDAYQTREICSSDSGSDWGQGIYLTHSQGFDIASEGRGEESESATDSFPKKIKGLLRAVHNEGMQVLSLTESPYSDGEDHSIQQVSEPWLEERKAYINTISSLKDLITKMQLQREAEVYDSSQSHESFSDWRGELLLALQQVFLEERSVLLAAFRTELTALGTTDAVGLLNCLEQRIQEQGVEYQAAMECLQKADRRSLLSEIQALHAQMNGRKITLKREQESEKPSQELLEYNIQQKQSQMLEMQVELSSMKDRATELQEQLSSEKMVVAELKSELAQTKLELETTLKAQHKHLKELEAFRLEVKDKTDEVHLLNDTLASEQKKSRELQWALEKEKAKLGRSEERDKEELEDLKFSLESQKQRNLQLNLLLEQQKQLLNESQQKIESQRMLYDAQLSEEQGRNLELQVLLESEKVRIREMSSTLDRERELHAQLQSSDGTGQSRPPLPSEDLLKELQKQLEEKHSRIVELLNETEKYKLDSLQTRQQMEKDRQVHRKTLQTEQEANTEGQKKMHELQSKVEDLQRQLEEKRQQVYKLDLEGQRLQGIMQEFQKQELEREEKRESRRILYQNLNEPTTWSLTSDRTRNWVLQQKIEGETKESNYAKLIEMNGGGTGCNHELEMIRQKLQCVASKLQVLPQKASERLQFETADDEDFIWVQENIDEIILQLQKLTGQQGEEPSLVSPSTSCGSLTERLLRQNAELTGHISQLTEEKNDLRNMVMKLEEQIRWYRQTGAGRDNSSRFSLNGGANIEAIIASEKEVWNREKLTLQKSLKRAEAEVYKLKAELRNDSLLQTLSPDSEHVTLKRIYGKYLRAESFRKALIYQKKYLLLLLGGFQECEDATLALLARMGGQPAFTDLEVITNRPKGFTRFRSAVRVSIAISRMKFLVRRWHRVTGSVSININRDGFGLNQGAEKTDSFYHSSGGLELYGEPRHTTYRSRSDLDYIRSPLPFQNRYPGTPADFNPGSLACSQLQNYDPDRALTDYITRLEALQRRLGTIQSGSTTQFHAGMRR

SEQ ID NO: 8274 - protein, 3857 aa, Homo sapiens
MEDEERQKKLEAGKAKIEELSLAFLVRQLAQFRQRKAQSDGQSPSKKQKKKRKTSSSKHDVSAHHDLNIDQSQCNEMYINSSQRVESTVIPESTIMRTLHSGEITSHEQGFSVELESEISTTADDCSSEVNGCSFVMRTGKPTNLLREEEFGVDDSYSEQGAQDSPTHLEMMESELAGKQHEIEELNRELEEMRVTYGTEGLQQLQEFEAAIKQRDGIITQLTANLQQARREKDETMREFLELTEQSQKLQIQFQQLQASETLRNSTHSSTAADLLQAKQQILTHQQQLEEQDHLLEDYQKKKEDFTMQISFLQEKIKVYEMEQDKKVENSNKEEIQEKETIIEELNTKIIEEEKKTLELKDKLTTADKLLGELQEQIVQKNQEIKNMKLELTNSKQKERQSSEEIKQLMGTVEELQKRNHKDSQFETDIVQRMEQETQRKLEQLRAELDEMYGQQIVQMKQELIRQHMAQMEEMKTRHKGEMENALRSYSNITVNEDQIKLMNVAINELNIKLQDTNSQKEKLKEELGLILEEKCALQRQLEDLVEELSFSREQIQRARQTIAEQESKLNEAHKSLSTVEDLKAEIVSASESRKELELKHEAEVTNYKIKLEMLEKEKNAVLDRMAESQEAELERLRTQLLFSHEEELSKLKEDLEIEHRINIEKLKDNLGIHYKQQIDGLQNEMSQKIETMQFEKDNLITKQNQLILEISKLKDLQQSLVNSKSEEMTLQINELQKEIEILRQEEKEKGTLEQEVQELQLKTELLEKQMKEKENDLQEKFAQLEAENSILKDEKKTLEDMLKIHTPVSQEERLIFLDSIKSKSKDSVWEKEIEILIEENEDLKQQCIQLNEEIEKQRNTFSFAEKNFEVNYQELQEEYACLLKVKDDLEDSKNKQELEYKSKLKALNEELHLQRINPTTVKMKSSVFDEDKTFVAETLEMGEVVEKDTTELMEKLEVTKREKLELSQRLSDLSEQLKQKHGEISFLNEEVKSLKQEKEQVSLRCRELEIIINHNRAENVQSCDTQVSSLLDGVVTMTSRGAEGSVSKVNKSFGEESKIMVEDKVSFENMTVGEESKQEQLILDHLPSVTKESSLRATQPSENDKLQKELNVLKSEQNDLRLQMEAQRICLSLVYSTHVDQVREYMENEKDKALCSLKEELIFAQEEKIKELQKIHQLELQTMKTQETGDEGKPLHLLIGKLQKAVSEECSYFLQTLCSVLGEYYTPALKCEVNAEDKENSGDYISENEDPELQDYRYEVQDFQENMHTLLNKVTEEYNKLLVLQTRLSKIWGQQTDGMKLEFGEENLPKEETEFLSIHSQMTNLEDIDVNHKSKLSSLQDLEKTKLEEQVQELESLISSLQQQLKETEQNYEAEIHCLQKRLQAVSESTVPPSLPVDSVVITESDAQRTMYPGSCVKKNIDGTIEFSGEFGVKEETNIVKLLEKQYQEQLEEEVAKVIVSMSIAFAQQTELSRISGGKENTASSKQAHAVCQQEQHYFNEMKLSQDQIGFQTFETVDVKFKEEFKPLSKELGEHGKEILLSNSDPHDIPESKDCVLTISEEMFSKDKTFIVRQSIHDEISVSSMDASRQLMLNEEQLEDMRQELVRQYQEHQQATELLRQAHMRQMERQREDQEQLQEEIKRLNRQLAQRSSIDNENLVSERERVLLEELEALKQLSLAGREKLCCELRNSSTQTQNGNENQGEVEEQTFKEKELDRKPEDVPPEILSNERYALQKANNRLLKILLEVVKTTAAVEETIGRHVLGILDRSSKSQSSASLIWRSEAEASVKSCVHEEHTRVTDESIPSYSGSDMPRNDINMWSKVTEEGTELSQRLVRSGFAGTEIDPENEELMLNISSRLQAAVEKLLEAISETSSQLEHAKVTQTELMRESFRQKQEATESLKCQEELRERLHEESRAREQLAVELSKAEGVIDGYADEKTLFERQIQEKTDIIDRLEQELLCASNRLQELEAEQQQIQEERELLSRQKEAMKAEAGPVEQQLLQETEKLMKEKLEVQCQAEKVRDDLQKQVKALEIDVEEQVSRFIELEQEKNTELMDLRQQNQALEKQLEKMRKFLDEQAIDREHERDVFQQEIQKLEQQLKVVPRFQPISEHQTREVEQLANHLKEKTDKCSELLLSKEQLQRDIQERNEEIEKLEFRVRELEQALLVSADTFQKVEDRKHFGAVEAKPELSLEVQLQAERDAIDRKEKEITNLEEQLEQFREELENKNEEVQQLHMQLEIQKKESTTRLQELEQENKLFKDDMEKLGLAIKESDAMSTQDQHVLFGKFAQIIQEKEVEIDQLNEQVTKLQQQLKITTDNKVIEEKNELIRDLETQIECLMSDQECVKRNREEEIEQLNEVIEKLQQELANIGQKTSMNAHSLSEEADSLKHQLDVVIAEKLALEQQVETANEEMTFMKNVLKETNFKMNQLTQELFSLKRERESVEKIQSIPENSVNVAIDHLSKDKPELEVVLTEDALKSLENQTYFKSFEENGKGSIINLETRLLQLESTVSAKDLELTQCYKQIKDMQEQGQFETEMLQKKIVNLQKIVEEKVAAALVSQIQLEAVQEYAKFCQDNQTISSEPERTNIQNLNQLREDELGSDISALTLRISELESQVVEMHTSLILEKEQVEIAEKNVLEKEKKLLELQKLLEGNEKKQREKEKKRSPQDVEVLKTTTELFHSNEESGFFNELEALRAESVATKAELASYKEKAEKLQEELLVKETNMTSLQKDLSQVRDHLAEAKEKLSILEKEDETEVQESKKACMFEPLPIKLSKSIASQTDGTLKISSSNQTPQILVKNAGIQINLQSECSSEEVTEIISQFTEKIEKMQELHAAEILDMESRHISETETLKREHYVAVQLLKEECGTLKAVIQCLRSKEGLLRAVHNEGMQVLSLTESPYSDGEDHSIQQVSEPWLEERKAYINTISSLKDLITKMQLQREAEVYDSSQSHESFSDWRGELLLALQQVFLEERSVLLAAFRTELTALGTTDAVGLLNCLEQRIQEQGVEYQAAMECLQKADRRSLLSEIQALHAQMNGRKITLKREQESEKPSQELLEYNIQQKQSQMLEMQVELSSMKDRATELQEQLSSEKMVVAELKSELAQTKLELETTLKAQHKHLKELEAFRLEVKDKTDEVHLLNDTLASEQKKSRELQWALEKEKAKLGRSEERDKEELEDLKFSLESQKQRNLQLNLLLEQQKQLLNESQQKIESQRMLYDAQLSEEQGRNLELQVLLESEKVRIREMSSTLDRERELHAQLQSSDGTGQSRPPLPSEDLLKELQKQLEEKHSRIVELLNETEKYKLDSLQTRQQMEKDRQVHRKTLQTEQEANTEGQKKMHELQSKVEDLQRQLEEKRQQVYKLDLEGQRLQGIMQEFQKQELEREEKRESRRILYQNLNEPTTWSLTSDRTRNWVLQQKIEGETKESNYAKLIEMNGGGTGCNHELEMIRQKLQCVASKLQVLPQKASERLQFETADDEDFIWVQENIDEIILQLQKLTGQQGEEPSLVSPSTSCGSLTERLLRQNAELTGHISQLTEEKNDLRNMVMKLEEQIRWYRQTGAGRDNSSRFSLNGGANIEAIIASEKEVWNREKLTLQKSLKRAEAEVYKLKAELRNDSLLQTLSPDSEHVTLKRIYGKYLRAESFRKALIYQKKYLLLLLGGFQECEDATLALLARMGGQPAFTDLEVITNRPKGFTRFRSAVRVSIAISRMKFLVRRWHRVTGSVSININRDGFGLNQGAEKTDSFYHSSGGLELYGEPRHTTYRSRSDLDYIRSPLPFQNRYPGTPADFNPGSLACSQLQNYDPDRALTDYITRLEALQRRLGTIQSGSTTQFHAGMRR

SEQ ID NO: 8275 - protein, 657 aa, Homo sapiens
MDEQEALNSIMNDLVALQMNRRHRMPGYETMKNKDTGHSNRQKKHNSSSSALLNSPTVTTSSCAGASEKKKFLSDVRIKFEHNGERRIIAFSRPVKYEDVEHKVTTVFGQPLDLHYMNNELSILLKNQDDLDKAIDILDRSSSMKSLRILLLSQDRNHNSSSPHSGVSRQVRIKASQSAGDINTIYQPPEPRSRHLSVSSQNPGRSSPPPGYVPERQQHIARQGSYTSINSEGEFIPETSEQCMLDPLSSAENSLSGSCQSLDRSADSPSFRKSRMSRAQSFPDNRQEYSDRETQLYDKGVKGGTYPRRYHVSVHHKDYSDGRRTFPRIRRHQGNLFTLVPSSRSLSTNGENMGLAVQYLDPRGRLRSADSENALSVQERNVPTKSPSAPINWRRGKLLGQGAFGRVYLCYDVDTGRELASKQVQFDPDSPETSKEVSALECEIQLLKNLQHERIVQYYGCLRDRAEKTLTIFMEYMPGGSVKDQLKAYGALTESVTRKYTRQILEGMSYLHSNMIVHRDIKGANILRDSAGNVKLGDFGASKRLQTICMSGTGMRSVTGTPYWMSPEVISGEGYGRKADVWSLGCTVVEMLTEKPPWAEYEAMAAIFKIATQPTNPQLPSHISEHGRDFLRRIFVEARQRPSAEELLTHHFAQLMY

SEQ ID NO: 8276 - protein, 462 aa, Homo sapiens
MIQTVPDPAAHIKEALSVVSEDQSLFECAYGTPHLAKTEMTASSSSDYGQTSKMSPRVPQQDWLSQPPARVTIKMECNPSQVNGSRNSPDECSVAKGGKMVGSPDTVGMNYGSYMEEKHMPPPNMTTNERRVIVPADPTLWSTDHVRQWLEWAVKEYGLPDVNILLFQNIDGKELCKMTKDDFQRLTPSYNADILLSHLHYLRETPLPHLTSDDVDKALQNSPRLMHARNTDLPYEPPRRSAWTGHGHPTPQSKAAQPSPSTVPKTEDQRPQLDPYQILGPTSSRLANPGSGQIQLWQFLLELLSDSSNSSCITWEGTNGEFKMTDPDEVARRWGERKSKPNMNYDKLSRALRYYYDKNIMTKVHGKRYAYKFDFHGIAQALQPHPPESSLYKYPSDLPYMGSYHAHPQKMNFVAPHPPALPVTSSSFFAAPNPYWNSPTGGIYPNTRLPTSHMPSHLGTYY

SEQ ID NO: 8277 - protein, 479 aa, Homo sapiens
MASTIKEALSVVSEDQSLFECAYGTPHLAKTEMTASSSSDYGQTSKMSPRVPQQDWLSQPPARVTIKMECNPSQVNGSRNSPDECSVAKGGKMVGSPDTVGMNYGSYMEEKHMPPPNMTTNERRVIVPADPTLWSTDHVRQWLEWAVKEYGLPDVNILLFQNIDGKELCKMTKDDFQRLTPSYNADILLSHLHYLRETPLPHLTSDDVDKALQNSPRLMHARNTGGAAFIFPNTSVYPEATQRITTRPDLPYEPPRRSAWTGHGHPTPQSKAAQPSPSTVPKTEDQRPQLDPYQILGPTSSRLANPGSGQIQLWQFLLELLSDSSNSSCITWEGTNGEFKMTDPDEVARRWGERKSKPNMNYDKLSRALRYYYDKNIMTKVHGKRYAYKFDFHGIAQALQPHPPESSLYKYPSDLPYMGSYHAHPQKMNFVAPHPPALPVTSSSFFAAPNPYWNSPTGGIYPNTRLPTSHMPSHLGTYY

SEQ ID NO: 8278 - protein, 363 aa, Homo sapiens
MVGSPDTVGMNYGSYMEEKHMPPPNMTTNERRVIVPADPTLWSTDHVRQWLEWAVKEYGLPDVNILLFQNIDGKELCKMTKDDFQRLTPSYNADILLSHLHYLRETPLPHLTSDDVDKALQNSPRLMHARNTDLPYEPPRRSAWTGHGHPTPQSKAAQPSPSTVPKTEDQRPQLDPYQILGPTSSRLANPGSGQIQLWQFLLELLSDSSNSSCITWEGTNGEFKMTDPDEVARRWGERKSKPNMNYDKLSRALRYYYDKNIMTKVHGKRYAYKFDFHGIAQALQPHPPESSLYKYPSDLPYMGSYHAHPQKMNFVAPHPPALPVTSSSFFAAPNPYWNSPTGGIYPNTRLPTSHMPSHLGTYY

SEQ ID NO: 8279 - protein, 174 aa, Homo sapiens
MFLTVKLLLGQRCSLKVSGQESVATLKRLVSRRLKVPEEQQHLLFRGQLLEDDKHLSDYCIGPNASINVIMQPLEKMALKEAHQPQTQPLWHQLGLVLAKHFEPQDAKAVLQLLRQEHEERLQKISLEHLEQLAQYLLAEEPHVEPAGERELEAKARPQSSCDMEEKEEAAADQ

SEQ ID NO: 8280 - protein, 116 aa, Homo sapiens
MRGVAEVKEPCSLPMLSVDMENKENGSVGVKNSMENGRPPDPADWAVMDVVNYFRTVGFEEQASAFQEQEIDGKSLLLMTRNDVLTGLQLKLGPALKIYEYHVKPLQTKHLKNNSS

SEQ ID NO: 8281 - protein, 259 aa, Homo sapiens
MSKYKLIMLRHGEGAWNKENRFCSWVDQKLNSEGMEEARNCGKQLKALNFEFDLVFTSVLNRSIHTAWLILEELGQEWVPVESSWRLNERHYGALIGLNREQMALNHGEEQVRLWRRSYNVTPPPIEESHPYYQEIYNDRRYKVCDVPLDQLPRSESLKDVLERLLPYWNERIAPEVLRGKTILISAHGNSSRALLKHLEGISDEDIINITLPTGVPILLELDENLRAVGPHQFLGDQEAIQAAIKKVEDQGKVKQAKK

SEQ ID NO: 8282 - protein, 331 aa, Homo sapiens
MAKWGQGDPRWIVEEREDGTNVNNWHWTERDATIWSKGKLRGLLVGIAMENEAGRCEISELKQVEGEASCNSRKGKLIFFYEWNIKLAWKGTVKESGAKHKGLIEIPSLSEENEINDTEVNVSKKKGDGEILKDLMRTTGTAKVREALGEYLKALKTEFTTGMILPTKAVATQELTLQRKLNENKLQASPVALGVRIPTVALHLTELFDTTVEQLYSIFTVKELVQKFSKSPAVLEAERGGKFQMFDGNISGEYVELVTNRKIIMKWRCRNWPEEHYATVELNFVPAPGQTELQLDCKGVPVCKEENMKFCWQKQHFEEIKGLLELTAQNA

SEQ ID NO: 8283 - protein, 1585 aa, Homo sapiens
MTLSTEESIEVFGDINLTLGMLNKEDIVNKEDIYSHLTSVIQNTDILDDAIVQRLIYYASKDMRDNNMLREIRMLAGEVLVSLAAHDFNSVMYEVQSNFRILELPDEFVVLALAELATSYVSQSIPFMMMTLLTMQTMLRLAEDERMKGTFCIALEKFSKAIYKYVNHWRDFPYPRLDANRLSDKIFMLFRYIMEKWAPLASPMQTLSIVKAHGPTVSLLLHREDFRGYALGQVPWLLNQYKDKEIDFHVTQSLKQILTAAVLYDIGLPRSLRRSIFINLLQQICRAPEPPVKENEMKASSCFLILAHSNPGELMEFFDEQVRSNNEAIRVGILTLLRLAVNADEPRLRDHIISIERTVKIVMGDLSTKVRNSVLLLIQTMCEKSYIEAREGWPLIDYVFSQFATLNRNLEKPVKTNFHENEKEEESVRETSLEVLKTLDPLVIGMPQVLWPRILTFVVPAEYTEALEPLFSIIRILIMAEEKKQHSAKESTALVISTGAVKLPSPQQLLARLLVISMPASLGELHGAGAIGLLKILPEIIHPKLVDLWKTRLPELLQPLEGKNISTVLWETMLLQLLKESLWKISDVAWTIQLTQDFKQQMGSYSNNSTEKKFLWNALGTTLACCQDSDFVNSQIKEFLTAPNQLGDQRQGITSILGYCAENHLDIVLKVLKTFQNQEKFFMNRCKSLFSGKKSLTKTDVMVIYGAVALHAPKKQLLSRLNQDIISQVLSLHGQCSQVLGMSVMNKDMDLQMSFTRSITEIGIAVQDAEDQGFQFSYKEMLIGYMLDFIRDEPLDSLASPIRWKALIAIRYLSKLKPQLSLQDHLNILEENIRRLLPLPPLENLKSEGQTDKDKEHIQFLYERSMDALGKLLKTMMWDNVNAEDCQEMFNLLQMWLVSQKEWERERAFQITAKVLTNDIEAPENFKIGSLLGLLAPHSCDTLPTIRQAAASSTIGLFYIKGIHLEVERLQGLQEGLESDDVQVQIKISSKIAKIVSKFIPNEEILMFLEEMLDGLESLNPTCTKACGIWMITVLKQQGAALEDQLLEILGTIYHHMPVLRQKEESFQFILEAISQIASFHMDTVVVNLLQKPLPFDRDTKTLWKALAEKPASSGKLLQALIDKLETELEDDIARVEAISVACAMYEVISMGTSVTGLYPELFTLLLKLVSCTLGQKMPTCPWSHRRHVMQQGEQQQIPDPCRLSTATLKCLQAQAMREGLAKESDEGDNLWTLLSSPSTHHIGVCSLARSMAVWQHGVILDIMEQLLSSLTSSSENYRITGAAFFSELMKEPILWKHGNLRNVLILMDQSAWDSNATLRQMAIRGLGNTASGAPHKVKKHKQLMLESIIRGLYHLARTEVVCESLKALKKILELLTDRDVSFYFKEIVLQTRTFFEDEQDDVRLTAIFLFEDLAPLTGRRWKIFFAEEIKKSLISFLLHLWDPNPKIGVACRDVLMVCIPFLGLQELYGVLDRLLDQDLPRARDFYRQFCVKLAKKNQEILWILHTHSFTFFTSTWEVIRSAAVKLTDAVVLNLTSQYVELLDREQLTTRLQALRQDPCISVQRAAEAALQTLLRRCKETSIPL

SEQ ID NO: 8284 - protein, 583 aa, Homo sapiens
  VARIANT 577: Xaa = Any Amino Acid
MRRSSRSEDILEIDERKDHRQLSSCVFIPLTFRSFRGQGQPCVLWHTGCCSGLPEDSRAPPSCITSSTVSYGWMVQVPPGLHVTTPPPPLLPSLTFLHKTPLESFATAIHGLKVGHLTDRVIQRSKRMILDTLGAGFLGTTTEVFHIASQYSKIYSSNISSTVWGQPDIRLPPTYAAFVNGVAIHSMDFDDTWHPATHPSGAVLPVLTALAEALPRSPKFSGLDLLLAFNVGIEVQGRLLHFAKEANDMPKRFHPPSVVGTLGSAAAASKFLGLSSTKCREALAIAVSHAGAPMANAATQTKPLHIGNAAKHGIEAAFLAMLGLQGNKQVLDLEAGFGAFYANYSPKVLPSIASYSWLLDQQDVAFKRFPAHLSTHWVADAAASVRKHLVAERALLPTDYIKRIVLRIPNVQYVNRPFPVSEHEARHSFQYVACAMLLDGGITVPSFHECQINRPQVRELLSKVELEYPPDNLPSFNILYCEISVTLKDGATFTDRSDTFYGHWRKPLSQEDLEEKFRANASKMLSWDTVESLIKIVKNLEDLEDCSVLTTLLKGPSPPEVASNSPACNNSITNLSXGLPTSK

SEQ ID NO: 8285 - protein, 1070 aa, Homo sapiens
MYCCSAQDSKMDYKRRFLLGGSKQKVQQHQQYPMPELGRALSAPLASTATTAPLGSLTAAGSCHHAMPHTTPIADIQQGISKYLDALNVFCRASTFLTDLFSTVFRNSHYSKAATQLKDVQEHVMEVASRLTSAIKPEIAKMLMELSAGAANFTDQKEFSLQDIEVLGRCFLTVVQVHFQFLTHALQKVQPVAHSCFAEVIVPEKKNSGSGGGLSGMGHTPEVEEAVRSWRGAAEATSRLRERGCDGCLAGIEVQQLFCSQSAAIPEHQLKELNIKIDSALQAYKIALESLGHCEYAMKAGFHLNPKAIEASLQGCCSEAEAQQTGRRQTPPQPMQCELPTVPVQIGSHFLKGVSFNESAADNLKLKTHTMLQLMKEAGCYNGITSRDDFPVTEVLNQVCPSTWRGACKTAVQLLFGQAGLVVVDTAQIENKEAYAPQISLEGSRIVVQVPSTWCLKEDPATMSLLQRSLDPEKTLGLVDVLYTAVLDLNRWRAGREQALPCIQIQLQREICDFGNQADLPSGNGNKSSGGLQKTFSKLTSRFTKKASCTSSSSSTNYSIQNTPSKNIFIAGCSEEKAKMPGNIDTRLQSILNIGNFPRTTDPSQSAQNSSNTVANGFLMERRENFLHGDDGKDEKGMNLPTDQEMQEVIDFLSGFNMGQSHQGSPLVTRHNSAATAMVTEQKAGAMQPQQPSLPVPPPPRAPQAGAHTPLTPQPGLAPQQQSPKQQQPQVQYYQHLLQPIGPQQPPPQPRAPGKWVHGSSQQPAQAVGAGLSPLGQWPGISDLSSDLYSLGLVSSYMDNVMSEVLGQKPQGPRNNTWPNRDQSDGVFGMLGEILPFDPAVGSDPEFARYVAGVSQAMQQKRQAQHGRRPGNPRGNWPPMDDAHRTWPFPEFFTEGDGLHGGWSGAQGDSASSSDETSSANGDSLFSMFSGPDLVAAVKQRRKHSSGEQDTSTLPSPPLLTTVEDVNQDNKTKTWPPKAPWQHPSPLPSTLPSPSAPLYAVTSPGSQWNDTMQMLQSPVWAATNDCSAAAFSYVQTPPQPPPPPAHKAAPKGFKAFPGKGERRPAYLPQY

SEQ ID NO: 8286 - protein, 1360 aa, Homo sapiens
MSRQSTLYSFFPKSPALSDANKASARASREGGRAAAAPGASPSPGGDAAWSEAGPGPRPLARSASPPKAKNLNGGLRRSVAPAAPTSCDFSPGDLVWAKMEGYPWWPCLVYNHPFDGTFIREKGKSVRVHVQFFDDSPTRGWVSKRLLKPYTGSKSKEAQKGGHFYSAKPEILRAMQRADEALNKDKIKRLELAVCDEPSEPEEEEEMEVGTTYVTDKSEEDNEIESEEEVQPKTQGSRRSSRQIKKRRVISDSESDIGGSDVEFKPDTKEEGSSDEISSGVGDSESEGLNSPVKVARKRKRMVTGNGSLKRKSSRKETPSATKQATSISSETKNTLRAFSAPQNSESQAHVSGGGDDSSRPTVWYHETLEWLKEEKRRDEHRRRPDHPDFDASTLYVPEDFLNSCTPGMRKWWQIKSQNFDLVICYKVGKFYELYHMDALIGVSELGLVFMKGNWAHSGFPEIAFGRYSDSLVQKGYKVARVEQTETPEMMEARCRKMAHISKYDRVVRREICRIITKGTQTYSVLEGDPSENYSKYLLSLKEKEEDSSGHTRAYGVCFVDTSLGKFFIGQFSDDRHCSRFRTLVAHYPPVQVLFEKGNLSKETKTILKSSLSCSLQEGLIPGSQFWDASKTLRTLLEEEYFREKLSDGIGVMLPQVLKGMTSESDSIGLTPGEKSELALSALGGCVFYLKKCLIDQELLSMANFEEYIPLDSDTVSTTRSGAIFTKAYQRMVLDAVTLNNLEIFLNGTNGSTEGTLLERVDTCHTPFGKRLLKQWLCAPLCNHYAINDRLDAIEDLMVVPDKISEVVELLKKLPDLERLLSKIHNVGSPLKSQNHPDSRAIMYEETTYSKKKIIDFLSALEGFKVMCKIIGIMEEVADGFKSKILKQVISLQTKNPEGRFPDLTVELNRWDTAFDHEKARKTGLITPKAGFDSDYDQALADIRENEQSLLEYLEKQRNRIGCRTIVYWGIGRNRYQLEIPENFTTRNLPEEYELKSTKKGCKRYWTKTIEKKLANLINAEERRDVSLKDCMRRLFYNFDKNYKDWQSAVECIAVLDVLLCLANYSRGGDGPMCRPVILLPEDTPPFLELKGSRHPCITKTFFGDDFIPNDILIGCEEEEQENGKAYCVLVTGPNMGGKSTLMRQAGLLAVMAQMGCYVPAEVCRLTPIDRVFTRLGASDRIMSGESTFFVELSETASILMHATAHSLVLVDELGRGTATFDGTAIANAVVKELAETIKCRTLFSTHYHSLVEDYSQNVAVRLGHMACMVENECEDPSQETITFLYKFIKGACPKSYGFNAARLANLPEEVIQKGHRKAREFEKMNQSLRLFREVCLASERSTVDAEAVHKLLTLIKEL

SEQ ID NO: 8287 - protein, 1068 aa, Homo sapiens
MSRQSTLYSFFPKSPALSDANKASARASREGGRAAAAPEASPSPGGDAAWSEAGPGPRPLARSASPPKAKNLNGGLRRSVAPAAPTSCDFSPGDLVWAKMEGYPWWPCLVYNHPFDGTFIREKGKSVRVHVQFFDDSPTRGWVSKRLLKPYTGSKSKEAQKGGHFYSAKPEILRAMQRADEALNKDKIKRLELAVCDEPSEPEEEEEMEVGTTYVTDKSEEDNEIESEEEVQPKTQGSRRSSRQIKKRRVISDSESDIGGSDVEFKPDTKEEGSSDEISSGVGDSESEGLNSPVKVARKRKRMVTGNGSLKRKSSRKETPSATKQATSISSETKNTLRAFSAPQNSESQAHVSGGGDDSSRPTVWYHETLEWLKEEKRRDEHRRRPDHPDFDASTLYVPEDFLNSCTPGMRKWWQIKSQNFDLVICYKVGKFYELYHMDALIGVSELGLVFMKGNWAHSGFPEIAFGRYSDSLVQKGYKVARVEQTETPEMMEARCRKMAHISKYDRVVRREICRIITKGTQTYSVLEGDPSENYSKYLLSLKEKEEDSSGHTRAYGVCFVDTSLGKFFIGQFSDDRHCSRFRTLVAHYPPVQVLFEKGNLSKETKTILKSSLSCSLQEGLIPGSQFWDASKTLRTLLEEEYFREKLSDGIGVMLPQVLKGMTSESDSIGLTPGEKSELALSALGGCVFYLKKCLIDQELLSMANFEEYIPLDSDTVSTTRSGAIFTKAYQRMVLDAVTLNNLEIFLNGTNGSTEGTLLERVDTCHTPFGKRLLKQWLCAPLCNHYAINDRLDAIEDLMVVPDKISEVVELLKKLPDLERLLSKIHNVGSPLKSQNHPDSRAIMYEETTYSKKKIIDFLSALEGFKVMCKIIGIMEEVADGFKSKILKQVISLQTKNPEGRFPDLTVELNRWDTAFDHEKARKTGLITPKAGFDSDYDQALADIRENEQSLLEYLEKQRNRIGCRTIVYWGIGRNRYQLEIPENFTTRNLPEEYELKSTKKGCKRYWTKTIEKKLANLINAEERRDVSLKDCMRRLFYNFDKNYKDWQSAVECIAVLGKTLNKLVLRL

SEQ ID NO: 8288 - protein, 1360 aa, Homo sapiens [sequence omitted]

SEQ ID NO: 8289 - protein, 372 aa, Homo sapiens
MANAGSHDNGTHFFFTLGRADELNNKHTIFGKVTGDTVYNMLRLSEVDIDDDERPHNPHKIKSCEVLFNPFDDIIPREIKRLKKEKPEEEVKKLKPKGTKNFSLLSFGEEAEEEEEEVNRVSQSMKGKSKSSHDLLKDDPHLSSVPVVESEKGDAPDLVDDGEDESAEHDEYIDGDEKNLMRERIAKKLKKDTSANVKSAGEGEVEKKSVSRSEELRKEARQLKRELLAAKQKKVENAAKQAEKRSEEEEAPPDGAVAEYRREKQKYEALRKQQSKKGTSREDQTLALLNQFKSKLTQAIAETPENDIPETEVEDDEGWMSHVLQFEDKSRKVKDASMQDSDTFEIYDPRNPVNKRRREESKKLMREKKERR

SEQ ID NO: 8290 - protein, 1445 aa, Homo sapiens
MEEGHGLDLTYITERIIAVSFPAGCSEESYPHNLQEVTRMLKSKHGDNYLVLNLSEKRYDLTKLNPKIMDVGWPELHAPPLDKMCTICKAQESWLNSNLQHVVVIHCRGGKGRIGVVISSYMHFTNVSASADQALDRFAMKKFYDDKVSALMQPSQKRYVQFLSGLLSGSVKMNASPLFLHFVILHGTPNFDTGGVCRPFLKLYQAMQPVYTSGIYNVGPENPSRICIVIEPAQLLKGDVMVKCYHKKYRSATRDVIFRLQFHTGAVQGYGLVFGKEDLDNASKDDRFPDYGKVELVFSATPEKIQGSEHLYNDHGVIVDYNTTDPLIRWDSYENLSADGEVLHTQGPVDGSLYAKVRKKSSSDPGIPGGPQAIPATNSPDHSDHTLSVSSDSGHSTASARTDKTEERLAPGTRRGLSAQEKAELDQLLSGFGLEDPGSSLKEMTDARSKYSGTRHVVPAQVHVNGDAALKDRETDILDDEMPHHDLHSVDSLGTLSSSEGPQSVHLGPFTCHKSSQNSLLSDGFGSNVGEDPQGTLVPDLGLGMDGPYERERTFGSREPKQPQPLLRKPSVSAQMQAYGQSSYSTQTWVRQQQMVVAHQYSFAPDGEARLVSRCPADNPGLVQAQPRVPLTPTRGTSSRVAVQRGVGSGPHPPDTQQPSPSKAFKPRFPGDQVVNGAGPELSTGPSPGSPTLDIDQSIEQLNRLILELDPTFEPIPTHMNALGSQANGSVSPDSVGGGLRASSRLPDTGEGPSRATGRQGSSAEQPLGGRLRKLSLGQYDNDAGGQLPFSKCAWGKAGVDYAPNLPPFPSPADVKETMTPGYPQDLDIIDGRILSSKESMCSTPAFPVSPETPYVKTALRHPPFSPPEPPLSSPASQHKGGREPRSCPETLTHAVGMSESPIGPKSTMLRADASSTPSFQQAFASSCTISSNGPGQRRESSSSAERQWVESSPKPMVSLLGSGRPTGSPLSAEFSGTRKDSPVLSCFPPSELQAPFHSHELSLAEPPDSLAPPSSQAFLGFGTAPVGSGLPPEEDLGALLANSHGASPTPSIPLTATGAADNGFLSHNFLTVAPGHSSHHSPGLQGQGVTLPGQPPLPEKKRASEGDRSLGSVSPSSSGFSSPHSGSTISIPFPNVLPDFSKASEAASPLPDSPGDKLVIVKFVQDTSKFWYKADISREQAIAMLKDKEPGSFIVRDSHSFRGAYGLAMKVATPPPSVLQLNKKAGDLANELVRHFLIECTPKGVRLKGCSNEPYFGSLTALVCQHSITPLALPCKLLIPERDPLEEIAESSPQTAANSAAELLKQGAACNVWYLNSVEMESLTGHQAIQKALSITLVQEPPPVSTVVHFKVSAQGITLTDNQRKLFFRRHYPVNSVIFCALDPQDRKWIKDGPSSKVFGFVARKQGSATDNVCHLFAEHDPEQPASAIVNFVSKVMIGSPKKV

SEQ ID NO: 8291 - protein, 1062 aa, Homo sapiens
MAAAPFLKHWRTTFERVEKFVSPIYFTDCNLRGRLFGASCPVAVLSSFLTPERLPYQEAVQRDFRPAQVGDSFGPTWWTCWFRVELTIPEAWVGQEVHLCWESDGEGLVWRDGEPVQGLTKEGEKTSYVLTDRLGERDPRSLTLYVEVACNGLLGAGKGSMIAAPDPEKIFQLSRAELAVFHRDVHMLLVDLELLLGIAKGLGKDNQRSFQALYTANQMVNVCDPAQPETFPVAQALASRFFGQHGGESQHTIHATGHCHIDTAWLWPFKETVRKCARSWVTALQLMERNPEFIFACSQAQQLEWVKSRYPGLYSRIQEFACRGQFVPVGGTWVEMDGNLPSGEAMVRQFLQGQNFFLQEFGKMCSEFWLPDTFGYSAQLPQIMHGCGIRRFLTQKLSWNLVNSFPHHTFFWEGLDGSRVLVHFPPGDSYGMQGSVEEVLKTVANNRDKGRANHSAFLFGFGDGGGGPTQTMLDRLKRLSNTDGLPRVQLSSPRQLFSALESDSEQLCTWVGELFLELHNGTYTTHAQIKKGNRECERILHDVELLSSLALARSAQFLYPAAQLQHLWRLLLLNQFHDVVTGSCIQMVAEEAMCHYEDIRSHGNTLLSAAAAALCAGEPGPEGLLIVNTLPWKRIEVMALPKPGGAHSLALVTVPSMGYAPVPPPTSLQPLLPQQPVFVVQETDGSVTLDNGIIRVKLDPTGRLTSLVLVASGREAIAEGAVGNQFVLFDDVPLYWDAWDVMDYHLETRKPVLGQAGTLAVGTEGGLRGSAWFLLQISPNSRLSQEVVLDVGCPYVRFHTEVHWHEAHKFLKVEFPARVRSSQATYEIQFGHLQRPTHYNTSWDWARFEVWAHRWMDLSEHGFGLALLNDCKYGASVRGSILSLSLLRAPKAPDATADTGRHEFTYALMPHKGSFQDAGVIQAAYSLNFPLLALPAPSPAPATSWSAFSVSSPAVVLETVKQAESSPQRRSLVLRLYEAHGSHVDCWLHLSLPVQEAILCDLLERPDPAGHLTSGQPPEAHLFSLPSAVPVARASASATLSPWGWGFVCRRLWGLLISASPA

SEQ ID NO: 8292 - protein, 336 aa, Homo sapiens
NSKGQSVSSPPNDCNISPARVQNWTEDEMEELTEVGFRRWIIKNKTPSKKKKKYAELKEHVLAQCKQAKNLDKRFEELLTRITSLERNINYLMELKSIAIVLHEAQSITLCEVEERISEFEDHLANIRHADKIRERMKRNEQSLQEIWDFVKKTKLRLIGVPEDDEEHGNKLENTLQNTIQENFLNLARQANMQIQEIQRMPLRYPLRRSTPRHIIIRFSKVEIKEENIKGSQREGQVTYAGKPIRLTADLSAETVQARRKWGPIFNILKRKDFQPRISYPAKLSFISEGEIKSCTDKQMLRDCVTTRSALQELLKEALNMEKKIWYQPLQKHTKI

SEQ ID NO: 8293 - protein, 447 aa, Homo sapiens
MKPESGLIQTPSPSQHSVLTCTTGLTTSQPSPAHYSYPIQASSTNASLISTSSTIANIPAAAVASISNQDYPTYTILGQNQYQACYPSSSFGVTGQTNSDAESTTLAATTYQSEKPSVMAPAPAAQKLSSGDPSTSPSLSQTTPSKDTDDQSRKNMNSKNRGKKKADATSSQDSELERVFLWDLDETIIIFHSLLTGSYAQKYGKDPTVVIGSGLTMEKMIFEVADTHLFSNDLKECDQVHVEDVAPNDKGQNLNNYSFSTNGFSGSGGSGSHGSSVGVQGGVDWMRKLAFRYRKVREIYDKHKSNVGGLLSPQRKEALQRLRAEIEVLTDSWLGTALKSLLLIQSRKNCVNVLITTTQLVPALAKVLLYGLGEIFPIENIYSATKIGKESCFERIVSRFGKKVTYVVIGDGRDEEIAAKQHNMPFWRITNHGDLVSLHQALELDFL

SEQ ID NO: 8294 - protein, 573 aa, Homo sapiens
MEEEQDLPEQPVKKAKMQESGEQTISQVSNPDVSDQKPETSSLASNLPMSEEIMTCTDYIPRSSNDYTSQMYSAKPYAHILSVPVSETAYPGQTQYQTLQQTQPDAVYPQATQTYGLPPFGALWPGMKPESGLIQTPSPSQHSVLTCTTGLTTSQPSPAHYSYPIQASSTNASLISTSSTIANIPAAAVASISNQDYPTYTILGQNQYQACYPSSSFGVTGQTNSDAESTTLAATTYQSEKPSVMAPAPAAQKLSSGDPSTSPSLSQTTPSKDTDDQSRKNMNSKNRGKKKADATSSQDSELERVFLWDLDETIIIFHSLLTGSYAQKYGKDPTVVIGSGLTMEKMIFEVADTHLFSNDLKECDQVHVEDVAPNDKGQNLNNYSFSTNGFSGSGGSGSHGSSVGVQGGVDWMRKLAFRYRKVREIYDKHKSNVGGLLSPQRKEALQRLRAEIEVLTDSWLGTALKSLLLIQSRKNCVNVLITTTQLVPALAKVLLYGLGEIFPIENIYSATKIGKESCFERIVSRFGKKVTYVVIGDGRDEEIAAKQHNMPFWRITNHGDLVSLHQALELDFL

SEQ ID NO: 8295 - protein, 1531 aa, Homo sapiens
MPSDFISLLSADLDLESPKSLYSRESVYDLLPKELQLPPSRETSVASMSQTSGGEAGSPPPAVVAADASSAPSSSSMGGACSSFTTSSSPTIYSTSVTDSKAMQVESCSSAVGVSNRGVSEKQLTSNTVQQHPSTPKRHTVLYISPPPEDLLDNSRMSCQDEGCGLESEQSCSMWMEDSPSNFSNMSTSSYNDNTEVPRKSRKRNPKQRPGVKRRDCEESNMDIFDADSAKAPHYVLSQLTTDNKGNSKAGNGTLENQKGTGVKKSPMLCGQYPVKSEGKELKIVVQPETQHRARYLTEGSRGSVKDRTQQGFPTVKLEGHNEPVVLQVFVGNDSGRVKPHGFYQACRVTGRNTTPCKEVDIEGTTVIEVGLDPSNNMTLAVDCVGILKLRNADVEARIGIAGSKKKSTRARLVFRVNIMRKDGSTLTLQTPSSPILCTQPAGVPEILKKSLHSCSVKGEEEVFLIGKNFLKGTKVIFQENVSDENSWKSEAEIDMELFHQNHLIVKVPPYHDQHITLPVSVGIYVVTNAGRSHDVQPFTYTPDPAAAGALNVNVKKEISSPARPCSFEEAMKAMKTTGCNLDKVNIIPNALMTPLIPSSMIKSEDVTPMEVTAEKRSSTIFKTTKSVGSTQQTLENISNIAGNGSFSSPSSSHLPSENEKQQQIQPKAYNPETLTTIQTQDISQPGTFPAVSASSQLPNSDALLQQATQFQTRETQSREILQSDGTVVNLSQLTEASQQQQQSPLQEQAQTLQQQISSNIFPSPNSVSQLQNTIQQLQAGSFTGSTASGSSGSVDLVQQVLEAQQQLSSVLFSAPDGNENVQEQLSADIFQQVSQIQSGVSPGMFSSTEPTVHTRPDNLLPGRAESVHPQSENTLSNQQQQQQQQQQVMESSAAMVMEMQQSICQAAAQIQSELFPSTASANGNLQQSPVYQQTSHMMSALSTNEDMQMQCELFSSPPAVSGNETSTTTTQQVATPGTTMFQTSSSGDGEETGTQAKQIQNSVFQTMVQMQHSGDNQPQVNLFSSTKSMMSVQNSGTQQQGNGLFQQGNEMMSLQSGNFLQQSSHSQAQLFHPQNPIADAQNLSQETQGSLFHSPNPIVHSQTSTTSSEQMQPPMFHSQSTIAVLQGSSVPQDQQSTNIFLSQSPMNNLQTNTVAQEAFFAAPNSISPLQSTSNSEQQAAFQQQAPISHIQTPMLSQEQAQPPQQGLFQPQVALGSLPPNPMPQSQQGTMFQSQHSIVAMQSNSPSQEQQQQQQQQQQQQQQQQQSILFSNQNTMATMASPKQPPPNMIFNPNQNPMANQEQQNQSIFHQQSNMAPMNQEQQPMQFQSQSTVSSLQNPGPTQSESSQTPLFHSSPQIQLVQGSPSSQEQQVTLFLSPASMSALQTSINQQDMQQSPLYSPQNNMPGIQGATSSPQPQATLFHNTAGGTMNQLQNSPGSSQQTSGMFLFGIQNNCSQLLTSGPATLPDQLMAISQPGQPQNEGQPPVTTLLSQQMPENSPLASSINTNQNIEKIDLLVSLQNQGNNLTGSF

SEQ ID NO: 8296 - protein, 1455 aa, Homo sapiens
MGGACSSFTTSSSPTIYSTSVTDSKAMQVESCSSAVGVSNRGVSEKQLTSNTVQQHPSTPKRHTVLYISPPPEDLLDNSRMSCQDEGCGLESEQSCSMWMEDSPSNFSNMSTSSYNDNTEVPRKSRKRNPKQRPGVKRRDCEESNMDIFDADSAKAPHYVLSQLTTDNKGNSKAGNGTLENQKGTGVKKSPMLCGQYPVKSEGKELKIVVQPETQHRARYLTEGSRGSVKDRTQQGFPTVKLEGHNEPVVLQVFVGNDSGRVKPHGFYQACRVTGRNTTPCKEVDIEGTTVIEVGLDPSNNMTLAVDCVGILKLRNADVEARIGIAGSKKKSTRARLVFRVNIMRKDGSTLTLQTPSSPILCTQPAGVPEILKKSLHSCSVKGEEEVFLIGKNFLKGTKVIFQENVSDENSWKSEAEIDMELFHQNHLIVKVPPYHDQHITLPVSVGIYVVTNAGRSHDVQPFTYTPDPAAAGALNVNVKKEISSPARPCSFEEAMKAMKTTGCNLDKVNIIPNALMTPLIPSSMIKSEDVTPMEVTAEKRSSTIFKTTKSVGSTQQTLENISNIAGNGSFSSPSSSHLPSENEKQQQIQPKAYNPETLTTIQTQDISQPGTFPAVSASSQLPNSDALLQQATQFQTRETQSREILQSDGTVVNLSQLTEASQQQQQSPLQEQAQTLQQQISSNIFPSPNSVSQLQNTIQQLQAGSFTGSTASGSSGSVDLVQQVLEAQQQLSSVLFSAPDGNENVQEQLSADIFQQVSQIQSGVSPGMFSSTEPTVHTRPDNLLPGRAESVHPQSENTLSNQQQQQQQQQQVMESSAAMVMEMQQSICQAAAQIQSELFPSTASANGNLQQSPVYQQTSHMMSALSTNEDMQMQCELFSSPPAVSGNETSTTTTQQVATPGTTMFQTSSSGDGEETGTQAKQIQNSVFQTMVQMQHSGDNQPQVNLFSSTKSMMSVQNSGTQQQGNGLFQQGNEMMSLQSGNFLQQSSHSQAQLFHPQNPIADAQNLSQETQGSLFHSPNPIVHSQTSTTSSEQMQPPMFHSQSTIAVLQGSSVPQDQQSTNIFLSQSPMNNLQTNTVAQEAFFAAPNSISPLQSTSNSEQQAAFQQQAPISHIQTPMLSQEQAQPPQQGLFQPQVALGSLPPNPMPQSQQGTMFQSQHSIVAMQSNSPSQEQQQQQQQQQQQQQQQQQSILFSNQNTMATMASPKQPPPNMIFNPNQNPMANQEQQNQSIFHQQSNMAPMNQEQQPMQFQSQSTVSSLQNPGPTQSESSQTPLFHSSPQIQLVQGSPSSQEQQVTLFLSPASMSALQTSINQQDMQQSPLYSPQNNMPGIQGATSSPQPQATLFHNTAGGTMNQLQNSPGSSQQTSGMFLFGIQNNCSQLLTSGPATLPDQLMAISQPGQPQNEGQPPVTTLLSQQMPENSPLASSINTNQNIEKIDLLVSLQNQGNNLTGSF

SEQ ID NO: 8297 - protein, 1484 aa, Homo sapiens
MSQTSGGEAGSPPPAVVAADASSAPSSSSMGGACSSFTTSSSPTIYSTSVTDSKAMQVESCSSAVGVSNRGVSEKQLTSNTVQQHPSTPKRHTVLYISPPPEDLLDNSRMSCQDEGCGLESEQSCSMWMEDSPSNFSNMSTSSYNDNTEVPRKSRKRNPKQRPGVKRRDCEESNMDIFDADSAKAPHYVLSQLTTDNKGNSKAGNGTLENQKGTGVKKSPMLCGQYPVKSEGKELKIVVQPETQHRARYLTEGSRGSVKDRTQQGFPTVKLEGHNEPVVLQVFVGNDSGRVKPHGFYQACRVTGRNTTPCKEVDIEGTTVIEVGLDPSNNMTLAVDCVGILKLRNADVEARIGIAGSKKKSTRARLVFRVNIMRKDGSTLTLQTPSSPILCTQPAGVPEILKKSLHSCSVKGEEEVFLIGKNFLKGTKVIFQENVSDENSWKSEAEIDMELFHQNHLIVKVPPYHDQHITLPVSVGIYVVTNAGRSHDVQPFTYTPDPAAAGALNVNVKKEISSPARPCSFEEAMKAMKTTGCNLDKVNIIPNALMTPLIPSSMIKSEDVTPMEVTAEKRSSTIFKTTKSVGSTQQTLENISNIAGNGSFSSPSSSHLPSENEKQQQIQPKAYNPETLTTIQTQDISQPGTFPAVSASSQLPNSDALLQQATQFQTRETQSREILQSDGTVVNLSQLTEASQQQQQSPLQEQAQTLQQQISSNIFPSPNSVSQLQNTIQQLQAGSFTGSTASGSSGSVDLVQQVLEAQQQLSSVLFSAPDGNENVQEQLSADIFQQVSQIQSGVSPGMFSSTEPTVHTRPDNLLPGRAESVHPQSENTLSNQQQQQQQQQQVMESSAAMVMEMQQSICQAAAQIQSELFPSTASANGNLQQSPVYQQTSHMMSALSTNEDMQMQCELFSSPPAVSGNETSTTTTQQVATPGTTMFQTSSSGDGEETGTQAKQIQNSVFQTMVQMQHSGDNQPQVNLFSSTKSMMSVQNSGTQQQGNGLFQQGNEMMSLQSGNFLQQSSHSQAQLFHPQNPIADAQNLSQETQGSLFHSPNPIVHSQTSTTSSEQMQPPMFHSQSTIAVLQGSSVPQDQQSTNIFLSQSPMNNLQTNTVAQEAFFAAPNSISPLQSTSNSEQQAAFQQQAPISHIQTPMLSQEQAQPPQQGLFQPQVALGSLPPNPMPQSQQGTMFQSQHSIVAMQSNSPSQEQQQQQQQQQQQQQQQQQSILFSNQNTMATMASPKQPPPNMIFNPNQNPMANQEQQNQSIFHQQSNMAPMNQEQQPMQFQSQSTVSSLQNPGPTQSESSQTPLFHSSPQIQLVQGSPSSQEQQVTLFLSPASMSALQTSINQQDMQQSPLYSPQNNMPGIQGATSSPQPQATLFHNTAGGTMNQLQNSPGSSQQTSGMFLFGIQNNCSQLLTSGPATLPDQLMAISQPGQPQNEGQPPVTTLLSQQMPENSPLASSINTNQNIEKIDLLVSLQNQGNNLTGSF

SEQ ID NO: 8298 - protein, 263 aa, Homo sapiens
MDEDGLELQQEPNSFFDATGADGTHMDGDQIVVEVQETVFVSDVVDSDITVHNFVPDDPDSVVIQDVIEDVVIEDVQCPDIMEEADVSETVIIPEQVLDSDVTEEVSLAHCTVPDDVLASDITSASMSMPEHVLTGDSIHVSDVGHVGHVGHVEHVVHDSVVEAEIVTDPLTTDVVSEEVLVADCASEAVIDANGIPVDQQDDDKGNCEDYLMISCNNSDGIENRNGTASALLHIDESAGLGRLAKQKPKKRRRPDSRQYQTA

SEQ ID NO: 8299 - protein, 570 aa, Homo sapiens
MAKTPSDHLLSTLEELVPYDFEKFKFKLQNTSVQKEHSRIPRSQIQRARPVKMATLLVTYYGEEYAVQLTLQVLRAINQRLLAEELHRAAIQGRPPDTAASPRCHAQEGDPVDGTCVRDSCSFPEAVSGHPQASGSRSPGCPRCQDSHERKSPGSLSPQPLPQCKRHLKQVQLLFCEDHDEPICLICSLSQEHQGHRVRPIEEVALEHKKKIQKQLEHLKKLRKSGEEQRSYGEEKAVSFLKQTEALKQRVQRKLEQVYYFLEQQEHFFVASLEDVGQMVGQIRKAYDTRVSQDIALLDALIGELEAKECQSEWELLQDIGDILHRAKTVPVPEKWTTPQEIKQKIQLLHQKSEFVEKSTKYFSETLRSEMEMFNVPELIGAQAHAVNVILDAETAYPNLIFSDDLKSVRLGNKWERLPDGPQRFDSCIIVLGSPSFLSGRRYWEVEVGDKTAWILGACKTSISRKGNMTLSPENGYWVVIMMKENEYQASSVPPTRLLIKEPPKRVGIFVDYRVGSISFYNVTARSHIYTFASCSFSGPLQPIFSPGTRDGGKNTAPLTICPVGGQGPD

SEQ ID NO: 8300 - protein, 781 aa, Homo sapiens
MAKTPSDHLLSTLEELVPYDFEKFKFKLQNTSVQKEHSRIPRSQIQRARPVKMATLLVTYYGEEYAVQLTLQVLRAINQRLLAEELHRAAIQEYSTQENGTDDSAASSSLGENKPRSLKTPDHPEGNEGNGPRPYGGGAASLRCSQPEAGRGLSRKPLSKRREKASEGLDAQGKPRTRSPALPGGRSPGPCRALEGGQAEVRLRRNASSAGRLQGLAGGAPGQKECRPFEVYLPSGKMRPRSLEVTISTGEKAPANPEILLTLEEKTAANLDSATEPRARPTPDGGASADLKEGPGNPEHSVTGRPPDTAASPRCHAQEGDPVDGTCVRDSCSFPEAVSGHPQASGSRSPGCPRCQDSHERKSPGSLSPQPLPQCKRHLKQVQLLFCEDHDEPICLICSLSQEHQGHRVRPIEEVALEHKKKIQKQLEHLKKLRKSGEEQRSYGEEKAVSFLKQTEALKQRVQRKLEQVYYFLEQQEHFFVASLEDVGQMVGQIRKAYDTRVSQDIALLDALIGELEAKECQSEWELLQDIGDILHRAKTVPVPEKWTTPQEIKQKIQLLHQKSEFVEKSTKYFSETLRSEMEMFNVPELIGAQAHAVNVILDAETAYPNLIFSDDLKSVRLGNKWERLPDGPQRFDSCIIVLGSPSFLSGRRYWEVEVGDKTAWILGACKTSISRKGNMTLSPENGYWVVIMMKENEYQASSVPPTRLLIKEPPKRVGIFVDYRVGSISFYNVTARSHIYTFASCSFSGPLQPIFSPGTRDGGKNTAPLTICPVGGQGPD

SEQ ID NO: 8301 - protein, 329 aa, Homo sapiens
MGNVLAASSPPAGPPPPPAPALVGLPPPPPSPPGFTLPPLGGSLGAGTSTSRSSERTPGAATASASGAAEDGACGCLPNPGTFEECHRKCKELFPIQMEGVKLTVNKGLSNHFQVNHTVALSTIGESNYHFGVTYVGTKQLSPTEAFPVLVGDMDNSGSLNAQVIHQLGPGLRSKMAIQTQQSKFVNWQVDGEYRGSDFTAAVTLGNPDVLVGSGILVAHYLQSITPCLALGGELVYHRRPGEEGTVMSLAGKYTLNNWLATVTLGQAGMHATYYHKASDQLQVGVEFEASTRMQDTSVSFGYQLDLPKANLLFKGKGLGSPTRETGRR

SEQ ID NO: 8302 - protein, 361 aa, Homo sapiens
MGNVLAASSPPAGPPPPPAPALVGLPPPPPSPPGFTLPPLGGSLGAGTSTSRSSERTPGAATASASGAAEDGACGCLPNPGTFEECHRKCKELFPIQMEGVKLTVNKGLSNHFQVNHTVALSTIGESNYHFGVTYVGTKQLSPTEAFPVLVGDMDNSGSLNAQVIHQLGPGLRSKMAIQTQQSKFVNWQVDGEYRGSDFTAAVTLGNPDVLVGSGILVAHYLQSITPCLALGGELVYHRRPGEEGTVMSLAGKYTLNNWLATVTLGQAGMHATYYHKASDQLQVGVEFEASTRMQDTSVSFGYQLDLPKANLLFKGSVDSNWIVGATLEKKLPPLPLTLALGAFLNHRKNKFQCGFGLTIG

SEQ ID NO: 8303 - protein, 739 aa, Homo sapiens
MIPYGFNNQTKHCLRRLGKRYEFQIQDLRPEDSGIYQVKVEDAVVFSTELEASAIPPRVVVPLAETHCEEQGDAVFECTLSSPCPSAAWHFRHRLLHPSDKYEVYVSPDGLTHRLVVRGARFSDMGPYSLGTGLYTSSAWLVVEAGKDKDLQSTSADHKLQRQGAQASGAEESGSIESQGEKSREQGPRGGSLEGAGPASGLQHIASPDRDGLGRHGYSLMGDKGTADSAWGPGQEGEGFPVAEGSRATLPRENQSHREGGWARSLAERPHLQGESSESGLGLPEKQQQDRGRDSNSDECWRKAGGWEAGSSRLQAGGLGSSREGKEHRGDSGRQLDRHAPEQLWDARLGPGRGKSDLQGCQSDPVGSWPRGKQIEISQDDSLAEMDRGDAPSRERGRGIVVWGGGTGLGEAGDSNGAGGPGTLELTGGRGSGSKVGMAPESWGSQGGRDADYGEARGYWGSGELLEQIPGGKDFQEPSISGGRKFLLGDGSPEIKAEDSLQEADGICRGESVVTGSAYKTGPGGPGDPRGCEGVLQELRGRDGQETAWASGEVEYDPRSFQSSQGWTAGHRAAGGIGRIESKGTSPWDDTPSSLRKTGAHHGPGVLGPSGGQEGMGGIWVAGLTESGQGVDARSHWLSRAPGLGAQGSGGTLGDKKGLRGPGSIGSEPDFWNGSGSSRVKGPRGHLREWSLRKGVGTGMAPERLGECGLEMKILALQEEGLGELPVLKMAQVVLMEHP

SEQ ID NO: 8304 - protein, 504 aa, Homo sapiens
MVLADLGRKITSALRSLSNATIINEEVLNAMLKEVCTALLEADVNIKLVKQLRENVKSAIDLEEMASGLNKRKMIQHAVFKELVKLVDPGVKAWTPTKGKQNVIMFVGLQGSGKTTTCSKLAYYYQRKGWKTCLICADTFRAGAFDQLKQNATKARIPFYGSYTEMDPVIIASEGVEKFKNENFEIIIVDTSGRHKQEDSLFEEMLQVANAIQPDNIVYVMDASIGQACEAQAKAFKDKVDVASVIVTKLDGHAKGGGALSAVAATKSPIIFIGTGEHIDDFEPFKTQPFISKLLGMGDIEGLIDKVNELKLDDNEALIEKLKHGQFTLRDMYEQFQNIMKMGPFSQILGMIPGFGTDFMSKGNEQESMARLKKLMTIMDSMNDQELDSTDGAKVFSKQPGRIQRVARGSGVSTRDVQELLTQYTKFAQMVKKMGGIKGLFKGGDMSKNVSQSQMAKLNQQMAKMMDPRVLHHMGGMAGLQSMMRQFQQGAAGNMKGMMGFNNM

SEQ ID NO: 8305 - protein, 618 aa, Homo sapiens
MAAVAAGGLVGKGRDISLAALQRHDPYINRIVDVASQVALYTFGHRANEWEKTDVEGTLFVYTRSASPKHGFTIMNRLSMENRTEPITKDLDFQLQDPFLLYRNARLSIYGIWFYDKEECQRIAELMKNLTQYEQLKAHQGTGAGISPVILNSGEGKEVDILRMLIKAKDEYTKCKTCSEPKKITSSSAIYDNPNLIKPIPVKPSENQQQRIPQPNQTLDPEPQHLSLTALFGKQDKATCQETVEPPQTLHQQQQQQQQQQQEKLPIRQGVVRSLSYEEPRRHSPPIEKQLCPAIQKLMVRSADLHPLSELPENRPCENGSTHSAGEFFTGPVQPGSPHNIGTSRGVQNASRTQNLFEKLQSTPGAANKCDPSTPAPASSAALNRSRAPTSVTPVAPGKGLAQPPQAYFNGSLPPQTVGHQAHGREQSTLPRQTLPISGSQTGSSGVISPQELLKKLQIVQQEQQLHASNRPALAAKFPVLAQSSGTGKPLESWINKTPNTEQQTPLFQVISPQRIPATAAPSLLMSPMVFAQPTSVPPKERESGLLPVGGQEPPAAATSLLLPIQSPEPSVITSSPLTKLQLQEALLYLIQNDDNFLNIIYEAYLFSMTQAAMKKTM

SEQ ID NO: 8306 - protein, 139 aa, Homo sapiens
NENNAAGYSCGPGTLKMNGKLSEERTEDTDCDGSPLPEYFTEATKMNGCEEYCEEKVKSESLIQKPQEKKTDDDEITWGNDELPIERTNHEDSDKGKNFNDNHSFLTNDELAVLPVVKVLPSGKYTGANLKSVIRVLRG

SEQ ID NO: 8307 - protein, 378 aa, Homo sapiens
MEVINLTTLPMIPVDEHLAVSLVARNTMVKTVRKELENNPPSCLIGSMHQVNQKIADINLRTEPSANSLAIERFELEKKALREKTRSSPEDKGKNLSLSLDALFMGKSQYSCKGSELRHARSSVIKRKTADKNLLAELYQYSNFNSSKPNKLPNGVDFCDMVGNVVRAERDCLSGKHFCSGRELEKFLSSSSPRAIWLDSFWWIFHERYQPNKELQNNLFDRIAQHYALLLFRVPKSHSEEALLKRLPSLLSKAVYTSFCCCFPQSWFDTHEFKSDICNTMSLWISGTYPSPQSYDSWDYSELDPERFRREELMLYRRRLTKGREFSLFAGKRAFSQKPAQSRKFYHPQVSGEARTRTPLESHKLQEPSVLLEHQWPP

SEQ ID NO: 8308 - protein, 540 aa, Homo sapiens
MASQEFEVEAIVDKRQDKNGNTQYLVRWKGYDKQDDTWEPEQHLMNCEKCVHDFNRRQTEKQKKLTWTTTSRIFSNNARRRTSRSTKANYSKNSPKTPVTDKHHRSKNRKLFAASKNVRRKAASILSDTKNMEIINSTIETLAPDSPFDHKTVSGFQKLEKLDPIAADQQDTVVFKVTEGKLLRDPLSRPGAEQTGIQNKTQIHPLMSQMSGSVTASMATGSATRKGIVVLIDPLAANGTTDMHTSVPRVKGGQRNITDDSRDQPFIKKMHFTIRLTESASTYRDIVVKKEDGFTQIVLSTRSTEKNALNTEVIKEIVNALNSAAADDSKLVLFSAAGSVFCCGLDFGYFVKHLRNNRNTASLEMVDTIKNFVNTFIQFKKPIVVSVNGPAIGLGASILPLCDLVWANEKAWFQTPYTTFGQSPDGCSSITFPKMMGKASANEMLIAGRKLTAREACAKGLVSQVFLTGTFTQEVMIQIKELASYNPIVLEECKALVRCNIKLELEQANERECEVLRKIWSSAQGIESMLKYVENKIDEF

SEQ ID NO: 8309 - protein, 554 aa, Homo sapiens
MASQEFEVEAIVDKRQDKNGNTQYLVRWKGYDKQDDTWEPEQHLMNCEKCVHDFNRRQTEKQKKLTWTTTSRIFSNNARRRTSRSTKANYSKNSPKTPVTDKHHRSKNRKLFAASKNVRRKAASILSDTKNMEIINSTIETLAPDSPFDHKTVSGFQKLEKLDPIAADQQDTVVFKVTEGKLLRDPLSRPGAEQTGIQNKTQIHPLMSQMSGSVTASMATGSATRKGIVVLIDPLAANGTTDMHTSVPRVKGGQRNITDDSRDQPFIKKMHFTIRLTESASTYRDIVVKKEDGFTQIVLSTRSTEKNALNTEVIKEIVNALNSAAADDSKLVLFSAAGSVFCCGLDFGYFVKHLRNNRNTASLEMVDTIKNFVNTFIQFKKPIVVSVNGPAIGLGASILPLCDLVWANEKAWFQTPYTTFGQSPDGCSSITFPKMMGKASANEMLIAGRKLTAREACAKGLVSQVFLTGTFTQEVMIQIKELASYNPIVLEECKALVRCNIKLELEQANERECEVLRKIWSSAQGIESMLKIPLLGYKAAFPPRKTQNDQRWCP

SEQ ID NO: 8310 - protein, 329 aa, Homo sapiens
MATGQKLMRAVRVFEFGGPEVLKLRSDIAVPIPKDHQVLIKVHACGVNPVETYIRSGTYSRKPLLPYTPGSDVAGVIEAVGDNASAFKKGDRVFTSSTISGGYAEYALAADHTVYKLPEKLDFKQGAAIGIPYFTAYRALIHSACVKAGESVLVHGASGGVGLAACQIARAYGLKILGTAGTEEGQKIVLQNGAHEVFNHREVNYIDKIKKYVGEKGIDIIIEMLANVNLSKDLSLLSHGGRVIVVGSRGTIEINPRDTMAKESSIIGVTLFSSTKEEFQQYAAALQAGMEIGWLKPVIGSQYPLEKVAEAHENIIHGSGATGKMILLL

SEQ ID NO: 8311 - protein, 895 aa, Homo sapiens
  VARIANT 295, 530, 545, 664, 666, 697: Xaa = Any Amino Acid
MQGPLTFMDVAIEFSLEEWQCLDTAQRNVYRHVMLENYRNLVFLALCSRFAQDLWLEQNIKDSFQKVTLSRYGKYGHKNLQLRKGCKSVDECKGHQGGFNGLNQCLKITTSKIFQCNKYVKVMHKFSNSNRHKIRHTENKHFRCKECDKSLCMLSRLTQHKKIHTRENFYKCEECGKTFNWSTNLSKPKKIHTGEKPYKCEVCGKAFHQSSILTKHKIIRTGEKPYKCAHCGKAFKQSSHLTRHKIIHTEEKPYKCEQCGKVFKQSPTLTKHQIIYTGEEPYKCEECGKAFNLSXQLTEHKKIYTREKAYKCEECGKAFNQFSTLITHKIIHSGEKPHKCEECGRAFNQSAKLTEHKLIHTGEKPYKCKECGKAFHRYSILSTHKKIHTGEKPHKCGECGKAFNWSSTLITHKIIHSGEKPYKCEECGKAFNQSSHLMRHKKIHSKEKPYKCEQCGKVFKKSSTLTAHKIIHTGEKPYKCEECGKGFSQLSNLTKHKKIHTREKPYKCEECGISFNQFSQLAIHKMIHTXMKPYKCERCGSCFNXFSNFTMHKKIQTGEKLYKCEECGKAFNQVSTLTIHKIIYTGAKPWKFKECGKTYNPQNFLTPKIHAGEKHHKCEKFGKFFNKSSTLSAHNIIHTGEKPHKYEECGNAFNQFSNLTKQNXYXKCYKPEKCENDFTKPSNFSKHKGNHTGKKLXKCEECDKAFKWLSHLIVGKIIHTGRNSQKCEEYGKTLIPIPYCTGKHLYFRKCCTDIKNVEKPLICAYILFNIRDRLRDSRSVLLGSLRPRSSWSLGSATSDTDVSESSMPIWTSPGEVNLGLLVTRTGLPLRKETLPGCAHDSRPGRNGQKEKGGVLTQRLPNWTGVAAAAVTWRQVTGRNGPMAVEEKPDLTEGEA

SEQ ID NO: 8312 - protein, 1233 aa, Homo sapiens
TTSTTSASTTSTISPLTTSTTSAPITSMPSGPGTTPSPVPTTSTTSAPTTSTTSGPGTTPSPVPTTSTTSAPTTSTTSASTASTTSGPGTTPSPVPTTSTTSAPTTSTTSASTASTTSGPGTSLSPVPTTSTTSAPTTSTTSGPGTTPSPVPTTSTTSAPTTSTTSGPGTTPSPVPTTSTTPVSKTSTSHLSVSKTTHSQPVTSDCHPLCAWTKWFDVDFPSPGPHGGDKETYNNIIRSGEKICRRPEEITRLQCRAESHPEVNIEHLGQVVQCSREEGLVCRNQDQQGPFKMCLNYEVRVLCCETPRGCPVTSVTPYGTSPTNALYPSLSTSMVSASVASTSVASSSVASSSVAYSTQTCFCNVADRLYPAGSTIYRHRDLAGHCYYALCSQDCQVVRGVDSDCPSTTLPPAPATSPSISTSEPVTELGCPNAVPPRKKGETWATPNCSEATCEGNNVISLSPRTCPRVEKPTCANGYPAVKVADQDGCCHHYQCQCVCSGWGDPHYITFDGTYYTFLDNCTYVLVQQIVPVYGHFRVLVDNYFCGAEDGLSCPRSIILEYHQDRVVLTRKPVHGVMTNEIIFNNKVVSPGFRKNGIVVSRIGVKMYATIPELGVQVMFSGLIFSVEVPFSKFANNTEGQCGTCTNDRKDECRTPRGTVVASCSEMSGLWNVSIPDQPACHRPHPTPTTVGPTTVGSTTVGPTTVGSTTVGPTTPPAPCLPSPICHLILSKVFEPCHTVIPPLLFYEGCVFDRCHMTDLDVVCSSLELYAALCASHDICIDWRGRTGHMCPFTCPADKVYQPCGPSNPSYCYGNDSASLGALREAGPITEGCFCPEGMTLFSTSAQVCVPTGCPRCLGPHGEPVKVGHTVGMDCQECTCEAATWTLTCRPKLCPLPPACPLPGFVPVPAAPQAGQCCPQYSCACNTSRCPAPVGCPEGARAIPTYQEGACCPVQNCSWTVCSINGTLYQPGAVVSSSLCETCRCELPGGPPSDAFVVSCETQICNTHCPVGFEYQEQSGQCCGTCVQVACVTNTSKSPAHLFYPGETWSDAGNHCVTHQCEKHQDGLVVVTTKKACPPLSCSLDEARMSKDGCCRFCPLPPPPYQNQSTCAVYHRSLIIQQQGCSSSEPVRLAYCRGNCGDSSSMYSLEGNTVEHRCQCCQELRTSLRNVTLHCTDGSSRAFSYTEVEECGCMGRRCPAPGDTQHSEEAEPEPSQEAESGSWERGVPVSPMH

SEQ ID NO: 8313 - protein, 446 aa, Homo sapiens
MCNTNMSVPTDGAVTTSQIPASEQETLVRPKPLLLKLLKSVGAQKDTYTMKEKIYTMIYRNLVVVNQQESSDSGTSVSENRCHLEGGSDQKDLVQELQEEKPSSSHLVSRPSTSSRRRAISETEENSDELSGERQRKRHKSDSISLSFDESLALCVIREICCERSSSSESTGTPSNPDLDAGVSEHSGDWLDQDSVSDQFSVEFEVESLDSEDYSLSEEGQELSDEDDEVYQVTVYQAGESDTDSFEEDPEISLADYWKCTSCNEMNPPLPSHCNRCWALRENWLPEDKGKDKGEISEKAKLENSTQAEEGFDVPDCKKTIVNDSRESCVEENDDKITQASQSQESEDYSQPSTSSSIIYSSQEDVKEFEREETQDKEESVESSLPLNAIEPCVICQGRPKNGCIVHGKTGHLMACFTCAKKLKKRNKPCPVCRQPIQMIVLTYFP

SEQ ID NO: 8314 - protein, 270 aa, Homo sapiens
MCNTNMSVPTDGAVTTSQIPASEQETLDLDAGVSEHSGDWLDQDSVSDQFSVEFEVESLDSEDYSLSEEGQELSDEDDEDYWKCTSCNEMNPPLPSHCNRCWALRENWLPEDKGKDKGEISEKAKLENSTQAEEGFDVPDCKKTIVNDSRESCVEENDDKITQASQSQESEDYSQPSTSSSIIYSSQEDVKEFEREETQDKEESVESSLPLNAIEPCVICQGRPKNGCIVHGKTGHLMACFTCAKKLKKRNKPCPVCRQPIQMIVLTYFP

SEQ ID NO: 8315 - protein, 296 aa, Homo sapiens
MCNTNMSVPTDGAVTTSQIPASEQETLDLDAGVSEHSGDWLDQDSVSDQFSVEFEVESLDSEDYSLSEEGQELSDEDDEVYQVTVYQAGESDTDSFEEDPEISLADYWKCTSCNEMNPPLPSHCNRCWALRENWLPEDKGKDKGEISEKAKLENSTQAEEGFDVPDCKKTIVNDSRESCVEENDDKITQASQSQESEDYSQPSTSSSIIYSSQEDVKEFEREETQDKEESVESSLPLNAIEPCVICQGRPKNGCIVHGKTGHLMACFTCAKKLKKRNKPCPVCRQPIQMIVLTYFP

SEQ ID NO: 8316 - protein, 243 aa, Homo sapiens
MCNTNMSVPTDGAVTTSQIPASEQETLVRPKPLLLKLLKSVGAQKDTYTMKEDYWKCTSCNEMNPPLPSHCNRCWALRENWLPEDKGKDKGEISEKAKLENSTQAEEGFDVPDCKKTIVNDSRESCVEENDDKITQASQSQESEDYSQPSTSSSIIYSSQEDVKEFEREETQDKEESVESSLPLNAIEPCVICQGRPKNGCIVHGKTGHLMACFTCAKKLKKRNKPCPVCRQPIQMIVLTYFP

SEQ ID NO: 8317 - protein, 218 aa, Homo sapiens
MCNTNMSVPTDGAVTTSQIPASEQETLDYWKCTSCNEMNPPLPSHCNRCWALRENWLPEDKGKDKGEISEKAKLENSTQAEEGFDVPDCKKTIVNDSRESCVEENDDKITQASQSQESEDYSQPSTSSSIIYSSQEDVKEFEREETQDKEESVESSLPLNAIEPCVICQGRPKNGCIVHGKTGHLMACFTCAKKLKKRNKPCPVCRQPIQMIVLTYFP

SEQ ID NO: 8318 - protein, 436 aa, Homo sapiens
MCNTNMSVPTDGAVTTSQIPASEQETLVRPKPLLLKLLKSVGAQKDTYTMKEVLFYLGQYIMTKRLYDEKQQHIVYCSNDLLGDLFGVPSFSVKEHRKIYTMIYRNLVVVNQQEENSDELSGERQRKRHKSDSISLSFDESLALCVIREICCERSSSSESTGTPSNPDLDAGVSEHSGDWLDQDSVSDQFSVEFEVESLDSEDYSLSEEGQELSDEDDEVYQVTVYQAGESDTDSFEEDPEISLADYWKCTSCNEMNPPLPSHCNRCWALRENWLPEDKGKDKGEISEKAKLENSTQAEEGFDVPDCKKTIVNDSRESCVEENDDKITQASQSQESEDYSQPSTSSSIIYSSQEDVKEFEREETQDKEESVESSLPLNAIEPCVICQGRPKNGCIVHGKTGHLMACFTCAKKLKKRNKPCPVCRQPIQMIVLTYFP

SEQ ID NO: 8319 - protein, 491 aa, Homo sapiens
MCNTNMSVPTDGAVTTSQIPASEQETLVRPKPLLLKLLKSVGAQKDTYTMKEVLFYLGQYIMTKRLYDEKQQHIVYCSNDLLGDLFGVPSFSVKEHRKIYTMIYRNLVVVNQQESSDSGTSVSENRCHLEGGSDQKDLVQELQEEKPSSSHLVSRPSTSSRRRAISETEENSDELSGERQRKRHKSDSISLSFDESLALCVIREICCERSSSSESTGTPSNPDLDAGVSEHSGDWLDQDSVSDQFSVEFEVESLDSEDYSLSEEGQELSDEDDEVYQVTVYQAGESDTDSFEEDPEISLADYWKCTSCNEMNPPLPSHCNRCWALRENWLPEDKGKDKGEISEKAKLENSTQAEEGFDVPDCKKTIVNDSRESCVEENDDKITQASQSQESEDYSQPSTSSSIIYSSQEDVKEFEREETQDKEESVESSLPLNAIEPCVICQGRPKNGCIVHGKTGHLMACFTCAKKLKKRNKPCPVCRQPIQMIVLTYFP

SEQ ID NO: 8320 - protein, 430 aa, Homo sapiens
MTKRLYDEKQQHIVYCSNDLLGDLFGVPSFSVKEHRKIYTMIYRNLVVVNQQESSDSGTSVSENRCHLEGGSDQKDLVQELQEEKPSSSHLVSRPSTSSRRRAISETEENSDELSGERQRKRHKSDSISLSFDESLALCVIREICCERSSSSESTGTPSNPDLDAGVSEHSGDWLDQDSVSDQFSVEFEVESLDSEDYSLSEEGQELSDEDDEVYQVTVYQAGESDTDSFEEDPEISLADYWKCTSCNEMNPPLPSHCNRCWALRENWLPEDKGKDKGEISEKAKLENSTQAEEGFDVPDCKKTIVNDSRESCVEENDDKITQASQSQESEDYSQPSTSSSIIYSSQEDVKEFEREETQDKEESVESSLPLNAIEPCVICQGRPKNGCIVHGKTGHLMACFTCAKKLKKRNKPCPVCRQPIQMIVLTYFP

SEQ ID NO: 8321 - protein, 321 aa, Homo sapiens
MCNTNMSVPTDGAVTTSQIPASEQETLVRPKPLLLKLLKSVGAQKDTYTMKEDLDAGVSEHSGDWLDQDSVSDQFSVEFEVESLDSEDYSLSEEGQELSDEDDEVYQVTVYQAGESDTDSFEEDPEISLADYWKCTSCNEMNPPLPSHCNRCWALRENWLPEDKGKDKGEISEKAKLENSTQAEEGFDVPDCKKTIVNDSRESCVEENDDKITQASQSQESEDYSQPSTSSSIIYSSQEDVKEFEREETQDKEESVESSLPLNAIEPCVICQGRPKNGCIVHGKTGHLMACFTCAKKLKKRNKPCPVCRQPIQMIVLTYFP

SEQ ID NO: 8322 - protein, 418 aa, Homo sapiens
MPGHDAEPQHQSQKVQDWMLAADTVSMAELQCTQLDLERKLKLNENAISRLQANQKSVLVSVSEVKAVAEMQFGELLAAVRKAQANVMLFLEEKEQAALSQANGIKAHLEYRSAEMEKSKQELETMAAISNTVQFLEEYCKFKNTEDITFPSVYIGLKDKLSGIRKVITESTVHLIQLLENYKKKLQEFSKEEEYDIRTQVSAIVQRKYWTSKPEPSTREQFLQYVHDITFDPDTAHKYLRLQEENRKVTNTTPWEHPYPDLPSRFLHWRQVLSQQSLYLHRYYFEVEIFGAGTYVGLTCKGIDQKGEERSSCISGNNFSWSLQWNGKEFTAWYSDMETPLKAGPFWRLGVYIDFPGGILSFYGVEYDSMTLVHKFACKFSEPVYAAFWLSKKENAIRIVDLGEEPEKPAPSLVGTAP

SEQ ID NO: 8323 - protein, 708 aa, Homo sapiens
MSFKDKDERISCLEAYVTLTSKSSRFTDETEILKMSQRHSGQAGTEAGNGADSPPIVNSKYSTFRDFCSTSSFQDSGYNELKSCSFDNIDKEYLGKKEKGPTLLYEHPETSGLGLTHPLESPTQKKKCILPRKEKDKTPELCETPKISGKKCLPRRRLNVSFALLKGDFESQNSSLESSISQVINLEKNIPSSASGFSRANNFSPLVTSTLKTEEVTSCSQKLRLNFSQQKTSTIDDSKDDCSLFEVECISPIQGNNFKDSITHDFSDSSLCINDENACPELLGSSVSGTTCGTDEDIFVTPISNLVANIRFNASQILSPSPEVRGSISTPEDSGFNSLSLEKSEDSLSDQEGSFQELLQKHKGTPKVGDTIRKTRHLGRSRRLSTLREQSSQSETEEEKQIVHPDSEKRAAAASAISEGQLSSDESGDLTFSLKNLSKTPALQLVHELFMKSKRKRLQENSGHEFLEQGDGEKIAVLQCILAGLIGKKMGIEKLDILTELKYRNLKHILAMVLESLTAESLCSVWKVSRNWREIVVQDKNANRRRKFYITQLKTDSEGAVLNVEDAATRLQLLNRSALRSVQAQARIPGSQREQGSTLSPWGEVLTPLASSSVTHLSSKQEEYVKVAKTLFTDEALKPCPRCQSPAKYQPYKKRGLCSRTACGFDFCVLCLCAYHGSEECSRGAAKPRNRKDALPGSAQSKRNLKRL

SEQ ID NO: 8324 - protein, 875 aa, Homo sapiens
MEKLHQCYWKSGEPQSDDIEASRMKRAAAKHLIERYYHQLTEGCGNEACTNEFCASCPTFLRMDNNAAAIKALELYKINAKLCDPHPSKKGASSAYLENSKGAPNNSCSEIKMNKKGARIDFKDVTYLTEEKVYEILELCREREDYSPLIRVIGRVFSSAEALVQSFRKVKQHTKEELKSLQAKDEDKDEDEKEKAACSAAAMEEDSEASSSRIGDSSQGDNNLQKLGPDDVSVDIDAIRRVYTRLLSNEKIETAFLNALVYLSPNVECDLTYHNVYSRDPNYLNLFIIGMENRNLHSPEYLEMALPLFCKAMSKLPLAAQGKLIRLWSKYNADQIRRMMETFQQLITYKVISNEFNSRNLVNDDDAIVAASKCLKMVYYANVVGGEVDTNHNEEDDEEPIPESSELTLQELLGEERRNKKGPRVDPLETELGVKTLDCRKPLIPFEEFINEPLNEVLEMDKDYTFFKVETENKFSFMTCPFILNAVTKNLGLYYDNRIRMYSERRITVLYSLVQGQQLNPYLRLKVRRDHIIDDALVRLEMIAMENPADLKKQLYVEFEGEQGVDEGGVSKEFFQLVVEEIFNPDIGMFTYDESTKLFWFNPSSFETEGQFTLIGIVLGLAIYNNCILDVHFPMVVYRKLMGKKGTFRDLGDSHPVLYQSLKDLLEYEGNVEDDMMITFQISQTDLFGNPMMYDLKENGDKIPITNENRKEFVNLYSDYILNKSVEKQFKAFRRGFHMVTNESPLKYLFRPEEIELLICGSRNLDFQALEETTEYDGGYTRDSVLIREFWEIVHSFTDEQKRLFLQFTTGTDRAPVGGLGKLKMIIAKNGPDTERLPTSHTCFNVLLLPEYSSKEKLKERLLKAITYAKGFGML

SEQ ID NO: 8325 - protein, 852 aa, Homo sapiens [sequence omitted]

SEQ ID NO: 8326 - protein, 872 aa, Homo sapiens
MATACKRSGEPQSDDIEASRMKRAAAKHLIERYYHQLTEGCGNEACTNEFCASCPTFLRMDNNAAAIKALELYKINAKLCDPHPSKKGASSAYLENSKGAPNNSCSEIKMNKKGARIDFKDVTYLTEEKVYEILELCREREDYSPLIRVIGRVFSSAEALVQSFRKVKQHTKEELKSLQAKDEDKDEDEKEKAACSAAAMEEDSEASSSRIGDSSQGDNNLQKLGPDDVSVDIDAIRRVYTRLLSNEKIETAFLNALVYLSPNVECDLTYHNVYSRDPNYLNLFIIGMENRNLHSPEYLEMALPLFCKAMSKLPLAAQGKLIRLWSKYNADQIRRMMETFQQLITYKVISNEFNSRNLVNDDDAIVAASKCLKMVYYANVVGGEVDTNHNEEDDEEPIPESSELTLQELLGEERRNKKGPRVDPLETELGVKTLDCRKPLIPFEEFINEPLNEVLEMDKDYTFFKVETENKFSFMTCPFILNAVTKNLGLYYDNRIRMYSERRITVLYSLVQGQQLNPYLRLKVRRDHIIDDALVRLEMIAMENPADLKKQLYVEFEGEQGVDEGGVSKEFFQLVVEEIFNPDIGMFTYDESTKLFWFNPSSFETEGQFTLIGIVLGLAIYNNCILDVHFPMVVYRKLMGKKGTFRDLGDSHPVLYQSLKDLLEYEGNVEDDMMITFQISQTDLFGNPMMYDLKENGDKIPITNENRKEFVNLYSDYILNKSVEKQFKAFRRGFHMVTNESPLKYLFRPEEIELLICGSRNLDFQALEETTEYDGGYTRDSVLIREFWEIVHSFTDEQKRLFLQFTTGTDRAPVGGLGKLKMIIAKNGPDTERLPTSHTCFNVLLLPEYSSKEKLKERLLKAITYAKGFGML

SEQ ID NO: 8327 - protein, 852 aa, Homo sapiens
MKRAAAKHLIERYYHQLTEGCGNEACTNEFCASCPTFLRMDNNAAAIKALELYKINAKLCDPHPSKKGASSAYLENSKGAPNNSCSEIKMNKKGARIDFKDVTYLTEEKVYEILELCREREDYSPLIRVIGRVFSSAEALVQSFRKVKQHTKEELKSLQAKDEDKDEDEKEKAACSAAAMEEDSEASSSRIGDSSQGDNNLQKLGPDDVSVDIDAIRRVYTRLLSNEKIETAFLNALVYLSPNVECDLTYHNVYSRDPNYLNLFIIVMENRNLHSPEYLEMALPLFCKAMSKLPLAAQGKLIRLWSKYNADQIRRMMETFQQLITYKVISNEFNSRNLVNDDDAIVAASKCLKMVYYANVVGGEVDTNHNEEDDEEPIPESSELTLQELLGEERRNKKGPRVDPLETELGVKTLDCRKPLIPFEEFINEPLNEVLEMDKDYTFFKVETENKFSFMTCPFILNAVTKNLGLYYDNRIRMYSERRITVLYSLVQGQQLNPYLRLKVRRDHIIDDALVRLEMIAMENPADLKKQLYVEFEGEQGVDEGGVSKEFFQLVVEEIFNPDIGMFTYDESTKLFWFNPSSFETEGQFTLIGIVLGLAIYNNCILDVHFPMVVYRKLMGKKGTFRDLGDSHPVLYQSLKDLLEYEGNVEDDMMITFQISQTDLFGNPMMYDLKENGDKIPITNENRKEFVNLYSDYILNKSVEKQFKAFRRGFHMVTNESPLKYLFRPEEIELLICGSRNLDFQALEETTEYDGGYTRDSVLIREFWEIVHSFTDEQKRLFLQFTTGTDRAPVGGLGKLKMIIAKNGPDTERLPTSHTCFNVLLLPEYSSKEKLKERLLKAITYAKGFGML

SEQ ID NO: 8328 - protein, 1348 aa, Homo sapiens
GAKDLVCSKMSRAKDAVSSGVASVVDVAKGVVQGGLDTTRSALTGTKEAVSSGVTGAMDMAKGAVQGGLDTSKAVLTGTKDTVSTGLTGAVNVAKGTVQAGVDTTKTVLTGTKDTVTTGVMGAVNLAKGTVQTGVETSKAVLTGTKDAVSTGLTGAVNVARGSIQTGVDTSKTVLTGTKDTVCSGVTSAMNVAKGTIQTGVDTSKTVLTGTKDTVCSGVTGAMNVAKGTIQTGVDTSKTVLTGTKDTVCSGVTGAMNVAKGTIQTGVDTTKTVLTGTKNTVCSGVTGAVNLAKEAIQGGLDTTKSMVMGTKDTMSTGLTGAANVAKGAMQTGLNTTQNIATGTKDTVCSGVTGAMNLARGTIQTGVDTTKIVLTGTKDTVCSGVTGAANVAKGAVQGGLDTTKSVLTGTKDAVSTGLTGAVNVAKGTVQTGVDTTKTVLTGTKDTVCSGVTSAVNVAKGAVQGGLDTTKSVVIGTKDTMSTGLTGAANVAKGAVQTGVDTAKTVLTGTKDTVTTGLVGAVNVAKGTVQTGMDTTKTVLTGTKDTIYSGVTSAVNVAKGAVQTGLKTTQNIATGTKNTFGSGVTGAVNVAKGAVQTGVDTAKTVLTGTKDTVTTGLMGAVNVAKGTVQTSVDTTKTVLTGTKDTVCSGVTGAANVAKGAVQTGVDTAKTVLTGTKDTVCSGVTGAVNVAKGAVQTGLKTTQNIATGTKNTLGSGVTGAANVAKGAVQGGLDTTKSVLTGTKDAVSTGLTGAVNLAKGTVQTGMDTTKTVLTGTKDAVCSGVTGAANVAKGAVQTGVDTAKTVLTGTKDTVTTGLMGAVNVAKGTVQTSVDTTKTVLTGTKDTVCSGVTGAANVAKGAVQGGLDTTKSVLTGTKDTVSTGLTGAVNLAKGTVQTGVDTSKTVLTGTKDTVCSGVTGAVNVAKGTVQTGVDTAKTVLSGAKDAVTTGVTGAVNVAKGTVQTGVDASKAVLMGTKDTVFSGVTGAMSMAKGAVQGGLDTTKTVLTGTKDAVSAGLMGSGNVATGATHTGLSTFQNWLPSTPATSWGGLTSSRTTDNGGEQTALSPQEAPFSGISTPPDVLSVGPEPAWEAAATTKGLATDVATFTQGAAPGREDTGLLTTTHGPEEAPRLAMLQNELEGLGDIFHPMNAEEQAQLAASQPGPKVLSAEQGSYFVRLGDLGPSFRQRAFEHAVSHLQHGQFQARDTLAQLQDCFRLIEKAQQAPEGQPRLDQGSGASAEDAAVQEERDAGVLSRVCGLLRQLHTAYSGLVSSLQGLPAELQQPVGRARHSLCELYGIVASAGSVEELPAERLVQSREGVHQAWQGLEQLLEGLQHNPPLSWLVGPFALPAGGQ

SEQ ID NO: 8329 - protein, 526 aa, Homo sapiens
ADSRDPASDQMQHWKEQRAAQKADVLTTGAGNPVGDKLNVITVGPRGPLLVQDVVFTDEMAHFDRERIPERVVHAKGAGAFGYFEVTHDITKYSKAKVFEHIGKKTPIAVRFSTVAGESGSADTVRDPRGFAVKFYTEDGNWDLVGNNTPIFFIRDPILFPSFIHSQKRNPQTHLKDPDMVWDFWSLRPESLHQVSFLFSDRGIPDGHRHMNGYGSHTFKLVNANGEAVYCKFHYKTDQGIKNLSVEDAARLSQEDPDYGIRDLFNAIATGKYPSWTFYIQVMTFNQAETFPFNPFDLTKVWPHKDYPLIPVGKLVLNRNPVNYFAEVEQIAFDPSNMPPGIEASPDKMLQGRLFAYPDTHRHRLGPNYLHIPVNCPYRARVANYQRDGPMCMQDNQGGAPNYYPNSFGAPEQQPSALEHSIQYSGEVRRFNTANDDNVTQVRAFYVNVLNEEQRKRLCENIAGHLKDAQIFIQKKAVKNFTEVHPDYGSHIQALLDKYNAEKPKNAIHTFVQSGSHLAAREKANL

SEQ ID NO: 8330 - protein, 841 aa, Homo sapiens
MTATTWLKEGPPAHKLEMPRQPDCQECRGTEQAAEPLAKEACDLCSDFSDEEPVGATGIKTAKNKAPDSSKASSSPGQLTLLQCGFSKLLETKCKAVEDSDGNTASDDESSDEQPTCLSTEAKDAGCEKNQDSLGTSKHQKLDNILNPKEKHIFYKSEKILEQNISSKSDEKKIKNTDKHCILQNVTESEDSDVICPTQYTTERFPDNSIRFKPPLEGSEDSETEHTVKTRNNDNSRNTDDKRNGIISKKLSPENTTLKSILKRKGTSDISDESDDIEISSKSRVRKRASSLRFKRIKETKKELHNSPKTMNKTNQVYAANEDHNSQFIDDYSSSDESLSVSHFSFSKQSHRPRTIRDRTSFSSKLPSHNKKNSTFIPRKPMKCSNEKVVNQEQSYESMDKFLDGVQEVAYIHSNQNVIGSSKAENHMSRWAAHDVFELKQFSQLPANIAVCSSKTYKEKVDADTLPHTKKGQQPSEGSISLPLYISNPVNQKKKKVYHTNQTTFIIGETPKGIRRKQFEEMASYFNSSSVNEFAKHITNATSEERQKMLRDFYASQYPEVKEFFVDSVSQFNNSSFEKGEQRTRKKSDKRESLIKPRLSDSETLSFKDSTNKISQVCSLKTYKRKSVKFQNHISYREEVFFNDAETKKSPVSSTQEIDSGKNSQASEDTVTSRSLNSESETRERRLENTMKDQQDLTRTGISRKEPLLKLENKKIENPVLENTSVISLLGDTSILDDLFKSHGNSPTQLPKKVLSGPMEKAKQRPKDFWDILNEQNDESLSKLTDLAVIETLCEKAPLAAPFKRREEPATSLWKSNEKFLWKKFSPSDTDENATNTQSTT

SEQ ID NO: 8331 - protein, 460 aa, Homo sapiens
MKCSNEKVVNQEQSYESMDKFLDGVQEVAYIHSNQNVIGSSKAENHMSRWAAHDVFELKQFSQLPANIAVCSSKTYKEKVDADTLPHTKKGQQPSEGSISLPLYISNPVNQKKKKVYHTNQTTFIIGETPKGIRRKQFEEMASYFNSSSVNEFAKHITNATSEERQKMLRDFYASQYPEVKEFFVDSVSQFNNSSFEKGEQRTRKKSDKRESLIKPRLSDSETLSFKDSTNKISQVCSLKTYKRKSVKFQNHISYREEVFFNDAETKKSPVSSTQEIDSGKNSQASEDTVTSRSLNSESETRERRLENTMKDQQDLTRTGISRKEPLLKLENKKIENPVLENTSVISLLGDTSILDDLFKSHGNSPTQLPKKVLSGPMEKAKQRPKDFWDILNEQNDESLSKLTDLAVIETLCEKAPLAAPFKRREEPATSLWKSNEKFLWKKFSPSDTDENATNTQSTT

SEQ ID NO: 8332 - protein, 222 aa, Homo sapiens [sequence omitted]

SEQ ID NO: 8333 - protein, 222 aa, Homo sapiens
MLSRAVCGTSRQLAPVLGYLGSRQKHSLPDLPYDYGALEPHINAQIMQLHHSKHHAAYVNNLNVTEEKYQEALAKGDVTAQIALQPALKFNGGGHINHSIFWTNLSPNGGGEPKGELLEAIKRDFGSFDKFKEKLTAASVGVQGSGWGWLGFNKERGHLQIAACPNQDPLQGTTGLIPLLGIDVWEHAYYLQYKNVRPDYLKAIWNVINWENVTERYMACKK

SEQ ID NO: 8334 - protein, 262 aa, Homo sapiens
MKKIRQVIRKYNYVAMDTEFPGVVARPIGEFRSNADYQYQLLRCNVDLLKIIQLGLTFMNEQGEYPPGTSTWQFNFKFNLTEDMYAQDSIELLTTSGIQFKKHEEEGIETQYFAELLMTSGVVLCEGVKWLSFHSGYDFGYLIKILTNSNLPEEELDFFEILRLFFPVIYDVKYLMKSCKNLKGGLQEVAEQLELERIGPQHQAGSDSLLTGMAFFKMREMFFEDHIDDAKYCGHLYGLGSGSSYVQNGTGNAYEEEANKQS

SEQ ID NO: 8335 - protein, 285 aa, Homo sapiens
  VARIANT 4: Xaa = Any Amino Acid
MPAXTVDHSQRICEVWACNLDEEMKKIRQVIRKYNYVAMDTEFPGVVARPIGEFRSNADYQYQLLRCNVDLLKIIQLGLTFMNEQGEYPPGTSTWQFNFKFNLTEDMYAQDSIELLTTSGIQFKKHEEEGIETQYFAELLMTSGVVLCEGVKWLSFHSGYDFGYLIKILTNSNLPEEELDFFEILRLFFPVIYDVKYLMKSCKNLKGGLQEVAEQLELERIGPQHQAGSDSLLTGMAFFKMREMFFEDHIDDAKYCGHLYGLGSGSSYVQNGTGNAYEEEANKQS

SEQ ID NO: 8336 - protein, 951 aa, Homo sapiens
MCCTEGSLRKRDSQRAPEAVLCLQLWQRTVPLDTLKGLGTCFPSGPELRGAGIAAAMERASERRTASALFAGFRALGLFSNDIPHVVRFSALKRRFYVTTCVGKSFHTYDVQKLSLVAVSNSVPQDICCMAADGRLVFAAYGNVFSAFARNKEIVHTFKGHKAEIHFLQPFGDHIISVDTDGILIIWHIYSEEEYLQLTFDKSVFKISAILHPSTYLNKILLGSEQGSLQLWNVKSNKLLYTFPGWKVGVTALQQAPAVDVVAIGLMSGQVIIHNIKFNETLMKFRQDWGPITSISFRTDGHPVMAAGSPCGHIGLWDLEDKKLINQMRNAHSTAIAGLTFLHREPLLVTNGADNALRIWIFDGPTGEGRLLRFRMGHSAPLTNIRYYGQNGQQILSASQDGTLQSFSTVHEKFNKSLGHGLINKKRVKRKGLQNTMSVRLPPITKFAAEEARESDWDGIIACHQGKLSCSTWNYQKSTIGAYFLKPKELKKDDITATAVDITSCGNFAVIGLSSGTVDVYNMQSGIHRGSFGKDQAHKGSVRGVAVDGLNQLTVTTGSEGLLKFWNFKNKILIHSVSLSSSPNIMLLHRDSGILGLALDDFSISVLDIETRKIVREFSGHQGQINDMAFSPDGRWLISAAMDCSIRTWDLPSGCLIDCFLLDSAPLNVSMSPTGDFLATSHVDHLGIYLWSNISLYSVVSLRPLPADYVPSIVMLPGTCQTQDVEVSEETVEPSDELIEYDSPEQLNEQLVTLSLLPESRWKNLLNLDVIKKKNKPKEPPKVPKSAPFFIPTIPGLVPRYAAPEQNNDPQQSKVVNLGVLAQKSDFCLKLEEGLVNNKYDTALNLLKESGPSGIETELRSLSPDCGGSIEVMQSFLKMIGMMLDRKRDFELAQAYLALFLKLHLKMLPSEPVLLEEITNLSSQVEENWTHLQSLFNQSMCILNYLKSALL

SEQ ID NO: 8337 - protein, 156 aa, Homo sapiens
MTLPFVGTADEQRAYNPGRTGPAALRPLVKLKIVKKRTKKFILYQSDWYVKIKPNWQKPRGIDNRVCRRFKGQILKPIVGYGSNKKTKHMLPNGFRKFLVHDINELEVLMMCNKSYCAKIAHNVSSKNCKAIVERAAQLAIRVNNLNAILRSKENE

SEQ ID NO: 8338 - protein, 2320 aa, Homo sapiens [sequence omitted]

SEQ ID NO: 8339 - protein, 2269 aa, Homo sapiens [sequence omitted]

SEQ ID NO: 8340 - protein, 573 aa, Homo sapiens
SWRTMGSTLGCHRSIPRDPSDLSHSRKFSAACNFSNILVNQERLNINTATEEELMTLPGVTRAVARSIVEYREYIGGFKKVEDLALVSGVGATKLEQVKFEICVSSKGSSAQHSPSSLRRDLLAEQQPHHLATAVPLTPRVNINTATPAQLMSVRGLSEKMALSIVDFRREHGPFRSVEDLVRMDGINAAFLDRIRHQVFAERSRPPSTHTNGGLTFTAKPHPSPTSLSLQSEDLDLPPGGPTQIISTRPSVEAFGGTRDGRPVLRLATWNLQGCSVEKANNPGVREVVCMTLLENSIKLLAVQELLDREALEKFCTELNQPTLPNIRKWKGPRGCWKAVVAEKPSNQLQKGAGYAGFLWDAAAGMELRDAGSQESSPSNGHGKLAGPSPYLGRFKVGSHDLTLVNLHLAALTLLGSENPSKNHSDGHRLASFAQTLQETLKGEKDVIILGDFGQGPDSNDYDILRKEKFHHLIPAHTFTNISTKNPQGSKSLDNIWISKSLKKVFTGHWAVVREGLTNPWIPDNWSWGGVASEHCPVLAEFYTEKDWSKKDAPRNGSGVALERSEANIKHER

SEQ ID NO: 8341 - protein, 2154 aa, Homo sapiens
VDVITPLKDVNVIEGTKAVLECKVSVPDVTSVKWYLNDEQIKPDDRVQAIVKGTKQRLVINRTHASDEGPYKLIVGRVETNCNLSVEKIKIIRGLRDLTCTETQNVVFEVELSHSGIDVLWNFKDKEIKPSSKYKIEAHGKIYKLTVLNMMKDDEGKYTFYAGENITSGKLTVAGGAISKPLTDQTVAESQEAVFECEVANPDSKGEWLRDGKHLPLTNNIRSESDGHKRRLIIAATKLDDIGEYTYKVATSKTSAKLKVEAVKIKKTLKNLTVTETQDAVFTVELTHPNVKGVQWIKNGVVLESNEKYAISVKGTIYSLRIKNCAIVDESVYGFRLGRLGASARLHVETVKIIKKPKDVTALENATVAFEVSVSHDTVPVKWFHKNVEIKPSDKHRLVSERKVHKLMLQNISPSDAGEYTAVVGQLECKAKLFVETLHITKTMKNIEVPETKTASFECEVSHFNVPSMWLKNGVEIEMSEKFKIVVQGKLHQLIIMNTSTEDSAEYTFVCGNDQVSATLTVTPIMITSMLKDINAEEKDTITFEVTVNYEGISYKWLKNGVEIKSTDKCQMRTKKLTHSLNIRNVHFGDAADYTFVAGKATSTATLYVEARHIEFRKHIKDIKVLEKKRAMFECEVSEPDITVQWMKDDQELQITDRIKIQKEKYVHRLLIPSTRMSDAGKYTVVAGGNVSTAKLFVEGRDVRIRSIKKEVQVIEKQRAVVEFEVNEDDVDAHWYKDGIEINFQVQERHKYVVERRIHRMFISETRQSDAGEYTFVAGRNRSSVTLYVNAPEPPQVLQELQPVTVQSGKPARFCAVISGRPQPKISWYKEEQLLSTGFKCKFLHDGQEYTLLLIEAFPEDAAVYTCEAKNDYGVATTSASLSVEVPEVVSPDQEMPVYPPAIITPLQDTVTSEGQPARFQCRVSGTDLKVSWYSKDKKIKPSRFFRMTQFEDTYQLEIAEAYPEDEGTYTFVASNAVGQVSSTANLSLEGFSKFEENTSNSQWHVSLSVSFKKEPLGQKPSFIQPLSSLRVHNGETVRFHARVSGIPKPEIQWFHNQQLILPTKDVVFHFEESTGMALMLIVDAYSEHAGQYSCKAANSAGEATCAATLTVTPKAPESILHERIEQEIEMEMKEFSSSFLSAEEEGLHSAELQLSKINETLELLSESPVYSTKFDSEKEGTGPIFIKEVSNADISMGDVATLSVTVIGIPKPKIQWFFNGVLLTPSADYKFVFDGDDHSLIILFTKLEDEGEYTCMASNDYGKTICSAYLKINSKGEGHKDTETESAVAKSLEKLGGPCPPHFLKELKPIRCAQGLPAIFEYTVVGEPAPTVTWFKENKQLCTSVYYTIIHNPNGSGTFIVNDPQREDSGLYICKAENMLGESTCAAELLVLLEDTDMTDTPCKAKSTPEAPEDFPQTPLKGPAVEALDSEQEIATFVKDTILKAALITEENQQLSYEHIAKANELSSQLPLGAQELQSILEQDKLTPESTREFLCINGSIHFQPLKEPSPNLQLQIVQSQKTFSKEGILMPEEPETQAVLSDTEKIFPSAMSIEQINSLTVEPLKTLLAEPEGNYPQSSIEPPMHSYLTSVAEEVLSPKEKTVSDTNREQRVTLQKQEAQSALILSQSLAEGHVESLQSPDVMISQVNYEPLVPSEHSCTEGGKILIESANPLENAGQDSAVRIEEGKSLRFPLALEEKQVLLKEEHSDNVVMPPDQIIESKREPVAIKKVQEVQGRDLLSKESLLSGIPEEQRLNLKIQICRALQAAVASEQPGLFSEWLRNIEKVEVEAVNITQEPRHIMCMYLVTSAKSVTEEVTIIIEDVDPQMANLKMELRDALCAIIYEEIDILTAEGPRIQQGAKTSLQEEMDSFSGSQKVEPITEPEVESKYLISPEEVSYFNVQSRVKYLDATPVTKGVASAVVSDEKQDESLKPSEEKEESSSESGTEEVATVKIQEAEGGFIKEDGPMIHTPLVDTVSEEGDIVHLTTSITNAKEVNWYFENKLVPSDEKFKCLQDQNTYTLVIDKVNTEDHQGEYVCEALNDSGKTATSAKLTVVKRAAPVIKRKIEPLEVALGHLAKFTCEIQSAPNVRFQWFKAGREIYESDKCSIRSSKYISSLEILRTQVVDCGEYTCKASNEYGSVSCTATLTVT

SEQ ID NO: 8342 - protein, 356 aa, Homo sapiens
MLLGFRRGRRSHFKHIIHGLLPAASVAPKAAVPRTPPPRSPNPSPERPRSALAAAILATTLTGRTVAIPQPRQRSRSESDVSSVEQDSFIEPYATTSQLRPRPNWQSEMGRRSSLPSFETLDYGDEEDIETQLSSSGKELGDVSAREDRGGHSDDLYAVPHRNQVPLLHEVNSEDDENISHQDGFPGSPPAPQRTQQKDGKHPVLNLKDEKPPLCEKPPPSPDITGRARQRYTEITREKFEALKEENMDLNNMNQSLTLELNTMKQAMKELQLKLKGMEKEKRKLKEAEKASSQEVAAPELLYLRKQAQELVDENDGLKMTVHRLNVELSRYQTKFRHLSKEEVTFPIVKISFSDF

SEQ ID NO: 8343 - protein, 1338 aa, Homo sapiens
MSPVLHFYVRPSGHEGAASGHTRRKLQGKLPELQGVETELCYNVNWTAEALPSAEETKKLMWLFGCPLLLDDVARESWLLPGSNDLLLEVGPRLNFSTPTSTNIVSVCRATGLGPVDRVETTRRYRLSFAHPPSAEVEAIALATLHDRMTEQHFPHPIQSFSPESMPEPLNGPINILGEGRLALEKANQELGLALDSWDLDFYTKRFQELQRNPSTVEAFDLAQSNSEHSRHWFFKGQLHVDGQKLVHSLFESIMSTQESSNPNNVLKFCDNSSAIQGKEVRFLRPEDPTRPSRFQQQQGLRHVVFTAETHNFPTGVCPFSGATTGTGGRIRDVQCTGRGAHVVAGTAGYCFGNLHIPGYNLPWEDLSFQYPGNFARPLEVAIEASNGASDYGNKFGEPVLAGFARSLGLQLPDGQRREWIKPIMFSGGIGSMEADHISKEAPEPGMEVVKVGGPVYRIGVGGGAASSVQVQGDNTSDLDFGAVQRGDPEMEQKMNRVIRACVEAPKGNPICSLHDQGAGGNGNVLKELSDPAGAIIYTSRFQLGDPTLNALEIWGAEYQESNALLLRSPNRDFLTHVSARERCPACFVGTITGDRRIVLVDDRECPVRRNGQGDAPPTPPPTPVDLELEWVLGKMPRKEFFLQRKPPMLQPLALPPGLSVHQALERVLRLPAVASKRYLTNKVDRSVGGLVAQQQCVGPLQTPLADVAVVALSHEELIGAATALGEQPVKSLLDPKVAARLAVAEALTNLVFALVTDLRDVKCSGNWMWAAKLPGEGAALADACEAMVAVMAALGVAVDGGKDSLSMAARVGTETVRAPGSLVISAYAVCPDITATVTPDLKHPEGRGHLLYVALSPGQHRLGGTALAQCFSQLGEHPPDLDLPENLVRAFSITQGLLKDRLLCSGHDVSDGGLVTCLLEMAFAGNCGLQVDVPVPRVDVLSVLFAEEPGLVLEVQEPDLAQVLKRYRDAGLHCLELGHTGEAGPHAMVRVSVNGAVVLEEPVGELRALWEETSFQLDRLQAEPRCVAEEERGLRERMGPSYCLPPTFPKASVPREPGGPSPRVAILREEGSNGDREMADAFHLAGFEVWDVTMQDLCSGAIGLDTFRGVAFVGGFSYADVLGSAKGWAAAVTFHPRAGAELRRFRKRPDTFSLGVCNGCQLLALLGWVGGDPNEDAAEMGPDSQPARPGLLLRHNLSGRYESRWASVRVGPGPALMLRGMEGAVLPVWSAHGEGYVAFSSPELQAQIEARGLAPLHWADDDGNPTEQYPLNPNGSPGGVAGICSCDGRHLAVMPHPERAVRPWQWAWRPPPFDTLTTSPWLQLSINARNWTLEGSC

SEQ ID NO: 8344 - protein, 279 aa, Homo sapiens
MVRKEYPNLSTSLDDAFLLRFLRARKFDYDRALQLLVNYHSCRRSWPEVFNNLKPSALKDVLASGFLTVLPHTDPRGCHVVCIRPDRWIPSNYPITENIRAIYLTLEKLIQSEETQVNGIVILADYKGVSLSKASHFGPFIAKKVIGILQDGFPIRIKAVHVVNEPRIFKGIFAIIKPFLKEKIANRFFLHGSDLNSLHTNLPRSILPKEYGGTAGELDTATWNAVLLASEDDFVKEFCQPVPACDSILGQTLLPEGLTSDAQCDDSLRAVKSQLYSCY

SEQ ID NO: 8345 - protein, 1721 aa, Homo sapiens
MLSATPLYGNVHSWMNSERVRMCGASEDRKILVNDGDASKARLELREENPLNHNVVDASTAHRIDGLAALSMDRTGLIREGLRVPGNIVYSSLCGLGSEKGREAATSTLGGLGFSSERNPEMQFKPNTPETVEASAVSGKPPNGFSAIYKTPPGIQKSAVATAEALGLDRPASDKQSPLNINGASYLRLPWVNPYMEGATPAIYPFLDSPNKYSLNMYKALLPQQSYSLAQPLYSPVCTNGERFLYLPPPHYVGPHIPSSLASPMRLSTPSASPAIPPLVHCADKSLPWKMGVSPGNPVDSHAYPHIQNSKQPRVPSAKAVTSGLPGDTALLLPPSPRPSPRVHLPTQPAADTYSEFHKHYARISTSPSVALSKPYMTVSSEFPAARLSNGKYPKAPEGGEGAQPVPGHARKTAVQDRKDGSSPPLLEKQTVTKDVTDKPLDLSSKVVDVDASKADHMKKMAPTVLVHSRAGSGLVLSGSEIPKETLSPPGNGCAIYRSEIISTAPSSWVVPGPSPNEENNGKSMSLKNKALDWAIPQQRSSSCPRMGGTDAVITNVSGSVSSAGRPASASPAPNANADGTKTSRSSVETTPSVIQHVGQPPATPAKHSSSTSSKGAKASNPEPSFKANENGLPPSSIFLSPNEAFRSPPIPYPRSYLPYPAPEGIAVSPLSLHGKGPVYPHPVLLPNGSLFPGHLAPKPGLPYGLPTGRPEFVTYQDALGLGMVHPMLIPHTPIEITKEEKPERRSRSHERARYEDPTLRNRFSEILETSSTKLHPDVPTDKNLKPNPNWNQGKTVVKSDKLVYVDLLREEPDAKTDTNVSKPSFAAESVGQSAEPPKPSVEPALQQHRDFIALREELGRISDFHETYTFKQPVFTVSKDSVLAGTNKENLGLPVSTPFLEPPLGSDGPAVTFGKTQEDPKPFCVGSAPPSVDVTPTYTKDGADEAESNDGKVLKPKPSKLAKRIANSAGYVGDRFKCVTTELYADSSQLSREQRALQMEGLQEDSILCLPAAYCERAMMRFSELEMKEREGGHPATKDSEMCKFSPADWERLKGNQDKKPKSVTLEEAIAEQNESERCEYSVGNKHRDPFEAPEDKDLPVEKYFVERQPVSEPPADQVASDMPHSPTLRVDRKRKVSGDSSHTETTAEEVPEDPLLKAKRRRVSKGLHPKKQRHLLHLRERWEQQVSAADGKPGRQSRKEVTQATQPEAIPQGTNITEEKPGRKRAEAKGNRSWSEESLKPSDNEQGLPVFSGSPPMKSLSSTSAGGKKQAQPSCAPASRPPAKQQKIKENQKTDVLCADEEEDCQAASLLQKYTDNSEKPSGKRLCKTKHLIPQESRRGLPLTGEYYVENADGKVTVRRFRKRPEPSSDYDLSPAKQEPKPFDRLQQLLPASQSTQLPCSSSPQETTQSRPMPPEARRLIVNKNAGETLLQRAARLGYEEVVLYCLENKICDVNHRDNAGYCALHEACARGWLNIVRHLLEYGADVNCSAQDGTRPLHDAVENDHLEIVRLLLSYGADPTLATYSGRTIMKMTHSELMEKFLTDYLNDLQGRNDDDASGTWDFYGSSVCEPDDESGYDVLANPPGPEDQDDDDDAYSDVFEFEFSETPLLPCYNIQVSVAQGPRNWLLLSDVLKKLKMSSRIFRCNFPNVEIVTIAEAEFYRQVSASLLFSCSKDLEAFNPESKELLDLVEFTNEIQTLLGSSVEWLHPSDLASDNYW

SEQ ID NO: 8346 - protein, 1011 aa, Homo sapiens
METSSMLSSLNDECKSDNYIEPHYKEWYRVAIDILIEHGLEAYQEFLVQERVSDFLAEEEINYILKNVQKVAQSTAHGTDDSCDDTLSSGTYWPVESDVEAPNLDLGWPYVMPGLLGGTHIDLLFHPPRAHLLTIKETIRKMIKEARKVIALVMDIFTDVDIFKEIVEASTRGVSVYILLDESNFNHFLNMTEKQGCSVQRLRNIRVRTVKGQDYLSKTGAKFHGKMEQKFLLVDCQKVMYGSYSYMWSFEKAHLSMVQIITGQLVESFDEEFRTLYARSCVPSSFAQEESARVKHGKALWENGTYQHSVSSLASVSSQRNLFGRQDKIHKLDSSYFKNRGIYTLNEHDKYNIRSHGYKPHFVPNFNGPNAIRQFQPNQINENWKRHSYAGEQPETVPYLLLNRALNRTNNPPGNWKKPSDSLSVASSSREGYVSHHNTPAQSFANRLAQRKTTNLADRNSNVRRSFNGTDNHIRFLQQRMPTLEHTTKSFLRNWRIESYLNDHSEATPDSNGSALGDRFEGYDNPENLKANALYTHSRLRSSLVFKPTLPEQKEVNSCTTGSSNSTIIGSQGSETPKEVPDTPTNVQHLTDKPLPESIPKLPLQSEAPKMHTLQVPENHSVALNQTTNGHTESNNYIYKTLGVNKQTENLKNQQTENLLKRRSFPLFDNSKANLDPGNSKHYVYSTLTRNRVRQPEKPKEDLLKSSKSMHNVTHNLEEDEEEVTKRNSPSGTTTKSVSIAALLDVNKEESNKELASKKEVKGSPSFLKKGSQKLRSLLSLTPDKKENLSKNKAPAFYRLCSSSDTLVSEGEENQKPKKSDTKVDSSPRRKHSSSSNSQGSIHKSKEDVTVSPSQEINAPPDENKRTPSPGPVESKFLERAGDASAPRFNTEQIQYRDSREINAVVTPERRPTSSPRPTSSELLRSHSTDRRVYSRFEPFCKIESSIQPTSNMPNTSINRPEIKSATMGNSYGRSSPLLNYNTGVYRSYQPNENKFRGFMQKFGNFIHKNK

SEQ ID NO: 8347 - protein, 2157 aa, Homo sapiens
MSDRSGPTAKGKDGKKYSSLNLFDTYKGKSLEIQKPAVAPRHGLQSLGKVAIARRMPPPANLPSLKAENKGNDPNVSLVPKDGTGWASKQEQSDPKSSDASTAQPPESQPLPASQTPASNQPKRPPAAPENTPLVPSGVKSWAQASVTHGAHGDGGRASSLLSRFSREEFPTLQAAGDQDKAAKERESAEQSSGPGPSLRPQNSTTWRDGGGRGPDELEGPDSKLHHGHDPRGGLQPSGPPQFPPYRGMMPPFMYPPYLPFPPPYGPQGPYRYPTPDGPSRFPRVAGPRGSGPPMRLVEPVGRPSILKEDNLKEFDQLDQENDDGWAGAHEEVDYTEKLKFSDEEDGRDSDEEGAEGHRDSQSASGEERPPEADGKKGNSPNSEPPTPKTAWAETSRPPETEPGPPAPKPPLPPPHRGPAGNWGPPGDYPDRGGPPCKPPAPEDEDEAWRQRRKQSSSEISLAVERARRRREEEERRMQEERRAACAEKLKRLDEKFGAPDKRLKAEPAAPPAAPSTPAPPPAVPKELPAPPAPPPASAPTPEKEPEEPAQAPPAQSTPTPGVAAAPTLVSGGGSTSSTSSGSFEASPVEPQLPSKEGPEPPEEVPPPTTPPVPKVEPKGDGIGPTRQPPSQGLGYPKYQKSLPPRFQRQQQEQLLKQQQQHQWQQHQQGSAPPTPVPPSPPQPVTLGAVPAPQAPPPPPKALYPGALGRPPPMPPMNFDPRWMMIPPYVDPRLLQGRPPLDFYPPGVHPSGLVPRERSDSGGSSSEPFDRHAPAMLRERGTPPVDPKLAWVGDVFTATPAEPRPLTSPLRQAADEDDKGMRSETPPVPPPPPYLASYPGFPENGAPGPPISRFPLEEPGPRPLPWPPGSDEVAKIQTPPPKKEPPKEETAQLTGPEAGRKPARGVGSGGQGPPPPRRESRTETRWGPRPGSSRRGIPPEEPGAPPRRAGPIKKPPPPTKVEELPPKPLEQGDETPKPPKPDPLKITKGKLGGPKETPPNGNLSPAPRLRRDYSYERVGPTSCRGRGRGEYFARGRGFRGTYGGRGRGARSREFRSYREFRGDDGRGGGTGGPNHPPAPRGRTASETRSEGSEYEEIPKRRRQRGSETGSETHESDLAPSDKEAPTPKEGTLTQVPLAPPPPGAPPSPAPARFTARGGRVFTPRGVPSRRGRGGGRPPPQVCPGWSPPAKSLAPKKPPTGPLPPSKEPLKEKLIPGPLSPVARGGSNGGSNVGMEDGERPRRRRHGRAQQQDKPPRFRRLKQERENAARGSEGKPSLTLPASAPAPEEALTTVTVAPAPRRAAAKSPDLSNQNSDQANEEWETASESSDFTSERRGDKEAPPPVLLTPKAVGTPGGGGGGAVPGISAMSRGDLSQRAKDLSKRSFSSQRPGMERQNRRPGPGGKAGSSGSSSGGGGGGPGGRTGPGRGDKRSWPSPKNRSRPPEERPPGLPLPPPPPSSSAVFRLDQVIHSNPAGIQQALAQLSSRQGSVTAPGGHPRHKPGPPQAPQGPSPRPPTRYEPQRVNSGLSSDPHFEEPGPMVRGVGGTPRDSAGVSPFPPKRRERPPRKPELLQEESLPPPHSSGFLGSKPEGPGPQAESRDTGTEALTPHIWNRLHTATSRKSYRPSSMEPWMEPLSPFEDVAGTEMSQSDSGVDLSGDSQVSSGPCSQRSSPDGGLKGAAEGPPKRPGGSSPLNAVPCEGPPGSEPPRRPPPAPHDGDRKELPREQPLPPGPIGTERSQHTDRGTEPGPIRPSHRPGPPVQFGTSDKDSDLRLVVGDSLKAEKELTASVTEAIPVSRDWELLPSAAASAEPQSKNLDSGHCVPEPSSSGQRLYPEVFYGSAGPSSSQISGGAMDSQLHPNSGGFRPGTPSLHPYRSQPLYLPPGPAPPSALLSGVALKGQFLDFSTMQATELGKLPAGGVLYPPPSFLYSPAFCPSPLPDTSLLQVRQDLPSPSDFYSTPLQPGGQSGFLPSGAPAQQMLLPMVDSQLPVVNFGSLPPAPPPAPPPLSLLPVGPALQPPSLAVRPPPAPATRVLPSPARPFPASLGRAELHPVELKPFQDYQKLSSNLGGPGSSRTPPTGRSFSGLNSRLKATPSTYSGVFRTQRVDLYQQASPPDALRWIPKPWERTGLPPREGPSRRAEEPGSRGDKEPGLPPPR

SEQ ID NO: 8348 - protein, 2142 aa, Homo sapiens
MSDRSGPTAKGKDGKKYSSLNLFDTYKGKSLEIQKPACCPSPWPAESRESCHCPAYRPPANLPSLKAENKGNDPNVSLVPKDGTGWASKQEQSDPKSSDASTAQPPESQPLPASQTPASNQPKRPPAAPENTPLVPSGVKSWAQASVTHGAHGDGGRASSLLSRFSREEFPTLQAAGDQDKAAKERESAEQSSGPGPSLRPQNSTTWRDGGGRGPDELEGPDSKLHHGHDPRGGLQPSGPPQFPPYRGMMPPFMYPPYLPFPPPYGPQGPYRYPTPDGPSRFPRVAGPRGSGPPMRLVEPVGRPSILKEDNLKEFDQLDQENDDGWAGAHEEVDYTEKLKFSDEEDGRDSDEEGAEGHRDSQSASGEERPPEADGKKGNSPNSEPPTPKTAWAETSRPPETEPGPPAPKPPLPPGDYPDRGGPPCKPPAPEDEDEAWRQRRKQSSSEISLAVERARRRREEEERRMQEERRAACAEKLKRLDEKFGAPDKRLKAEPAAPPAAPSTPAPPPAVPKELPAPPAPPPASAPTPETEPEEPAQAPPAQSTPTPGVAAAPTLVSGGGSTSSTSSGSFEASPVEPQLPSKEGPEPPEEVPPPTTPPVPKVEPKGDGIGPTRQPPSQGLGYPKYQKSLPPRFQRQQQEQLLKQQQQHQWQQHQQGSAPPTPVPPSPPQPVTLGAVPAPQAPPPPPKALYPGALGRPPPMPPMNFDPRWMMIPPYVDPRLLQGRPPLEFYPPGVHPSGLVPRERSDSLGLSSEPFDRHAPAMLRERGTPPVDPKLAWVGDVFTATPAEPRPLTSPLRQAADEDDKGMRSETPPVPPPPPYLASYPGFPENGAPGPPISRFPLEEPGPRPLPWPPGSDEVAKIQTPPPKKEPPKEETAQLTGPEAGRKLPASRSGAGPPPPRRESRTETRWGPRPGSSRRGIPPEEPGAPPRRAGPIKKPPPPTKVEELPPKPLEQGDETPKPPKPDPLKITKGKLGGPKETPPNGNLSPAPRLRRDYSYERVGPTSCRGRGRGEYFARGRGFRGTYGGRGRGGQANSAVTESFEEMMGVEVGQGDQTTLLLPEAAMPARHGARVQSMRKSPSGAGSGAQKQAARPMRVIWLLQTRRLPHPRREHSPRSSRSPTTRSPTLHRAPARFTCPGVGESSLPEGAISPGPRRREAPPQVCPGWSPPAKSLAPKKPPTGPLPPSKEPLKEKLIPGPLSPVARGGSNGGSNVGMEDGERPRRRRHGRAQQQDKPPRFRRLKQERENAARGSEGKPSLTLPASAPGPEEALTTVTVAPAPPRAAAKSPDLSNQNSDQANEEWETASESSDFTSERRGDKEAPPPVLLTPKAVGTPGGGGGGAVPGISAMSRGDLSQRAKDLSKRSFSSQRPGMERQNRRPGPGGKAGSSGSSSGGGGGGPGGRTGPGRGDKRSWPSPKNRSRPPEERPPGLPLPPPPPSSSAVFRLDQVIHSNPAGIQQALAQLSSRQGSVTAPGGHPRHKPGPPQAPQGPSPRPPTRYEPQRVNSGLSSDPHFEEPGPMVRGVGGTPRDSAGVSPFPPKRRERPPRKPELLQEESLPPPHSSGFLGSKPEGPGPQAESRDTGTEALTPHIWNRLHTATSRKSYRPTSMEPWMEPLSPFEDVAGTEMSQSDSGVDLSGDSQVSSGPCSQRSSPDGGLKGAAEGPPKRPGGSSPLNAVPCEGPPGSEPPRRPPPAPHDGDRKELPREQPLPPGPIGTERSQRTDRGTEPGPIRPSHRPGPPVQFGTSDKDSDLRLVVGDSLKAEKELTASVTEAIPVSRDWELLPSAAASAEPQSKNLDSGHCVPEPSSSGQRLYPEVFYGSAGPSSSQISGGSHGLSITSKQWRLRPGTPSLHPYRSQPLYLPPGPAPPSALLSGVALKGQFLDFSTMQATELGKLPAGGVLYPPPSFLYSPAFCPSPLPDTSLLQVRQDLPSPSDFYSTPLQPGGQSGFLPSGAPAQQMLLPMVDSQLPVVNFGSLPPAPPPAPPPLSLLPVGPALQPPSLAVRPPPAPATRVLPSPARPFPASLGRAELHPVELKPFQDYQKLSSNLGGPGSSRTPPTGRSFSGLNSRLKATPSTYSGVFRTQRVDLYQQASPPDALRWIPKPWERTGPPPREGPSRRAEEPGSRGDKEPGLPPPR

SEQ ID NO: 8349 - protein, 2145 aa, Homo sapiens
MSDRSGPTAKGKDGKKYSSLNLFDTYKGKSLEIQKPAVAPRHGLQSLGKVAIARRMPPPANLPSLKAENKGNDPNVSLVPKDGTGWASKQEQSDPKSSDASTAQPPESQPLPASQTPASNQPKRPPAAPENTPLVPSGVKSWAQASVTHGAHGDGGRASSLLSRFSREEFPTLQAAGDQDKAAKERESAEQSSGPGPSLRPQNSTTWRDGGGRGPDELEGPDSKLHHGHDPRGGLQPSGPPQFPPYRGMMPPFMYPPYLPFPPPYGPQGPYRYPTPDGPSRFPRVAGPRGSGPPMRLVEPVGRPSILKEDNLKEFDQLDQENDDGWAGAHEEVDYTEKLKFSDEEDGRDSDEEGAEGHRDSQSASGEERPPEADGKKGNSPNSEPPTPKTAWAETSRPPETEPGPPAPKPPLPPGDYPDRGGPPCKPPAPEDEDEAWRQRRKQSSSEISLAVERARRRREEEERRMQEERRAACAEKLKRLDEKFGAPDKRLKAEPAAPPAAPSTPAPPPAVPKELPAPPAPPPASAPTPEKEPEEPAQAPPAQSTPTPGVAAAPTLVSGGGSTSSTSSGSFEASPVEPQLPSKEGPEPPEEVPPPTTPPVPKVEPKGDGIGPTRQPPSQGLGYPKYQKSLPPRFQRQQQEQLLKQQQQHQWQQHQQGSAPPTPVPPSPPQPVTLGAVPAPQAPPPPPKALYPGALGRPPPMPPMNFDPRWMMIPPYVDPRLLQGRPPLDFYPPGVHPSGLVPRERSDSGGSSSEPFDRHAPAMLRERGTPPVDPKLAWVGDVFTATPAEPRPLTSPLRQAADEDDKGMRSETPPVPPPPPYLASYPGFPENGAPGPPISRFPLEEPGPRPLPWPPGSDEVAKIQTPPPKKEPPKEETAQLTGPEAGRKPARGVGSGGQGPPPPRRESRTETRWGPRPGSSRRGIPPEEPGAPPRRAGPIKKPPPPTKVEELPPKPLEQGDETPKPPKPDPLKITKGKLGGPKETPPNGNLSPAPRLRRDYSYERVGPTSCRGRGRGEYFARGRGFRGTYGGRGRGARSREFRSYREFRGDDGRGGGTGGPNHPPAPRGRTASETRSEGSEYEEIPKRRRQRGSETGSETHESDLAPSDKEAPTPKEGTLTQVPLAPPPPGAPPSPAPARFTARGGRVFTPRGVPSRRGRGGGRPPPQVCPGWSPPAKSLAPKKPPTGPLPPSKEPLKEKLIPGPLSPVARGGSNGGSNVGMEDGERPRRRRHGRAQQQDKPPRFRRLKQERENAARGSEGKPSLTLPASAPAPEEALTTVTVAPAPRRAAAKSPDLSNQNSDQANEEWETASESSDFTSERRGDKEAPPPVLLTPKAVGTPGGGGGGAVPGISAMSRGDLSQRAKDLSKRSFSSQRPGMERQNRRPGPGGKAGSSGSSSGGGGGGPGGRTGPGRGDKRSWPSPKNRSRPPEERPPGLPLPPPPPSSSAVFRLDQVIHSNPAGIQQALAQLSSRQGSVTAPGGHPRHKPGPPQAPQGPSPRPPTRYEPQRVNSGLSSDPHFEEPGPMVRGVGGTPRDSAGVSPFPPKRRERPPRKPELLQEESLPPPHSSGFLGSKPEGPGPQAESRDTGTEALTPHIWNRLHTATSRKSYRPSSMEPWMEPLSPFEDVAGTEMSQSDSGVDLSGDSQVSSGPCSQRSSPDGGLKGAAEGPPKRPGGSSPLNAVPCEGPPGSEPPRRPPPAPHDGDRKELPREQPLPPGPIGTERSQHTDRGTEPGPIRPSHRPGPPVQFGTSDKDSDLRLVVGDSLKAEKELTASVTEAIPVSRDWELLPSAAASAEPQSKNLDSGHCVPEPSSSGQRLYPEVFYGSAGPSSSQISGGAMDSQLHPNSGGFRPGTPSLHPYRSQPLYLPPGPAPPSALLSGVALKGQFLDFSTMQATELGKLPAGGVLYPPPSFLYSPAFCPSPLPDTSLLQVRQDLPSPSDFYSTPLQPGGQSGFLPSGAPAQQMLLPMVDSQLPVVNFGSLPPAPPPAPPPLSLLPVGPALQPPSLAVRPPPAPATRVLPSPARPFPASLGRAELHPVELKPFQDYQKLSSNLGGPGSSRTPPTGRSFSGLNSRLKATPSTYSGVFRTQRVDLYQQASPPDALRWIPKPWERTGLPPREGPSRRAEEPGSRGDKEPGLPPPR

SEQ ID NO: 8350 - protein, 544 aa, Homo sapiens [sequence omitted]

SEQ ID NO: 8351 - protein, 544 aa, Homo sapiens
MIHVRRHETRRNSKSHVPEQKSRVDWRRTKRSSISQLLDSDEELDSEEFDSDEELDSDESFENDEELDSNKGPDCNKTPGSERELNLSKIQSEGNDSKCLINSGNGSTYEEETNKIKHRNIDLQDQEKHLSQEDNDLNKQTGQIIEDDQEKHLSQEDNDLNKQTGQIIEDDLEEEDIKRGKRKRLSSVMCDSDESDDSDILVRKVGVKRPRRVVEDEGSSVEMEQKTPEKTLAAQKREKLQKLKELSKQRSRQRRSSGRDFEDSEKESCPSSDEVDEEEEEDNYESDEDGDDYIIDDFVVQDEEGDEENKNQQGEKLTTSQLKLVKQNSLYSFSDHYTHFERVVKALLINALDESFLGTLYDGTRQKSYAKDMLTSLHYLDNRFVQPRLESLVSRSRWKEQYKERVENYSNVSIHLKNPENCSCQACGLHRYCKYSVHLSGELYNTRTMQIDNFMSHDKQVFTVGRICASRTRIYHKLKHFKFKLYQECCTIAMTEEVEDEQVKETVERIFRRSKENGWIKEKYGQLEEYLNFADYFQEEKFEL

SEQ ID NO: 8352 - protein, 198 aa, Homo sapiens
MKLYSLSVLYKGEAKVVLLKAAYDVSSFSFFQRSSVQEFMTFTSQLIVERSSKGTRASVKEQDYLCHVYVRNDSLAGVVIADNEYPSRVAFTLLEKVLDEFSKQVDRIDWPVGSPATIHYPALDGHLSRYQNPREADPMTKVQAELDETKIILHNTMESLLERGEKLDDLVSKSEVLGTQSKAFYKTARKQNSCCAIM

SEQ ID NO: 8353 - protein, 811 aa, Homo sapiens
RWCHKGAGRGGSGALSASAFREVARRVVGPCRPVGGRASQRTRLRVQNSKHEQQYILPIFKPGLPRTGIQLPATYFRRTRKVKVMDNRKEPPFFNDDNMGPFYYRLHFCDTMELFIETLTGTCFELRVSPFETVISVKAKIRRLEGIPICRQHLIWNNMELENDYCLNDYNISEGCTLKLVLAMRGGPINTRRVPTDDPLRKMAEYLDSSRVEVWEKTSCSKQVTFLVYQEGDQLNFFPAVDRGDGTLTPLSDSSKKIDFHLHVLRRKGEHRMSGGSMYNSDTDEDEETEPSSSGQQIIENSITMNKMKLLKAKMKNMNLSKKPKKAVKIKPHPPVAPRPSSGSTAPSRHRLLRVLPNIGQSCSPAFGNAYPPEISRNGISSLATQLSAERYISSITGEFLKEDNSWENNTLSHFSSNVKLPPQIPHLELGNDQELADSVLHLGSSLPRQTKHFLGNLPSSNGNIVLPSEECVTEQSLLPKVGSLASFAEGNADEQSSGLEGACKVNLELLLTNADKGLKAPEQHLKHVAGVLNGESVETSVLNYRELSPHKNRLLSPLRCSAPMSLHNSLVKPERQSKCFEFGKLQPSSSQSLDVQNITDSSFSRTTCFQGVKVDSLGKRSDVISKVEARDITEMTNKASKEPVGCVNNISFLASLAGSTSRNRLQSTRGAGRLQNSGTGLSTNLQHFQEENFRKSSPQLEHTGVFLSTHGVGMNGNNAAAGKSVGECTTHHLPPVKAPLQTKKKTTNHCFLCGKKTGLASSYECRCGNNFCASHRYAETHGCTYDYKSAGRRYLHEANPVVNAPKLPKI

SEQ ID NO: 8354 - protein, 2288 aa, Homo sapiens
MSDDISRDSDGMDEQCRWCAEGGNLICCDFCHNAFCKKCILRNLGRKELSTIMDENNQWYCYICHPEPLLDLVTACNSVFENLEQLLQQNKKKIKVDSEKSNKVYEHTSRFSPKKTSSNCNGEEKKLDDSCSGSVTYSYSALIVPKEMIKKAKKLIETTANMNSSYVKFLKQATDNSEISSATKLRQLKAFKSVLADIKKAHLALEEDLNSEFRAMDAVNKEKNTKEHKVIDAKFETKARKGEKPCALEKKDISKSEAKLSRKQVDSEHMHQNVPTEEQRTNKSTGGEHKKSDRKEEPQYEPANTSEDLDMDIVSVPSSVPEDIFENLETAMEVQSSVDHQGDGSSGTEQEVESSSVKLNISSKDNRGGIKSKTTAKVTKELYVKLTPVSLPNSPIKGADCQEVPQDKDGYKSCGLNPKLEKCGLGQENSDNEHLVENEVSLLLEESDLRRSPRVKTTPLRRPTETNPVTSNSDEECNETVKEKQKLSVPVRKKDKRNSSDSAIDNPKPNKLPKSKQSETVDQNSDSDEMLAILKGVSRMSHSSSSDTDINEIHTNHKTLYDLKTQAGKDDKGKRKRKSSTSGSDFDTKKGKSAKSSIISKKKRQTQSESSNYDSELEKEIKSMSKIGAARTTKKRIPNTKDFDSSEDEKHSKKGMDNQGHKNLKTSQEGSSDDAERKQERETFSSAEGTVDKDTTIMELRDRLPKKQQASASTDGVDKLSGKEQSFTSLEVRKVAETKEKSKHLKTKTCKKVQDGLSDIAEKFLKKDQSDETSEDDKKQSKKGTEEKKKPSDFKKKVIKMEQQYESSSDGTEKLPEREEICHFPKGIKQIKNGTTDGEKKSKKIRDKTSKKKDELSDYAEKSTGKGDSCDSSEDKKSKNGAYGREKKRCKLLGKSSRKRQDCSSSDTEKYSMKEDGCNSSDKRLKRIELRERRNLSSKRNTKEIQSGSSSSDAEESSEDNKKKKQRTSSKKKAVIVKEKKRNSLRTSTKRKQADITSSSSSDIEDDDQNSIGEGSSDEQKIKPVTENLVLSSHTGFCQSSGDEALSKSVPVTVDDDDDDNDPENRIAKKMLLEEIKANLSSDEDGSSDDEPEEGKKRTGKQNEENPGDEEAKNQVNSESDSDSEESKKPRYRHRLLRHKLTVSDGESGEEKKTKPKEHKEVKGRNRRKVSSEDSEDSDFQESGVSEEVSESEDEQRPRTRSAKKAELEENQRSYKQKKKRRRIKVQEDSSSENKSNSEEEEEEKEEEEEEEEEEEEEEEDENDDSKSPGKGRKKIRKILKDDKLRTETQNALKEEEERRKRIAEREREREKLREVIEIEDASPTKCPITTKLVLDEDEETKEPLVQVHRNMVIKLKPHQVDGVQFMWDCCCESVKKTKKSPGSGCILAHCMGLGKTLQVVSFLHTVLLCDKLDFSTALVVCPLNTALNWMNEFEKWQEGLKDDEKLEVSELATVKRPQERSYMLQRWQEDGGVMIIGYEMYRNLAQGRNVKSRKLKEIFNKALVDPGPDFVVCDEGHILKNEASAVSKAMNSIRSRRRIILTGTPLQNNLIEYHCMVNFIKENLLGSIKEFRNRFINPIQNGQCADSTMVDVRVMKKRAHILYEMLAGCVQRKDYTALTKFLPPKHEYVLAVRMTSIQCKLYQYYLDHLTGVGNNSEGGRGKAGAKLFQDFQMLSRIWTHPWCLQLDYISKENKGYFDEDSMDEFIASDSDETSMSLSSDDYTKKKKKGKKGKKDSSSSGSGSDNDVEVIKVWNSRSRGGGEGNVDETGNNPSVSLKLEESKATSSSNPSSPAPDWYKDFVTDADAEVLEHSGKMVLLFEILRMAEEIGDKVLVFSQSLISLDLIEDFLELASREKTEDKDKPLIYKGEGKWLRNIDYYRLDGSTTAQSRKKWAEEFNDETNVRGRLFIISTKAGSLGINLVAANRVIIFDASWNPSYDIQSIFRVYRFGQTKPVYVYRFLAQGTMEDKIYDRQVTKQSLSFRVVDQQQVERHFTMNELTELYTFEPDLLDDPNSEKKKKRDTPMLPKDTILAELLQIHKEHIVGYHEHDSLLDHKEEEELTEEERKAAWAEYEAEKKVLTMRFNIPTGTNLPPVSFNSQTPYIPFNLGALSAMSNQQLEDLINQGREKVVEATNSVTAVRIQPLEDIISAVWKENMNLSEAQVQALALSRQASQELDVKRREAIYNDVLTKQQMLISCVQRILMNRRLQQQYNQQQQQQMTYQQATLGHLMMPKPPNLIMNPSNYQQIDMRGMYQPVAGGMQPPPLQRAPPPMRSKNPGPSQGKSM

SEQ ID NO: 8355 - protein, 2337 aa, Homo sapiens
MQSLPKEDGLHGIVSCTACGQQVNHFQKDSIYRHPSLQVLICKNCFKYYMSDDISRDSDGMDEQCRWCAEGGNLICCDFCHNAFCKKCILRNLGRKELSTIMDENNQWYCYICHPEPLLDLVTACNSVFENLEQLLQQNKKKIKVDSEKSNKVYEHTSRFSPKKTSSNCNGEEKKLDDSCSGSVTYSYSALIVPKEMIKKAKKLIETTANMNSSYVKFLKQATDNSEISSATKLRQLKAFKSVLADIKKAHLALEEDLNSEFRAMDAVNKEKNTKEHKVIDAKFETKARKGEKPCALEKKDISKSEAKLSRKQVDSEHMHQNVPTEEQRTNKSTGGEHKKSDRKEEPQYEPANTSEDLDMDIVSVPSSVPEDIFENLETAMEVQSSVDHQGDGSSGTEQEVESSSVKLNISSKDNRGGIKSKTTAKVTKELYVKLTPVSLPNSPIKGADCQEVPQDKDGYKSCGLNPKLEKCGLGQENSDNEHLVENEVSLLLEESDLRRSPRVKTTPLRRPTETNPVTSNSDEECNETVKEKQKLSVPVRKKDKRNSSDSAIDNPKPNKLPKSKQSETVDQNSDSDEMLAILKGVSRMSHSSSSDTDINEIHTNHKTLYDLKTQAGKDDKGKRKRKSSTSGSDFDTKKGKSAKSSIISKKKRQTQSESSNYDSELEKEIKSMSKIGAARTTKKRIPNTKDFDSSEDEKHSKKGMDNQGHKNLKTSQEGSSDDAERKQERETFSSAEGTVDKDTTIMELRDRLPKKQQASASTDGVDKLSGKEQSFTSLEVRKVAETKEKSKHLKTKTCKKVQDGLSDIAEKFLKKDQSDETSEDDKKQSKKGTEEKKKPSDFKKKVIKMEQQYESSSDGTEKLPEREEICHFPKGIKQIKNGTTDGEKKSKKIRDKTSKKKDELSDYAEKSTGKGDSCDSSEDKKSKNGAYGREKKRCKLLGKSSRKRQDCSSSDTEKYSMKEDGCNSSDKRLKRIELRERRNLSSKRNTKEIQSGSSSSDAEESSEDNKKKKQRTSSKKKAVIVKEKKRNSLRTSTKRKQADITSSSSSDIEDDDQNSIGEGSSDEQKIKPVTENLVLSSHTGFCQSSGDEALSKSVPVTVDDDDDDNDPENRIAKKMLLEEIKANLSSDEDGSSDDEPEEGKKRTGKQNEENPGDEEAKNQVNSESDSDSEESKKPRYRHRLLRHKLTVSDGESGEEKKTKPKEHKEVKGRNRRKVSSEDSEDSDFQESGVSEEVSESEDEQRPRTRSAKKAELEENQRSYKQKKKRRRIKVQEDSSSENKSNSEEEEEEKEEEEEEEEEEEEEEEDENDDSKSPGKGRKKIRKILKDDKLRTETQNALKEEEERRKRIAEREREREKLREVIEIEDASPTKCPITTKLVLDEDEETKEPLVQVHRNMVIKLKPHQVDGVQFMWDCCCESVKKTKKSPGSGCILAHCMGLGKTLQVVSFLHTVLLCDKLDFSTALVVCPLNTALNWMNEFEKWQEGLKDDEKLEVSELATVKRPQERSYMLQRWQEDGGVMIIGYEMYRNLAQGRNVKSRKLKEIFNKALVDPGPDFVVCDEGHILKNEASAVSKAMNSIRSRRRIILTGTPLQNNLIEYHCMVNFIKENLLGSIKEFRNRFINPIQNGQCADSTMVDVRVMKKRAHILYEMLAGCVQRKDYTALTKFLPPKHEYVLAVRMTSIQCKLYQYYLDHLTGVGNNSEGGRGKAGAKLFQDFQMLSRIWTHPWCLQLDYISKENKGYFDEDSMDEFIASDSDETSMSLSSDDYTKKKKKGKKGKKDSSSSGSGSDNDVEVIKVWNSRSRGGGEGNVDETGNNPSVSLKLEESKATSSSNPSSPAPDWYKDFVTDADAEVLEHSGKMVLLFEILRMAEEIGDKVLVFSQSLISLDLIEDFLELASREKTEDKDKPLIYKGEGKWLRNIDYYRLDGSTTAQSRKKWAEEFNDETNVRGRLFIISTKAGSLGINLVAANRVIIFDASWNPSYDIQSIFRVYRFGQTKPVYVYRFLAQGTMEDKIYDRQVTKQSLSFRVVDQQQVERHFTMNELTELYTFEPDLLDDPNSEKKKKRDTPMLPKDTILAELLQIHKEHIVGYHEHDSLLDHKEEEELTEEERKAAWAEYEAEKKVLTMRFNIPTGTNLPPVSFNSQTPYIPFNLGALSAMSNQQLEDLINQGREKVVEATNSVTAVRIQPLEDIISAVWKENMNLSEAQVQALALSRQASQELDVKRREAIYNDVLTKQQMLISCVQRILMNRRLQQQYNQQQQQQMTYQQATLGHLMMPKPPNLIMNPSNYQQIDMRGMYQPVAGGMQPPPLQRAPPPMRSKNPGPSQGKSM

SEQ ID NO: 8356 - protein, 2454 aa, Homo sapiens
MTAEPMSESKLNTLVQKLHDFLAHSSEESEETSSPPRLAMNQNTDKISGSGSNSDMMENSKEEGTSSSEKSKSSGSSRSKRKPSIVTKYVESDDEKPLDDETVNEDASNENSENDITMQSLPKEDGLHGIVSCTACGQQVNHFQKDSIYRHPSLQVLICKNCFKYYMSDDISRDSDGMDEQCRWCAEGGNLICCDFCHNAFCKKCILRNLGRKELSTIMDENNQWYCYICHPEPLLDLVTACNSVFENLEQLLQQNKKKIKVDSEKSNKVYEHTSRFSPKKTSSNCNGEEKKLDDSCSGSVTYSYSALIVPKEMIKKAKKLIETTANMNSSYVKFLKQATDNSEISSATKLRQLKAFKSVLADIKKAHLALEEDLNSEFRAMDAVNKEKNTKEHKVIDAKFETKARKGEKPCALEKKDISKSEAKLSRKQVDSEHMHQNVPTEEQRTNKSTGGEHKKSDRKEEPQYEPANTSEDLDMDIVSVPSSVPEDIFENLETAMEVQSSVDHQGDGSSGTEQEVESSSVKLNISSKDNRGGIKSKTTAKVTKELYVKLTPVSLPNSPIKGADCQEVPQDKDGYKSCGLNPKLEKCGLGQENSDNEHLVENEVSLLLEESDLRRSPRVKTTPLRRPTETNPVTSNSDEECNETVKEKQKLSVPVRKKDKRNSSDSAIDNPKPNKLPKSKQSETVDQNSDSDEMLAILKGVSRMSHSSSSDTDINEIHTNHKTLYDLKTQAGKDDKGKRKRKSSTSGSDFDTKKGKSAKSSIISKKKRQTQSESSNYDSELEKEIKSMSKIGAARTTKKRIPNTKDFDSSEDEKHSKKGMDNQGHKNLKTSQEGSSDDAERKQERETFSSAEGTVDKDTTIMELRDRLPKKQQASASTDGVDKLSGKEQSFTSLEVRKVAETKEKSKHLKTKTCKKVQDGLSDIAEKFLKKDQSDETSEDDKKQSKKGTEEKKKPSDFKKKVIKMEQQYESSSDGTEKLPEREEICHFPKGIKQIKNGTTDGEKKSKKIRDKTSKKKDELSDYAEKSTGKGDSCDSSEDKKSKNGAYGREKKRCKLLGKSSRKRQDCSSSDTEKYSMKEDGCNSSDKRLKRIELRERRNLSSKRNTKEIQSGSSSSDAEESSEDNKKKKQRTSSKKKAVIVKEKKRNSLRTSTKRKQADITSSSSSDIEDDDQNSIGEGSSDEQKIKPVTENLVLSSHTGFCQSSGDEALSKSVPVTVDDDDDDNDPENRIAKKMLLEEIKANLSSDEDGSSDDEPEEGKKRTGKQNEENPGDEEAKNQVNSESDSDSEESKKPRYRHRLLRHKLTVSDGESGEEKKTKPKEHKEVKGRNRRKVSSEDSEDSDFQESGVSEEVSESEDEQRPRTRSAKKAELEENQRSYKQKKKRRRIKVQEDSSSENKSNSEEEEEEKEEEEEEEEEEEEEEEDENDDSKSPGKGRKKIRKILKDDKLRTETQNALKEEEERRKRIAEREREREKLREVIEIEDASPTKCPITTKLVLDEDEETKEPLVQVHRNMVIKLKPHQVDGVQFMWDCCCESVKKTKKSPGSGCILAHCMGLGKTLQVVSFLHTVLLCDKLDFSTALVVCPLNTALNWMNEFEKWQEGLKDDEKLEVSELATVKRPQERSYMLQRWQEDGGVMIIGYEMYRNLAQGRNVKSRKLKEIFNKALVDPGPDFVVCDEGHILKNEASAVSKAMNSIRSRRRIILTGTPLQNNLIEYHCMVNFIKENLLGSIKEFRNRFINPIQNGQCADSTMVDVRVMKKRAHILYEMLAGCVQRKDYTALTKFLPPKHEYVLAVRMTSIQCKLYQYYLDHLTGVGNNSEGGRGKAGAKLFQDFQMLSRIWTHPWCLQLDYISKENKGYFDEDSMDEFIASDSDETSMSLSSDDYTKKKKKGKKGKKDSSSSGSGSDNDVEVIKVWNSRSRGGGEGNVDETGNNPSVSLKLEESKATSSSNPSSPAPDWYKDFVTDADAEVLEHSGKMVLLFEILRMAEEIGDKVLVFSQSLISLDLIEDFLELASREKTEDKDKPLIYKGEGKWLRNIDYYRLDGSTTAQSRKKWAEEFNDETNVRGRLFIISTKAGSLGINLVAANRVIIFDASWNPSYDIQSIFRVYRFGQTKPVYVYRFLAQGTMEDKIYDRQVTKQSLSFRVVDQQQVERHFTMNELTELYTFEPDLLDDPNSEKKKKRDTPMLPKDTILAELLQIHKEHIVGYHEHDSLLDHKEEEELTEEERKAAWAEYEAEKKVLTMRFNIPTGTNLPPVSFNSQTPYIPFNLGALSAMSNQQLEDLINQGREKVVEATNSVTAVRIQPLEDIISAVWKENMNLSEAQVQALALSRQASQELDVKRREAIYNDVLTKQQMLISCVQRILMNRRLQQQYNQQQQQQMTYQQATLGHLMMPKPPNLIMNPSNYQQIDMRGMYQPVAGGMQPPPLQRAPPPMRSKNPGPSQGKSM

SEQ ID NO: 8357 - protein, 2375 aa, Homo sapiens
MQSLPKGTVIVQPEPVLNEDKDDFKGPEFRSRSKMKTENLKKRGEDGLHGIVSCTACGQQVNHFQKDSIYRHPSLQVLICKNCFKYYMSDDISRDSDGMDEQCRWCAEGGNLICCDFCHNAFCKKCILRNLGRKELSTIMDENNQWYCYICHPEPLLDLVTACNSVFENLEQLLQQNKKKIKVDSEKSNKVYEHTSRFSPKKTSSNCNGEEKKLDDSCSGSVTYSYSALIVPKEMIKKAKKLIETTANMNSSYVKFLKQATDNSEISSATKLRQLKAFKSVLADIKKAHLALEEDLNSEFRAMDAVNKEKNTKEHKVIDAKFETKARKGEKPCALEKKDISKSEAKLSRKQVDSEHMHQNVPTEEQRTNKSTGGEHKKSDRKEEPQYEPANTSEDLDMDIVSVPSSVPEDIFENLETAMEVQSSVDHQGDGSSGTEQEVESSSVKLNISSKDNRGGIKSKTTAKVTKELYVKLTPVSLPNSPIKGADCQEVPQDKDGYKSCGLNPKLEKCGLGQENSDNEHLVENEVSLLLEESDLRRSPRVKTTPLRRPTETNPVTSNSDEECNETVKEKQKLSVPVRKKDKRNSSDSAIDNPKPNKLPKSKQSETVDQNSDSDEMLAILKGVSRMSHSSSSDTDINEIHTNHKTLYDLKTQAGKDDKGKRKRKSSTSGSDFDTKKGKSAKSSIISKKKRQTQSESSNYDSELEKEIKSMSKIGAARTTKKRIPNTKDFDSSEDEKHSKKGMDNQGHKNLKTSQEGSSDDAERKQERETFSSAEGTVDKDTTIMELRDRLPKKQQASASTDGVDKLSGKEQSFTSLEVRKVAETKEKSKHLKTKTCKKVQDGLSDIAEKFLKKDQSDETSEDDKKQSKKGTEEKKKPSDFKKKVIKMEQQYESSSDGTEKLPEREEICHFPKGIKQIKNGTTDGEKKSKKIRDKTSKKKDELSDYAEKSTGKGDSCDSSEDKKSKNGAYGREKKRCKLLGKSSRKRQDCSSSDTEKYSMKEDGCNSSDKRLKRIELRERRNLSSKRNTKEIQSGSSSSDAEESSEDNKKKKQRTSSKKKAVIVKEKKRNSLRTSTKRKQADITSSSSSDIEDDDQNSIGEGSSDEQKIKPVTENLVLSSHTGFCQSSGDEALSKSVPVTVDDDDDDNDPENRIAKKMLLEEIKANLSSDEDGSSDDEPEEGKKRTGKQNEENPGDEEAKNQVNSESDSDSEESKKPRYRHRLLRHKLTVSDGESGEEKKTKPKEHKEVKGRNRRKVSSEDSEDSDFQESGVSEEVSESEDEQRPRTRSAKKAELEENQRSYKQKKKRRRIKVQEDSSSENKSNSEEEEEEKEEEEEEEEEEEEEEEDENDDSKSPGKGRKKIRKILKDDKLRTETQNALKEEEERRKRIAEREREREKLREVIEIEDASPTKCPITTKLVLDEDEETKEPLVQVHRNMVIKLKPHQVDGVQFMWDCCCESVKKTKKSPGSGCILAHCMGLGKTLQVVSFLHTVLLCDKLDFSTALVVCPLNTALNWMNEFEKWQEGLKDDEKLEVSELATVKRPQERSYMLQRWQEDGGVMIIGYEMYRNLAQGRNVKSRKLKEIFNKALVDPGPDFVVCDEGHILKNEASAVSKAMNSIRSRRRIILTGTPLQNNLIEYHCMVNFIKENLLGSIKEFRNRFINPIQNGQCADSTMVDVRVMKKRAHILYEMLAGCVQRKDYTALTKFLPPKHEYVLAVRMTSIQCKLYQYYLDHLTGVGNNSEGGRGKAGAKLFQDFQMLSRIWTHPWCLQLDYISKENKGYFDEDSMDEFIASDSDETSMSLSSDDYTKKKKKGKKGKKDSSSSGSGSDNDVEVIKVWNSRSRGGGEGNVDETGNNPSVSLKLEESKATSSSNPSSPAPDWYKDFVTDADAEVLEHSGKMVLLFEILRMAEEIGDKVLVFSQSLISLDLIEDFLELASREKTEDKDKPLIYKGEGKWLRNIDYYRLDGSTTAQSRKKWAEEFNDETNVRGRLFIISTKAGSLGINLVAANRVIIFDASWNPSYDIQSIFRVYRFGQTKPVYVYRFLAQGTMEDKIYDRQVTKQSLSFRVVDQQQVERHFTMNELTELYTFEPDLLDDPNSEKKKKRDTPMLPKDTILAELLQIHKEHIVGYHEHDSLLDHKEEEELTEEERKAAWAEYEAEKKVLTMRFNIPTGTNLPPVSFNSQTPYIPFNLGALSAMSNQQLEDLINQGREKVVEATNSVTAVRIQPLEDIISAVWKENMNLSEAQVQALALSRQASQELDVKRREAIYNDVLTKQQMLISCVQRILMNRRLQQQYNQQQQQQMTYQQATLGHLMMPKPPNLIMNPSNYQQIDMRGMYQPVAGGMQPPPLQRAPPPMRSKNPGPSQGKSM

SEQ ID NO: 8358 - protein, 1214 aa, Homo sapiens
MARNCSECKEKRAAHILCTYCNRWLCSSCTEEHRHSPVPGGPFFPRAQKGSPGVNGGPGDFTLYCPLHTQEVLKLFCETCDMLTCHSCLVVEHKEHRHVEEVLQNQRMLLEGVTTQVAHKKSSLQTSAKQIEDRIFEVKHQHRKVENQIKMAKMVLMNELNKQANGLIEELEGITNERKRKLEQQLQSIMVLNRQFEHVQNFINWAVCSKTSVPFLFSKELIVFQMQRLLETSCNTDPGSPWSIRFTWEPNFWTKQLASLGCITTEGGQMSRADAPAYGGLQGSSPFYQSHQSPVAQQEALSHPSHKFQSPAVCSSSVCCSHCSPVSPSLKGQVPPPSIHPAHSFRQPPEMVPQQLGSLQCSALLPREKELACSPHPPKLLQPWLETQPPVEQESTSQRLGQQLTSQPVCIVPPQDVQQGAHAQPTLQTPSIQVQFGHHQKLKLSHFQQQPQQQLPPPPPPLPHPPPPLPPPPQQPHPPLPPSQHLASSQHESPPGPACSQNMDIMHHKFELEEMQKDLELLLQAQQPSLQLSQTKSPQHLQQTIVGQINYIVRQPAPVQSQSQEETLQATDEPPASQGSKPALPLDKNTAAALPQASGEETPLSVPPVDSTIQHSSPNVVRKHSTSLSIMGFSNTLEMELSSTRLERPLEPQIQSVSNLTAGAPQAVPSLLSAPPKMVSSLTSVQNQAMPSLTTSHLQTVPSLVHSTFQSMPNLISDSPQAMASLASDHPQAGPSLMSGHTQAVPSLATCPLQSIPPVSDMQPETGSSSSSGRTSGSLCPRDGADPSLENALCKVKLEEPINLSVKKPPLAPVVSTSTALQQYQNPKECENFEQGALELDAKENQSIRAFNSEHKIPYVRLERLKICAASSGEMPVFKLKPQKNDQDGSFLLIIECGTESSSMSIKVSQDRLSEATQAPGLEGRKVTVTSLAGQRPPEVEGTSPEEHRLIPRTPGAKKGPPAPIENEDFCAVCLNGGELLCCDRCPKVFHLSCHVPALLSFPGGEWVCTLCRSLTQPEMEYDCENACYNQPGMRASPGLSMYDQKKCEKLVLSLCCNNLSLPFHEPVSPLARHYYQIIKRPMDLSIIRRKLQKKDPAHYTTPEEVVSDVRLMFWNCAKFNYPDSEVAEAGRCLEVFFEGWLKEIYPEKRFAQPRQEDSDSEEVSSESGCSTPQGFPWPPYMQEGIQPKRRRRHMENERAKRMSFRLANSISQV

SEQ ID NO: 8359 - protein, 1187 aa, Homo sapiens [sequence omitted]

SEQ ID NO: 8360 - protein, 1174 aa, Homo sapiens
MPLPFGLKLKRTRRYTVSSKSCLVARIQLLNNEFVEFTLSVESTGQESLEAVAQRLELREVTYFSLWYYNKQNQRRWVDLEKPLKKQLDKYALEPTVYFGVVFYVPSVSQLQQEITRYQYYLQLKKDILEGSIPCTLEQAIQLAGLAVQADFGDFDQYESQDFLQKFALFPVGWLQDEKVLEEATQKVALLHQKYRGLTAPDAEMLYMQEVERMDGYGEESYPAKDSQGSDISIGACLEGIFVKHKNGRHPVVFRWHDIANMSHNKSFFALELANKEETIQFQTEDMETAKYIWRLCVARHKFYRLNQCNLQTQTVTVNPIRRRSSSRMSLPKPQPYVMPPPPQLHYNGHYTEPYASSQDNLFVPNQNGYYCHSQTSLDRAQIDFNGRIRNGSVYSAHSTNSLNNPQPYLQPSPMSSNPSITGSDVMRPDYLPSHRHSAVIPPSYRPTPDYETVMKQLNRGLVHAERQSHSLRNLNIGSSYAYSRPAALVYSQPEIREHAQLPSPAAAHCPFSLSYSFHSPSPYPYPAERRPVVGAVSVPELTNAQLQAQDYPSPNIMRTQVYRPPPPYPPPRPANSTPDLSRHLYISSSNPDLITRRVHHSVQTFQEDSLPVAHSLQEVSEPLTAARHAQLHKRNSIEVAGLSHGLEGLRLKERTLSASAAEVAPRAVSVGSQPSVFTERTQREGPEEAEGLRYGHKKSLSDATMLIHSSEEEEDEDFEEESGARAPPARAREPRPGLAQDPPGCPRVLLAGPLHILEPKAHVPDAEKRMMDSSPVRTTAEAQRPWRDGLLMPSMSESDLTTSGRYRARRDSLKKRPVSDLLSGKKNIVEGLPPLGGMKKTRVDAKKIGPLKLAALNGLSLSRVPLPDEGKEVATRATNDERCKILEQRLEQGMVFTEYERILKKRLVDGECSTARLPENAERNRFQDVLPYDDARVELVPTKENNTGYINASHIKVSVSGIEWDYIATQGPLQNTCQDFWQMVWEQGIAIIAMVTAEEEGGREKSFRYWPRLGSRHNTVTYGRFKITTRFRTDSGCYATTGLKMKHLLTGQERTVWHLQYTDWPEHGCPEDLKGFLSYLEEIQSVRRHTNSTSDPQSPNPPLLVHCSAGVGRTGVVILSEIMIACLEHNEVLDIPRVLDMLRQQRMMLVQTLCQYTFVYRVLIQFLKSSRLI

SEQ ID NO: 8361 - protein, 399 aa, Homo sapiens
MQSLSLGQTSISKGLNYLTIMAPGNLWHMRNNFLFGSRCWMTRFSAENIFKSVSFRLFGVKCHNTDSEPLKNEDLLKNLLTMGVDIDMARKRQPGVFHRMITNEQDLKMFLLSKGASKEVIASIISRYPRAITRTPENLSKRWDLWRKIVTSDLEIVNILERSPESFFRSNNNLNLENNIKFLYSVGLTRKCLCRLLTNAPRTFSNSLDLNKQMVEFLQAAGLSLGHNDPADFVRKIIFKNPFILIQSTKRVKANIEFLRSTFNLNSEELLVLICGPGAEILDLSNDYARRSYANIKEKLFSLGCTEEEVQKFVLSYPDVIFLAEKKFNDKIDCLMEENISISQIIENPRVLDSSISTLKSRIKELVNAGCNLSTLNITLLSWSKKRYEAKLKKLSRFA

SEQ ID NO: 8362 - protein, 424 aa, Homo sapiens
MEMTTNKLKMQLKSAQSELEQTRNTLKSMEGSDGHAMKVAMGMQKQITAKRGQIDALQSKIQFLEEAMTNANKEKHFLKEEKSKLSQELSTVATEKNKMAGELEVLRSQERRLKEKVTNMEVALDKASLQFAECQDIIQRQEQESVRLKLQHTLDIKELQGPGYTSNSSLKPRLLQPASVTRSHSNVPSSQSTASFLSHHSTKANTLKEDPTRDLKQLLQELRSVINEEPAVSLSKTEEDGRTSLGALEDRVRDCITESSLRSDMCHRSNNSLRDSTEGSKSSETLSREPVTLHAGDREDPSGCFTFTSAASPSVKNSASRSFNSSPKKSPVHSLLTSSVEGSIGSTSQYRSAKPIHSSDSVKDSQSPPIETTGKTCRKLQNRLESLQTLVEDLQLKNQAMSSMIRNQEKRIQKVKDQEKMLLK

SEQ ID NO: 8363 - protein, 728 aa, Homo sapiens
MSESGEMSEFGYIMELIAKGKVTIKNIERELICPACKELFTHPLILPCQHSICHKCVKELLLTLDDSFNDVGSDNSNQSSPRLRLPSPSMDKIDRINRPGWKRNSLTPRTTVFPCPGCEHDVDLGERGINGLFRNFTLETIVERYRQAARAATAIMCDLCKPPPQESTKSCMDCSASYCNECFKIHHPWGTIKAQHEYVGPTTNFRPKILMCPEHETERINMYCELCRRPVCHLCKLGGNHANHRVTTMSSAYKTLKEKLSKDIDYLIGKESQVKSQISELNLLMKETECNGERAKEEAITHFEKLFEVLEERKSSVLKAIDSSKKLRLDKFQTQMEEYQGLLENNGLVGYAQEVLKETDQSCFVQTAKQLHLRIQKATESLKSFRPAAQTSFEDYVVNTSKQTELLGELSFFSSGIDVPEINEEQSKVYNNALINWHHPEKDKADSYVLEYRKINRDDEMSWNEIEVCGTSKIIQDLENSSTYAFRVRAYKGSICSPCSRELILHTPPAPVFSFLFDEKCGYNNEHLLLNLKRDRVESRAGFNLLLAAERIQVGYYTSLDYIIGDTGITKGKHFWAFRVEPYSYLVKVGVASSDKLQEWLRSPRDAVSPRYEQDSGHDSGSEDACFDSSQPFTLVTIGMQKFFIPKSPTSSNEPENRVLPMPTSIGIFLDCDKGKVNFYDMDQMKCLYERQVDCSHTLYPAFALMGSGGIQLEEPITAKYLEYQEDM

SEQ ID NO: 8364 - protein, 425 aa, Homo sapiens
MADMEDLFGSDADSEAERKDSDSGSDSDSDQENAASGSNASGSESDQDERGDSGQPSNKELFGDDSEDEGASHHSGSDNHSERSDNRSEASERSDHEDNDPSDVDQHSGSEAPNDDEDEGHRSDGGSHHSEAEGSEKAHSDDEKWGREDKSDQSDDEKIQNSDDEERAQGSDEDKLQNSDDDEKMQNTDDEERPQLSDDERQQLSEEEKANSDDERPVASDNDDEKQNSDDEEQPQLSDEEKMQNSDDERPQASDEEHRHSDDEEEQDHKSESARGSDSEDEVLRMKRKNAIASDSEADSDTEVPKDNSGTMDLFGGADDISSGSDGEDKPPTPGQPVDENGLPQDQQEEEPIPETRIEVEIPKVNTDLGNDLYFVKLPNFLSVEPSMSLHLGNEVFDVYKAPLQGDHNHLFYKTRYWSTGTSSL

SEQ ID NO: 8365 - protein, 666 aa, Homo sapiens
MADMEDLFGSDADSEAERKDSDSGSDSDSDQENAASGSNASGSESDQDERGDSGQPSNKELFGDDSEDEGASHHSGSDNHSERSDNRSEASERSDHEDNDPSDVDQHSGSEAPNDDEDEGHRSDGGSHHSEAEGSEKAHSDDEKWGREDKSDQSDDEKIQNSDDEERAQGSDEDKLQNSDDDEKMQNTDDEERPQLSDDERQQLSEEEKANSDDERPVASDNDDEKQNSDDEEQPQLSDEEKMQNSDDERPQASDEEHRHSDDEEEQDHKSESARGSDSEDEVLRMKRKNAIASDSEADSDTEVPKDNSGTMDLFGGADDISSGSDGEDKPPTPGQPVDENGLPQDQQEEEPIPETRIEVEIPKVNTDLGNDLYFVKLPNFLSVEPRPFDPQYYEDEFEDEEMLDEEGRTRLKLKVENTIRWRIRRDEEGNEIKESNARIVKWSDGSMSLHLGNEVFDVYKAPLQGDHNHLFIRQGTGLQGQAVFKTKLTFRPHSTDSATHRKMTLSLADRCSKTQKIRILPMAGRDPECQRTEMIKKEEERLRASIRRESQQRRMREKQHQRGLSASYLEPDRYDEEEEGEESISLAAIKNRYKGGIREERARIYSSDSDEGSEEDKAQRLLKAKKLTSDEEGEPSGKRKAEDDDKANKKHKKYVISDEEEEDDD

SEQ ID NO: 8366 - protein, 1150 aa, Homo sapiens
MSKTLKKKKHWLSKVQECAVSWAGPPGDFGAEIRGGAERGEFPYLGRLREEPGGGTCCIVSGKAPNPSDVLLEVNGTPVSGLTNRDTLAVIRHFREPIRLKTVKPGKVINKDLRHYLSLQFQKGSIDHKLQQVIRDNLYLRTIPCTTRAPRDGEVPGVDYNFISVEQFKALEESGALLESGTYDGNFYGTPKPPAEPSPFQPDPVDQVLFDNEFDAESQRKRTTSVSKMERMDSSLPEEEEDEDKGAINGSGNAENRERHSESSDWMKTVPSYNQTNSSMDFRNYMMRDETLEPLPKNWEMAYTDTGMIYFIDHNTKTTTWLDPRLCKKAKAPEDCEDGELPYGWEKIEDPQYGTYYVDFTLVAQAGVQWHDLGSLQPPPPGFNHLNQKTQFENPVEEAKRKKQLGQVEIGSSKPDMEKSHFTRDPSQLKGVLVRASLKKSTMGFGFTIIGGDRPDEFLQVKNVLKDGPAAQDGKIAPGDVIVDINGNCVFGHTHADVVQMFQLVPVNQYVNLTLCRGYPLPDDSEDPVVDIVAATPVINGQSLTKGETCMNPQDFKPGAMVLEQNGKSGHTSTGDGLNGPSDASEQRVSMASSGSSQPELVTIPLIKGPKGFGFAIADSPTGQKVKMILDSQWCQGLQKEDIIKEIYHQNVQNLTHLQVVEVLKQFPVGADVPLLILRGGPPSTTKTAKMKTDKKENAGSLEAINEPIPQPMPFPPSIIRSGSPKLDPSEVYLKSKTLYEDKPPNTKDLDVFLRKQESGFGFRVLGGDGPDQSIYIGAIIPLGAAEKDGRLRAADELMCIDGIPVKGKSHKQVLDLMTTAARNGHVLLTVRRKIFYGEKQPEDDSSQAFISTQNGSPRLNRAEVPARPAPQEPYDVVLQRKENEGFGFVILTSKNKPPPGVIPHKIGRVIEGSPADRCGKLKVGDHISAVNGQSIVELSHANIVQLIKDAGVTVTLTVIAEEEHHGPPSGTNSARQSPALQHRPMGQSQANHIPGDRSALEGEIGKDVSTSYRHSWSDHKHLAQPDTAVISVVGSRHNQNLGCYPVELERGPRGFGFSLRGGKEYNMGLFILRLAEDGPAIKDGRIHVGDQIVEINGEPTQGITHTRAIELIQAGGNKVLLLLRPGTGLIPDHGLAPSGLCSYVKPEQH

SEQ ID NO: 8367 - protein, 1027 aa, Homo sapiens
DVIVDINGNCVLGHTHADVVQMFQLVPVNQYVNLTLCRGYPLPDDSEDPVVDIVAATPVINGQSLTKGETCMNPQDFKPGAMVLEQNGKSGHTLTGDGLNGPSDASEQRVSMASSGSSQPELVTIPLIKGPKGFGFAIADSPTGQKVKMILDSQWCQGLQKGDIIKEIYHQNVQNLTHLQVVEVLKQFPVGADVPLLILRGGPPSPTKTAKMKTDKKENAGSLEAINEPIPQPMPFPPSIIRSGSPKLDPSEVYLKSKTLYEDKPPNTKDLDVFLRKQESGFGFRVLGGDGPDQSIYIGAIIPLGAAEKDGRLRAADELMCIDGIPVKGKSHKQVLDLMTTAARNGHVLLTVRRKIFYGEKQPEDDSSQAFISTQNGSPRLNRAEVPARPAPQEPYDVVLQRKENEGFGFVILTSKNKPPPGVIPHKIGRVIEGSPADRCGKLKVGDHISAVNGQSIVELSHDNIVQLIKDAGVTVTLTVIAEEEHHGPPSGTNSARQSPALQHRPMGQSQANHIPGDRSALEGEIGKDVSTSYRHSWSDHKHLAQPDTAVISVVGSRHNQNLGCYPVELERGPRGFGFSLRGGKEYNMGLFILRLAEDGPAIKDGRIHVGDQIVEINGEPTQGITHTRAIELIQAGGNKVLLLLRPGTGLIPDHGDWDINNPSSSNVIYDEQSPLPPSSHFASIFEESHVPVIEESLRVQICEKAEELKDIVPEKKSTLNENQPEIKHQSLLQKNVSKRDPPSSHGHSNKKNLLKVENGVTRRGRSVSPKKPASQHSEEHLDKIPSPLKNNPKRRPRDQSLSPSKGENKSCQVSTRAGSGQDQCRKSRGRSASPKKQQKIEGSKAPSNAEAKLLEGKSRRIAGYTGSNAEQIPDGKEKSDVIRKDAKQNQLEKSRTRSPEKKIKRMVEKSLPSKMTNKTTSKEVSENEKGKKVTTGETSSSNDKIGENVQLSEKRLKQEPEEKVVSNKTEDHKGKELEAADKNKETGRFKPESSSPVKKTLITPGPWKVPSGNKVTGTIGMAEKRQ

SEQ ID NO: 8368 - protein, 1125 aa, Homo sapiens
MSKTLKKKRHWLSKVQECAVSWAGPPGDFGAEIRGGAERGEFPYLGRLREEPGGGTCCVVSGKAPSPGDVLLEVNGTPVSGLTNRDTLAVIRHFREPIRLKTVKPGKVINKDLRHYLSLQFQKGSIDHKLQQVIRDNLYLRTIPCTTRAPRDGEVPGVDYNFISVEQFKALEESGALLESGTYDGNFYGTPKPPAEPSPFQPDPVDQVLFDNEFDAESQRKRTTSVSKMERMDSSLPEEEEDEDKEAINGSGNAENGERHSESSDWMKTVPSYNQTNSSMDFRNYMMRDETLEPLPKNWEMAYTDTGMIYFIDHNTKTTTWLDPRLCKKAKAPEDCEDGELPYGWEKIEDPQYGTYYVDHLNQKTQFENPVEEAKRKKQLGQVEIGSSKPDMEKSHFTRDPSQLKGVLVRASLKKSTMGFGFTIIGGDRPDEFLQVKNVLKDGPAAQDGKIAPGDVIVDINGNCVLGHTHADVVQMFQLVPVNQYVNLTLCRGYPLPDDSEDPVVDIVAATPVINGQSLTKGETCMNPQDFKPGAMVLEQNGKSGHTLTGDGLNGPSDASEQRVSMASSGSSQPELVTIPLIKGPKGFGFAIADSPTGQKVKMILDSQWCQGLQKGDIIKEIYHQNVQNLTHLQVVEVLKQFPVGADVPLLILRGGPPSPTKTAKMKTDKKENAGSLEAINEPIPQPMPFPPSIIRSGSPKLDPSEVYLKSKTLYEDKPPNTKDLDVFLRKQESGFGFRVLGGDGPDQSIYIGAIIPLGAAEKDGRLRAADELMCVDGIPVKGKSHKQVLDLMTTAAPNGHVLLTVRRKIFYGEKQPEDDSSQAFISTQNGSPRLNRAEVPARPAPQEPYDVVLQRKENEGFGFVILTSKNKPPPGVIPHKIGRVIEGSPADRCGKLKVGDHISAVNGQSIVELSHDNIVQLIKDAGVTVTLTVIAEEEHHGPPSGTNSARQSPALQHRPMGQSQANHIPGDRSALEGEIGKDVSTSYRHSWPDHKHLAQPDTAVISVVGSRHNQNLGCYPVELERGPRGFGFSLRGGKEYNMGLFILRLAEDGPAIKDGRIHVGDQIVEINGEPTQGITHTRAIELIQAGGNKVLLLLRPGTGLIPDHGLAPSGLCSYVKPEQH

SEQ ID NO: 8369 - protein, 1432 aa, Homo sapiens
MTVFRQENVDDYYDTGEELGSGQFAVVKKCREKSTGLQYAAKFIKKRRTKSSRRGVSREDIEREVSILKEIQHPNVITLHEVYENKTDVILILELVAGGELFDFLAEKESLTEEEATEFLKQILNGVYYLHSLQIAHFDLKPENIMLLDRNVPKPRIKIIDFGLAHKIDFGNEFKNIFGTPEFVAPEIVNYEPLGLEADMWSIGVITYILLSGASPFLGDTKQETLANVSAVNYEFEDEYFSNTSALAKDFIRRLLVKDPKKRMTIQDSLQHPWIKPKDTQQALSRKASAVNMEKFKKFAARKKWKQSVRLISLCQRLSRSFLSRSNMSVARSDDTLDEEDSFVMKAIIHAINDDNVPGLQHLLGSLSNYDVNQPNKHGTPPLLIAAGCGNIQILQLLIKRGSRIDVQDKGGSNAVYWAARHGHVDTLKFLSENKCPLDVKDKSGEMALHVAARYGHADVAQVQVLCSFGSNPNIQDKEEETPLHCAAWHGYYSVAKALCEAGCNVNIKNREGETPLLTASARGYHDIVECLAEHGADLNACDKDGHIALHLAVRRCQMEVIKTLLSQGCFVDYQDRHGNTPLHVACKDGNMPIVVALCEANCNLDISNKYGRTPLHLAANNGILDVVRYLCLMGASVEALTTDGKTAEDLARSEQHEHVAGLLARLRKDTHRGLFIQQLRPTQNLQPRIKLKLFGHSGSGKTTLVESLKCGLLRSFFRRRRPRLSSTNSSRFPPSPLASKPTVSVSINNLYPGCENVSVRSRSMMFEPGLTKGMLEVFVAPTHHPHCSADDQSTKAIDIQNAYLNGVGDFSVWEFSGNPVYFCCYDYFAANDPTSIHVVVFSLEEPYEIQLNPVIFWLSFLKSLVPVEEPIAFGGKLKNPLQVVLVATHADIMNVPRPAGGEFGYDKDTSLLKEIRNRFGNDLHISNKLFVLDAGASGSKDMKVLRNHLQEIRSQIVSVCPPMTHLCEKIISTLPSWRKLNGPNQLMSLQQFVYDVQDQLNPLASEEDLRRIAQQLHSTGEINIMQSETVQDVLLLDPRWLCTNVLGKLLSVETPRALHHYRGRYTVEDIQRLVPDSDVEELLQILDAMDICARDLSSGTMVDVPALIKTDNLHRSWADEEDEVMVYGGVRIVPVEHLTPFPCGIFHKVQVNLCRWIHQQSTEGDADIRLWVNGCKLANRGAELLVLLVNHGQGIEVQVRGLETEKIKCCLLLDSVCSTIENVMATTLPGLLTVKHYLSPQQLREHHEPVMIYQPRDFFRAQTLKETSLTNTMGGYKESFSSIMCFGCHDVYSQASLGMDIHASDLNLLTRRKLSRLLDPPDPLGKDWCLLAMNLGLPDLVAKYNTNNGAPKDFLPSPLHALLREWTTYPESTVGTLMSKLRELGRRDAADLLLKASSVFKINLDGNGQEAYASSCNSGTSYNSISSVVSR

SEQ ID NO: 8370 - protein, 539 aa, Homo sapiens
QIPVSFQDLTVNFTQEEWQQLDPAQRLLYRDVMLENYSNLVSVGYHVSKPDVIFKLEQGEEPWIVEEFSNQNYPDIDDALEKNKEIQDKHLTQTVFFSNKTLITERENVFGKTLNLGMNSVPSRKMPYKCNPGGNSLKTNSEILKQPFDYNKCGKTFFKRAILITQKGRQTERKPNECNECRKTFSKRSTLIVHQRIHTGEKPYVCSDCRKTFRVKTSLTRHRRIHTGERPYECSECRKTFIDKSALIVHQKIHGGEKSYECNECGKTFFRKSALAEHFRSHTGEKPYECKECGNAFSKKSYLVVHQRTHRGEKPNECKECGKTFFCQSALTAHQRIHTGEKPYECSECEKTFFCQSALNVHRRSHTGEKPYECSQCGKFLCTKSALIAHQITHRGKKSYECNECGKFFCHKSTLTIHQRTHTGEKHGQRPYECNECGKTFCQKFSFVEHQRTHTGEKPYECNECGKSFCHKSAFRVHRRIHTGEKPYECNQCGKTYRRLWTLTEHQKIHTGEKPYECNKCEKTFRHKSNFLLHQKSHK

SEQ ID NO: 8371 - protein, 708 aa, Homo sapiens
EGLAASSEHSGVGGNALLSTLLALSQENMKMKKFQIPVSFQDLTVNFTQEEWQQLDPAQRLLYRDVMLENYSNLVSVGYHVSKPDVIFKLEQGEEPWIVEEFSNQNYPDIDDALEKNKEIQDKHLTQTVFFSNKTLITERENVFGKTLNLGMNSVPSRKMPYKCNPGGNSLKTNSEVIVAKKSKENRKIPDGYSGFGKHEKSHLGMKKYRYNPMRKASNQNENLILHQNIQILKQPFDYNKCGKTFFKRAILITQKGRQTERKPNECNECRKTFSKRSTLIVHQRIHTGEKPYVCSDCRKTFRVKTSLTRHRRIHTGERPYECSECRKTFIDKSALIVHQKIHGGEKSYECNECGKTFFRKSALAEHFRSHTGEKPYECKECGNAFSKKSYLVVHQRTHRGEKPNECKECGKTFFCQSALTAHQRIHTGEKPYECSECEKTFFCQSALNVHRRSHTGEKPYECSQCGKFLCTKSALIAHQITHRGKKSYECNECGKFFCHKSTLTIHQRTHTGEKHGVFNKCGRISIVKSNCSQCKRMNTKENLYECSEHGHAVSKNSHLIVHQRTIWERPYECNECGRTYCRKSALTHHQRTHTGQRPYECNECGKTFCQKFSFVEHQRTHTGEKPYECNECGKSFCHKSAFRVHRRIHTGEKPYECNQCGKTYRRLWTLTEHQKIHTGEKPYECNKCEKTFRHKSNFLLHQKSHKE

SEQ ID NO: 8372 - protein, 634 aa, Homo sapiens
PVSFQDLTVNFTQEEWQQLDPAQRLLYRDVMLENYSNLVSVEKNKEIQDKHLTQTVFFSNKTLITERENVFGKTLNLGMNSVPSRKMPYKCNPGGNSLKTNSEVIVAKKSKENRKIPDGYSGFGKHEKSHLGMKKYRYNPMRKASNQNENLILHQNIQILKQPFDYNKCGKTFFKRAILITQKGRQTERKPNECNECRKTFSKRSTLIVHQRIHTGEKPYVCSDCRKTFRVKTSLTRHRRIHTGERPYECSECRKTFIDKSALIVHQKIHGGEKSYECNECGKTFFRKSALAEHFRSHTGEKPYECKECGNAFSKKSYLVVHQRTHRGEKPNECKECGKTFFCQSALTAHQRIHTGEKPYECSECEKTFFCQSALNVHRRSHTGEKPYECSQCGKFLCTKSALIAHQITHRGKKSYECNECGKFFCHKSTLTIHQRTHTGEKHGVFNKCGRISIVKSNCSQCKRMNTKENLYECSEHGHAVSKNSHLIVHQRTIWERPYECNECGRTYCRKSALTHHQRTHTGQRPYECNECGKTFCQKFSFVEHQRTHTGEKPYECNECGKSFCHKSAFRVHRRIHTGEKPYECNQCGKTYRRLWTLTEHQKIHTGEKPYECNKCEKTFRHKSNFLLHQKSHK

SEQ ID NO: 8373 - protein, 703 aa, Homo sapiens
MCVFLHLLSYIKDTSFIPGPDCELHPRGMAATGPCSEAPVQGCDAGELQQLGLCGVSDVQRSWSKFCNFPLTGYHVSKPDVIFKLEQGEEPWIVEEFSNQNYPDIDDALEKNKEIQDKHLTQTVFFSNKTLITERENVFGKTLNLGMNSVPSRKMPYKCNPGGNSLKTNSEVIVAKKSKENRKIPDGYSGFGKHEKSHLGMKKYRYNPMRKASNQNENLILHQNIQILKQPFDYNKCGKTFFKRAILITQKGRQTERKPNECNECRKTFSKRSTLIVHQRIHTGEKPYVCSDCRKTFRVKTSLTRHRRIHTGERPYECSECRKTFIDKSALIVHQKIHGGEKSYECNECGKTFFRKSALAEHFRSHTGEKPYECKECGNAFSKKSYLVVHQRTHRGEKPNECKECGKTFFCQSALTAHQRIHTGEKPYECSECEKTFFCQSALNVHRRSHTGEKPYECSQCGKFLCTKSALIAHQITHRGKKSYECNECGKFFCHKSTLTIHQRTHTGEKHGVFNKCGRISIVKSNCSQCKRMNTKENLYECSEHGHAVSKNSHLIVHQRTIWERPYECNECGRTYCRKSALTHHQRTHTGQRPYECNECGKTFCQKFSFVEHQRTHTGEKPYECNECGKSFCHKSAFRVHRRIHTGEKPYECNQCGKTYRRLWTLTEHQKIHTGEKPYECNKCEKTFRHKSNFLLHQKSHKE

SEQ ID NO: 8374 - protein, 587 aa, Homo sapiens
VSFQDLTVNFTQEEWQQLDPAQRLLYRDVMLENYSNLVSVGYHVSKPDVIFKLEQGEEPWIVEEFSNQNYPDIDDALEKNKEIQDKHLTQTVFFSNKTLITERENVFGKTLNLGMNSVPSRKMPYKCNPGGNSLKTNSEVIVAKKSKENRKIPDGYSGFGKHEKSHLGMKKYRYNPMRKASNQNENLILHQNIQILKQPFDYNKCGKTFFKRAILITQKGRQTERKPNECNECRKTFSKRSTLIVHQRIHTGEKPYVCSDCRKTFRVKTSLTRHRRIHTGERPYECSECRKTFIDKSALIVHQKIHGGEKSYECNECGKTFFRKSALAEHFRSHTGEKPYECKECGNAFSKKSYLVVHQRTHRGEKPNECKECGKTFFCQSALTAHQRIHTGEKPYECSECEKTFFCQSALNVHRRSHTGEKPYECSQCGKFLCTKSALIAHQITHRGKKSYECNECGKFFCHKKSALTHHQRTHTGQRPYECNECGKTFCQKFSFVEHQRTHTGEKPYECNECGKSFCHKSAFRVHRRIHTGEKPYECNQCGKTYRRLWTLTEHQKIHTGEKPYECNKCEKTFRHKSNFLLHQKSH

SEQ ID NO: 8375 - protein, 195 aa, Homo sapiens
MLKTLNKLGIEGPCLKIIRAICDKRTANIILNGQQLEAFPLKTGTRQGCPLSPLLFNIVLEVLARAIRQVKEIKGIQIGREEVNLSLLADDMILYLENPVVSAQRPLKLINNFSKVSGYRINVQKSLAFLYTSNSKADSQISNELPFTIATKRIKYLGIQLTREVKDLYKENYKPPLKEIGDDTQKNGKTFQAHG

SEQ ID NO: 8376 - protein, 1102 aa, Homo sapiens
MFQLPVNNLGSLRKARKTVKKILSDIGLEYCKEHIEDFKQFEPNDFYLKNTTWEDVGLWDPSLTKNQDYRTKPFCCSACPFSSKFFSAYKSHFRNVHSEDFENRILLNCPYCTFNADKKTLETHIKIFHAPNASAPSSSLSTFKDKNKNDGLKPKQADSVEQAVYYCKKCTYRDPLYEIVRKHIYREHFQHVAAPYIAKAGEKSLNGAVPLGSNAREESSIHCKRCLFMPKSYEALVQHVIEDHERIGYQVTAMIGHTNVVVPRSKPLMLIAPKPQDKKSMGLPPRIGSLASGNVRSLPSQQMVNRLSIPKPNLNSTGVNMMSSVHLQQNNYGVKSVGQGYSVGQSMRLGLGGNAPVSIPQQSQSVKQLLPSGNGRSYGLGSEQRSQAPARYSLQSANASSLSSGQLKSPSLSQSQASRVLGQSSSKPAAAATGPPPGNTSSTQKWKICTICNELFPENVYSVHFEKEHKAEKVPAVANYIMKIHNFTSKCLYCNRYLPTDTLLNHMLIHGLSCPYCRSTFNDVEKMAAHMRMVHIDEEMGPKTDSTLSFDLTLQQGSHTNIHLLVTTYNLRDAPAESVAYHAQNNPPVPPKPQPKVQEKADIPVKSSPQAAVPYKKDVGKTLCPLCFSILKGPISDALAHHLRERHQVIQTVHPVEKKLTYKCIHCLGVYTSNMTASTITLHLVHCRGVGKTQNGQDKTNAPSRLNQSPSLAPVKRTYEQMEFPLLKKRKLDDDSDSPSFFEEKPEEPVVLALDPKGHEDDSYEARKSFLTKYFNKQPYPTRREIEKLAASLWLWKSDIASHFSNKRKKCVRDCEKYKPGVLLGFNMKELNKVKHEMDFDAEWLFENHDEKDSRVNASKTADKKLNLGKEDDSSSDSFENLEEESNESGSPFDPVFEVEPKISNDNPEEHVLKVIPEDASESEEKLDQKEDGSKYETIHLTEEPTKLMHNASDSEVDQDDVVEWKDGASPSESGPGSQQVSDFEDNTCEMKPGTWSDESSQSEDARSSKPAAKKKATMQGDREQLKWKNSSYGKVEGFWSKDQSQWKNASENDERLSNPQIEWQNSTIDSEDGEQFDNMTDGVAEPMHGSLAGVKLSSQQA

SEQ ID NO: 8377 - protein, 2062 aa, Homo sapiens
MPKSGFTKPIQSENSDSDSNMVEKPYGRKSKDKIASYSKTPKIERSDVSKEMKEKSSMKRKLPFTISPSRNEERDSDTDSDPGHTSENWGERLISSYRTYSEKEGPEKKKTKKEAGNKKSTPVSILFGYPLSERKQMALLMQMTARDNSPDSTPNHPSQTTPAQKKTPSSSSRQKDKVNKRNERGETPLHMAAIRGDVKQVKELISLGANVNVKDFAGWTPLHEACNVGYYDVAKILIAAGADVNTQGLDDDTPLHDSASSGHRDIVKLLLRHGGNPFQANKHGERPVDVAETEELELLLKREVPLSDDDESYTDSEEAQSVNPSSVDENIDSETEKDSLICESKQILPSKTPLPSALDEYEFKDDDDEEINKMIDDRHILRKEQRKENEPEAEKTHLFAKQEKAFYPKSFKSKKQKPSRVLYSSTESSDEEALQNKKISTSCSVIPETSNSDMQTKKEYVVSGEHKQKGKVKRKLKNQNKNKENQELKQEKEGKENTRITNLTVNTGLDCSEKTREEGNFRKSFSPKDDTSLHLFHISTGKSPKHSCGLSEKQSTPLKQEHTKTCLSPGSSEMSLQPDLVRYDNTESEFLPESSSVKSCKHKEKSKHQKDFHLEFGEKSNAKIKDEDHSPTFENSDCTLKKMDKEGKTLKKHKLKHKEREKEKHKKEIEGEKEKYKTKDSAKELQRSVEFDREFWKENFFKSDETEDLFLNMEHESLTLEKKSKLEKNIKDDKSTKEKHVSKERNFKEERDKIKKESEKSFREEKIKDLKEERENIPTDKDSEFTSLGMSAIEESIGLHLVEKEIDIEKQEKHIKESKEKPEKRSQIKEKDIEKMERKTFEKEKKIKHEHKSEKDKLDLSECVDKIKEKDKLYSHHTEKCHKEGEKSKNTAAIKKTDDREKSREKMDRKHDKEKPEKERHLAESKEKHLMEKKNKQSDNSEYSKSEKGKNKEKDRELDKKEKSRDKESINITNSKHIQEEKKSSIVDGNKAQHEKPLSLKEKTKDEPLKTPDGKEKDKKDKDIDRYKERDKHKDKIQINSLLKLKSEADKPKPKSSPASKDTRPKEKRLVNDDLMQTSFERMLSLKDLEIEQWHKKHKEKIKQKEKERLRNRNCLELKIKDKEKTKHTPTESKNKELTRSKSSEVTDAYTKEKQPKDAVSNRSQSVDTKNVMTLGKSSFVSDNSLNRSPRSENEKPGLSSRSVSMISVASSEDSCHTTVTTPRPPVEYDSDFMLESSESQMSFSQSPFLSIAKSPALHERELDSLADLPERIKPPYANRLSTSHLRSSSVEDVKLIISEGRPTIEVRRCSMPSVICEHTKQFQTISEESNQGSLLTVPGDTSPSPKPEVFSNVPERDLSNVSNIHSSFATSPTGASNSKYVSADRNLIKNTAPVNTVMDSPVHLEPSSQVGVIQNKSWEMPVDRLETLSTRDFICPNSNIPDQESSLQSFCNSENKVLKENADFLSLRQTELPGNSCAQDPASFMPPQQPCSFPSQSLSDAESISKHMSLSYVANQEPGILQQKNAVQIISSALDTDNESTKDTENTFVLGDVQKTDAFVPVYSDSTIQEASPNFEKAYTLPVLPSEKDFNGSDASTQLNTHYAFSKLTYKSSSGHEVENSTTDTQVISHEKENKLESLVLTHLSRCDSDLCEMNAGMPKGNLNEQDPKHCPESEKCLLSIEDEESQQSILSSLENHSQQSTQPEMHKYGQLVKVELEENAEDDKTENQIPQRMTRNKANTMANQSKQILASCTLLSEKDSESSSPRGRIRLTEDDDPQIHHPRKRKVSRVPQPVQVSPSLLQAKEKTQQSLAAIVDSLKLDEIQPYSSERANPYFEYLHIRKKIEEKRKLLCSVIPQAPQYYDEYVTFNGSYLLDGNPLSKICIPTITPPPSLSDPLKELFRQQEVVRMKLRLQHSIEREKLIVSNEQEVLRVHYRAARTLANQTLPFSACTVLLDAEVYNVPLDSQSDDSKTSVRDRFNARQFMSWLQDVDDKFDKLKTCLLMRQQHEAAALNAVQRLEWQLKLQELDPATYKSISIYEIQEFYVPLVDVNDDFELTPI

SEQ ID NO: 8378 - protein, 1049 aa, Homo sapiens
MLCWGNASFGQLGLGGIDEEIVLEPRKSDFFINKRVRDVGCGLRHTVFVLDDGTVYTCGCNDLGQLGHEKSRKKPEQVVALDAQNIVAVSCGEAHTLALNDKGQVYAWGLDSDGQLGLVGSEECIRVPRNIKSLSDIQIVQVACGYYHSLALSKASEVFCWGQNKYGQLGLGTDCKKQTSPQLLKSLLGIPFMQVAAGGAHSFVLTLSGAIFGWGRNKFGQLGLNDENDRYVPNLLKSLRSQKIVYICCGEDHTAALTKEGGVFTFGAGGYGQLGHNSTSHEINPRKVFELMGSIVTEIACGRQHTSAFVPSSGRIYSFGLGGNGQLGTGSTSNRKSPFTVKGNWYPYNGQCLPDIDSEEYFCVKRIFSGGDQSFSHYSSPQNCGPPDDFRCPNPTKQIWTVNEALIQKWLSYPSGRFPVEIANEIDGTFSSSGCLNGSFLAVSNDDHYRTGTRFSGVDMNAARLLFHKLIQPDHPQISQQVAASLEKNLIPKLTSSLPDVEALRFYLTLPECPLMSDSNNFTTIAIPFGTALVNLEKAPLKVLENWWSVLEPPLFLKIVELFKEVVVHLLKLYKIGIPPSERRIFNSFLHTALKVLEILHRVNEKMGQIIQYDKFYIHEVQELIDIRNDYINWVQQQAYGMLADIPVTICTYPFVFDAQAKTTLLQTDAVLQMQMAIDQAHRQNVSSLFLPVIESVNPCLILVVRRENIVGDAMEVLRKTKNIDYKKPLKVIFVGEDAVDAGGVRKEFFLLIMRELLDPKYGMFRYYEDSRLIWFSDKTFEDSDLFHLIGVICGLAIYNCTIVDLHFPLALYKKLLKKKPSLDDLKELMPDVGRSMQQLLDYPEDDIEETFCLNFTITVENFGATEVKELVLNGADTAVNKQNRQEFVDAYVDYIFNKSVASLFDAFHAGFHKVCGGKVLLLFQPNELQAMVIGNTNYDWKELEKNTEYKGEYWAEHPTIKIFWEVFHELPLEKKKQFLLFLTGSDRIPILGMKSLKLVIQSTGGGEEYLPVSHTCFNLLDLPKYTEKETLRSKLIQAIDHNEGFSLI

SEQ ID NO: 8379 - protein, 953 aa, Homo sapiens
SCFPKIMCVDSLVRICSGLSYGRIRNIKSLSDIQIVQVACGYYHSLALSKASEVFCWGQNKYGQLGLGTDCKKQTSPQLLKSLLGIPFMQVAAGGAHSFVLTLSGAIFGWGRNKFGQLGLNDENDRYVPNLLKSLRSQKIVYICCGEDHTAALTKEGGVFTFGAGGYGQLGHNSTSHEINPRKVFELMGSIVTEIACGRQHTSAFVPSSGRIYSFGLGGNGQLGTGSTSNRKSPFTVKGNWYPYNGQCLPDIDSEEYFCVKRIFSGGDQSFSHYSSPQNCGPPDDFRCPNPTKQIWTVNEALIQKWLSYPSGRFPVEIANEIDGTFSSSGCLNGSFLAVSNDDHYRTGTRFSGVDMNAARLLFHKLIQPDHPQISQQVAASLEKNLIPKLTSSLPDVEALRFYLTLPECPLMSDSNNFTTIAIPFGTALVNLEKAPLKVLENWWSVLEPPLFLKIVELFKEVVVHLLKLYKIGIPPSERRIFNSFLHTALKVLEILHRVNEKMGQIIQYDKFYIHEVQELIDIRNDYINWVQQQAYGMDVNHGLTELADIPVTICTYPFVFDAQAKTTLLQTDAVLQMQMAIDQAHRQNVSSLFLPVIESVNPCLILVVRRENIVGDAMEVLRKTKNIDYKKPLKVIFVGEDAVDAGGVRKEFFLLIMRELLDPKYGMFRYYEDSRLIWFSDKTFEDSDLFHLIGVICGLAIYNCTIVDLHFPLALYKKLLKKKPSLDDLKELMPDVGRSMQQLLDYPEDDIEETFCLNFTITVENFGATEVKELVLNGADTAVNKQNRQEFVDAYVDYIFNKSVASLFDAFHAGFHKVCGGKVLLLFQPNELQAMVIGNTNYDWKELEKNTEYKGEYWAEHPTIKIFWEVFHELPLEKKKQFLLFLTGSDRIPILGMKSLKLVIQSTGGGEEYLPVSHTCFNLLDLPKYTEKETLRSKLIQAIDHNEGFSLI

SEQ ID NO: 8380 - protein, 331 aa, Homo sapiens
MEPEFLYDLLQLPKGVEPPAEEELSKGGKKKYLPPTSRKDPKFEELQKVLMEWINATLLPEHIVVRSLEEDMFDGLILHHLFQRLAALKLEAEDIALTATSQKHKLTVVLEAVNRSLQLEEWQAKWSVESIFNKDLLSTLHLLVALAKRFQPDLSLPTNVQVEVITIESTKSGLKSEKLVEQLTEYSTDKDEPPKDVFDELFKLAPEKVNAVKEAIVNFVNQKLDRLGLSVQNLDTQFADGVILLLLIGQLEGFFLHLKEFYLTPNSPAEMLHNVTLALELLKDEGLLSCPVSPEDIVNKDAKSTLRVLYGLFCKHTQKAHRDRTPHGAPN

SEQ ID NO: 8381 - protein, 706 aa, Homo sapiens
MKIFSESHKTVFVVDHCPYMAESCRQHVEFDMLVKNRTQGIIPLAPISKSLWTCSVESSMEYCRIMYDIFPFKKLVNFIVSDSGAHVLNSWTQEDQNLQELMAALAAVGPPNPRADPECCSILHGLVAAVETLCKITEYQHEARTLLMENAERVGNRGRIICITNAKSDSHVRMLEDCVQETIHEHNKLAANSDHLMQIQKCELVLIHTYPVGEDSLVSDRSKKELSPVLTSEVHSVRAGRHLATKLNILVQQHFDLASTTITNIPMKEEQHANTSANYDVELLHHKDAHVDFLKSGDSHLGGGSREGSFKETITLKWCTPRTNNIELHYCTGAYRISPVDVNSRPSSCLTNFLLNGRSVLLEQPRKSGSKVISHMLSSHGGEIFLHVLSSSRSILEDPPSISEGCGGRVTDYRITDFGEFMRENRLTPFLDPRYKIDGSLEVPLERAKDQLEKHTRYWPMIISQTTIFNMQAVVPLASVIVKESLTEEDVLNCQKTIYNLVDMERKNDPLPISTVGTRGKGPKRDEQYRIMWNELETLVRAHINNSEKHQRVLECLMACRSKPPEEEERKKRGRKREDKEDKSEKAVKDYEQEKSWQDSERLKGILERGKEELAEAEIIKDSPDSPEPPNKKPLVEMDETPQVEKSKGPVSLLSLWSNRINTANSRKHQEFAGRLNSVNNRAELYQHLKEENGMETTENGKASRQ

SEQ ID NO: 8382 - protein, 203 aa, Homo sapiens
MARPRPREYKAGDLVFAKMKGYPHWPARIDELPEGAVKPPANKYPIFFFGTHETAFLGPKDLFPYKEYKDKFGKSNKRKGFNEGLWEIENNPGVKFTGYQAIQQQSSSETEGEGGNTADASSEEEGDRVEEDGKGKRKNEKAGSKRKKSYTSKKSSKQSRKSPGDEDDKDCKEEENKSSSEGGDAGNDTRNTTSDLQKTSEGT

SEQ ID NO: 8383 - protein, 606 aa, Homo sapiens
MDSQRELAEELRLYQSTLLQDGLKDLLDEKKFIDCTLKAGDKSLPCHRLILSACSPYFREYFLSEIDEAKKKEVVLDNVDPAILDLIIKYLYSASIDLNDGNVQDIFALASRFQIPSVFTVCVSYLQKRLAPGNCLAILRLGLLLDCPRLAISAREFVSDRFVQICKEEDFMQLSPQELISVISNDSLNVEKEEAVFEAVMKWVRTDKENRVKNLSEVFDCIRFRLMTEKYFKDHVEKDDIIKSNPDLQKKIKVLKDAFAGKLPEPSKNAAKTGAGEVNGDVGDEDLLPGYLNDIPRHGMFVKDLILLVNDTAAVAYDPTENECYLTALAEQIPRNHSSIVTQQNQIYVVGGLYVDEENKDQPLQSYFFQLDSIASEWVGLPPLPSARCLFGLGEVDDKIYVVAGKDLQTEASLDSVLCYDPVAAKWNEVKKLPIKVYGHNVISHKGMIYCLGGKTDDKKCTNRVFIFNPKKGDWKDLAPMKIPRSMFGVAVHKGKIVIAGGVTEDGLSASVEAFDLTTNKWDVMTEFPQERSSISLVSLAGSLYAIGGFAMIQLESKEFAPTEVNDIWKYEDDKKEWAGMLKEIRYASGASCLATRLNLFKLSKL

SEQ ID NO: 8384 - protein, 596 aa, Homo sapiens
MRLYQSTLLQDGLKDLLDEKKFIDCTLKAGDKSLPCHRLILSACSPYFREYFLSEIDEAKKKEVVLDNVDPAILDLIIKYLYSASIDLNDGNVQDIFALASRFQIPSVFTVCVSYLQKRLAPGNCLAILRLGLLLDCPRLAISAREFVSDRFVQICKEEDFMQLSPQELISVISNDSLNVEKEEAVFEAVMKWVRTDKENRVKNLSEVFDCIRFRLMTEKYFKDHVEKDDIIKSNPDLQKKIKVLKDAFAGKLPEPSKNAAKTGAGEVNGDVGDEDLLPGYLNDIPRHGMFVKDLILLVNDTAAVAYDPTENECYLTALAEQIPRNHSSIVTQQNQIYVVGGLYVDEENKDQPLQSYFFQLDSIASEWVGLPPLPSARCLFGLGEVDDKIYVVAGKDLQTEASLDSVLCYDPVAAKWNEVKKLPIKVYGHNVISHKGMIYCLGGKTDDKKCTNRVFIFNPKKGDWKDLAPMKIPRSMFGVAVHKGKIVIAGGVTEDGLSASVEAFDLTTNKWDVMTEFPQERSSISLVSLAGSLYAIGGFAMIQLESKEFAPTEVNDIWKYEDDKKEWAGMLKEIRYASGASCLATRLNLFKLSKL

SEQ ID NO: 8385 - protein, 708 aa, Homo sapiens
DWILDQGRVWEQSWGQSGSPRAFKGWARPWLAQCHLHADQQPRAMHRMPDPGKFKLLEQARDVREPVRYFSSVEEVASVFPDRIFVMEAITFSVKVVSGEFSEDSEVYNFTLHAGDELTLMGQAEILCAKTTKERSRFTTLLRKLGRAGALAGVGGGGPASAGAAGGTGGGGARPVKGKMPCLICMNHRTNESLSLPFQCQGRFSTRSPLELQMQEGEHTVRAIIERVRLPVNVLVPSRPPRNPYDLHPVREGHCYKLVSIISKTVVLGLALRREGPAPLHFLLLTDTPRFALPQGLLAGDPRVERLVRDSASYCRERFDPDEYSTAVREAPAELAEDCASPRRARLCLPAPRAPGLARAPGPLAPAPAGEGDREYVSPDWAAAPEPAAPPAEIPYEELWAHQGPEGLVRPPPGLDLISFGAAGPPRREPEAPPPPVPPKSEAVKEECRLLNAPPVPPRGGNGSGRLSSSPPVPPRFPKLQPVHSPSSSLSYYSSGLQDGAGSRSGSGSPSPDTYSLYCYPCTWGDCKEPVLEPFDPFELGQGSSPEPELLRSQEPRAVGTPGPGPPLSPLGPSKAFEPEGLVLHQVPTPLSPAALQGPEAGGALFLTQGRLEGPPASPRDGATGFGVRDASSWQPPADLSALSLEEVSRSLGFIGLSEDVVSFFARERIDGSIFVQLSEDILADDFHLTKLQVKKIIQFIKGWRPKI

SEQ ID NO: 8386 - protein, 342 aa, Homo sapiens
KGPRGSQGGGGGGSSSSSVVSSGGDEGYGTGGGGSSATSGGRRGSLEMSSDGEPLSRMDSEDSISSTIMDVDSTISSGRSTPAMMNGQGSTTSSSKNIAYNCCWDQCQACFNSSPDLADHIRSIHVDGQRGGVFVCLWKGCKVYNTPSTSQSWLQRHMLTHSGDKPFKCVVGGCNASFASQGGLARHVPTHFSQQNSSKVSSQPKAKEESPSKAGMNKRRKLKNKRRRSLPRPHDFFDAQTLDAIRHRAICFNLSAHIESLGKGHSVVFHSTVIAKRKEDSGKIKLLLHWMPEDILPDVWVNESERHQLKTKVVHLSKLPKDTALLLDPNIYRTMPQKRLKR

SEQ ID NO: 8387 - protein, 84 aa, Homo sapiens
LPSENRYREVSSISICGDFQAQRMKLRYKEDGKTLYANTINGSGLAIDRIIAIILEQYQTESGYIEIPEVLIPYFGKIKQITNK

SEQ ID NO: 8388 - protein, 588 aa, Homo sapiens
MGPLTFTDVAIEFSLEEWQCLDTAQQNLYRNVMLENYRNLVFLGIAVSKPDLITCLEKEKEPCKMKRHEMVDEPPVVCSHFAEDFWPEQDIKDSFQKVTLRRYDKRGHENLQLRKGYKTVGDCKLYKGGYNGLNQCLTLTQSKMYHCDIYVKVFYAFSNADRYKTRYTGKKPFQCKKCGKSFCMLSQLTQHKKIHIRENTYRCKECCNAFNQSSALTNHKRIYVGEKHYRCEECGKAFNHYSTLTNHKRIHSGEKPYKCDECGKTFSISSTFTKHKIIHTEEKPYKCKECGKAFNQFQLLLNYKIIHTVEKPYKCEECAKPLSGPQPLTKHKIIHTGENPYKCEECGKAFNQSSRLTRHKKIHTGEEPYKFEKCGRVFTCSSTLTQDKKIHTGEKPYNCEECGKVFTYSSTLTRHKRIHTEEKPYKCNECGKAFNRSSHLTSHRRIHTGEKPYKCEECGKAFKQSSNLNSHKKIHSGEKPYKCEECGKAFILSSRLTQHKKIHTGEKPYKCEECGKAFNRSSRLTQHKKIHTGEKPYKCKQCDKAFTHSSNLSSHKKIHSGEKPYKCEECGKAFNRSSRLTQHKKNSY

SEQ ID NO: 8389 - protein, 691 aa, Homo sapiens
MNAAVVRRTQEALGKVIRRPPLTEKLLSKPPFRYLHDIITEVIRMTGFMKGLYTDAEMKSDNVKDKDAKISFLQKAIDVVVMVSGEPLLAKPARIVAGHEPERTNELLQIIGKCCLNKLSSDDAVRRVLAGEKGEVKGRASLTSRSQELDNKNVREEESRVHKNTEDRGDAEIKERSTSRDRKQKEELKEDRKPREKDKDKEKAKENGGNRHREGERERAKARARPDNERQKDRGNRERDRDSERKKETERKSEGGKEKERLRDRDRERDRDKGKDRDRRRVKNGEHSWDLDREKNREHDKPEKKSASSGEMSKKLSDGTFKDSKAETETEISTRASKSLTTKTSKRRSKNSVEGRKEDNISAKSLDSIVSGINNEPNQETTTSEIGTKEANINSTSISDDNSASLRCENIQPNPTEKQKGDSTSDAEGDAGPAGQDKSEVPETPEIPNELSSNIRRIPRPGSARPAPPRVKRQDSMEALQMDRSGSGKTVSNVITESHNSDNEEDDQFVVEAAPQLSEMSEIEMVTAVELEEEEKHGGLVKKILETKKDYEKLQQSPKPGEKERSLFESAWKKEKDIVSKEIEKLRTSIQTLCKSALPLGKIMDYIQEDVDAMQNELQMWHSENRQHAEALQQEQRITDCAVEPLKAELAELEQLIKDQQDKICAVKANILKNEEKIQKMVYSINLTSRR

SEQ ID NO: 8390 - protein, 323 aa, Homo sapiens
MSERKVLNKYYPPDFDPSKIPKLKLPKDRQYVVRLMAPFNMRCKTCGEYIYKGKKFNARKETVQNEVYLGLPIFRFYIKCTRCLAEITFKTDPENTDYTMEHGATRNFQAEKLLEEEEKRVQKEREDEELNNPMKVLENRTKDSKLEMEVLENLQELKDLNQRQAHVDFEAMLRQHRLSEEERRRQQQEEDEQETAALLEEARKRRLLEDSDSEDEAAPSPLQPALRPNPTAILDEAPKPKRKVEVWEQSVGSLGSRPPLSRLVVVKKAKADPDCSNGQPQAAPTPGAPQNRKEANPTPLTPGASSLSQLGAYLDSDDSNGSN

SEQ ID NO: 8391 - protein, 315 aa, Homo sapiens
MPGLSCRFYQHKFPEVEDVVMVNVRSIAEMGAYVSLLEYNNIEGMILLSELSRRRIRSINKLIRIGRNECVVVIRVDKEKGYIDLSKRRVSPEEAIKCEDKFTKSKTVYSILRHVAEVLEYTKDEQLESLFQRTAWVFDDKYKRPGYGAYDAFKHAVSDPSILDSLDLNEDEREVLINNINRRLTPQAVKIRADIEVACYGYEGIDAVKEALRAGLNCSTENMPIKINLIAPPRYVMTTTTLERTEGLSVLSQAMAVIKEKIEEKRGVFNVQMEPKVVTDTDETELARQMERLERENAEVDGDDDAEEMEAKAED

SEQ ID NO: 8392 - protein, 350 aa, Homo sapiens
MASPPPFHSQKLPGEYFRYKGVPFPVGLYSLESISLAENTQDVRDDDIFIITYPKSGTTWMIEIICLILKEGDPSWIRSVPIWERAPWCETIVGAFSLPDQYSPRLMSSHLPIQIFTKAFFSSKAKVIYMGRNPRDVVVSLYHYSKIAGQLKDPGTPDQFLRDFLKGEVQFGSWFDHIKGWLRMKGKDNFLFITYEELQQDLQGSVERICGFLGRPLGKEALGSVVAHSTFSAMKANTMSNYTLLPPSLLDHRRGAFLRKGVCGDWKNHFTVAQSEAFDRAYRKQMRGMPTFPWDEDPEEDGSPDPEPSPEPEPKPSLEPNTSLEREPRPNSSPSPSPGQASETPHPRPS

SEQ ID NO: 8393 - protein, 365 aa, Homo sapiens
MDGPAEPQIPGLWDTYEDDISEISQKLPGEYFRYKGVPFPVGLYSLESISLAENTQDVRDDDIFIITYPKSGTTWMIEIICLILKEGDPSWIRSVPIWERAPWCETIVGAFSLPDQYSPRLMSSHLPIQIFTKAFFSSKAKVIYMGRNPRDVVVSLYHYSKIAGQLKDPGTPDQFLRDFLKGEVQFGSWFDHIKGWLRMKGKDNFLFITYEELQQDLQGSVERICGFLGRPLGKEALGSVVAHSTFSAMKANTMSNYTLLPPSLLDHRRGAFLRKGVCGDWKNHFTVAQSEAFDRAYRKQMRGMPTFPWDEDPEEDGSPDPEPSPEPEPKPSLEPNTSLEREPRPNSSPSPSPGQASETPHPRPS

SEQ ID NO: 8394 - protein, 503 aa, Homo sapiens
MENNMVELSKLQEYKLELDERAMQAVEKLEEIHLQKQAQYEKQLEQLNKDNTASLNMKELTLKDVECKFSKMKTTYEEVTTKLEEYKEAFAAALNANNSMSKKLTKSNKKIAMISTKLLMEKEWVKYFLSTLPTRRGQESPCVENLTSIVLNSKYIPKMTVRIPTSNPQTSNNCQNYLTEFCHPHGTVSQHTETILRKHRHHQVLRVLVEIEGINLCYLLHQKAHDIDIKVEEQLPHPLRYQETSKGPSGCLGTVLMWSLAQPQRFWISLPVASVLSLDRGSVGRALGDPTAQGVSSAKCPSLPNTLTLRNRVDGVSRQCQATSLSPLRWAQRAFRGFYSTVGFLDAKRQTTGHLEKDSVQKGPNLVDEPHGQLLDAGTVPHFLSLLMRPTSTEETAWRQGKRKAEKDELALELDQAIHFSIEIFHTVSEVFANQSRQDLDPAMDLLVLSQGHQTNILDIIHIHKEALTKVTESRQQVAEGKIDVQRLMMSESQEQDFFGHFG

SEQ ID NO: 8395 - protein, 207 aa, Homo sapiens
MKTTYEEVTTKLEEYKEAFAAALNANNSMSKKLTKSNKKIAMISTKLLMEKEWVKYFLSTLPTRRGQESPCVENLTSIVLNSKYIPKMTVRIPTSNPQTSNNCQNYLTEMELDCVEQIIRETKRTVAVLDTCSHLFSSLESTEVEPLRKHRRALPSVYSLVPNRRTAAASTESRTKRPGGVRSPGLQLEGTSTLQWEQGPIAHPRQR

SEQ ID NO: 8396 - protein, 1297 aa, Homo sapiens
VDVITPLKDVNVIEGTKAVLECKVSVPDVTSVKWYLNDEQIKPDDRVQAIVKGTKQRLVINRTHASDEGPYKLIVGRVETNCNLSVEKIKIIRGLRDLTCTETQNVVFEVELSHSGIDVLWNFKDKEIKPSSKYKIEAHGKIYKLTVLNMMKDDEGKYTFYAGENMTSGKLTVAGGAISKPLTDQTVAESQEAVFECEVANPDSKGEWLRDGKHLPLTNNIRSESDGHKRRLIIAATKLDDIGEYTYKVATSKTSAKLKVEGKVTVKIKKTLKNLTVTETQDAVFTVELTHPNVKGVQWIKNGVVLESNEKYAISVKGTIYSLRIKNCAIVDESVYGFRLGRLGASARLHVETVKIIKKPKDVTALENATVAFEVSVSHDTVPVKWFHKSVEIKPSDKHRLVSERKVHKLMLQNISPSDAGEYTAVVGQLECKAKLFVETLHITKTMKNIEVPETKTASFECEVSHFNVPSMWLKNGVEIEMSEKFKIVVQGKLHQLIIMNTSTEDSAEYTFVCGNDQVSATLTVTPIMITSMLKDINAEEKDTITFEVTVNYEGISYKWLKNGVEIKSTDKCQMRTKKLTHSLNIRNVHFGDAADYTFVAGKATSTATLYVEARHIEFRKHIKDIKVLEKKRAMFECEVSEPDITVQWMKDDQELQITDRIKIQKEKYVHRLLIPSTRMSDAGKYTVVAGGNVSTAKLFVEGRDVRIRSIKKEVQVIEKQRAVVEFEVNEDDVDAHWYKDGIEINFQVQERHKYVVERRIHRMFISETRQSDAGEYTFVAGRNRSSVTLYVNAPEPPQVLQELQPVTVQSGKPARFCAVISGRPQPKISWYKEEQLLSTGFKCKFLHDGQEYTLLLIEAFPEDAAVYTCEAKNDYGVATTSASLSVEVPEVVSPDQEMPVYPPAIITPLQDTVTSEGQPARFQCRVSGTDLKVSWYSKDKKIKPSRFFRMTQFEDTYQLEIAEAYPEDEGTYTFVASNAVGQVSSTANLSLEVQALDRQSSGKDVRESAKSQAVADSSFTKEESKISQKEIKSFQGSSYEYEVQVFESVSQSSIHTAASVQDTQLCHTASLSQIAESTELSKECAKESTGEAPKIFLHLQDVTVKCGDTAQFLCVLKDDSFIDVTWTHEGAKIEESERLKQSQNGNIQFLTICNVQLVDQGLYSCIVHNDCGERTTSAVLSVEGAPESILHERIEQEIEMEMKAAPVIKRKIEPLEVALGHLAKFTCEIQSAPNVRFQWFKAGREIYESDKCSIRSSKYISSLEILRTQVVDCGEYTCKASNEYGSVSCTATLTVT

SEQ ID NO: 8397 - protein, 1204 aa, Homo sapiens
MSFFNFRKIFKLGSEKKKKQYEHVKRDLNPEDFWEIIGELGDGAFGKVYKAQNKETSVLAAAKVIDTKSEEELEDYMVEIDILASCDHPNIVKLLDAFYYENNLWILIEFCAGGAVDAVMLELERPLTESQIQVVCKQTLDALNYLHDNKIIHRDLKAGNILFTLDGDIKLADFGVSAKNTRTIQRRDSFIGTPYWMAPEVVMCETSKDRPYDYKADVWSLGITLIEMAEIEPPHHELNPMRVLLKIAKSEPPTLAQPSRWSSNFKDFLKKCLEKNVDARWTTSQLLQHPFVTVDSNKPIRELIAEAKAEVTEEVEDGKEEDEEEETENSLPIPASKRASSDLSIASSEEDKLSQNACILESVSEKTERSNSEDKLNSKILNEKPTTDEPEKAVEDINEHITDAQLEAMTELHDRTAVIKENEREKRPKLENLPDTEDQETVDINSVSEGKENNIMITLETNIEHNLKSEEEKDQEKQQMFENKLIKSEEIKDTILQTVDLVSQETGEKEANIQAVDSEVGLTKEDTQEKLGEDDKTQKDVISNTSDVIGTCEAADVAQKVDEDSAEDTQSNDGKEVVEVGQKLINKPMVGPEAGGTKEVPIKEIVEMNEIEEGKNKEQAINSSENIMDINEEPGTTEGEEITESSSTEEMEVRSVVADTDQKALGSEVQDASKVTTQIDKEKKEIPVSIKKEPEVTVVSQPTEPQPVLIPSININSDSGENKEEIGSLSKTETILPPESENPKENDNDSGTGSTADTSSIDLNLSISSFLSKTKDSGSISLQETRRQKKTLKKTRKFIVDGVEVSVTTSKIVTDSDSKTEELRFLRRQELRELRFLQKEEQRAQQQLNSKLQQQREQIFRRFEQEMMSKKRQYDQEIENLEKQQKQTIERLEQEHTNRLRDEAKRIKGEQEKELSKFQNMLKNRKKEEQEFVQKQQQELDGSLKKIIQQQKAELANIERECLNNKQQLMRAREAAIWELEERHLQEKHQLLKQQLKDQYFMQRHQLLKRHEKETEQMQRYNQRLIEELKNRQTQERARLPKIQRSEAKTRMAMFKKSLRINSTATPDQDRDKIKQFAAQEEKRQKNERMAQHQKHENQMRDLQLQCEANVRELHQLQNEKCHLLVEHETQKLKELDEEHSQELKEWREKLRPRKKTLEEEFARKLQEQEVFFKMTGESECLNPSTQSRISKFYPIPSLHSTGS

SEQ ID NO: 8398 - protein, 1235 aa, Homo sapiens
MSFFNFRKIFKLGSEKKKKQYEHVKRDLNPEDFWEIIGELGDGAFGKVYKAQNKETSVLAAAKVIDTKSEEELEDYMVEIDILASCDHPNIVKLLDAFYYENNLWILIEFCAGGAVDAVMLELERPLTESQIQVVCKQTLDALNYLHDNKIIHRDLKAGNILFTLDGDIKLADFGVSAKNTRTIQRRDSFIGTPYWMAPEVVMCETSKDRPYDYKADVWSLGITLIEMAEIEPPHHELNPMRVLLKIAKSEPPTLAQPSRWSSNFKDFLKKCLEKNVDARWTTSQLLQHPFVTVDSNKPIRELIAEAKAEVTEEVEDGKEEDEEEETENSLPIPASKRASSDLSIASSEEDKLSQNACILESVSEKTERSNSEDKLNSKILNEKPTTDEPEKAVEDINEHITDAQLEAMTELHDRTAVIKENEREKRPKLENLPDTEDQETVDINSVSEGKENNIMITLETNIEHNLKSEEEKDQEKQQMFENKLIKSEEIKDTILQTVDLVSQETGEKEANIQAVDSEVGLTKEDTQEKLGEDDKTQKDVISNTSDVIGTCEAADVAQKVDEDSAEDTQSNDGKEVVEVGQKLINKPMVGPEAGGTKEVPIKEIVEMNEIEEGKNKEQAINSSENIMDINEEPGTTEGEEITESSSTEEMEVRSVVADTDQKALGSEVQDASKVTTQIDKEKKEIPVSIKKEPEVTVVSQPTEPQPVLIPSININSDSGENKEEIGSLSKTETILPPESENPKENDNDSGTGSTADTSSIDLNLSISSFLSKTKDSGSISLQETRRQKKTLKKTRKFIVDGVEVSVTTSKIVTDSDSKTEELRFLRRQELRELRFLQKEEQRAQQQLNSKLQQQREQIFRRFEQEMMSKKRQYDQEIENLEKQQKQTIERLEQEHTNRLRDEAKRIKGEQEKELSKFQNMLKNRKKEVINEVEKAPKELRKELMKRRKEELAQSQHAQEQEFVQKQQQELDGSLKKIIQQQKAELANIERECLNNKQQLMRAREAAIWELEERHLQEKHQLLKQQLKDQYFMQRHQLLKRHEKETEQMQRYNQRLIEELKNRQTQERARLPKIQRSEAKTRMAMFKKSLRINSTATPDQDRDKIKQFAAQEEKRQKNERMAQHQKHENQMRDLQLQCEANVRELHQLQNEKCHLLVEHETQKLKELDEEHSQELKEWREKLRPRKKTLEEEFARKLQEQEVFFKMTGESECLNPSTQSRISKFYPIPSLHSTGS

SEQ ID NO: 8399 - protein, 1152 aa, Homo sapiens
MSFFSFRKIFKLGSEKKKKQYEHVKRDLNPEDFWEIIGELGDGAFGKVYKAQNKETSVLAAAKVIDTKSEEELEDYMVEIDILASCDHPNIVKLLDAFYYENNLWILIEFCAGGAVDAVMLELERPLTESQIQVVCKQTLDALNYLHDNKIIHRDLKAGNILFTLDGDIKLADFGVSAKNTRTIQRRDSFIGTPYWMAPEVVMCETSKDRPYDYKADVWSLGITLIEMAEIEPPHHELNPMRVLLKIAKSEPPTLAQPSRWSSNFKDFLKKCLEKNVDARWTTSQLLQHPFVTVDSNKPIRELIAEAKAEVTEEVEDGKEEDEEEETENSLPIPASKRASSDLSIASSEEDKLSQNACILESVSEKTERSNSEDKLNSKILNEKPTTDEPEKAVEDINEHITDAQLEAMTELHDRTAVIKENEREKRPKLENLPDTEDQETVDINSVSEGKENNIMITLETNIEHNLKSEEEKDQEKQQMFENKLIKSEEIKDTILQTVDLVSQETGEKEANIQAVDSEVGLTKEDTQEKLGEDDKTQKDVISNTSDVIGTCEAADVAQKVDEDSAEDTQSNDGKEVVEVGQKLINKPMVGPEAGGTKEVPIKEIVEMNEIEEGKNKEQAINSSENIMDINEEPGTTEGEEITESSSTEEMEVRSVVADTDQKALGSEVQDASKVTTQIDKEKKEIPVSIKKEPEVTVVSQPTEPQPVLIPSININSDSGENKEEIGSLSKTETILPPESENPKENDNDSGTGSTADTSSIDLNLSISSFLSKTKDSGSISLQETRRQKKTLKKTRKFIVDGVEVSVTTSKIVTDSDSKTEELRFLRRQELRELRFLQKEEQRAQQQLNSKLQQQREQIFRRFEQEMMSKKRQYDQEIENLEKQQKQTIERLEQEHTNRLRDEAKRIKGEQEKELSKFQNMLKNRKKEEQEFVQKQQQELDGSLKKIIQQQKAELANIERECLNNKQQLMRAREAAIWELEERHLQEKHQLLKQQLKDQYFMQRHQLLKRHEKETEQMQRYNQRLIEELKNRQTQERARLPKIQRSEAKTRMAMFKKSLRINSTATPDQDRDKIKQFAAQEEKRQKNERMAQHQKHENQMRDLQLQCEANVRELHQLQNEKCHLLVEHETQKLKELDEEHTRIKGVEREIET

SEQ ID NO: 8400 - protein, 154 aa, Homo sapiens
MDNLESQTYEVFEKDPIKYSQYQQAIYKCLLDRVPEEEKDTNVQVLMVLGAGRGPLVNASLRAAKQADRRIKLYAVEKNPNAVVTLENWQFEEWGSQVTVVSSDMREWVAPEKADIIVSELLGSFADNELSPECLDGAQHFLKDVLMVSHPLPY

SEQ ID NO: 8401 - protein, 637 aa, Homo sapiens
MAAMAVGGAGGSRVSSGRDLNCVPEIADTLGAVAKQGFDFLCMPVFHPRFKREFIQEPAKNRPGPQTRSDLLLSGRDWNTLIVGKLSPWIRPDSKVEKIRRNSEAAMLQELNFGAYLGLPAFLLPLNQEDNTNLARVLTNHIHTGHHSSMFWMRVPLVAPEDLRDDIIENAPTTHTEEYSGEEKTWMWWHNFRTLCDYSKRIAVALEIGADLPSNHVIDRWLGEPIKAAILPTSIFLTNKKGFPVLSKMHQRLIFRLLKLEVQFIITGTNHHSEKEFCSYLQYLEYLSQNRPPPNAYELFAKGYEDYLQSPLQPLMDNLESQTYEVFEKDPIKYSQYQQAIYKCLLDRVPEEEKDTNVQVLMVLGAGRGPLVNASLRAAKQADRRIKLYAVEKNPNAVVTLENWQFEEWGSQVTVVSSDMREWVAPEKADIIVSELLGSFADNELSPECLDGAQHFLKDDGVSIPGEYTSFLAPISSSKLYNEVRACREKDRDPEAQFEMPYVVRLHNFHQLSAPQPCFTFSHPNRDPMIDNNRYCTLEFPVEVNTVLHGFAGYFETVLYQDITLSIRPETHSPGMFSWFPILFPIKQPITVREGQTICVRFWRCSNSKKVWYEWAVTAPVCSAIHNPTGRSYTIGL

SEQ ID NO: 8402 - protein, 372 aa, Homo sapiens
  VARIANT 53, 102: Xaa = Any Amino Acid
MSADCALLIIAPGVGEFEVGISKNGQTQEHALLAYTLGVKQLLVGVNKMDSTXSPYHQMRYKEISTYIKKIGYNPDTVTFVPISGWHGDNMLEPSGNMPWFXEWKVTYKDSNASGTTLLEALDFILPLTHPTYEPLCLCLQDVYKIVGIGTVPVGRAETGVLKPGMVVSFAPVNVRIEVKSIEMHHEALSESLPGDNVGLNVNKKKKKNASAKDVHHGNVAGDSKNDPPMEASGFTAQVIILNHLGQISAGYAPALDCHTSQIPYKCSEQKEKVTILTSVNPSSPYTNSSRTQPMSATLRERLRKARSSFSSCYNVVKLLKVENEENDQTFSEKPASSTEENCLEFQESFKHIDSEFEENINLKNTLKNQCL

SEQ ID NO: 8403 - protein, 305 aa, Homo sapiens
MKGGNLDLNGLDHLTAAHVMTIFVADEDDEEEDDSPPERQIVVGICSMAKKSKSKPMKEILEWVSLFKYITVVVFEEEVILREPVENWPLCDCLFSLHSKGFPLDKVVAYAKLRNPFVINDLNMQYLIQDWREVYSILQAEVILLPCYAILNRDPNNPKECNLIEGEDHVEVNEEVFQKPFVEKPVSAEDHNVYIYYPTSAGSGSQRLFRKIGSRNTAEHARRSGNCLSAGTARISDPEEYGSPDRRLNAFCWCSKLFLSIDIVGDLKDSESMSFSDLENWAVANSSEPQLEDAKREISNSSLFW

SEQ ID NO: 8404 - protein, 1123 aa, Homo sapiens [sequence omitted]

SEQ ID NO: 8405 - protein, 2342 aa, Homo sapiens
MDGVSSEANEENDNIERPVRRRHSSILKPPRSPLQDHRGGNERVQESNALRNKKNSRRVSFADTIKVFQTESHMKIVRKSEMEGCSAMVPSQLQLLPPGFKRFSCLSLPETETGENLLLIQNKKLEDNYCEITGMNTLLSAPIHTQMQQKEFSIIEHTRERKHANDQTVIFSDENQMDLTSSHTVMITKGLLDNPISEKSTKIDTTSFLANLKLHTEDSRMKKEVNFSVDQNTSSENKIDFNDFIKRLKTGKCSAFPDVPDKENFEIPIYSKEPNSASSTHQMHVSLKEDENNSNITRLFREKDDGMNFTQCHTANIQTLIPTSSETNSRESKGNDITIYGNDFMDLTFNHTLQILPATGNFSEIENQTQNAMDVTTGYGTKASGNKTVFKSKQNTAFQDLSINSADKIHITRSHIMGAETHIVSQTCNQDARILAMTPESIYSNPSIQGCKTVFYSSCNDAMEMTKCLSNMREEKNLLKHDSNYAKMYCNPDAMSSLTEKTIYSGEENMDITKSHTVAIDNQIFKQDQSNVQIAAAPTPEKEMMLQNLMTTSEDGKMNVNCNSVPHVSKERIQQSLSNPLSISLTDRKTELLSGENTDLTESHTSNLGSQVPLAAYNLAPESTSESHSQSKSSSDECEEITKSRNEPFQRSDIIAKNSLTDTWNKDKDWVLKILPYLDKDSPQSADCNQEIATSHNIVYCGGVLDKQITNRNTVSWEQSLFSTTKPLFSSGQFSMKNHDTAISSHTVKSVLGQNSKLAEPLRKSLSNPTPDYCHDKMIICSEEEQNMDLTKSHTVVIGFGPSELQELGKTNLEHTTGQLTTMNRQIAVKVEKCGKSPIEKSGVLKSNCIMDVLEDESVQKPKFPKEKQNVKIWGRKSVGGPKIDKTIVFSEDDKNDMDITKSYTIEINHRPLLEKRDCHLVPLAGTSETILYTCGQDDMEITRSHTTALECKTVSPDEITTRPMDKTVVFVDNHVELEMTESHTVFIDYQEKERTDRPNFELSQRKSLGTPTVICTPTEESVFFPGNGESDRLVANDSQLTPLEEWSNNRGPVEVADNMELSKSATCKNIKDVQSPGFLNEPLSSKSQRRKSLKLKNDKTIVFSENHKNDMDITQSCMVEIDNESALEDKEDFHLAGASKTILYSCGQDDMEITRSHTTALECKTLLPNEIAIRPMDKTVLFTDNYSDLEVTDSHTVFIDCQATEKILEENPKFGIGKGKNLGVSFPKDNSCVQEIAEKQALAVGNKIVLHTEQKQQLFAATNRTTNEIIKFHSAAMDEKVIGKVVDQACTLEKAQVESCQLNNRDRRNVDFTSSHATAVCGSSDNYSCLPNVISCTDNLEGSAMLLCDKDEEKANYCPVQNDLAYANDFASEYYLESEGQPLSAPCPLLEKEEVIQTSTKGQLDCVITLHKDQDLIKDPRNLLANQTLVYSQDLGEMTKLNSKRVSFKLPKDQMKVYVDDIYVIPQPHFSTDQPPLPKKGQSSINKEEVILSKAGNKSLNIIENSSAPICENKPKILNSEEWFAAACKKELKENIQTTNYNTALDFHSNSDVTKQVIQTHVNAGEAPDPVITSNVPCFHSIKPNLNNLNGKTGEFLAFQTVHLPPLPEQLLELGNKAHNDMHIVQATEIHNINIISSNAKDSRDEENKKSHNGAETTSLPPKTVFKDKVRRCSLGIFLPRLPNKRNCSVTGIDDLEQIPADTTDINHLETQPVSSKDSGIGSVAGKLNLSPSQYINEENLPVYPDEINSSDSINIETEEKALIETYQKEISPYENKMGKTCNSQKRTWVQEEEDIHKEKKIRKNEIKFSDTTQDREIFDHHTEEDIDKSANSVLIKNLSRTPSSCSSSLDSIKADGTSLDFSTYRSSQMESQFLRDTICEESLREKLQDGRITIREFFILLQVHILIQKPRQSNLPGNFTVNTPPTPEDLMLSQYVYRPKIQIYREDCEARRQKIEELKLSASNQDKLLVDINKNLWEKMRHCSDKELKAFGIYLNKIKSCFTKMTKVFTHQGKVALYGKLVQSAQNEREKLQIKIDEMDKILKKIDNCLTEMETETKNLEDEEKNNPVEEWDSEMRAAEKELEQLKTEEEELQRNLLELEVQKEQTLAQIDFMQKQRNRTEELLDQLSLSEWDVVEWSDDQAVFTFVYDTIQLTITFEESVVGFPFLDKRYRKIVDVNFQSLLDEDQAPPSSLLVHKLIFQYVEEKESWKKTCTTQHQLPKMLEEFSLVVHHCRLLGEEIEYLKRWGPNYNLMNIDINNNELRLLFSSSAAFAKFEITLFLSAYYPSVPLPSTIQNHVGNTSQDDIATILSKVPLENNYLKNVVKQIYQDLFQDCHFYH

SEQ ID NO: 8406 - protein, 2316 aa, Homo sapiens
MDGVSSEANEENDNIERPVRRRHSSILKPPRSPLQDLRGGNERVQESNALRNKKNSRRVSFADTIKVFQTESHMKIVRKSEMEETETGENLLLIQNKKLEDNYCEITGMNTLLSAPIHTQMQQKEFSIIEHTRERKHANDQTVIFSDENQMDLTSSHTVMITKGLLDNPISEKSTKIDTTSFLANLKLHTEDSRMKKEVNFSVDQNTSSENKIDFNDFIKRLKTGKCSAFPDVPDKENFEIPIYSKEPNSASSTHQMHVSLKEDENNSNITRLFREKDDGMNFTQCHTANIQTLIPTSSETNSRESKGNDITIYGNDFMDLTFNHTLQILPATGNFSEIENQTQNAMDVTTGYGTKASGNKTVFKSKQNTAFQDLSINSADKIHITRSHIMGAETHIVSQTCNQDARILAMTPESIYSNPSIQGCKTVFYSSCNDAMEMTKCLSNMREEKNLLKHDSNYSKMYCNPDAMSSLTEKTIYSGEENMDITKSHTVAIDNQIFKQDQSNVQIAAAPTPEKEMMLQNLMTTSEDGKMNVNCNSVPHVSKERIQQSLSNPLSISLTDRKTELLSGENTDLTESHTSNLGSQVPLAAYNLAPESTSESHSQSKSSSDECEEITKSRNEPFQRSDIIAKNSLTDTWNKDKDWVLKILPYLDKDSPQSADCNQEIATSHNIVYCGGVLDKQITNRNTVSWEQSLFSTTKPLFSSGQFSMKNHDTAISSHTVKSVLGQNSKLAEPLRKSLSNPTPDYCHDKMIICSEEEQNMDLTKSHTVVIGFGPSELQELGKTNLEHTTGQLTTMNRQIAVKVEKCGKSPIEKSGVLKSNCIMDVLEDESVQKPKFPKEKQNVKIWGRKSVGGPKIDKTIVFSEDDKNDMDITKSYTIEINHRPLLEKRDCHLVPLAGTSETILYTCGQDDMEITRSHTTALECKTVSPDEITTRPMDKTVVFVDNHVELEMTESHTVFIDYQEKERTDRPNFELSQRKSLGTPTVICTPTEESVFFPGNGESDRLVANDSQLTPLEEWSNNRGPVEVADNMELSKSATCKNIKDVQSPGFLNEPLSSKSQRRKSLKLKNDKTIVFSENHKNDMDITQSCMVEIDNESALEDKEDFHLAGASKTILYSCGQDDMEITRSHTTALECKTLLPNEIAIRPMDKTVLFTDNYSDLEVTDSHTVFIDCQATEKILEENPKFGIGKGKNLGVSFPKDNSCVQEIAEKQALAVGNKIVLHTEQKQQLFAATNRTTNEIIKFHSAAMDEKVIGKVVDQACTLEKAQVESCQLNNRDRRNVDFTSSHATAVCGSSDNYSCLPNVISCTDNLEGSAMLLCDKDEEKANYCPVQNDLAYANDFASEYYLESEGQPLSAPCPLLEKEEVIQTSTKGQLDCVITLHKDQDLIKDPRNLLANQTLVYSQDLGEMTKLNSKRVSFKLPKDQMKVYVDDIYVIPQPHFSTDQPPLPKKGQSSINKEEVILSKAGNKSLNIIENSSAPICENKPKILNSEEWFAAACKKELKENIQTTNYNTALDFHSNSDVTKQVIQTHVNAGEAPDPVITSNVPCFHSIKPNLNNLNGKTGEFLAFQTVHLPPLPEQLLELGNKAHNDMHIVQATEIHNINIISSNAKDSRDEENKKSHNGAETTSLPPKTVFKDKVRRCSLGIFLPRLPNKRNCSVTGIDDLEQIPADTTDINHLETQPVSSKDSGIGSVAGKLNLSPSQYINEENLPVYPDEINSSDSINIETEEKALIETYQKEISPYENKMGKTCNSQKRTWVQEEEDIHKEKKIRKNEIKFSDTTQDREIFDHHTEEDIDKSANSVLIKNLSRTPSSCSSSLDSIKADGTSLDFSTYRSSQMESQFLRDTICEESLREKLQDGRITIREFFILLQVHILIQKPRQSNLPGNFTVNTPPTPEDLMLSQYVYRPKIQIYREDCEARRQKIEELKLSASNQDKLLVDINKNLWEKMRHCSDKELKAFGIYLNKIKSCFTKMTKVFTHQGKVALYGKLVQSAQNEREKLQIKIDEMDKILKKIDNCLTEMETETKNLEDEEKNNPVEEWDSEMRAAEKELEQLKTEEEELQRNLLELEVQKEQTLAQIDFMQKQRNRTEELLDQLSLSEWDVVEWSDDQAVFTFVYDTIQLTITFEESVVGFPFLDKRYRKIVDVNFQSLLDEDQAPPSSLLVHKLIFQYVEEKESWKKTCTTQHQLPKMLEEFSLVVHHCRLLGEEIEYLKRWGPNYNLMNIDINNNELRLLFSSSAAFAKFEITLFLSAYYPSVPLPSTIQNHVGNTSQDDIATILSKVPLENNYLKNVVKQIYQDLFQDCHFYH

SEQ ID NO: 8407 - protein, 1746 aa, Homo sapiens
MDGVSSEANEENDNIERPVRRRHSSILKPPRSPLQDLRGGNETVQESNALRNKKNSRRVSFADTIKVFQTESHMKIVRKSEMEETEAGENLLLIQNKKLEDNYCEITGMNTLLSAPIHTQMQQKEFSIIEHTRERKHANDQTVIFSDENQMDLTSSHTVMITKGLLDNPISEKSTKIDTTSFLANLKLHTEDSRMKKEVNFSVDQNTSSENKIDFNDFIKRLKTGKCSAFPDVPDKENFEIPIYSKEPNSASSTHQMHVSLKEDENNSNITRLFREKDDGMNFTQCHTANIQTLIPTSSETNSRESKGNDITIYGNDFMDLTFNHTLQILPATGNFSEIENQTQNAMDVTTGYGTKASGNKTVFKSKQNTAFQDLSINSADKIHITRSHIMGAETHIVSQTCNQDARILAMTPESIYSNPSIQGCKTVFYSSCNDAMEMTKCLSNMREEKNLLKHDSNYSKMYCNPDAMSSLTEKTIYSGEENMDITKSHTVAIDNQIFKQDQSNVQIAAAPTPEKEMMLQNLMTTSEDGKMNVNCNSVPHVSKERIQQSLSNPLSISLTDRKTELLSGENTDLTESHTSNLGSQVPLAAYNLAPESTSESHSQSKSSSDECEEITKSRNEPFQRSDIIAKNSLTDTWNKDKDWVLKILPYLDKDSPQSADCNQEIATSHNIVYCGGVLDKQITNRNTVSWEQSLFSTTKPLFSSGQFSMKNHDTAISSHTVKSVLGQNSKLAEPLRKSLSNPTPDYCHDKMIICSEEEQNMDLTKSHTVVIGFGPSELQELGKTNLEHTTGQLTTMNRQIAVKVEKCGKSPIEKSGVLKSNCIMDVLEDESVQKPKFPKEKQNVKIWGRKSVGGPKIDKTIVFSEDDKNDMDITKSYTIEINHRPLLEKRDCHLVPLAGTSETILYTCGQDDMEITRSHTTALECKTVSPDEITTRPMDKTVVFVDNHVELEMTESHTVFIDYQEKERTDRPNFELSQRKSLGTPTVICTPTEESVFFPGNGESDRLVANDSQLTPLEEWSNNRGPVEVADNMELSKSATCKNIKDVQSPGFLNEPLSSKSQRRKSLKLKNDKTIVFSENHKNDMDITQSCMVEIDNESALEDKEDFHLAGASKTILYSCGQDDMEITRSHTTALECKTLLPNEIAIRPMDKTVLFTDNYSDLEVTDSHTVFIDCQATEKILEENPKFGIGKGKNLGVSFPKDNSCVQEIAEKQALAVGNKIVLHTEQKQQLFAATNRTTNEIIKFHSAAMDEKVIGKVVDQACTLEKAQVESCQLNNRDRRNVDFTSSHATAVCGSSDNYSCLANVISCTDNLEGSAMLLCDKDEEKAHYCPVQNDLAYANDFASEYYLESEGQPLSAPCPLLEKEEVIQTSTKGQLDCVITLHKDQDLIKDPRNLLANQTLVYSQDLGEMTKLNSKRVSFKLPKDQMKVYVDDIYVIPQPHFSTDQPPLPKKGQSSINKEEVILSKAGNKSLNIIENSSAPICENKPKILNSEEWFAAACKKELKENIQTTNYNTALDFHSNSDVTKQVIQTHVNAGEAPDPVITSNVPCFHSIKPNLNNLNGKTGEFLAFQTVHLPPLPEQLLELGNKAHNDMHIVQATEIHNINIISSNAKDSRDEENKKSHNGAETTSLPPKTVFKDKVRRCSLGIFLPRLPNKRNCSVTGIDDLEQIPADTTDINHLETQPVSSKDSGIGSVAGKLNLSPSQYINEENLPVYPDEINSSDSIYIETEEKAVGTRRRRYS

SEQ ID NO: 8408 - protein, 228 aa, Homo sapiens
MTMGDKKSPTRPKRQAKPATDEGFWDCSVCTFRNSAEAFKCSICDVRKGTSTRKPRINSQLVAQQVAQQYATPPPPKKEKKEKVEKQDKEKPEKDKEISPSVTKKNTNKKTKPKSDILKDPPSEANSIQSANATTKTSETNHTSRPRLKNVDRSTAQQLAVTVGNVTVIITDFKEKTRSSSTSSSTVTSSAGSEQQNQSSSGSESTDKGSSRSSTPKGDMSAVNDESF

SEQ ID NO: 8409 - protein, 265 aa, Homo sapiens
EDEVARSAKKMDKMVQEKNTAGALGLLTELQNVLELLRSTGTGMLLNVSLKQSADEEVTSLAKSLVKSWKKLPDKPSSEKDPKEKQIEPAMTSQNSKRNTSDSVRMKYREMLPAALRTGDDCIEMGTDEEELGSRTEEAIDPERGNTGMKYKNRVQSKISNLTDAKNPDLRKNAPCGNIPPDLLARMTAEEMASDELKEMHKNLTKEAIREHQMAKTGGTQPDSLTCAKCKKKNCTSTQVQACSAGEPMTTFVDCNECGNQQKFC

SEQ ID NO: 8410 - protein, 309 aa, Homo sapiens
DKGKIIKQQETVIILEDYADPYDAKRTKGQRDAERVGENDGYMEPYDAQQMITEIRRRGSKDPLVKALQLLDSPCEPADGGLKSETLAKRRSSKDLLGKPPQLYDTPYEPAEGGPRAEGKARPPDSRLPENDERPAAEYEQPWEWKKEQIVRALSVQFEGAERPSFREETVRQHHRQKSWTQKILKPALSDHSEGEKVDPGLPLEKQPWYHGAISRAEAESRLQPCKEAGYLVRNSESGNSRYSIALKTSQGCVHIIVAQTKDNKYTLNQTSAVFDSIPEVVHYYSNEKLPFKGAEHMTLLYPVHSKLH

SEQ ID NO: 8411 - protein, 1046 aa, Homo sapiens
MNNVYTRKHCPIFTYSVKELDSVSDYAEKENTIAKALEDLKANFYCELCDKQYYKHQEFDNHINSYDHAHKQRLKELKQREFARNVASKSRKDERKQEKALQRLHKLAELRKETVCAPGSGPMFKSTTVTVRENCNEISQRVVVDSVNNQQDFKYTLIHSEENTKDATTVAEDPESANNYTAKNNQVGDQAQGIHRHKIGFSFAFPKKASVKLESSAAAFSEYSDDASVGKGFSRKSRFVPSACHLQQSSPTDVLLSSEEKTNSFHPPEAMCRDKETVQTQEIKEVSSEKDALLLPSFCKFQLQLSSDADNCQNSVPLADQIPLESVVINEDIPVSGNSFELLGNKSTVLDMSNDCISVQATTEENVKHNEASTTEVENKNGPETLAPSNTEEVNITIHKKTNFCKRQCEPFVPVLNKHRSTVLQWPSEMLVYTTTKPSISYSCNPLCFDFKSTKVNNNLDKNKPDLKDLCSQQKQEDICMGPLSDYKDVSTEGLTDYEIGSSKNKCSQVTPLLADDILSSSCDSGKNENTGQRYKNISCKIRETEKYNFTKSQIKQDTLDEKYNKIRLKETHEYWFHKSRRKKKRKKLCQHHHMEKTKESETRCKMEAENSYTENAGKYLLEPISEKQYLAAEQLLDSHQLLDKRPKSESISLSDNEEMCKTWNTEYNTYDTISSKNHCKKNTILLNGQSNATMIHSGKHNLTYSRTYCCWKTKMSSCSQDHRSLVLQNDMKHMSQNQAVKRGYNSVMNESERFYRKRRQHSHSYSSDESLNRQNHLPEEFLRPPSTSVAPCKPKKKRRRKRGRFHPGFETLELKENTDYPVKDNSSLNPLDRLISEDKKEKMKPQEVAKIERNSEQTNQLRNKLSFHPNNLLPSETNGETEHLEMETTSGELSDVSNDPTTSVCVASAPTKEAIDNTLLEHKERSENINLNEKQIPFQVPNIERNFRQSQPKSYLCHYELAEALPQGKMNETPTEWLRYNSGILNTQPPLPFKEAHVSGHTFVTAEQILAPLALPEQALLIPLENHDKFKNVPYANHSSFRSSS

SEQ ID NO: 8412 - protein, 1209 aa, Homo sapiens
MECYYIVISSTHLSNGHFRNIKGVFRGPLSKNGNKTLDYAEKENTIAKALEDLKANFYCELCDKQYYKHQEFDNHINSYDHAHKQRLKELKQREFARNVASKSRKDERKQEKALQRLHKLAELRKETVCAPGSGPMFKSTTVTVRENCNEISQRVVVDSVNNQQDFKYTLIHSEENTKDATTVAEDPESANNYTAKNNQVGDQAQGIHRHKIGFSFAFPKKASVKLESSAAAFSEYSDDASVGKGFSRKSRFVPSACHLQQSSPTDVLLSSEEKTNSFHPPEAMCRDKETVQTQEIKEVSSEKDALLLPSFCKFQLQLSSDADNCQNSVPLADQIPLESVVINEDIPVSGNSFELLGNKSTVLDMSNDCISVQATTEENVKHNEASTTEVENKNGPETLAPSNTEEVNITIHKKTNFCKRQCEPFVPVLNKHRSTVLQWPSEMLVYTTTKPSISYSCNPLCFDFKSTKVNNNLDKNKPDLKDLCSQQKQEDICMGPLSDYKDVSTEGLTDYEIGSSKNKCSQVTPLLADDILSSSCDSGKNENTGQRYKNISCKIRETEKYNFTKSQIKQDTLDEKYNKIRLKETHEYWFHKSRRKKKRKKLCQHHHMEKTKESETRCKMEAENSYTENAGKYLLEPISEKQYLAAEQLLDSHQLLDKRPKSESISLSDNEEMCKTWNTEYNTYDTISSKNHCKKNTILLNGQSNATMIHSGKHNLTYSRTYCCWKTKMSSCSQDHRSLVLQNDMKHMSQNQAVKRGYNSVMNESERFYRKRRQHSHSYSSDESLNRQNHLPEEFLRPPSTSVAPCKPKKKRRRKRGRFHPGFETLELKENTDYPVKDNSSLNPLDRLISEDKKEKMKPQEVAKIERNSEQTNQLRNKLSFHPNNLLPSETNGETEHLEMETTSGELSDVSNDPTTSVCVASAPTKEAIDNTLLEHKERSENINLNEKQIPFQVPNIERNFRQSQPKSYLCHYELAEALPQGKMNETPTEWLRYNSGILNTQPPLPFKEAHVSGHTFVTAEQILAPLALPEQALLIPLENHDKFKNVPCEVYQHILQPNMLANKVKFTFPPAALPPPSTPLQPLPLQQSLCSTSVTTIHHTVLQQHAAAAAAAAAAAAAGTFKVLQPHQQFLSQIPALTRTSLPQLSVGPVGPRLCPGNQPTFVAPPQMPIIPASVLHPSHLAFPSLPHALFPSLLSPHPTVIPLQPLF

SEQ ID NO: 8413 - protein, 479 aa, Homo sapiens
MDETSPLVSPERAQPPDYTFPSGSGAHFPQVPGGAVRVAAAAGSGPSPPGSPGHDRERQPLLDRARGAAAQGQTQTVAAQAQALAAQAAAAAHAAQAHRERNEFPEDPEFEAVVRQAELAIERCIFPERIYQGSSGSYFVKDPQGRIIAVFKPKNEEPYGHLNPKWTKWLQKLCCPCCFGRDCLVLNQGYLSEAGASLVDQKLELNIVPRTKVVYLASETFNYSAIDRVKSRGKRLALEKVPKVGQRFNRIGLPPKVGSFQLFVEGYKDADYWLRRFEAEPLPENTNRQLLLQFERLVVLDYIIRNTDRGNDNWLIKYDCPMDSSSSRDTDWVVVKEPVIKVAAIDNGLAFPLKHPDSWRAYPFYWAWLPQAKVPFSQEIKDLILPKISDPNFVKDLEEDLYELFKKDPGFDRGQFHKQIAVMRGQILNLTQALKDNKSPLHLVQMPPVIVETARSHQRSSSESYTQSFQSRKPFFSWW

SEQ ID NO: 8414 - protein, 408 aa, Homo sapiens
MTSKGPEEEHPSVTLFRQYLRIRTVQPKPDYGAAVAFFEETARQLGLGCQKVEVAPGYVVTVLTWPGTNPTLSSILLNSHTDVVPVFKEHWSHDPFEAFKDSEGYIYARGAQDMKCVSIQYLEAVRRLKVEGHRFPRTIHMTFVPDEEVGGHQGMELFVQRPEFHALRAGFALDEGIANPTDAFTVFYSERSPWWVRVTSTGRPGHASRFMEDTAAEKLHKVVNSILAFREKEWQRLQSNPHLKEGSVTSVNLTKLEGGVAYNVIPATMSASFDFRVAPDVDFKAFEEQLQSWCQAAGEGVTLEFAQKWMHPQVTPTDDSNPWWAAFSRVCKDMNLTLEPEIMPAATDNRYIRAVGVPALGFSPMNRTPVLLHDHDERLHEAVFLRGVDIYTRLLPALASVPALPSDS

SEQ ID NO: 8415 - protein, 2586 aa, Homo sapiens
PSPRPHHDRRGFPRLAETLQHPMCPLPLVASAGHHRHHRLLLLLAPQAPEREASDEIVFSGRSRSRDAVLRSHHFRSEGFRASPRHLRRRVAAAAAARLEEVKPVVEVHHQSEQETSVRKRRIKKSSRVQPEFYHSVQGASIRRPSSGNASYRCSMSSSADFSDEDDFSQKSGSASPAPGDTLPWNLPKHERSKRKIQGGSVLDPAERAVLRIADERDKVQKKTFTKWINQHLMKVRKHVNDLYEDLRDGHNLISLLEVLSGDTLPREKGRMRFHRLQNVQIALDYLKRRQVKLVNIRNDDITDGNPKLTLGLIWTIILHFQISDIHVTGESEDMSAKERLLLWTQQATEGYAGIRCENFTTCWRDGKLFNAIIHKYRPDLIDMNTVAVQSNLANLEHAFYVAEKIGVIRLLDPEDVDVSSPDEKSVITYVSSLYDAFPKVPEGGEGIGANDVEVKWIEYQNMVNYLIQWIRHHVTTMSERTFPNNPVELKALYNQYLQFKETEIPPKETEKSKIKRLYKLLEIWIEFGRIKLLQGYHPNDIEKEWGKLIIAMLEREKALRPEVERLEMLQQIANRVQRDSVICEDKLILAGNALQSDSKRLESGVQFQNEAEIAGYILECENLLRQHVIDVQILIDGKYYQADQLVQRVAKLRDEIMALRNECSSVYSKGRILTTEQTKLMISGITQSLNSGFAQTLHPSLTSGLTQSLTPSLTSSSMTSGLSSGMTSRLTPSVTPAYTPGFPSGLVPNFSSGVEPNSLQTLKLMQIRKPLLKSSLLDQNLTEEEINMKFVQDLLNWVDEMQVQLDRTEWGSDLPSVESHLENHKNVHRAIEEFESSLKEAKISEIQMTAPLKLTYAEKLHRLESQYAKLLFSLLKNTSRNQERHLDTLHNFVSRATNELIWLNEKEEEEVAYDWSERNTNIARKKDYHAELMRELDQKEENIKSVQEIAEQLLLENHPARLTIEVKLESVMVLVEYAYRAAMQTQWSWILQLCQCVEQHIKENTAYFEFFNDAKEATDYLRNLKDAIQRKYSCDRSSSIHKLEDLVQESMEEKEELLQYKSTIANLMGKAKTIIQLKPRNSDCPLKTSIPIKAICDYRQIEITIYKDDECVLANNSHRAKWKVISPTGNEAMVPSVCFTVPPPNKEAVDLANRIEQQYQNVLTLWHESHINMKSVVSWHYLINEIDRIRASNVASVSMNLIKTMLPGEHQQVLSNLQSRFEDFLEDSQESQVFSGSDITQLEKEVNVCKQYYQELLKSAEREEQEESVYNLYISEVRNIRLRLENCEDRLIRQIRTPLERDDLHESVFRITEQEKLKKELERLKDDLGTITNKCEEFFSQAAASSSVPTLRSELNVVLQNMNQVYSMSSTYIDKYVTAISIYKGYCLISFLRLKTVNLVLKNTQAAEALVKLYETKLCEEEAVIADKNNIENLISTLKQWRSEVDEKRQVFHALEDELQKAKAISDEMFKTYKERDLDFDWHKEKADQLVERWQNVHVQIDNRLRDLEGIGKSLKYYRDTYHPLDDWIQQVETTQRKIQENQPENSKTLATQLNQQKMLVSEIEMKQSKMDECQKYAEQYSATVKDYELQTMTYRAMVDSQQKSPVKRRRMQSSADLIIQEFMDLRTRYTALVTLMTQYIKFAGDSLKRLEEEEVIINSEHPVNIKELEIKRCKETSEHGAYSDLLQRQKATVLENSKLTGKISELERMVAELKKQKSRVEEELPKVREAAENELRKQQRNVEDISLQKIRAESEAKQYRRELETIVREKEAAERELERVRQLTIEAEAKRAAVEENLLNFRNQLEENTFTRRTLEDHLKRKDLSLNDLEQQKNKLMEELRRKRDNEEELLKLIKQMEKDLAFQKQVAEKQLKEKQKIELEARRKITEIQYTCRENALPVCPITQATSCRAVTGLQQEHDKQKAEELKQQVDELTAANRKAEQDMRELTYELNALQLEKTSSEEKARLLKDKLDETNNTLRCLKLELERKDQAEKGYSQQLRELGRQLNQTTGKAEEAMQEASDLKKIKRNYQLELESLNHEKGKLQREVDRITRAHAVAEKNIQHLNSQIHSFRDEKELERLQICQRKSDHLKEQFEKSHEQLLQNIKAEKENNDKIQRLNEELEKSNECAEMLKQKVEELTRQNNETKLMMQRIQAESENIVLEKQTIQQRCEALKIQADGFKDQLRSTNEHLHKQTKTEQDFQRKIKCLEEDLAKSQNLVSEFKQKCDQQNIIIQNTKKEVRNLNAELNASKEEKRRGEQKVQLQQAQVQELNNRLKKVQDELHLKTIEEQMTHRKMVLFQEESGKFKQSAEEFRKKMEKLMESKVITENDISGIRLDFVSLQQENSRAQENAKLCETNIKELERQLQQYREQMQQGQHMEANHYQKCQKLEDELIAQKREVENLKQKMDQQIKEHEHQLVLLQCEIQKKSTAKDCTFKPDFEMTVKECQHSGELSSRNTGHLHPTPRSPLLRWTQEPQPLEEKWQHRVVEQIPKEVQFQPPGAPLEKEKSQQCYSEYFSQTSTELQITFDETNPITRLSEIEKIRDQALNNSRPPVRYQDNACEMELVKVLTPLEVYSVF

SEQ ID NO: 8416 - protein, 2649 aa, Homo sapiens
MHSSSYSYRSSDSVFSNTTSTRTSLDSNENLLLVHCGPTLINSCISFGSESFDGHRLEMLQQIANRVQRDSVICEDKLILAGNALQSDSKRLESGVQFQNEAEIAGYILECENLLRQHVIDVQILIDGKYYQADQLVQRVAKLRDEIMALRNECSSVYSKGRILTTEQTKLMISGITQSLNSGFAQTLHPSLTSGLTQSLTPSLTSSSMTSGLSSGMTSRLTPSVTPAYTPGFPSGLVPNFSSGVEPNSLQTLKLMQIRKPLLKSSLLDQNLTEEEINMKFVQDLLNWVDEMQVQLDRTEWGSDLPSVESHLENHKNVHRAIEEFESSLKEAKISEIQMTAPLKLTYAEKLHRLESQYAKLLNTSRNQERHLDTLHNFVSRATNELIWLNEKEEEEVAYDWSERNTNIARKKDYHAELMRELDQKEENIKSVQEIAEQLLLENHPARLTIEAYRAAMQTQWSWILQLCQCVEQHIKENTAYFEFFNDAKEATDYLRNLKDAIQRKYSCDRSSSIHKLEDLVQESMEEKEELLQYKSTIANLMGKAKTIIQLKPRNSDCPLKTSIPIKAICDYRQIEITIYKDDECVLANNSHRAKWKVISPTGNEAMVPSVCFTVPPPNKEAVDLANRIEQQYQNVLTLWHESHINMKSVVSWHYLINEIDRIRASNVASIKTMLPGEHQQVLSNLQSRFEDFLEDSQESQVFSGSDITQLEKEVNVCKQYYQELLKSAEREEQEESVYNLYISEVRNIRLRLENCEDRLIRQIRTPLERDDLHESVFRITEQEKLKKELERLKDDLGTITNKCEEFFSQAAASSSVPTLRSELNVVLQNMNQVYSMSSTYIDKLKTVNLVLKNTQAAEALVKLYETKLCEEEAVIADKNNIENLISTLKQWRSEVDEKRQVFHALEDELQKAKAISDEMFKTYKERDLDFDWHKEKADQLVERWQNVHVQIDNRLRDLEGIGKSLKYYRDTYHPLDDWIQQVETTQRKIQENQPENSKTLATQLNQQKMLVSEIEMKQSKMDECQKYAEQYSATVKDYELQTMTYRAMVDSQQKSPVKRRRMQSSADLIIQEFMDLRTRYTALVTLMTQYIKFAGDSLKRLEEEEIKRCKETSEHGAYSDLLQRQKATVLENSKLTGKISELERMVAELKKQKSRVEEELPKVREAAENELRKQQRNVEDISLQKIRAESEAKQYRRELETIVREKEAAERELERVRQLTIEAEAKRAAVEENLLNFRNQLEENTFTRRTLEDHLKRKDLSLNDLEQQKNKLMEELRRKRDNEEELLKLIKQMEKDLAFQKQVAEKQLKEKQKIELEARRKITEIQYTCRENALPVCPITQATSCRAVTGLQQEHDKQKAEELKQQVDELTAANRKAEQDMRELTYELNALQLEKTSSEEKARLLKDKLDETNNTLRCLKLELERKDQAEKGYSQQLRELGRQLNQTTGKAEEAMQEASDLKKIKRNYQLELESLNHEKGKLQREVDRITRAHAVAEKNIQHLNSQIHSFRDEKELERLQICQRKSDHLKEQFEKSHEQLLQNIKAEKENNDKIQRLNEELEKSNECAEMLKQKVEELTRQNNETKLMMQRIQAESENIVLEKQTIQQRCEALKIQADGFKDQLRSTNEHLHKQTKTEQDFQRKIKCLEEDLAKSQNLVSEFKQKCDQQNIIIQNTKKEVRNLNAELNASKEEKRRGEQKVQLQQAQVQELNNRLKKVQDELHLKTIEEQMTHRKMVLFQEESGKFKQSAEEFRKKMEKLMESKVITENDISGIRLDFVSLQQENSRAQENAKLCETNIKELERQLQQYREQMQQGQHMEANHYQKCQKLEDELIAQKREVENLKQKMDQQIKEHEHQLVLLQCEIQKKSTAKDCTFKPDFEMTVKECQHSGELSSRNTGHLHPTPRSPLLRWTQEPQPLEEKWQHRVVEQIPKEVQFQPPGAPLEKEKSQQCYSEYFSQTSTELQITFDETNPITRLSEIEKIRDQALNNSRPPVRYQDNACEMELVKVLTPLEIAKNKQYDMHTEVTTLKQEKNPVPSAEEWMLEGCRASGGLKKGDFLKKGLEPETFQNFDGDHACSVRDDEFKFQGLRHTVTARQLVEAKLLDMRTIEQLRLGLKTVEEVQKTLNKFLTKATSIAGLYLESTKEKISFASAAERIIIDKMVALAFLEAQAATGFIIDPISGQTYSVEDAVLKGVVDPEFRIRLLEAEKAAVGYSYSSKTLSVFQAMENRMLDRQKGKHILEAQIASGGVIDPVRGIRVPPEIALQQGLLNNAILQFLHEPSSNTRVFPNPNNKQALYYSELLRMCVFDVESQCFLFPFGERNISNLNVKKTHRISVVDTKTGSELTVYEAFQRNLIEKSIYLELSGQQYQWKEAMFFESYGHSSHMLTDTKTGLHFNINEAIEQGTIDKALVKKYQEGLITLTELADSLLSRLVPKKDLHSPVAGYWLTASGERISVLKASRRNLVDRITALRCLEAQVSTGGIIDPLTGKKYRVAEALHRGLVDEGFAQQLRQCELVITGIGHPITNKMMSVVEAVNANIINKEMGIRCLEFQYLTGGLIEPQVHSRLSIEEALQVGIIDVLIATKLKDQKSYVRNIICPQTKRKLTYKEALEKADFDFHTGLKLLEVSEPLMTGISSLYYSS

SEQ ID NO: 8417 - protein, 3030 aa, Homo sapiens
MAGYLSPAAYLYVEEQEYLQAYEDVLERYKDERDKVQKKTFTKWINQHLMKVRKHVNDLYEDLRDGHNLISLLEVLSGDTLPREKGRMRFHRLQNVQIALDYLKRRQVKLVNIRNDDITDGNPKLTLGLIWTIILHFQISDIHVTGESEDMSAKERLLLWTQQATEGYAGIRCENFTTCWRDGKLFNAIIHKYRPDLIDMNTVAVQSNLANLEHAFYVAEKIGVIRLLDPEDVDVSSPDEKSVITYVSSLYDAFPKVPEGGEGIGANDVEVKWIEYQNMVNYLIQWIRHHVTTMSERTFPNNPVELKALYNQYLQFKETEIPPKETEKSKIKRLYKLLEIWIEFGRIKLLQGYHPNDIEKEWGKLIIAMLEREKALRPEVERLEMLQQIANRVQRDSVICEDKLILAGNALQSDSKRLESGVQFQNEAEIAGYILECENLLRQHVIDVQILIDGKYYQADQLVQRVAKLRDEIMALRNECSSVYSKGRILTTEQTKLMISGITQSLNSGFAQTLHPSLTSGLTQSLTPSLTSSSMTSGLSSGMTSRLTPSVTPAYTPGFPSGLVPNFSSGVEPNSLQTLKLMQIRKPLLKSSLLDQNLTEEEINMKFVQDLLNWVDEMQVQLDRTEWGSDLPSVESHLENHKNVHRAIEEFESSLKEAKISEIQMTAPLKLTYAEKLHRLESQYAKLLFSLLKNTSRNQERHLDTLHNFVSRATNELIWLNEKEEEEVAYDWSERNTNIARKKDYHAELMRELDQKEENIKSVQEIAEQLLLENHPARLTIEVKLESVMVLVEYAYRAAMQTQWSWILQLCQCVEQHIKENTAYFEFFNDAKEATDYLRNLKDAIQRKYSCDRSSSIHKLEDLVQESMEEKEELLQYKSTIANLMGKAKTIIQLKPRNSDCPLKTSIPIKAICDYRQIEITIYKDDECVLANNSHRAKWKVISPTGNEAMVPSVCFTVPPPNKEAVDLANRIEQQYQNVLTLWHESHINMKSVVSWHYLINEIDRIRASNVASVSMNLIKTMLPGEHQQVLSNLQSRFEDFLEDSQESQVFSGSDITQLEKEVNVCKQYYQELLKSAEREEQEESVYNLYISEVRNIRLRLENCEDRLIRQIRTPLERDDLHESVFRITEQEKLKKELERLKDDLGTITNKCEEFFSQAAASSSVPTLRSELNVVLQNMNQVYSMSSTYIDKYVTAISIYKGYCLISFLRLKTVNLVLKNTQAAEALVKLYETKLCEEEAVIADKNNIENLISTLKQWRSEVDEKRQVFHALEDELQKAKAISDEMFKTYKERDLDFDWHKEKADQLVERWQNVHVQIDNRLRDLEGIGKSLKYYRDTYHPLDDWIQQVETTQRKIQENQPENSKTLATQLNQQKMLVSEIEMKQSKMDECQKYAEQYSATVKDYELQTMTYRAMVDSQQKSPVKRRRMQSSADLIIQEFMDLRTRYTALVTLMTQYIKFAGDSLKRLEEEEVIINSEHPVNIKELEIKRCKETSEHGAYSDLLQRQKATVLENSKLTGKISELERMVAELKKQKSRVEEELPKVREAAENELRKQQRNVEDISLQKIRAESEAKQYRRELETIVREKEAAERELERVRQLTIEAEAKRAAVEENLLNFRNQLEENTFTRRTLEDHLKRKDLSLNDLEQQKNKLMEELRRKRDNEEELLKLIKQMEKDLAFQKQVAEKQLKEKQKIELEARRKITEIQYTCRENALPVCPITQATSCRAVTGLQQEHDKQKAEELKQQVDELTAANRKAEQDMRELTYELNALQLEKTSSEEKARLLKDKLDETNNTLRCLKLELERKDQAEKGYSQQLRELGRQLNQTTGKAEEAMQEASDLKKIKRNYQLELESLNHEKGKLQREVDRITRAHAVAEKNIQHLNSQIHSFRDEKELERLQICQRKSDHLKEQFEKSHEQLLQNIKAEKENNDKIQRLNEELEKSNECAEMLKQKVEELTRQNNETKLMMQRIQAESENIVLEKQTIQQRCEALKIQADGFKDQLRSTNEHLHKQTKTEQDFQRKIKCLEEDLAKSQNLVSEFKQKCDQQNIIIQNTKKEVRNLNAELNASKEEKRRGEQKVQLQQAQVQELNNRLKKVQDELHLKTIEEQMTHRKMVLFQEESGKFKQSAEEFRKKMEKLMESKVITENDISGIRLDFVSLQQENSRAQENAKLCETNIKELERQLQQYREQMQQGQHMEANHYQKCQKLEDELIAQKREVENLKQKMDQQIKEHEHQLVLLQCEIQKKSTAKDCTFKPDFEMTVKECQHSGELSSRNTGHLHPTPRSPLLRWTQEPQPLEEKWQHRVVEQIPKEVQFQPPGAPLEKEKSQQCYSEYFSQTSTELQITFDETNPITRLSEIEKIRDQALNNSRPPVRYQDNACEMELVKVLTPLEIAKNKQYDMHTEVTTLKQEKNPVPSAEEWMLEGCRASGGLKKGDFLKKGLEPETFQNFDGDHACSVRDDEFKFQGLRHTVTARQLVEAKLLDMRTIEQLRLGLKTVEEVQKTLNKFLTKATSIAGLYLESTKEKISFASAAERIIIDKMVALAFLEAQAATGFIIDPISGQTYSVEDAVLKGVVDPEFRIRLLEAEKAAVGYSYSSKTLSVFQAMENRMLDRQKGKHILEAQIASGGVIDPVRGIRVPPEIALQQGLLNNAILQFLHEPSSNTRVFPNPNNKQALYYSELLRMCVFDVESQCFLFPFGERNISNLNVKKTHRISVVDTKTGSELTVYEAFQRNLIEKSIYLELSGQQYQWKEAMFFESYGHSSHMLTDTKTGLHFNINEAIEQGTIDKALVKKYQEGLITLTELADSLLSRLVPKKDLHSPVAGYWLTASGERISVLKASRRNLVDRITALRCLEAQVSTGGIIDPLTGKKYRVAEALHRGLVDEGFAQQLRQCELVITGIGHPITNKMMSVVEAVNANIINKEMGIRCLEFQYLTGGLIEPQVHSRLSIEEALQVGIIDVLIATKLKDQKSYVRNIICPQTKRKLTYKEALEKADFDFHTGLKLLEVSEPLMTGISSLYYSS

SEQ ID NO: 8418 - protein, 3222 aa, Homo sapiens
PSPRPHHDRRGFPRLAETLQHPMCPLPLVASAGHHRHHRLLLLLAPQAPEREASDEIFSGRSRSRDAVLRSHHFRSEGFRASPRHLRRRVAAAAAARLEEVKPVVEVHHQSEQETSVRKRRIKKSSRVQPEFYHSVQGASIRRPSSGNASYRCSMSSSADFSDEDDFSQKSGSASPAPGDTLPWNLPKHERSKRKIQGGSVLDPAERAVLRIADERDKVQKKTFTKWINQHLMKVRKHVNDLYEDLRDGHNLISLLEVLSGDTLPREKGRMRFHRLQNVQIALDYLKRRQVKLVNIRNDDITDGNPKLTLGLIWTIILHFQISDIHVTGESEDMSAKERLLLWTQQATEGYAGIRCENFTTCWRDGKLFNAIIHKYRPDLIDMNTVAVQSNLANLEHAFYVAEKIGVIRLLDPEDVDVSSPDEKSVITYVSSLYDAFPKVPEGGEGIGANDVEVKWIEYQNMVNYLIQWIRHHVTTMSERTFPNNPVELKALYNQYLQFKETEIPPKETEKSKIKRLYKLLEIWIEFGRIKLLQGYHPNDIEKEWGKLIIAMLEREKALRPEVERLEMLQQIANRVQRDSVICEDKLILAGNALQSDSKRLESGVQFQNEAEIAGYILECENLLRQHVIDVQILIDGKYYQADQLVQRVAKLRDEIMALRNECSSVYSKGRILTTEQTKLMISGITQSLNSGFAQTLHPSLTSGLTQSLTPSLTSSSMTSGLSSGMTSRLTPSVTPAYTPGFPSGLVPNFSSGVEPNSLQTLKLMQIRKPLLKSSLLDQNLTEEEINMKFVQDLLNWVDEMQVQLDRTEWGSDLPSVESHLENHKNVHRAIEEFESSLKEAKISEIQMTAPLKLTYAEKLHRLESQYAKLLFSLLKNTSRNQERHLDTLHNFVSRATNELIWLNEKEEEEVAYDWSERNTNIARKKDYHAELMRELDQKEENIKSVQEIAEQLLLENHPARLTIEVKLESVMVLVEYAYRAAMQTQWSWILQLCQCVEQHIKENTAYFEFFNDAKEATDYLRNLKDAIQRKYSCDRSSSIHKLEDLVQESMEEKEELLQYKSTIANLMGKAKTIIQLKPRNSDCPLKTSIPIKAICDYRQIEITIYKDDECVLANNSHRAKWKVISPTGNEAMVPSVCFTVPPPNKEAVDLANRIEQQYQNVLTLWHESHINMKSVVSWHYLINEIDRIRASNVASVSMNLYIKTMLPGEHQQVLSNLQSRFEDFLEDSQESQVFSGSDITQLEKEVNVCKQYYQELLKSAEREEQEESVYNLYISEVRNIRLRLENCEDRLIRQIRTPLERDDLHESVFRITEQEKLKKELERLKDDLGTITNKCEEFFSQAAASSSVPTLRSELNVVLQNMNQVYSMSSTYIDKYVTAISIYKCGYCLISFLRLKTVNLVLKNTQAAEALVKLYETKLCEEEAVIADKNNIENLISTLKQWRSEVDEKRQVFHALEDELQKAKAISDEMFKTYKERDLDFDWHKEKADQLVERWQNVHVQIDNRLRDLEGIGKSLKYYRDTYHPLDDWIQQVETTQRKIQENQPENSKTLATQLNQQKMLVSEIEMKQSKMDECQKYAEQYSATVKDYELQTMTYRAMVDSQQKSPVKRRRMQSSADLIIQEFMDLRTRYTALVTLMTQYIKFAGDSLKRLEEEEVIINSEHPVNIKELEMSSNYSVIKRCKETSEHGAYSDLLQRQKATVLENSKLTGKISELERMVAELKKQKSRVEEELPKVREAAENELRKQQRNVEDISLQKIRAESEAKQYRRELETIVREKEAAERELERVRQLTIEAEAKRAAVEENLLNFRNQLEENTFTRRTLEDHLKRKDLSLNDLEQQKNKLMEELRRKRDNEEELLKLIKQMEKDLAFQKQVAEKQLKEKQKIELEARRKITEIQYTCRENALPVCPITQATSCRAVTGLQQEHDKQKAEELKQQVDELTAANRKAEQDMRELTYELNALQLEKTSSEEKARLLKDKLDETNNTLRCLKLELERKDQAEKGYSQQLRELGRQLNQTTGKAEEAMQEASDLKKIKRNYQLELESLNHEKGKLQREVDRITRAHAVAEKNIQHLNSQIHSFRDEKELERLQICQRKSDHLKEQFEKSHEQLLQNIKAEKENNDKIQRLNEELEKSNECAEMLKQKVEELTRQNNETKLMMQRIQAESENIVLEKQTIQQRCEALKIQADGFKDQLRSTNEHLHKQTKTEQDFQRKIKCLEEDLAKSQNLVSEFKQKCDQQNIIIQNTKKEVRNLNAELNASKEEKRRGEQKVQLQQAQVQELNNRLKKVQDELHLKTIEEQMTHRKMVLFQEESGKFKQSAEEFRKKMEKLMESKVITENDISGIRLDFVSLQQENSRAQENAKLCETNIKELERQLQQYREQMQQGQHMEANHYQKCQKLEDELIAQKREVENLKQKMDQQIKEHEHQLVLLQCEIQKKSTAKDCTFKPDFEMTVKECQHSGELSSRNTGHLHPTPRSPLLRWTQEPQPLEEKWQHRVVEQIPKEVQFQPPGAPLEKEKSQQCYSEYFSQTSTELQITFDETNPITRLSEIEKIRDQALNNSRPPVRYQDNACEMELVKVLTPLEIAKNKQYDMHTEVTTLKQEKNPVPSAEEWMLEGCRASGGLKKGDFLKKGLEPETFQNFDGDHACSVRDDEFKFQGLRHTVTARQLVEAKLLDMRTIEQLRLGLKTVEEVQKTLNKFLTKATSIAGLYLESTKEKISFASAAERIIIDKMVALAFLEAQAATGFIIDPISGQTYSVEDAVLKGVVDPEFRIRLLEAEKAAVGYSYSSKTLSVFQAMENRMLDRQKGKHILEAQIASGGVIDPVRGIRVPPEIALQQGLLNNAILQFLHEPSSNTRVFPNPNNKQALYYSELLRMCVFDVESQCFLFPFGERNISNLNVKKTHRISVVDTKTGSELTVYEAFQRNLIEKSIYLELSGQQYQWKEAMFFESYGHSSHMLTDTKTGLHFNINEAIEQGTIDKALVKKYQEGLITLTELADSLLSRLVPKKDLHSPVAGYWLTASGERISVLKASRRNLVDRITALRCLEAQVSTGGIIDPLTGKKYRVAEALHRGLVDEGFAQQLRQCELVITGIGHPITNKMMSVVEAVNANIINKEMGIRCLEFQYLTGGLIEPQVHSRLSIEEALQVGIIDVLIATKLKDQKSYVRNIICPQTKRKLTYKEALEKADFDFHTGLKLLEVSEPLMTGISSLYYSS

SEQ ID NO: 8419 - protein, 2950 aa, Homo sapiens
PSPRPHHDRRGFPRLAETLQHPMCPLPLVASAGHHRHHRLLLLLAPQAPEREASDEIVFSGRSRSRDAVLRSHHFRSEGFRASPRHLRRRVAAAAAARLEEVKPVVEVHHQSEQETSVRKRRIKKSSRVQPEFYHSVQGASIRRPSSGNASYRCSMSSSADFSDEDDFSQKSGSASPAPGDTLPWNLPKHERSKRKIQGGSVLDPAERAVLRIADERDKVQKKTFTKWINQHLMKVRKHVNDLYEDLRDGHNLISLLEVLSGDTLPREKGRMRFHRLQNVQIALDYLKRRQVKLVNIRNDDITDGNPKLTLGLIWTIILHFQISDIHVTGESEDMSAKERLLLWTQQATEGYAGIRCENFTTCWRDGKLFNAIIHKYRPDLIDMNTVAVQSNLANLEHAFYVAEKIGVIRLLDPEDVDVSSPDEKSVITYVSSLYDAFPKVPEGGEGIGANDVEVKWIEYQNMVNYLIQWIRHHVTTMSERTFPNNPVELKALYNQYLQFKETEIPPKETEKSKIKRLYKLLEIWIEFGRIKLLQGYHPNDIEKEWGKLIIAMLEREKALRPEVERLEMLQQIANRVQRDSVICEDKLILAGNALQSDSKRLESGVQFQNEAEIAGYILECENLLRQHVIDVQILIDGKYYQADQLVQRVAKLRDEIMALRNECSSVYSKGRILTTEQTKLMISGITQSLNSGFAQTLHPSLTSGLTQSLTPSLTSSSMTSGLSSGMTSRLTPSVTPAYTPGFPSGLVPNFSSGVEPNSLQTLKLMQIRKPLLKSSLLDQNLTEEEINMKFVQDLLNWVDEMQVQLDRTEWGSDLPSVESHLENHKNVHRAIEEFESSLKEAKISEIQMTAPLKLTYAEKLHRLESQYAKLLFSLLKNTSRNQERHLDTLHNFVSRATNELIWLNEKEEEEVAYDWSERNTNIARKKDYHAELMRELDQKEENIKSVQEIAEQLLLENHPARLTIEVKLESVMVLVEYAYRAAMQTQWSWILQLCQCVEQHIKENTAYFEFFNDAKEATDYLRNLKDAIQRKYSCDRSSSIHKLEDLVQESMEEKEELLQYKSTIANLMGKAKTIIQLKPRNSDCPLKTSIPIKAICDYRQIEITIYKDDECVLANNSHRAKWKVISPTGNEAMVPSVCFTVPPPNKEAVDLANRIEQQYQNVLTLWHESHINMKSVVSWHYLINEIDRIRASNVASVSMNLIKTMLPGEHQQVLSNLQSRFEDFLEDSQESQVFSGSDITQLEKEVNVCKQYYQELLKSAEREEQEESVYNLYISEVRNIRLRLENCEDRLIRQIRTPLERDDLHESVFRITEQEKLKKELERLKDDLGTITNKCEEFFSQAAASSSVPTLRSELNVVLQNMNQVYSMSSTYIDKYVTAISIYKGYCLISFLRLKTVNLVLKNTQAAEALVKLYETKLCEEEAVIADKNNIENLISTLKQWRSEVDEKRQVFHALEDELQKAKAISDEMFKTYKERDLDFDWHKEKADQLVERWQNVHVQIDNRLRDLEGIGKSLKYYRDTYHPLDDWIQQVETTQRKIQENQPENSKTLATQLNQQKMLVSEIEMKQSKMDECQKYAEQYSATVKDYELQTMTYRAMVDSQQKSPVKRRRMQSSADLIIQEFMDLRTRYTALVTLMTQYIKFAGDSLKRLEEEEVIINSEHPVNIKELEIKRCKETSEHGAYSDLLQRQKATVLENSKLTGKISELERMVAELKKQKSRVEEELPKVREAAENELRKQQRNVEDISLQKIRAESEAKQYRRELETIVREKEAAERELERVRQLTIEAEAKRAAVEENLLNFRNQLEENTFTRRTLEDHLKRKDLSLNDLEQQKNKLMEELRRKRDNEEELLKLIKQMEKDLAFQKQVAEKQLKEKQKIELEARRKITEIQYTCRENALPVCPITQATSCRAVTGLQQEHDKQKAEELKQQVDELTAANRKAEQDMRELTYELNALQLEKTSSEEKARLLKDKLDETNNTLRCLKLELERKDQAEKGYSQQLRELGRQLNQTTGKAEEAMQEASDLKKIKRNYQLELESLNHEKGKLQREVDRITRAHAVAEKNIQHLNSQIHSFRDEKELERLQICQRKSDHLKEQFEKSHEQLLQNIKAEKENNDKIQRLNEELEKSNECAEMLKQKVEELTRQNNETKLMMQRIQAESENIVLEKQTIQQRCEALKIQADGFKDQLRSTNEHLHKQTKTEQDFQRKIKCLEEDLAKSQNLVSEFKQKCDQQNIIIQNTKKEVRNLNAELNASKEEKRRGEQKVQLQQAQVQELNNRLKKVQDELHLKTIEEQMTHRKMVLFQEESGKFKQSAEEFRKKMEKLMESKVITENDISGIRLDFVSLQQENSRAQENAKLCETNIKELERQLQQYREQMQQGQHMEANHYQKCQKLEDELIAQKREVENLKQKMDQQIKEHEHQLVLLQCEIQKKSTAKDCTFKPDFEMTVKECQHSGELSSRNTGHLHPTPRSPLLRWTQEPQPLEEKWQHRVVEQIPKEVQFQPPGAPLEKEKSQQCYSEYFSQTSTELQITFDETNPITRLSEIEKIRDQALNNSRPPVRYQDNACEMELVKVLTPLEIAKNKQYDMHTEVTTLKQEKNPVPSAEEWMLEGCRASGGLKKGDFLKKGLEPETFQNFDGDHACSVRDDEFKFQGLRHTVTARQLVEAKLLDMRTIEQLRLGLKTVEEVQKTLNKFLTKATSIAGLYLESTKEKISFASAAERIIIDKMVALAFLEAQAATGFIIDPISGQTYSVEDAVLKGVVDPEFRIRLLEAEKAAVGYSYSSKTLSVFQAMENRMLDRQKGKHILEAQIASGGVIDPVRGIRVPPEIALQQGLLNNAILQFLHEPSSNTRVFPNPNNKQALYYSELLRMCVFDVESQCFLFPFGERNISNLNVKKTHRISVVDTKTGSELTVYEAFQRNLIEKSIYLELSGPFWDTGFSLFRSKK

SEQ ID NO: 8420 - protein, 2704 aa, Homo sapiens
MHSSSYSYRSSDSVFSNTTSTRTSLDSNENLLLVHCGPTLINSCISFGSESFDGHRLEMLQQIANRVQRDSVICEDKLILAGNALQSDSKRLESGVQFQNEAEIAGYILECENLLRQHVIDVQILIDGKYYQADQLVQRVAKLRDEIMALRNECSSVYSKGRILTTEQTKLMISGITQSLNSGFAQTLHPSLTSGLTQSLTPSLTSSSMTSGLSSGMTSRLTPSVTPAYTPGFPSGLVPNFSSGVEPNSLQTLKLMQIRKPLLKSSLLDQNLTEEEINMKFVQDLLNWVDEMQVQLDRTEWGSDLPSVESHLENHKNVHRAIEEFESSLKEAKISEIQMTAPLKLTYAEKLHRLESQYAKLLFSLLKNTSRNQERHLDTLHNFVSRATNELIWLNEKEEEEVAYDWSERNTNIARKKDYHAELMRELDQKEENIKSVQEIAEQLLLENHPARLTIEVKLESVMVLVEYAYRAAMQTQWSWILQLCQCVEQHIKENTAYFEFFNDAKEATDYLRNLKDAIQRKYSCDRSSSIHKLEDLVQESMEEKEELLQYKSTIANLMGKAKTIIQLKPRNSDCPLKTSIPIKAICDYRQIEITIYKDDECVLANNSHRAKWKVISPTGNEAMVPSVCFTVPPPNKEAVDLANRIEQQYQNVLTLWHESHINMKSVVSWHYLINEIDRIRASNVASVSMNLIKTMLPGEHQQVLSNLQSRFEDFLEDSQESQVFSGSDITQLEKEVNVCKQYYQELLKSAEREEQEESVYNLYISEVRNIRLRLENCEDRLIRQIRTPLERDDLHESVFRITEQEKLKKELERLKDDLGTITNKCEEFFSQAAASSSVPTLRSELNVVLQNMNQVYSMSSTYIDKYVTAISIYKGYCLISFLRLKTVNLVLKNTQAAEALVKLYETKLCEEEAVIADKNNIENLISTLKQWRSEVDEKRQVFHALEDELQKAKAISDEMFKTYKERDLDFDWHKEKADQLVERWQNVHVQIDNRLRDLEGIGKSLKYYRDTYHPLDDWIQQVETTQRKIQENQPENSKTLATQLNQQKMLVSEIEMKQSKMDECQKYAEQYSATVKDYELQTMTYRAMVDSQQKSPVKRRRMQSSADLIIQEFMDLRTRYTALVTLMTQYIKFAGDSLKRLEEEEVIINSEHPVNIKELEIKRCKETSEHGAYSDLLQRQKATVLENSKLTGKISELERMVAELKKQKSRVEEELPKVREAAENELRKQQRNVEDISLQKIRAESEAKQYRRELETIVREKEAAERELERVRQLTIEAEAKRAAVEENLLNFRNQLEENTFTRRTLEDHLKRKDLSLNDLEQQKNKLMEELRRKRDNEEELLKLIKQMEKDLAFQKQVAEKQLKEKQKIELEARRKITEIQYTCRENALPVCPITQATSCRAVTGLQQEHDKQKAEELKQQVDELTAANRKAEQDMRELTYELNALQLEKTSSEEKARLLKDKLDETNNTLRCLKLELERKDQAEKGYSQQLRELGRQLNQTTGKAEEAMQEASDLKKIKRNYQLELESLNHEKGKLQREVDRITRAHAVAEKNIQHLNSQIHSFRDEKELERLQICQRKSDHLKEQFEKSHEQLLQNIKAEKENNDKIQRLNEELEKSNECAEMLKQKVEELTRQNNETKLMMQRIQAESENIVLEKQTIQQRCEALKIQADGFKDQLRSTNEHLHKQTKTEQDFQRKIKCLEEDLAKSQNLVSEFKQKCDQQNIIIQNTKKEVRNLNAELNASKEEKRRGEQKVQLQQAQVQELNNRLKKVQDELHLKTIEEQMTHRKMVLFQEESGKFKQSAEEFRKKMEKLMESKVITENDISGIRLDFVSLQQENSRAQENAKLCETNIKELERQLQQYREQMQQGQHMEANHYQKCQKLEDELIAQKREVENLKQKMDQQIKEHEHQLVLLQCEIQKKSTAKDCTFKPDFEMTVKECQHSGELSSRNTGHLHPTPRSPLLRWTQEPQPLEEKWQHRVVEQIPKEVQFQPPGAPLEKEKSQQCYSEYFSQTSTELQITFDETNPITRLSEIEKIRDQALNNSRPPVRYQDNACEMELVKVLTPLEIAKNKQYDMHTEVTTLKQEKNPVPSAEEWMLEGCRASGGLKKGDFLKKGLEPETFQNFDGDHACSVRDDEFKFQGLRHTVTARQLVEAKLLDMRTIEQLRLGLKTVEEVQKTLNKFLTKATSIAGLYLESTKEKISFASAAERIIIDKMVALAFLEAQAATGFIIDPISGQTYSVEDAVLKGVVDPEFRIRLLEAEKAAVGYSYSSKTLSVFQAMENRMLDRQKGKHILEAQIASGGVIDPVRGIRVPPEIALQQGLLNNAILQFLHEPSSNTRVFPNPNNKQALYYSELLRMCVFDVESQCFLFPFGERNISNLNVKKTHRISVVDTKTGSELTVYEAFQRNLIEKSIYLELSGQQYQWKEAMFFESYGHSSHMLTDTKTGLHFNINEAIEQGTIDKALVKKYQEGLITLTELADSLLSRLVPKKDLHSPVAGYWLTASGERISVLKASRRNLVDRITALRCLEAQVSTGGIIDPLTGKKYRVAEALHRGLVDEGFAQQLRQCELVITGIGHPITNKMMSVVEAVNANIINKEMGIRCLEFQYLTGGLIEPQVHSRLSIEEALQVGIIDVLIATKLKDQKSYVRNIICPQTKRKLTYKEALEKADFDFHTGLKLLEVSEPLMTGISSLYYSS

SEQ ID NO: 8421 - protein, 2319 aa, Homo sapiens [sequence omitted]

SEQ ID NO: 8422 - protein, 1946 aa, Homo sapiens
VKYTTWMFETQPIDTLGAYSSDTVENAEKIPELARGDVCTARWMFETRPLDSMNKMHQSQEESAVTISKDITGGDVKTVRYMFETQHLDQLGQLHSVDEVHLLQLRSELKEIKGNVKRSIKCFETQPLYVIRDGSGQMLEIKTVHREDVEKGDVRTARWMFETQPLDTINKDITEIKVVRGISMEENVKGGVSKAKWLFETQPLEKIKESEEVIIEKEKIIGTDVSRKCWMFETQPLDILKEVPDADSLQREEIIGGDVQTTKHLFETLPIEALKDSPDIGKLQKITASEEEKGDVRHQKWIFETQPLEDIRKDKKEYTRTVKLEEVDRGDVKNYTHIFESNNLIKFDASHKIEVEGVTRGAVELNKSLFETTPLYAIQDPLGKYHQVKTVQQEEIVRGDVRSCRWLFETRPIDQFDESIHKFQIIRGISAQEIQTGNVKSAKWLFETQPLDSIKYFSDVEETESKTEQTRDIVKGDVKTCKWLFETLPMESLYEKVSLMTSSEEIHKGDVKTCTWLFETQPLDTIKDDSETAVKLQTVKQEEIQGGDVRTACFLFETENLDSIQGEEVKEIKPVEMDIQAGDVSSMRYKFENQSLDSISSSSEEVLKKIKTLKTEDIQKGNVLNCRWLFENQPIDKIKESQEGDECVKTVTDIQGGDVRKGCFIFETFSLDEIKEESDYISTKKTITEEVIQGDVKSYRMLFETRPLYAIQDREGSYHEVTTVKKEEVIHGDVRGTRWLFETKPLDSINKSETVYVIKSVTQEDIQKGDVSSVRYRFETQPLDQISEESHNIMPSIDHIQGGNVKTSRQFFESENFDKNNYIRTVSVNEIQKGNVKTSTWLFETHTMDELRGEGLEYENIKTVTQEDVQKGDVKQAVWLFENRTFDSIMEAHKGITKMTKEEIPPSDVKTTTWLFETTPLHEFNETRVEKIEIIGKSIKETLEDLYSQKVIQAPGIIIEADEIGDVRMAKYKLMNQASPEIQKEEIIRADLRNIMVNLLSKRDCTEREILISEEEKGNVNLTKTQLLNRSTEFHAEKEEIVKGDVQQAIKNLFSEERSVKKGILIQEDEKGDINMTIYCLLHENDGDTIEREEVIGGDVKRTIHNLLSSTSNNKISERAKIDASERGNVQFFTTCIEAGALDYLKQLHTESNETLTAKKQEGEKEIIGGDVEGTKLLLKKRQSLVERTVSETDIIPGDVHNTVKVFMTEPQSTFGKIPKEEIIKGDLTSTLNSLSQAVNQKTVTKTEEIIKGNMLATLKSLKESSHRWKESKQPDAIPGDIEKAIECLEKATNTKTEILKKELLKDDLETSLRSLKEAQRSFKEVHKEGVIKKDAKAVMAGSSGEQKTDIHQVAVQRNKNSLLQPKPGPFEPAAKWQGGADTLSQTMGKSCHGNLVEERTEVNLPKAPKGTVKIVIDREQNNDALEKSLRRLSNSHHKSNVLESGDKTGVWTDTTGEQHLRDEYMSRQLTSTVSVKNNLTTKESDRAVRELKKDDVFNSIQSAGKTVGKQQTYELRNDHQKMEGFHIKSPKKTKNIKILTDTQSSKPSPTQHPVSMPVGGTYDLSGDFQKQTLLKQETKYSNKDIKKKNINLQPMWQLLPVEQDTSNVTEMKVSEKSHNTFKATNKKRETDVHLKSQDFLMKTNTSTGLKMAMERSLNPINFNPENNVKESECPLPPPSPPPPPPSNASSEIEFPLPPPPPLMMFPEKNGFLPSLSTEKIKAEFESFPGLPLPPPPVDEKSERESSSMFLPPPPPPTPSQKPAHLLSSSAPEKHSGDFMQQYSQKEASNSQNSQAKIITGKTGVLPPPTLPKPKLPKHIKDNKNDFSPKVELATSLSDMECKITTSKDQKKVMVMTSSEHTETKQNVISKSLDERKQLSIDSANCLSHTVPGTSAPRKKQIAPLIKSHSFPESSGQQNPKPYMRKFKTPLMIAEEKYRQQKKKKK

SEQ ID NO: 8423 - protein, 201 aa, Homo sapiens
MPSETLWEIAKAEVEKRGINGSEGDGAEIAEKFVFFIGSKNGGKTTIILRCLDRDEPPKPTLALEYTYGRRAKGHNTPKDIAHFWELGGGTSLLDLISIPITGDTLRTFSLVLVLDLSKPNDLWPTMENLLQATKSHVDKVIMKLGKTNAKAVSEMRQKIWNNMPKDHPVSCCLGLLLESLVPFIVNDNITNNFFRFLCMT

SEQ ID NO: 8424 - protein, 262 aa, Homo sapiens
MLEPSANMPWFKGWKVTHKDGNASGTMLLEALDCILPPTRPTDKPLRLPLQDVYKIGGIGTVLVGRVETGILKPGMVVTFAPVSVTTEVKSVEMHHEALNEALPGDNMGFNVKNVSVKDVHRGNVAGDSKNDPPMEAAGFTAQVIILNHPGQISSGYAPVLDCHTAHIACKFAELKEKIDRRSGKKLEDGPKFLKSGDAAIADMVPGKPMCVESFSDYPPLGRFTVHDMRQTLAVGVIKAVDKKAAGAGKVTKSAQKAQKAK

SEQ ID NO: 8425 - protein, 462 aa, Homo sapiens
MGKEKTHINIVVIGHVDSGKSTTTGHLIYKCSSIDKRTIEKFEKETAEMGKGSFKYGWVLDKLKAERERGITIDISLWKFETSKYYVTITDAPGHRDFIKNMITGTSQADCAVPIVAAGVGEFEAGISKNGQTREHALLAYTLGVKQLIVGVNKMDSTEPPYSQKRYEEIVKEVSTYIKKIGYNPDTVAFVPISGWNGNNMLEPSANMPWFKGWKVTRKDGNASGTMLLEALDCILPPTRPTDKPLRLPLQDVYKIGGIGSVPVGRVETGILKPGMVVTFAPVNVTTEVKSVEMHHEALGEALPGDSVGFHVKNVSVKDVRRGNVAGDSKNDPPMEAAGFTAQVIILNHPGQISAGYAPVLDCHTAHIACKFAELKEKIDRRSGKKLEDGPKFLKSGDAAIVDMVPGKPMCAESFSDYPPLGRFAVRDMRHTVAVGVIKAVDKKAAGAGKVTNSAQKAQMAK

SEQ ID NO: 8426 - protein, 627 aa, Homo sapiens
MAAAVLTDRAQVSVTFDDVAVTFTKEEWGQLDLAQRTLYQEVMLENCGLLVSLGCPVPKAELICHLEHGQEPWTRKEDLSQDTCPGDKGKPKTTEPTTCEPALSEGISLQGQVTQGNSVDSQLGQAEDQDGLSEMQEGHFRPGIDPQEKSPGKMSPECDGLGTADGVCSRIGQEQVSPGDRVRSHNSCESGKDPMIQEEENNFKCSECGKVFNKKHLLAGHEKIHSGVKPYECTECGKTFIKSTHLLQHHMIHTGERPYECMECGKAFNRKSYLTQHQRIHSGEKPYKCNECGKAFTHRSNFVLHNRRHTGEKSFVCTECGQVFRHRPGFLRHYVVHSGENPYECLECGKVFKHRSYLMWHQQTHTGEKPYECSECGKVFLESAALIHHYVIHTGEKPFECLECGKAFNHRSYLKRHQRIHTGEKPFVCSECGKAFTHCSTFILHKRAHTGEKPFECKECGKAFSNRKDLIRHFSIHTGEKPYECVECGKAFTRMSGLTRHKRIHSGEKPYECVECGKSFCWSTNLIRHAIIHTGEKPYKCSECGKAFSRSSSLTQHQRMHTGKNPISVTDVGRPFTSGQTSVTLRELLLGKDFLNVTTEANILPEETSSSASDQPYQRETPQVSSL

SEQ ID NO: 8427 - protein, 1515 aa, Homo sapiens
MSLLTCAFYLGYELQFRLGPTLQGKAVTVYTNYPFPGETFNREKFRSLDWENPTEREDDSDKYCKLNLQQSGSFQYYFLQGNEKSGGGYIVVDPILRVGADNHVLPLDCVTLQTFLAKCLGPFDEWESRLRVAKESGYNMIHFTPLQTLGLSRSCYSLANQLELNPDFSRPNRKYTWNDVGQLVEKLKKEWNVICITDVVYNHTAANSKWIQEHPECAYNLVNSPHLKPAWVLDRALWRFSCDVAEGKYKEKGIPALIENDHHMNSIRKIIWEDIFPKLKLWEFFQVDVNKAVEQFRRLLTQENRRVTKSDPNQHLTIIQDPEYRRFGCTVDMNIALTTFIPHDKGPAAIEECCNWFHKRMEELNSEKHRLINYHQEQAVNCLLGNVFYERLAGHGPKLGPVTRKHPLVTRYFTFPFEEIDFSMEESMIHLPNKACFLMAHNGWVMGDDPLRNFAEPGSEVYLRRELICWGDSVKLRYGNKPEDCPYLWAHMKKYTEITATYFQGVRLDNCHSTPLHVAEYMLDAARNLQPNLYVVAELFTGSEDLDNVFVTRLGISSLIREAMSAYNSHEEGRLVYRYGGEPVGSFVQPCLRPLMPAIAHALFMDITHDNECPIVHRSAYDALPSTTIVSMACCASGSTRGYDELVPHQISVVSEERFYTKWNPEALPSNTGEVNFQSGIIAARCAISKLHQELGAKGFIQVYVDQVDEDIVAVTRHSPSIHQSVVAVSRTAFRNPKTSFYSKEVPQMCIPGKIEEVVLEARTIERNTKPYRKDENSINGTPDITVEIREHIQLNESKIVKQAGVATKGPNEYIQEIEFENLSPGSVIIFRVSLDPHAQVAVGILRNHLTQFSPHFKSGSLAVDNADPILKIPFASLASRLTLAELNQILYRCESEEKEDGGGCYDIPNWSALKYAGLQGLMSVLAEIRPKNDLGHPFCNNLRSGDWMIDYVSNRLISRSGTIAEVGKWLQAMFFYLKQIPRYLIPCYFDAILIGAYTTLLDTAWKQMSSFVQNGSTFVKHLSLGSVQLCGVGKFPSLPILSPALMDVPYRLNEITKEKEQCCVSLAAGLPHFSSGIFRCWGRDTFIALRGILLITGRYVEARNIILAFAGTLRHGLIPNLLGEGIYARYNCRDAVWWWLQCIQDYCKMVPNGLDILKCPVSRMYPTDDSAPLPAGTLDQPLFEVIQEAMQKHMQGIQFRERNAGPQIDRNMKDEGFNITAGVDEETGFVYGGNRFNCGTWMDKMGESDRARNRGIPATPRDGSAVEIVGLSKSAVRWLLELSKKNIFPYHEVTVKRHGKAIKVSYDEWNRKIQDNFEKLFHVSEDPSDLNEKHPNLVHKRGIYKDSYGASSPWCDYQLRPNFTIAMVVAPELFTTEKAGKALEIAEKKLLGPLGMKTLDPDDMVYCGIYDNALDNDNYNLAKGFNYHQGPEWLWPIGYFLRAKLYFSRLMGPETTAKTIVLVKNVLSRHYVHLERSPWKGLPELTNENAQYCPFSCETQAWSIATILETLYDL

SEQ ID NO: 8428 - protein, 1516 aa, Homo sapiens
MAPLLSINLFIGYELQFRLGPTLQGKAVTVYTNYPFPGETFNREKFRSLDWENPTEREDDSDKYCKLNLQQSGSFQYYFLQGNEKSGGGYIVVDPILRVGADNHVLPLDCVTLQTFLAKCLGPFDEWESRLRVAKESGYNMIHFTPLQTLGLSRSCYSLANQLELNPDFSRPNRKYTWNDVGQLVEKLKKEWNVICITDVVYNHTAANSKWIQEHPECAYNLVNSPHLKPAWVLDRALWRFSCDVAEGKYKEKGIPALIENDHHMNSIRKIIWEDIFPKLKLWEFFQVDVNKAVEQFRRLLTQENRRVTKSDPNQHLTIIQDPEYRRFGCTVDMNIALTTFIPHDKGPAAIEECCNWFHKRMEELNSEKHRLINYHQEQAVNCLLGNVFYERLAGHGPKLGPVTRKHPLVTRYFTFPFEEIDFSMEESMIHLPNKACFLMAHNGWVMGDDPLRNFAEPGSEVYLRRELICWGDSVKLRYGNKPEDCPYLWAHMKKYTEITATYFQGVRLDNCHSTPLHVAEYMLDAARNLQPNLYVVAELFTGSEDLDNVFVTRLGISSLIREAMSAYNSHEEGRLVYRYGGEPVGSFVQPCLRPLMPAIAHALFMDITHDNECPIVHRSAYDALPSTTIVSMACCASGSTRGYDELVPHQISVVSEERFYTKWNPEALPSNTGEVNFQSGIIAARCAISKLHQELGAKGFIQVYVDQVDEDIVAVTRHSPSIHQSVVAVSRTAFRNPKTSFYSKEVPQMCIPGKIEEVVLEARTIERNTKPYRKDENSINGTPDITVEIREHIQLNESKIVKQAGVATKGPNEYIQEIEFENLSPGSVIIFRVSLDPHAQVAVGILRNHLTQFSPHFKSGSLAVDNADPILKIPFASLASRLTLAELNQILYRCESEEKEDGGGCYDIPNWSALKYAGLQGLMSVLAEIRPKNDLGHPFCNNLRSGDWMIDYVSNRLISRSGTIAEVGKWLQAMFFYLKQIPRYLIPCYFDAILIGAYTTLLDTAWKQMSSFVQNGSTFVKHLSLGSVQLCGVGKFPSLPILSPALMDVPYRLNEITKEKEQCCVSLAAGLPHFSSGIFRCWGRDTFIALRGILLITGRYVEARNIILAFAGTLRHGLIPNLLGEGIYARYNCRDAVWWWLQCIQDYCKMVPNGLDILKCPVSRMYPTDDSAPLPAGTLDQPLFEVIQEAMQKHMQGIQFRERNAGPQIDRNMKDEGFNITAGVDEETGFVYGGNRFNCGTWMDKMGESDRARNRGIPATPRDGSAVEIVGLSKSAVRWLLELSKKNIFPYHEVTVKRHGKAIKVSYDEWNRKIQDNFEKLFHVSEDPSDLNEKHPNLVHKRGIYKDSYGASSPWCDYQLRPNFTIAMVVAPELFTTEKAGKALEIAEKKLLGPLGMKTLDPDDMVYCGIYDNALDNDNYNLAKGFNYHQGPEWLWPIGYFLRAKLYFSRLMGPETTAKTIVLVKNVLSRHYVHLERSPWKGLPELTNENAQYCPFSCETQAWSIATILETLYDL

SEQ ID NO: 8429 - protein, 1535 aa, Homo sapiens
MGHSKQIRILLLNEMEKLEKTLFRLEQGYELQFRLGPTLQGKAVTVYTNYPFPGETFNREKFRSLDWENPTEREDDSDKYCKLNLQQSGSFQYYFLQGNEKSGGGYIVVDPILRVGADNHVLPLDCVTLQTFLAKCLGPFDEWESRLRVAKESGYNMIHFTPLQTLGLSRSCYSLANQLELNPDFSRPNRKYTWNDVGQLVEKLKKEWNVICITDVVYNHTAANSKWIQEHPECAYNLVNSPHLKPAWVLDRALWRFSCDVAEGKYKEKGIPALIENDHHMNSIRKIIWEDIFPKLKLWEFFQVDVNKAVEQFRRLLTQENRRVTKSDPNQHLTIIQDPEYRRFGCTVDMNIALTTFIPHDKGPAAIEECCNWFHKRMEELNSEKHRLINYHQEQAVNCLLGNVFYERLAGHGPKLGPVTRKHPLVTRYFTFPFEEIDFSMEESMIHLPNKACFLMAHNGWVMGDDPLRNFAEPGSEVYLRRELICWGDSVKLRYGNKPEDCPYLWAHMKKYTEITATYFQGVRLDNCHSTPLHVAEYMLDAARNLQPNLYVVAELFTGSEDLDNVFVTRLGISSLIREAMSAYNSHEEGRLVYRYGGEPVGSFVQPCLRPLMPAIAHALFMDITHDNECPIVHRSAYDALPSTTIVSMACCASGSTRGYDELVPHQISVVSEERFYTKWNPEALPSNTGEVNFQSGIIAARCAISKLHQELGAKVVLSASQVYVDQVDEDIVAVTRHSPSIHQSVVAVSRTAFRNPKTSFYSKEVPQMCIPGKIEEVVLEARTIERNTKPYRKDENSINGTPDITVEIREHIQLNESKIVKQAGVATKGPNEYIQEIEFENLSPGSVIIFRVSLDPHAQVAVGILRNHLTQFSPHFKSGSLAVDNADPILKIPFASLASRLTLAELNQILYRCESEEKEDGGGCYDIPNWSALKYAGLQGLMSVLAEIRPKNDLGHPFCNNLRSGDWMIDYVSNRLISRSGTIAEVGKWLQAMFFYLKQIPRYLIPCYFDAILIGAYTTLLDTAWKQMSSFVQNGSTFVKHLSLGSVQLCGVGKFPSLPILSPALMDVPYRLNEITKEKEQCCVSLAAGLPHFSSGIFRCWGRDTFIALRGILLITGRYVEARNIILAFAGTLRHGLIPNLLGEGIYARYNCRDAVWWWLQCIQDYCKMVPNGLDILKCPVSRMYPTDDSAPLPAGTLDQPLFEVIQEAMQKHMQGIQFRERNAGPQIDRNMKDEGFNITAGVDEETGFVYGGNRFNCGTWMDKMGESDRARNRGIPATPRDGSAVEIVGLSKSAVRWLLELSKKNIFPYHEVTVKRHGKAIKVSYDEWNRKIQDNFEKLFHVSEDPSDLNEKHPNLVHKRGIYKDSYGASSPWCDYQLRPNFTIAMVVAPELFTTEKAWKALEIAEKKLLGPLGMKTLDPDDMVYCGIYDNALDNDNYNLAKGFNYHQGPEWLWPIGYFLRAKLYFSRLMGPETTAKTIVLVKNVLSRHYVHLERSPWKGLPELTNENAQYCPFSCETQAWSIATILETLYDL

SEQ ID NO: 8430 - protein, 293 aa, Homo sapiens
MADLLGSILSSMEKPPSLGDQETRRKAREQAARLKKLQEQEKQQKVEFRKRMEKEVSDFIQDSGQIKKKFQPMNKIERSILHDVVEVAGLTSFSFGEDDDCRYVMIFKKEFAPSDEELDSYRRGEEWDPQKAEEKRKLKELAQRQEEEAAQQGPVVVSPASDYKDKYSHLIGKGAAKDAAHMLQANKTYGCVPVANKRDTRSIEEAMNEIRAKKRLRQSGEELPPTSRRPAQLPLTPGAGQGAGRDKAAAIRAHPGAPPLNHLLPAVPQAGGKQVFDLSPLELGYVRGMCVCV

SEQ ID NO: 8431 - protein, 515 aa, Homo sapiens
MAANMYRVGDYVYFENSSSNPYLIRRIEELNKTASGNVEAKVVCFYRRRDISNTLIMLADKHAKEIEEESETTVEADLTDKQKHQLKHRELFLSRQYESLPATHIRGKCSVALLNETESVLSYLDKEDTFFYSLVYDPSLKTLLADKGEIRVGPRYQADIPEMLLEGESDEREQSKLEVKVWDPNSPLTDRQIDQFLVVARAVGTFARALDCSSSVRQPSLHMSAAAASRDITLFHAMDTLYRHSYDLSSAISVLVPLGGPVLCRDEMEEWSASEASLFEEALEKYGKDFNDIRQDFLPWKSLTSIIEYYYMWKTTDRYVQQKRLKAAEAESKLKQVYIPTYSKPNPNQISTSNGKPGAVNGAVGTTFQPQNPLLGRACESCYATQSHQWYSWGPPNMQCRLCAICWLYWKKYGGLKMPTQSEEEKLSPSPTTEDPRVRSHVSRQAMQGMPVRNTGSPKSAVKTRQAFFLHTTYFTKFARQVCKNTLRLRQAARRPFVAINYAAIRAECKMLLNS

SEQ ID NO: 8432 - protein, 594 aa, Homo sapiens
MAANMYRVGDYVYFENSSSNPYLIRRIEELNKTASGNVEAKVVCFYRRRDISNTLIMLADKHAKEIEEESETTVEADLTDKQKHQLKHRELFLSRQYESLPATHIRGKCSVALLNETESVLSYLDKEDTFFYSLVYDPSLKTLLADKGEIRVGPRYQADIPEMLLEGESDEREQSKLEVKVWDPNSPLTDRQIDQFLVVARAVGTFARALDCSSSVRQPSLHMSAAAASRDITLFHAMDTLYRHSYDLSSAISVLVPLGGPVLCRDEMEEWSASEASLFEEALEKYGKDFNDIRQDFLPWKSLTSIIEYYYMWKTTDRYVQQKRLKAAEAESKLKQVYIPTYSKPNPNQISTSNGKPGAVNGAVGTTFQPQNPLLGRACESCYATQSHQWYSWGPPNMQCRLCAICWLYWKKYGGLKMPTQSEEEKLSPSPTTEDPRVRSHVSRQAMQGMPVRNTGSPKSAVKTRQAFFLHTTYFTKFARQVCKNTLRLRQAARRPFVAINYAAIRAEYADRHAELSGSPLKSKSTRKPLACIIGYLEIHPAKKPNVIRSTPSLQTPTTKRMLTTPNHTSLSILGKRNYSHHNGLDELTCCVSD

SEQ ID NO: 8433 - protein, 724 aa, Homo sapiens
MAALEEEFTLSSVVLSAGPEGLLGVEQSDKTDQFLVTDSGRTVILYKVSDQKPLGSWSVKQGQIITCPAVCNFQTGEYVVVHDNKVLRIWNNEDVNLDKVFKATLSAEVYRILSVQGTEPLVLFKEGAVRGLEALLADPQQKIETVISDEEVIKWTKFFVVFRHPVLIFITEKHGNYFAYVQMFNSRILTKYTLLLGQDENSVIKSFTASVDRKFISLMSLSSDGCIYETLIPIRPADPEKNQSLVKSLLLKAVVSGNARNGVALTALDQDHVAVLGSPLAASKECLSVWNIKFQTLQTSKELPQGTSGQLWYYGEHLFMLHGKSLTVIPYKCEVSSLAGALGKLKHSQDPGTHVVSHFVNWETPQGCGLGFQNSEQSRRILRRRKIEVSLQPEVPPSKQLLSTIMKDSEKHIEVEVRKFLALKQTPDFHTVIGDTVTGLLERCKAEPSFYPRNCLMQLIQTHVLSYRFFCLSLCPDLMEIALKKKDVQLLQLCLQQFPDIPESVTCACLKIFLSIGDDSLQETDVNMESVFDYSINSVHDEKMEEQTEILQNGFNPEEDKCNNCDQELNKKPQDETKESTSCPVVQKRAALLNAILHSAYSETFLLPHLKDIPAQHITLFLKYLYFLYLKCSENATMTLPGIHPPTLNQIMDWICLLLDANFTVVVMMPEAKRLLINLYKLVKSQISVYSELNKIEVSFRELQKLNQEKNNRGLYSIEVLELF

SEQ ID NO: 8434 - protein, 1495 aa, Homo sapiens
PSPEAGGGGGALKASSARAAAAGLLREAGSGGRERADWRRRQLRKVRSVELDQLPEQPLFLAASPPASSTSPSPEPADAAGSGTGFQPVAVPPPHGAASRRGAHLTESVAAPDSGASSPAAAEPGEKRAPAAEPSPAAAPAGREMENKETLKGLHKMDDRPEERMIREKLKATCMPAWKHEWLERRNRRGPVVVKPIPVKGDGSEMNHLAAESPGEVQASAASPASKGRRSPSPGNSPSGRTVKSESPGVRRKRVSPVPFQSGRITPPRRAPSPDGFSPYSPEETNRRVNKVMRARLYLLQQIGPNSFLIGGDSPDNKYRVFIGPQNCSCAHGTFCIHLLFVMLRVFQLEPSDPMLWRKTLKNFEVESLFQKYHSRRSSRIKAPSRNTIQKFVSRMSNSHTLSSSSTSTSSSENSIKDEEEQMCPICLLGMLDEESLTVCEDGCRNKLHHHCMSIWAEECRRNREPLICPLCRSKWRSHDFYSHELSSPVDSPSSLRAAQQQTVQQQPLAGSRRNQESNFNLTHYGTQQIPPAYKDLAEPWIQVFGMELVGCLFSRNWNVREMALRRLSHDVSGALLLANGESTGNSGGSSGSSPSGGATSGSSQTSISGDVVEACCSVLSMVCADPVYKVYVAALKTLRAMLVYTPCHSLAERIKLQRLLQPVVDTILVKCADANSRTSQLSISTLLELCKGQAGELAVGREILKAGSIGIGGVDYVLNCILGNQTESNNWQELLGRLCLIDRLLLEFPAEFYPHIVSTDVSQAEPVEIRYKKLLSLLTFALQSIDNSHSMVGKLSRRIYLSSARMVTTVPHVFSKLLEMLSVSSVSTHFTRMRRRLMAYADEVEIAEAIQLGVEDTLQRQQHNSFCRHLFPTTIWKPQRTVPLECTVHLEKTGKGLCATKLSASSEDISERLARISVGPSSSTTTTTTTTEQPKPMVQTKGRPHSQCLNSSPLSHHSQLMFPALSTPSSSTPSVPAGTATDVSKHRLQGFIPCRIPSASPQTQRKFSLQFHRNCPENKDSDKLSPVFTQSRPLPSSNIHRPKPSRPTPGNTSKQGDPSKNSMTLDLNSSSKCDDSFGLSSNSSNCCYTSDETVFTPVEEKCRLDVNTELNSSIEDLLEASMPSSDTTVTFKSEVAVLSPEKAENDDTYKDDVNHNQKCKEKMEAEEEEALAIAMAMSASQVALPIVPQLQVENGEDIIIIQQDTPETLPGHTKAKQPYREDTEWLKGQQIGLGAFSSCYQAQDVGTGTLMAVKQVTYVRNTSSEQEEVVEALREEIRMMSHLNHPNIIRMLGATCEKSNYNLFIEWMAGGSVAHLLSKYGAFKESVVINYTEQLLRGLSYLHENQIIHRDVKGANLLIDSTGQRLRIADFGAAARLASKGTGAGEFQGQLLGTIAFMAPEVLRGQQYGRSCDVWSVGCAIIEMACAKPPWNAEKHSNHLALIFKIASATTAPSIPSHLSPGLRDVALRCLELQPQDRPPSRELLKHPVFRTTW

SEQ ID NO: 8435 - protein, 424 aa, Homo sapiens
MASMPPTPEAQGPILFEDLAVYFSQEECVTLHPAQRSLSKDGTKESLEDAALMGEEGKPEINQQLSLESMELDELALEKYPIAAPLVPYPEKSSEDGVGNPEAKILSGTPTYKRRVISLLVTIENHTPLVELSEYLGTNTLSEILDSPWEGAKNVYKCPECDQNFSDHSYLVLHQKIHSGEKKHKCGDCGKIFNHRANLRTHRRIHTGEKPYKCAKCSASFRQHSHLSRHMNSHVKEKPYTCSICGRGFMWLPGLAQHQKSHSAENTYESTNCDKHFNEKPNLALPEETFVSGPQYQHTKCMKSFRQSLYPALSEKSHDEDSERCSDDGDNFFSFSKFKPLQCPDCDMTFPCFSELISHQNIHTEERPHKCKTCEESFALDSELACHQKSHMLAEPFKCTVCGKTFKSNLHLITHKRTHIKNTT

SEQ ID NO: 8436 - protein, 261 aa, Homo sapiens
MAATAREDGASGQERGQRGCEHYDRGCLLKAPCCDKLYTCRLCHDNNEDHQLDRFKVKEVQCINCEKIQHAQQTCEECSTLFGEYYCDICHLFDKDKKQYHCENCGICRIGPKEDFFHCLKCNLCLAMNLQGRHKCIENVSRQNCPICLEDIHTSRVVAHVLPCGHLLHRTCYEEMLKEGYRCPLCMHSALDMTRYWRQLDDEVAQTPMPSEYQNMTVDILCNDCNGRSTVQFHILGMKCKICESYNTAQAGGRRISLDQQ

SEQ ID NO: 8437 - protein, 79 aa, Homo sapiens
MHPDLSPHLHTEECNVLINLLKECHKNHNILKFFGYCNDVDRELRKCLKNEYVENRTKSREHGIAMRKKLFNPPEESEK

SEQ ID NO: 8438 - protein, 919 aa, Homo sapiens
MEAPEYLDLDEIDFSDDISYSVTSLKTIPELCRRCDTQNEDRSASSSSWNCGISTLITNTQKPTGIADVYSKFRPVKRVSPLKHQPETLENNESDDQKNQKVVEYQKGGESDLGPQPQELGPGDGVGGPPGKSSEPSTSLGELEHYDLDMDEILDVPYIKSSQQLASFTKVTSEKRILGLCTTINGLSGKACSTGSSESSSSNMAPFCVLSPVKSPHLRKASAVIHDQHKLSTEETEISPPLVKCGSAYEPENQSKDFLNKTFSDPHGRKVEKTTPDCQLRAFHLQSSAAESKPEEQVSGLNRTSSQGPEERSEYLKKVKSILNIVKEGQISLLPHLAADNLDKIHDENGNNLLHIAASQGHAECLQHLTSLMGEDCLNERNTEKLTPAGLAIKNGQLECVRWMVSETEAIAELSCSKDFPSLIHYAGCYGQEKILLWLLQFMQEQGISLDEVDQDGNSAVHVASQHGYLGCIQTLVEYGANVTMQNHAGEKPSQSAERQGHTLCSRYLVVVETCMSLASQVVKLTKQLKEQTVERVTLQNQLQQFLEAQKSEGKSLPSSPSSPSSPASRKSQWKSPDADDDSVAKSKPGVQEGIQVLGSLSASSRARPKAKDEDSDKILRQLLGKEISENVCTQEKLSLEFQDAQASSRNSKKIPLEKRELKLARLRQLMQRSLSESDTDSNNSEDPKTTPVRKADRPRPQPIVESVESMDSAESLHLMIKKHTLASGGRRFPFSIKASKSLDGHSPSPTSESSEPDLESQYPGSGSIPPNQPSGDPQQPSPDSTAAQKVATSPKSALKSPSSKRRTSQNLKLRVTFEEPVVQMEQPSLELNGEKDKDKGRTLQRTSTSNESGDQLKRPFGAFRSIMETLSGNQNNNNNYQAANQLKTSTLPLTSLGRKTDAKGNPASSASKGKNKAA

SEQ ID NO: 8439 - protein, 1016 aa, Homo sapiens
MEAPEYLDLDEIDFSDDISDNRSQGNRLQKLGLEDTDREDAMGFGSHRAKLTVVAALGACHCPENEYSVTSLKTIPELCRRCDTQNEDRSVSSSSWNCGISTLITNTQKPTGIADVYSKFRPVKRVSPLKHQPETLENNESDDQKNQKVVEYQKGGESDLGPQPQELGPGDGVGGPPGKSSEPSTSLGELEHYDLDMDEILDVPYIKSSQQLASFTKVTSEKRILGLCTTINGLSGKACSTGSSESSSSNMAPFCVLSPVKSPHLRKASAVIHDQHKLSTEETEISPPLVKCGSAYEPENQSKDFLNKTFSDPHGRKVEKTTPDCQLRAFHLQSSAAESKPEEQVSGLNRTSSQGPEERSEYLKKVKSILNIVKEGQISLLPHLAADNLDKIHDENGNNLLHIAASQGHAECLQHLTSLMGEDCLNERNTEKLTPAGLAIKNGQLECVRWMVSETEAIAELSCSKDFPSLIHYAGCYGQEKILLWLLQFMQEQGISLDEVDQDGNSAVHVASQHGYLGCIQTLVEYGANVTMQNHAGEKPSQSAERQGHTLCSRYLVVVETCMSLASQVVKLTKQLKEQTVERVTLQNQLQQFLEAQKSEGKSLPSSPSSPSSPASRKSQWKSPDADDDSVAKSKPGVQEGIQVLGSLSASSRARPKAKDEDSDKILRQLLGKEISENVCTQEKLSLEFQDAQASSRNSKKIPLEKRELKLARLRQLMQRSLSESDTDSNNSEDPKTTPVRKADRPRPQPIVESVESMDSAESLHLMIKKHTLASGGRRFPFSIKASKSLDGHSPSPTSESSEPDLESQYPGSGSIPPNQPSGDPQQPSPDSTAAQKVATSPKSALKSPSSKRRTSQNLKLRVTFEEPVVQMEQPSLELNGEKDKDKGRTLQRTSTSNESGDQLKRPFGAFRSIMETLSGNQNNNNNYQAANQLKTSTLPLTSLGRKTDAKGNPASSASKGKNKAEMYSSCINLSSNMLIEEHLCNDTRHNDINRKMKKSYSIKHIAEPESKELFL

SEQ ID NO: 8440 - protein, 717 aa, Homo sapiens
MSVDEKPDSPMYVYESTVHCTNILLGLNDQRKKDILCDVTLIVERKEFRAHRAVLAACSEYFWQALVGQTKNDLVVSLPEEVTARGFGPLLQFAYTAKLLLSRENIREVIRCAEFLRMHNLEDSCFSFLQTQLLNSEDGLFVCRKDAACQRPHEDCENSAGEEEDEEEETMDSETAKMACPRDQMLPEPISFEAAAIPVAEKEEALLPEPDVPTDTKESSEKDALTQYPRYKKYQLACTKNVYNASSHSTSGFASTFREDNSSNSLKPGLARGQIKSEPPSEENEEESITLCLSGDEPDAKDRAGDVEMDRKQPSPAPTPTAPAGAACLERSRSVASPSCLRSLFSITKSVELSGLPSTSQQHFARSPACPFDKGITQGDLKTDYTPFTGNYGQPHVGQKEVSNFTMGSPLRGPGLPLCEFSSSPCSQGARFLATEHQEPGLMGDGMYNQVRPQIKCEQSYGTNSSDESGSFSEADSESCPVQDRGQEVKLPFPVDQITDLPRNDFQMMIKMHKLTSEQLEFIHDVRRRSKNRIAAQRCRKRKLDCIQNLECEIRKLVCEKEKLLSERNQLKACMGELLDNFSCLSQEVCRDIQSPEQIQALHRYCPVLRPMDLPTASSINPAPLGAEQNIAASQCAVGENVPCCLEPGAAPPGPPWAPSNTSENCTSGRRLEGTDPGTFSERGPPLEPRSQTVTVDFCQEMTDKCTTDEQPRKDYT

SEQ ID NO: 8441 - protein, 841 aa, Homo sapiens
MSVDEKPDSPMYVYESTVHCTNILLGLNDQRKKDILCDVTLIVERKEFRAHRAVLAACSEYFWQALVGQTKNDLVVSLPEEVTARGFGPLLQFAYTAKLLLSRENIREVIRCAEFLRMHNLEDSCFSFLQTQLLNSEDGLFVCRKDAACQRPHEDCENSAGEEEDEEEETMDSETAKMACPRDQMLPEPISFEAAAIPVAEKEEALLPEPDVPTDTKESSEKDALTQYPRYKKYQLACTKNVYNASSHSTSGFASTFREDNSSNSLKPGLARGQIKSEPPSEENEEESITLCLSGDEPDAKDRAGDVEMDRKQPSPAPTPTAPAGAACLERSRSVASPSCLRSLFSITKSVELSGLPSTSQQHFARSPACPFDKGITQGDLKTDYTPFTGNYGQPHVGQKEVSNFTMGSPLRGPGLEALCKQEGELDRRSVIFSSSACDQVSTSVHSYSGVSSLDKDLSEPVPKGLWVGAGQSLPSSQAYSHGGLMADHLPGRMRPNTSCPVPIKVCPRSPPLETRTRTSSSCSSYSYAEDGSGGSPCSLPLCEFSSSPCSQGARFLATEHQEPGLMGDGMYNQVRPQIKCEQSYGTNSSDESGSFSEADSESCPVQDRGQEVKLPFPVDQITDLPRNDFQMMIKMHKLTSEQLEFIHDVRRRSKNRIAAQRCRKRKLDCIQNLECEIRKLVCEKEKLLSERNQLKACMGELLDNFSCLSQEVCRDIQSPEQIQALHRYCPVLRPMDLPTASSINPAPLGAEQNIAASQCAVGENVPCCLEPGAAPPGPPWAPSNTSENCTSGRRLEGTDPGTFSERGPPLEPRSQTVTVDFCQEMTDKCTTDEQPRKDYT

SEQ ID NO: 8442 - protein, 384 aa, Homo sapiens
MKVTSLDGRQLRKMLRKEAAARCVVLDCRPYLAFAASNVRGSLNVNLNSVVLRRARGGAVSARYVLPDEAARARLLQEGGGGVAAVVVLDQGSRHWQKLREESAARVVLTSLLACLPAGPRVYFLKGGYETFYSEYPECCVDVKPISQEKIESERALISQCGKPVVNVSYRPAYDQGGPVEILPFLYLGSAYHASKCEFLANLHITALLNVSRRTSEACMTHLHYKWIPVEDSHTADISSHFQEAIDFIDCVREKGGKVLVHCEAGISRSPTICMAYLMKTKQFRLKEAFDYIKQRRSMVSPNFGFMGQLLQYESEILPSTPNPQPPSCQGEAAGSSLIGHLQTLSPDMQGAYCTFPASVLAPVPTHSTVSELSRSPVATATSC

SEQ ID NO: 8443 - protein, 697 aa, Homo sapiens
MAETSPEPSGQLVVHSDAHSDTVLASFEDQRKKGFLCDITLIVENVHFRAHKALLAASSEYFSMMFAEEGEIGQSIYMLEGMVADTFGILLEFIYTGYLHASEKSTEQILATAQFLKVYDLVKAYTDFQNNHSSPKPTTLNTAGAPVVVIPNKKNDPPKRKRGRPKKVNTLQEEKSELAAEEEIQLRVNNSVQNRQNFVVKGDSGVLNEQIAAKEKEESEPTCEPSREEEMPVEKDENYDPKTEDGQASQSRYSKRRIWRSVKLKDYKLVGDQEDHGSAKRICGRRKRPGGPEARCKDCGKVFKYNHFLAIHQRSHTGERPFKCNECGKGFAQKHSLQVHTRMHTGERPYTCTVCSKALTTKHSLLEHMSLHSGQKSFTCDQCGKYFSQNRQLKSHYRVHTGHSLPECKDCHRKFMDVSQLKKHLRTHTGEKPFTCEICGKSFTAKSSLQTHIRIHRGEKPYSCGICGKSFSDSSAKRRHCILHTGKKPFSCPECNLQFARLDNLKAHLKIHSKEKHASDASSISGSSNTEEVRNILQLQPYQLSTSGEQEIQLLVTDSVHNINFMPGPSQGISIVTAESSQNMTADQAANLTLLTQQPEQLQNLILSAQQEQTEHIQSLNMIESQMGPSQTEPVHVITLSKETLEHLHAHQEQTEELHLATSTSDPAQHLQLTQEPGPPPPTHHVPQPTPLGQEQS

SEQ ID NO: 8444 - protein, 331 aa, Homo sapiens
MPSLQLEVWRRQQHNHYAFLFVVVTHKGYSSRANPKAYIHAQAENCSHTAELVSWKRERIRDGQDGASRGCFRKDMVLNESHSEGSRVIANNTESIPMPYDHVKLTFSDMNNVPEASKGTKKGTIYLTPFIFLSRAKDATQSFVMSFYLLKAYEIKQPVFDTNCIKGTVNTEAGGGWEGSASGKSAFTAGGATESGQQVLQVTSQASRGEALSGAYGHSHVPGRTCVFPPPVTSGMYPCPPGCPSPPPSPEFYPGPPKMDRAMGYVQPPPLPCPGPMEPPVSPDVPCTPAAEARATKAAASTYYNPGKPHHVSMPTKQPPPSYPREDKKTQ

SEQ ID NO: 8445 - protein, 145 aa, Homo sapiens
IKTKTKYKTAAGITPTLPPQVSGFRLKKTCIFLGCAIIRNYRGPQRPTQCDSQRERSWNKDREWGGCGSSWERAKAYAGRKQHYIAGNCSSNGRGWVLPHHPSALDLCPRSEPSEILGELSTTASLRNLETLGSRSPWRMKGTVA

SEQ ID NO: 8446 - protein, 1409 aa, Homo sapiens
MDWYQTRAEEIEHYARQLQQKIIPDQDQLMAIALECIYTCERNDQLCLCYDLLECLPERGYGDKTEATTKLHDMVDQLEQILSVSELLEKHGLEKPISFVKNTQSSSEEARKLMVRLTRHTGRKQPPVSESHWRTLLQDMLTMQQNVYTCLDSDACYEIFTESLLCSSRLENIHLAGQMMHCSACSENPPAGIAHKGKPHYRVSYEKSIDLVLAASREYFNSSTNLTDSCMDLARCCLQLITDRPPAIQEELDLIQAVGCLEEFGVKILPLQVRLCPDRISLIKECISQSPTCYKQSTKLLGLAELLRVAGENPEERRGQVLILLVEQALRFHDYKAASMHCQELMATGYPKSWDVCSQLGQSEGYQDLATRQELMAFALTHCPPSSIELLLAASSSLQTEILYQRVNFQIHHEGGENISASPLTSKAVQEDEVGVPGSNSADLLRWTTATTMKVLSNTTTTTKAVLQAVSDGQWWKKSLTYLRPLQGQKCGGAYQIGTTANEDLEKQGCHPFYESVISNPFVAESEGTYDTYQHVPVESFAEVLLRTGKLAEAKNKGEVFPTTEVLLQLASEALPNDMTLALAYLLALPQVLDANRCFEKQSPSALSLQLAAYYYSLQIYARLAPCFRDKCHPLYRADPKELIKMVTRHVTRHEHEAWPEDLISLTKQLHCYNERLLDFTQAQILQGLRKGVDVQRFTADDQYKRETILGLAETLEESVYSIAISLAQRYSVSRWEVFMTHLEFLFTDSGLSTLEIENRAQDLHLFETLKTDPEAFHQHMVKYIYPTIGGFDHERLQYYFTLLENCGCADLGNCAIKPETHIRLLKKFKVVASGLNYKKLTDENMSPLEALEPVLSSQNILSISKLVPKIPEKDGQMLSPSSLYTIWLQKLFWTGDPHLIKQVPGSSPEWLHAYDVCMKYFDRLHPGDLITVVDAVTFSPKAVTKLSVEARKEMTRKAIKTVKHFIEKPRKRNSEDEAQEAKDSKVTYADTLNHLEKSLAHLETLSHSFILSLKNSEQETLQKYSHLYDLSRSEKEKLHDEAVAICLDGQPLAMIQQLLEVAVGPLDISPKDIVQSAIMKIISALSGGSADLGGPRDPLKVLEGVVAAVHTSVDKGEELVSPEDLLEWLRPFCADDAWPVRPRIHVLQILGQSFHLTEEDSKLLVFFRTEAILKASWPQRQVDIADIENEENRYCLFMELLESSHHEAEFQHLVLLLQAWPPMKSEYVITNNPWVRLATVMLTRCTMENKEGLGNEVLKMCRSLYNTKQMLPAEGVKELCLLLLNQSLLLPSLKLLLESRDEHLHEMALEQITAVTTVNDSNCDQELLSLLLDAKLLVKCVSTPFYPRIVDHLLASLQQGRWDAEELGRHLREAGHEAEAGSLLLAVRGTHQAFRTFSTALRAAQHWV

SEQ ID NO: 8447 - protein, 594 aa, Homo sapiens
MGKKSRVKTQKSGTGATATVSPKEILNLTSELLQKCSSPAPGPGKEWEEYVQIRTLVEKIRKKQKGLSVTFDGKREDYFPDLMKWASENGASVEGFEMVNFKEEGFGLRATRDIKAEELFLWVPRKLLMTVESAKNSVLGPLYSQDRILQAMGNIALAFHLLCERASPNSFWQPYIQTLPSEYDTPLYFEEDEVRYLQSTQAIHDVFSQYKNTARQYAYFYKVIQTHPHANKLPLKDSFTYEDYRWAVSSVMTRQNQIPTEDGSRVTLALIPLWDMCNHTNGLITTGYNLEDDRCECVALQDFRAGEQIYIFYGTRSNAEFVIHSGFFFDNNSHDRVKIKLGVSKSDRLYAMKAEVLARAGIPTSSVFALHFTEPPISAQLLAFLRVFCMTEEELKEHLLGDSAIDRIFTLGNSEFPVSWDNEVKLWTFLEDRASLLLKTYKTTIEEDKSVLKNHDLSVRAKMAIKLRLGEKEILEKAVKSAAVNREYYRQQMEEKAPLPKYEESNLGLLESSVGDSRLPLVLRNLEEEAGVQDALNIREAISKAKATENGLVNGENSIPNGTRSENESLNQESKRAVEDAKGSSSDSTAGVKE

SEQ ID NO: 8448 - protein, 766 aa, Homo sapiens
SMAGFKRGYDGKIAGLYDLDKTLGRGHFAVVKLARHVFTGEKVAVKVIDKTKLDTLATGHLFQEVRCMKLVQHPNIVRLYEVIDTQTKLYLILELGDGGDMFDYIMKHEEGLNEDLAKKYFAQIVHAISYCHKLHVVHRDLKPENVVFFEKQGLVKLTDFGFSNKFQPGKKLTTSCGSLAYSAPEILLGDEYDAPAVDIWSLGVILFMLVCGQPPFQEANDSETLTMIMDCKYTVPSHVSKECKDLITRMLQRDPKRRASLEEIENHPWLQGVDPSPATKYNIPLVSYKNLSEEEHNSIIQRMVLGDIADRDAIVEALETNRYNHITATYFLLAERILREKQEKEIQTRSASPSNIKAQFRQSWPTKIDVPQDLEDDLTATPLSHATVPQSPARAADSVLNGHRSKGLCDSAKKDDLPELAGPALSTVPPASLKPTASGRKCLFRVEEDEEEDEEDKKPMSLSTQVVLRRKPSVTNRLTSRKSAPVLNQIFEEGESDDEFDMDENLPPKLSRLKMNIASPGTVHKRYHRRKSQGRGSSCSSSETSDDDSESRRRLDKDSGFTYSWHRRDSSEGPPGSEGDGGGQSKPSNASGGVDKASPSENNAGGGSPSSGSGGNPTNTSGTTRRCAGPSNSMQLASRSAGELVESLKLMSLCLGSQLHGSTKYIIDPQNGLSFSSVKVQEKSTWKMCISSTGNAGQVPAVGGIKFFSDHMADTTTELERIKSKNLKNNVLQLPLCEKTISVNIQRNPKEGLLCASSPASCCHVI

SEQ ID NO: 8449 - protein, 3703 aa, Homo sapiens
MEGCDSPVVSGKDNGCGIPQHQQWTELNSTHLPDKPSSMEQSTGESHGPLDSLRAPFNERLAESTASAGPPAEPASKEVTCNECSASFASLQTYMEHHCPSARPPPPLREESASDTGEEGDEESDVENLAGEIVYQPDGSAYIVESLSQLTQGGGACGSGSGSGPLPSLFLNSLPGAGGKQGDPSCAAPVYPQIINTFHIASSFGKWFEGPDQAFPNTSALAGLSPVLHSFRVFDVRHKSNKDYLNSDGSAKSSCVSKDVPNNVDLSKFDGFVLYGKRKPILMCFLCKLSFGYVRSFVTHAVHDHRMTLSEDERKILSNKNISAIIQGIGKDKEPLVSFLEPKNKNFQHPLVSTANLIGPGHSFYGKFSGIRMEGEEALPAGSAAGPEQPQAGLLTPSTLLNLGGLTSSVLKTPITSVPLGALASSPTKSSEGKDSGAAEGEKQEVGDGDCFSEKVEPAEEEAEEEEEEEEAEEEEEEEEEEEEEEEDEGCKGLFPSELDEELEDRPHEEPGAAAGSSSKKDLALSNQSISNSPLMPNVLQTLSRGTASTSSNSASSFVVFDGANRRNRLSFNSEGVRTNVAEGGRRLDFADESANKDNATAPEPNESTEGDDGGFVPHHQHAGSLCELGVGECPSGSGVECPKCDTVLGSSRSLGGHMTMMHSRNSCKTLKCPKCNWHYKYQQTLEAHMKEKHPEPGGSCVYCKSGQPHPRLARGESYTCGYKPFRCEVCNYSTTTKGNLSIHMQSDKHLNNMQNLQNGGGEQVFIHTAGAAAAAAAAAAAAANISSSCGAPSPTKPKTKPTWRCEVCDYETNVARNLRIHMTSEKHMHNMMLLQQNMTQIQHNHHRVLGSLPSPAEAELYQYYLAQNMNLPNLKMDSAASDAQFMMSGFQLDPAGPMAAMTPALVGGEIPLDMRLGGGQLVSEELMNLGESFIQTNDPSLKLFQCAVCNKFTTDNLDMLGLHMNVERSLSEDEWKAVMGDSYQCKLCRYNTQLKANFQLHCKTDKHVQKYQLVAHIKEGGKANEWRLKCVAIGNPVHLKCNACDYYTNSLEKLRLHTVNSRHEASLKLYKHLQQHESGVEGESCYYHCVLCNYSTKAKLNLIQHVRSMKHQRSESLRKLQRLQKGLPEEDEDLGQIFTIRRCPSTDPEEAIEDVEGPSETAADPEELAKDQEGGASSSQAEKELTDSPATSKRISFPGSSESPLSSKRPKTAEEIKPEQMYQCPYCKYSNADVNRLRVHAMTQHSVQPMLRCPLCQDMLNNKIHLQLHLTHLHSVAPDCVEKLIMTVTTPEMVMPSSMFLPAAVPDRDGNSNLEEAGKQPETSEDLGKNILPSASTEQSGDLKPSPADPGSVREDSGFICWKKGCNQVFKTSAALQTHFNEVHAKRPQLPVSDRHVYKYRCNQCSLAFKTIEKLQLHSQYHVIRAATMCCLCQRSFRTFQALKKHLETSHLELSEADIQQLYGGLLANGDLLAMGDPTLAEDHTIIVEEDKEEESDLEDKQSPTGSDSGSVQEDSGSEPKRALPFRKGPNFTMEKFLDPSRPYKCTVCKESFTQKNILLVHYNSVSHLHKLKRALQESATGQPEPTSSPDNKPFKCNTCNVAYSQSSTLEIHMRSVLHQTKARAAKLEAASGSSNGTGNSSSISLSSSTPSPVSTSGSNTFTTSNPSSAGIAPSSNLLSQVPTESVGMPPLGNPIGANIASPSEPKEANRKKLADMIASRQQQQQQQQQQQQQQQQQQQAQTLAQAQAQVQAHLQQELQQQAALIQSQLFNPTLLPHFPMTTETLLQLQQQQHLLFPFYIPSAEFQLNPEVSLPVTSGALTLTGTGPGLLEDLKAQVQVPQQSHQQILPQQQQNQLSIAQSHSALLQPSQHPEKKNKLVIKEKEKESQRERDSAEGGEGNTGPKETLPDALKAKEKKELAPGGGSEPSMLPPRIASDARGNATKALLENFGFELVIQYNENKQKVQKKNGKTDQGENLEKLECDSCGKLFSNILILKSHQEHVHQNYFPFKQLERFAKQYRDHYDKLYPLRPQTPEPPPPPPPPPPPPLPAAPPQPASTPAIPASAPPITSPTIAPAQPSVPLTQLSMPMELPIFSPLMMQTMPLQTLPAQLPPQLGPVEPLPADLAQLYQHQLNPTLLQQQNKRPRTRITDDQLRVLRQYFDINNSPSEEQIKEMADKSGLPQKVIKHWFRNTLFKERQRNKDSPYNFSNPPITSLEELKIDSRPPSPEPPKQEYWGSKRSSRTRFTDYQLRVLQDFFDANAYPKDDEFEQLSNLLNLPTRVIVVWFQNARQKARKNYENQGEGKDGERRELTNDRYIRTSNLNYQCKKCSLVFQRIFDLIKHQKKLCYKDEDEEGQDDSQNEDSMDAMEILTPTSSSCSTPMPSQAYSAPAPSANNTASSAFLQLTAEAEELATFNSKTEAGDEKPKLAEAPSAQPNQTQEKQGQPKPELQQQEQPEQKTNTPQQKLPQLVSLPSLPQPPPQAPPPQCPLPQSSPSPSQLSHLPLKPLHTSTPQQLANLPPQLIPYQCDQCKLAFPSFEHWQEHQQLHFLSAQNQFIHPQFLDRSLDMPFMLFDPSNPLLASQLLSGAIPQIPASSATSPSTPTSTMNTLKRKLEEKASASPGENDSGTGGEEPQRDKRLRTTITPEQLEILYQKYLLDSNPTRKMLDHIAHEVGLKKRVVQVWFQNTRARERKGQFRAVGPAQAHRRCPFCRALFKAKTALEAHIRSRHWHEAKRAGYNLTLSAMLLDCDGGLQMKGDIFDGTSFSHLPPSSSDGQGVPLSPVSKTMELSPRTLLSPSSIKVEGIEDFESPSMSSVNLNFDQTKLDNDDCSSVNTAITDTTTGDEGNADNDSATGIATETKSSSAPNEGLTKAAMMAMSEYEDRLSSGLVSPAPSFYSKEYDNEGTVDYSETSSLADPCSPSPGASGSAGKSGDSGDRPGQKRFRTQMTNLQLKVLKSCFNDYRTPTMLECEVLGNDIGLPKRVVQVWFQNARAKEKKSKLSMAKHFGINQTSYEGPKTECTLCGIKYSARLSVRDHIFSQQHISKVKDTIGSQLDKEKEYFDPATVRQLMAQQELDRIKKANEVLGLAAQQQGMFDNTPLQALNLPTAYPALQGIPPVLLPGLNSPSLPGFTPSNTALTSPKPNLMGLPSTTVPSPGLPTSGLPNKPSSASLSSPTPAQATMAMGPQQPPQQQQQQQQPQVQQPPPPPAAQPPPTPQLPLQQQQQRKDKDSEKVKEKEKAHKGKGEPLPVPKKEKGEAPTATAATISAPLPTMEYAVDPAQLQALQAALTSDPTALLTSQFLPYFVPGFSPYYAPQIPGALQSGYLQPMYGMEGLFPYSPALSQALMGLSPGSLLQQYQQYQQSLQEAIQQQQQRQLQQQQQQKVQQQQPKASQTPVPPGAPSPDKDPAKESPKPEEQKNTPREVSPLLPKLPEEPEAESKSADSLYDPFIVPKVQYKLVCRKCQAGFSDEEAARSHLKSLCFFGQSVVNLQEMVLHVPTGGGGGGSGGGGGGGGGGGGGGSYHCLACESALCGEEALSQHLESALHKHRTITRAARNAKEHPSLLPHSACFPDPSTASTSQSAAHSNDSPPPPSAAAPSSASPHASRKSWPQVVSRASAAKPPSFPPLSSSSTVTSSSCSTSGVQPSMPTDDYSEESDTDLSQKSDGPASPVEGPKDPSCPKDSGLTSVGTDTFRL

SEQ ID NO: 8450 - protein, 2789 aa, Homo sapiens
MRLGGGQLVSEELMNLGESFIQTNDPSLKLFQCAVCNKFTTDNLDMLGLHMNVERSLSEDEWKAVMGDSYQCKLCRYNTQLKANFQLHCKTDKHVQKYQLVAHIKEGGKANEWRLKCVAIGNPVHLKCNACDYYTNSLEKLRLHTVNSRHEASLKLYKHLQQHESGVEGESCYYHCVLCNYSTKAKLNLIQHVRSMKHQRSESLRKLQRLQKGLPEEDEDLGQIFTIRRCPSTDPEEAIEDVEGPSETAADPEELAKDQEGGASSSQAEKELTDSPATSKRISFPGSSESPLSSKRPKTAEEIKPEQMYQCPYCKYSNADVNRLRVHAMTQHSVQPMLRCPLCQDMLNNKIHLQLHLTHLHSVAPDCVEKLIMTVTTPEMVMPSSMFLPAAVPDRDGNSNLEEAGKQPETSEDLGKNILPSASTEQSGDLKPSPADPGSVREDSGFICWKKGCNQVFKTSAALQTHFNEVHAKRPQLPVSDRHVYKYRCNQCSLAFKTIEKLQLHSQYHVIRAATMCCLCQRSFRTFQALKKHLETSHLELSEADIQQLYGGLLANGDLLAMGDPTLAEDHTIIVEEDKEEESDLEDKQSPTGSDSGSVQEDSGSEPKRALPFRKGPNFTMEKFLDPSRPYKCTVCKESFTQKNILLVHYNSVSHLHKLKRALQESATGQPEPTSSPDNKPFKCNTCNVAYSQSSTLEIHMRSVLHQTKARAAKLEAASGSSNGTGNSSSISLSSSTPSPVSTSGSNTFTTSNPSSAGIAPSSNLLSQVPTESVGMPPLGNPIGANIASPSEPKEANRKKLADMIASRQQQQQQQQQQQQQQQQQQQAQTLAQAQAQVQAHLQQELQQQAALIQSQLFNPTLLPHFPMTTETLLQLQQQQHLLFPFYIPSAEFQLNPEVSLPVTSGALTLTGTGPGLLEDLKAQVQVPQQSHQQILPQQQQNQLSIAQSHSALLQPSQHPEKKNKLVIKEKEKESQRERDSAEGGEGNTGPKETLPDALKAKEKKELAPGGGSEPSMLPPRIASDARGNATKALLENFGFELVIQYNENKQKVQKKNGKTDQGENLEKLECDSCGKLFSNILILKSHQEHVHQNYFPFKQLERFAKQYRDHYDKLYPLRPQTPEPPPPPPPPPPPPLPAAPPQPASTPAIPASAPPITSPTIAPAQPSVPLTQLSMPMELPIFSPLMMQTMPLQTLPAQLPPQLGPVEPLPADLAQLYQHQLNPTLLQQQNKRPRTRITDDQLRVLRQYFDINNSPSEEQIKEMADKSGLPQKVIKHWFRNTLFKERQRNKDSPYNFSNPPITSLEELKIDSRPPSPEPPKQEYWGSKRSSRTRFTDYQLRVLQDFFDANAYPKDDEFEQLSNLLNLPTRVIVVWFQNARQKARKNYENQGEGKDGERRELTNDRYIRTSNLNYQCKKCSLVFQRIFDLIKHQKKLCYKDEDEEGQDDSQNEDSMDAMEILTPTSSSCSTPMPSQAYSAPAPSANNTASSAFLQLTAEAEELATFNSKTEAGDEKPKLAEAPSAQPNQTQEKQGQPKPELQQQEQPEQKTNTPQQKLPQLVSLPSLPQPPPQAPPPQCPLPQSSPSPSQLSHLPLKPLHTSTPQQLANLPPQLIPYQCDQCKLAFPSFEHWQEHQQLHFLSAQNQFIHPQFLDRSLDMPFMLFDPSNPLLASQLLSGAIPQIPASSATSPSTPTSTMNTLKRKLEEKASASPGENDSGTGGEEPQRDKRLRTTITPEQLEILYQKYLLDSNPTRKMLDHIAHEVGLKKRVVQVWFQNTRARERKGQFRAVGPAQAHRRCPFCRALFKAKTALEAHIRSRHWHEAKRAGYNLTLSAMLLDCDGGLQMKGDIFDGTSFSHLPPSSSDGQGVPLSPVSKTMELSPRTLLSPSSIKVEGIEDFESPSMSSVNLNFDQTKLDNDDCSSVNTAITDTTTGDEGNADNDSATGIATETKSSSAPNEGLTKAAMMAMSEYEDRLSSGLVSPAPSFYSKEYDNEGTVDYSETSSLADPCSPSPGASGSAGKSGDSGDRPGQKRFRTQMTNLQLKVLKSCFNDYRTPTMLECEVLGNDIGLPKRVVQVWFQNARAKEKKSKLSMAKHFGINQTSYEGPKTECTLCGIKYSARLSVRDHIFSQQHISKVKDTIGSQLDKEKEYFDPATVRQLMAQQELDRIKKANEVLGLAAQQQGMFDNTPLQALNLPTAYPALQGIPPVLLPGLNSPSLPGFTPSNTALTSPKPNLMGLPSTTVPSPGLPTSGLPNKPSSASLSSPTPAQATMAMGPQQPPQQQQQQQQPQVQQPPPPPAAQPPPTPQLPLQQQQQRKDKDSEKVKEKEKAHKGKGEPLPVPKKEKGEAPTATAATISAPLPTMEYAVDPAQLQALQAALTSDPTALLTSQFLPYFVPGFSPYYAPQIPGALQSGYLQPMYGMEGLFPYSPALSQALMGLSPGSLLQQYQQYQQSLQEAIQQQQQRQLQQQQQQKVQQQQPKASQTPVPPGAPSPDKDPAKESPKPEEQKNTPREVSPLLPKLPEEPEAESKSADSLYDPFIVPKVQYKLVCRKCQAGFSDEEAARSHLKSLCFFGQSVVNLQEMVLHVPTGGGGGGSGGGGGGGGGGGGGGSYHCLACESALCGEEALSQHLESALHKHRTITRAARNAKEHPSLLPHSACFPDPSTASTSQSAAHSNDSPPPPSAAAPSSASPHASRKSWPQVVSRASAAKPPSFPPLSSSSTVTSSSCSTSGVQPSMPTDDYSEESDTDLSQKSDGPASPVEGPKDPSCPKDSGLTSVGTDTFRL

SEQ ID NO: 8451 - protein, 241 aa, Homo sapiens
MFLTRSEYDRGVNTFSPEGRLFQVEYAIEAIKLGSTAIGIQTSEGVCLAVEKRITSPLMEPSSIEKIVEIDAHIGCAMSGLIADAKTLIDKARVETQNHWFTYNETMTVESVTQAVSNLALQFGEEDADPGAMSRPFGVALLFGGVDEKGPQLFHMDPSGTFVQCDARAIGSASEGAQSSLQEVYHKSMTLKEAIKSSLIILKQVMEEKLNATNIELATVQPGQNFHMFTKEELEEVIKDI

SEQ ID NO: 8452 - protein, 121 aa, Homo sapiens
MSGSTEVKPAVTTARKIQTRTFSLKELKEKARPNFSNQADHPVLAGTGFWPALPVRGEETTDLRKQAETAPDGPDSGEYLLHLILYNWCCSRYADRRQPQGTNARKWQGKKTEAWRGYNIT

SEQ ID NO: 8453 - protein, 1302 aa, Homo sapiens
MDDLKINTDITGAKEELLDDNNFISDKESGVHKPKDCQTSFQKNNTLTLPEELSKDKSENALSGGQSSLFIHAGAPTVSSENFILPKGAAVNGPVSHSSLTKTSNMNKGSVSLTTGQPVDQPTTESCSTLKVAADLQLSTPQKASQHQVLFLLSDVAHAKNPTHSNKKLPTSASVGCDIQNSVGSNIKSDGTLINQVEVGEDGEDLLVKDDCVNTVTGISSGTDGFRSENDTNWDPQKEFIQFLMTNEETVDKAPPHSKIGLEKKRKRKMDVSKITRYTEDCFSDSNCVPNKSKMQEVDFLEQNEELQAVDSQKYALSKVKPESTDEDLESVDAFQHLIYNPDKCGEESSPVHTSTFLSNTLKKKCEESDSESPATFSTEEPSFYPCTKCNVNFREKKHLHRHMMYHLDGNSHFRHLNVPRPYACRECGRTFRDRNSLLKHMIIHQERRQKLMEEIRELKELQDEGRSARLQCPQCVFGTNCPKTFVQHAKTHEKDKRYYCCEECNFMAVTENELECHRGIAHGAVVKCPMVTSDIAQRKTQKKTFMKDSVVGSSKKSATYICKMCPFTTSAKSVLKKHTEYLHSSSCVDSFGSPLGLDKRKNDILEEPVDSDSTKTLTKQQSTTFPKNSALKQDVKRTFGSTSQSSSFSKIHKRPHRIQKARKSIAQSGVNMCNQNSSPHKNVTIKSSVDQKPKYFHQAAKEKSNAKANSHYLYRHKYENYRMIKKSGESYPVHFKKEEASSLNSLHLFSSSSNSHNNFISDPHKPDAKRPESFKDHRRVAVKRVIKESKKESSVGGEDLDSYPDFLHKMTVVVLQKLNSAEKKDSYETEDESSWDNVELGDYTTQAIEDETYSDINQEHVNLFPLFKSKVEGQEPGENATLSYDQNDGFYFEYYEDTGSNNFLHEIHDPQHLETADASLSKHSSVFHWTDLSLEKKSCPYCPATFETGVGLSNHVRGHLHRAGLSYEARHVVSPEQIATSDKMQHFKRTGTGTPVKRVRKAIEKSETTSEHTCQLCGGWFDTKIGLSNHVRGHLKRLGKTKWDAHKSPICVLNEMMQNEEKYEKILKALNSRRIIPRPFVAQKLASSDDFISQNVIPLEAYRNGLKTEALSVSASEEEGLNFLNEYDETKPELPSGKKNQSLTLIELLKNKRMGEERNSAISPQKIHNQTARKRFVQKCVLPLNEDSPLMYQPQKMDLTMHSALDCKQKKSRSRSGSKKKMLTLPHGADEVYILRCRFCGLVFRGPLSVQEDWIKHLQRHIVNANLPRTGAGMVEVTSLLKKPASITETSFSLLMAEAAS

SEQ ID NO: 8454 - protein, 650 aa, Homo sapiens
MMYHLDGNSHFRHLNVPRPYACRECGRTFRDRNSLLKHMIIHQERRQKLMEEIRELKELQDEGRSARLQCPQCVFGTNCPKTFVQHAKTHEKDKRYYCCEECNFMAVTENELECHRGIAHGAVVKCPMVTSDIAQKKTQKKTFMKDSVVGSSKKSATYICKMCPFTTSAKSVLKKHTEYLHSSSCVDSFGSPLGLDKRKNDILEEPVDSDSTKTLTKQQSTTFPKNSALKQDVKRTFGSTSQSSSFSKIHKRPHRIQKARKSIAQSGVNMCNQNSSPHKNVTIKSSVDQKPKYFHQAAKEKSNAKANSHYLYRHKYENYRMIKKSGESYPVHFKKEEASSLNSLHLFSSSSNSHNNFISDPHKPDAKRPESFKDHRRVAVKRVIKESKKESSVGGEDLDSYPDFLHKMTVVVLQKLNSAEKKDSYETEDESSWDNVELGDYTTQAIEDETYSDINQEHVNLFPLFKSKVEGQEPGENATLSYDQNDGFYFEYYEDTGSNNFLHEIHDPQHLETADASLSKHSSVFHWTDLSLEKKSCPYCPATFETGVGLSNHVRGHLHRAGLSYEARHVVSPEQIATSDKMQHFKRTGTGTPVKRVRKAIEKSETTSEHTCQLCGGWFDTKIGLSNHVRSPLERLGKTKWDAHKSPIWV

SEQ ID NO: 8455 - protein, 239 aa, Homo sapiens
MQDPNTDTEWNDILDKKGILPTKESIKESEEKAEEEQHILQQSVVTTYEDMTLEELEDHEDEFNEEDEHAIEMYRWQRLAEGKAIKLKNKFGEVLEISGKYYVQEVTKASEGLWVILHLCKRGIPLCALINQHLSGLARKFPDVKFIKANSTTCIPNYPDRNLPMVFVYLEGDIKAQLIGPLVFGGMNLTRDELGWKLSESRAVKTDLEENPKKPIEGVLLSSVQSSVPMRRDSDSKGD

SEQ ID NO: 8456 - protein, 405 aa, Homo sapiens
PRVRKRRKWRPEPSLGVLDAERMASSSPDAPCSCDCFVSVPPASAIPAVIFAKNSDRPRDEVQEVVFIPAGTHVPGSRLQCTYIEVEQVGKTHAVILSRPSWLWGAEMGANELGVCIGNEAVWTKEPVGQGEALLGMDLLRLALERSSTAQEAVHVIAGLLDRYGQGGSCREDPEPFCYHNTFLLADRTEAWVLETAGSLWAAQRIQGGARNISNQLSIGTDISAEHPELRSHAKAQGNITAEVMMGILRDKESGICMDSGGFRTTASMVSVLPQDPTKPCVHFLTATPDPSRSVFKPFIFEVGVSQSPQVLSPTFGAQDPVRILPRFQTRVDRRHSLYRGHQAALGLMEDEQEQAQQLRKKQQRLEQEGLEALRGLLTGEQTPPAQGLGSLFQAFVEREEQAYA

SEQ ID NO: 8457 - protein, 1124 aa, Homo sapiens
GLSTRAGQHPSSCDRAQEEAETETMPGKLKVKIVAGRHLPVMDRASDLTDAFVEVKFGNTTFKTDVYLKSLNPQWNSEWFKFEVDDEDLQDEPLQITVLDHDTYSANDAIGKVYIDIDPLLYSEAATVISGWFPIYDTIHGIRGEINVVVKVDLFNDLNRFRQSSCGVKFFCTTSIPKCYRAVIIHGFVEELVVNEDPEYQWIDRIRTPRASNEARQRLISLMSGELQRKIGLKVLEMRGNAVVGYLQCFDLEGESGLVVRAIGTACTLDKLSSPAAFLPACNSPSKEMKESPLVHPPSHGCRSTHNSPIHTATGSRLTQNFSVSVPTLIYTGTRLLRLQSWGDAGHGQSGCRGRQAGMGSGSAGKEGGPFKALLRQQTQSALEQRGGSPHRFCRRREFPFFTLTAFPPGFLVHVGGVVSARSVKLLDRIHNPAFVGIMGNTRSYKLLDWNSFNSDEPETRDAWWAEIRQEIKSHAKALGCHAVVGYSESTSICEEVCILSASGTAAVLNPRFLQDGTVEGCLEQRLEENLPTRCGFCHIPYDELNMPFPAHLTYCYNCRKQKVPDVLFTTIDLPTDATVIGKGCLIQARLCRLKKKAQAEANATAISNLLPFMEYEVHTQLMNKLKLKGMNALFGLRIQITVGENMLMGLASATGVYLAALPTPGGIQIAGKTPNDGSYEQHISHMQKKINDTIAKNKELYEINPPEISEEIIGSPIPEPRQRSRLLRSQSESSDEVTELDLSHGKKDAFVLEIDDTDAMEDVHSLLTDVPPPSGFYSCNTEIMPGINNWTSEIQMFTSVRVIRLSSLNLTNQALNKNFNDLCENLLKSLYFKLRSMIPCCLCHVNFTVSLPEDELIQVTVTAVAITFDKNQALQTTKTPVEKSLQRASTDNEELLQFPLELCSDSLPSHPFPPAKEHLESASSNSGIPAAQRATSVDYSSFADRCSSWIELIKLKAQTIRRGSIKTTMTVEKASPVGDGNFRNRSAPPCANSTVGVVKMTPLSFIPGAKITKYLGIINMFFIRETTSLREEGGVSGFLHAFIAEVFAMVRAHVAALGGNAVVSYIMKQCVFMENPNKNQAQCLINVSGDAVVFVRESDLEVVSSQQPTTNCQSSCTEGEVTT

SEQ ID NO: 8458 - protein, 1005 aa, Homo sapiens
AETETMPGKLKVKIVAGRHLPVMDRASDLTDAFVEVKFGNTTFKTDVYLKSLNPQWNSEWFKFEVDDEDLQDEPLQITVLDHDTYSANDAIGKVYIDIDPLLYSEAATVISGWFPIYDTIHGIRGEINVVVKVDLFNDLNRFRQSSCGVKFFCTTSIPKCYRAVIIHGFVEELVVNEDPEYQWIDRIRTPRASNEARQRLISLMSGELQRKIGLKVLEMRGNAVVGYLQCFDLEGESGLVVRAIGTACTLDKLSSPAAFLPACNSPSKEMKEIPFNEDPNPNTHSSGPSTPLKNQTYSFSPSKSYSRQSSSSDTDLSLTPKTGMGSGSAGKEGGPFKALLRQQTQSALEQREFPFFTLTAFPPGFLVHVGGVVSARSVKLLDRIHNPDEPETRDAWWAEIRQEIKSHAKALGCHAVVGYSESTSICEEVCILSASGTAAVLNPRFLQDGTVEGCLEQRLEENLPTRCGFCHIPYDELNMPFPAHLTYCYNCRKQKVPDVLFTTIDLPTDATVIGKGCLIQARLCRLKKKAQAEANATAISNLLPFMEYEVHTQLMNKLKLKGMNALFGLRIQITVGENMLMGLASATGVYLAALPTPGGIQIAGKTPNDGSYEQHISHMQKKINDTIAKNKELYEINPPEISEEIIGSPIPEPRQRSRLLRSQSESSDEVTELDLSHGKKDAFVLEIDDTDAMEDVHSLLTDVPPPSGFYSCNTEIMPGINNWTSEIQMFTSVRVIRLSSLNLTNQALNKNFNDLCENLLKSLYFKLRSMIPCCLCHVNFTVSLPEDELIQVTVTAVAITFDKNQALQTTKTPVEKSLQRASTDNEELLQFPLELCSDSLPSHPFPPAKAMTVEKASPVGDGNFRNRSAPPCANSTVGVVKMTPLSFIPGAKITKYLGIINMFFIRETTSLREEGGVSGFLHAFIAEVFAMVRAHVAALGGNAVVSYIMKQCVFMENPNKNQAQCLINVSGDAVVFVRESDLEVVSSQQPTTNCQSSCTEGEVTT

SEQ ID NO: 8459 - protein, 2644 aa, Homo sapiens
MGEHGLELASMIPALRELGSATPEEYNTVVQKPRQILCQFIDRILTDVNVVAVELVKKTDSQPTSVMLLDFIQHIMKSSPLMFVNVSGSHERKGSCIEFSNWIITRLLRIAATPSCHLLHKKICEVICSLLFLFKSKSPAIFGVLTKELLQLFEDLVYLHRRNVMGHAVEWPVVMSRFLSQLDEHMGYLQSAPLQLMSMQNLEFIEVTLLMVLTRIIAIVFFRRQELLLWQIGCVLLEYGSPKIKSLAISFLTELFQLGGLPAQPASTFFSSFLELLKHLVEMDTDQLKLYEEPLSKLIKTLFPFEAEAYRNIEPVYLNMLLEKLCVMFEDGVLMRLKSDLLKAALCHLLQYFLKFVPAGYESALQVRKVYVRNICKALLDVLGIEVDAEYLLGPLYAALKMESMEIIEEIQCQTQQENLSSNSDGISPKRRRLSSSLNPSKRAPKQTEEIKHVDMNQKSILWSALKQKAESLQISLEYSGLKNPVIEMLEGIAVVLQLTALCTVHCSHQNMNCRTFKDCQHKSKKKPSVVITWMSLDFYTKVLKSCRSLLESVQKLDLEATIDKVVKIYDALIYMQVNSSFEDHILEDLCGMLSLPWIYSHSDDGCLKLTTFAANLLTLSCRISDSYSPQAQSRCVFLLTLFPRRIFLEWRTAVYNWALQSSHEVIRASCVSGFFILLQQQNSCNRVPKILIDKVKDDSDIVKKEFASILGQLVCTLHGMFYLTSSLTEPFSEHGHVDLFCRNLKATSQHECSSSQLKASVCKPFLFLLKKKIPSPVKLAFIDNLHHLCKHLDFREDETDVKAVLGTLLNLMEDPDKDVRVAFSGNIKHILESLDSEDGFIKELFVLRMKEAYTHAQISRNNELKDTLILTTGDIGRAAKGDLVPFALLHLLHCLLSKSASVSGAAYTEIRALVAAKSVKLQSFFSQYKKPICQFLVESLHSSQMTALPNTPCQNADVRKQDVAHQREMALNTLSEIANVFDFPDLNRFLTRTLQVLLPDLAAKASPAASALIRTLGKQLNVNRREILINNFKYIFSHLVCSCSKDELERALHYLKNETEIELGSLLRQDFQGLHNELLLRIGEHYQQVFNGLSILASFASSDDPYQGPRDIISPELMADYLQPKLLGILAFFNMQLLSSSVGIEDKKMALNSLMSLMKLMGPKHVSSVRVKMMTTLRTGLRFKDDFPELCCRAWDCFVRCLDHACLGSLLSHVIVALLPLIHIQPKETAAIFHYLIIENRDAVQDFLHEIYFLPDHPELKKIKAVLQEYRKETSESTDLQTTLQLSMKAIQHENVDVRIHALTSLKETLYKNQEKLIKYATDSETVEPIISQLVTVLLKGCQDANSQARLLCGECLGELGAIDPGRLDFSTTETQGKDFTFVTGVEDSSFAYGLLMELTRAYLAYADNSRAQDSAAYAIQELLSIYDCREMETNGPGHQLWRRFPEHVREILEPHLNTRYKSSQKSTDWSGVKKPIYLSKLGSNFAEWSASWAGYLITKVRHDLASKIFTCCSIMMKHDFKVTIYLLPHILVYVLLGCNQEDQQEVYAEIMAVLKHDDQHTINTQDIASDLCQLSTQTVFSMLDHLTQWARHKFQALKAEKCPHSKSNRNKVDSMVSTVDYEDYQSVTRFLDLIPQDTLAVASFRSKAYTRAVMHFESFITEKKQNIQEHLGFLQKLYAAMHEPDGVAGVSAIRKAEPSLKEQILEHESLGLLRDATACYDRAIQLEPDQIIHYHGVVKSMLGLGQLSTVITQVNGVHANRSEWTDELNTYRVEAAWKLSQWDLVENYLAADGKSTTWSVRLGQLLLSAKKRDITAFYDSLKLVRAEQIVPLSAASFERGSYQRGYEYIVRLHMLCELEHSIKPLFQHSPGDSSQEDSLNWVARLEMTQNSYRAKEPILALRRALLSLNKRPDYNEMVGECWLQSARVARKAGHHQTAYNALLNAGESRLAELYVERAKWLWSKGDVHQALIVLQKGVELCFPENETPPEGKNMLIHGRAMLLVGRFMEETANFESNAIMKKYKDVTACLPEWEDGHFYLAKYYDKLMPMVTDNKMEKQGDLIRYIVLHFGRSLQYGNQFIYQSMPRMLTLWLDYGTKAYEWEKAGRSDRVQMRNDLGKINKVITEHTNYLAPYQFLTAFSQLISRICHSHDEVFVVLMEIIAKVFLAYPQQAMWMMTAVSKSSYPMRVNRCKEILNKAIHMKKSLEKFVGDATRLTDKLLELCNKPVDGSSSTLSMSTHFKMLKKLVEEATFSEILIPLQSVMIPTLPSILGTHANHASHEPFPGHWAYIAGFDDMVEILASLQKPKKISLKGSDGKFYIMMCKPKDDLRKDCRLMEFNSLINKCLRKDAESRRRELHIRTYAVIPLNDECGIIEWVNNTAGLRPILTKLYKEKGVYMTGKELRQCMLPKSAALSEKLKVFREFLLPRHPPIFHEWFLRTFPDPTSWYSSRSAYCRSTAVMSMVGYILGLGDRHGENILFDSLTGECVHVDFNCLFNKGETFEVPEIVPFRLTHNMVNGMGPMGTEGLFRRACEVTMRLMRDQREPLMSVLKTFLHDPLVEWSKPVKGHSKAPLNETGEVVNEKAKTHVLDIEQRLQGVIKTRNRVTGLPLSIEGHVHYLIQEATDENLLCQMYLGWTPYM

SEQ ID NO: 8460 - protein, 1032 aa, Homo sapiens
MAETNNECSIKVLCRFRPLNQAEILRGDKFIPIFQGDDSVVIGGKPYVFDRVFPPNTTQEQVYHACAMQIVKDVLAGYNGTIFAYGQTSSGKTHTMEGKLHDPQLMGIIPRIARDIFNHIYSMDENLEFHIKVSYFEIYLDKIRDLLDVTKTNLSVHEDKNRVPFVKGCTERFVSSPEEILDVIDEGKSNRHVAVTNMNEHSSRSHSIFLINIKQENMETEQKLSGKLYLVDLAGSEKVSKTGAEGAVLDEAKNINKSLSALGNVISALAEGTKSYVPYRDSKMTRILQDSLGGNCRTTMFICCSPSSYNDAETKSTLMFGQRAKTIKNTASVNLELTAEQWKKKYEKEKEKTKAQKETIAKLEAELSRWRNGENVPETERLAGEEAALGAELCEETPVNDNSSIVVRIAPEERQKYEEEIRRLYKQLDDKDDEINQQSQLIEKLKQQMLDQEELLVSTRGDNEKVQRELSHLQSENDAAKDEVKEVLQALEELAVNYDQKSQEVEEKSQQNQLLVDELSQKVATMLSLESELQRLQEVSGHQRKRIAEVLNGLMKDLSEFSVIVGNGEIKLPVEISGAIEEEFTVARLYISKIKSEVKSVVKRCRQLENLQVECHRKMEVTGRELSSCQLLISQHEAKIRSLTEYMQSVELKKRHLEESYDSLSDELAKLQAQETVHEVALKDKEPDTQDADEVKKALELQMESHREAHHRQLARLRDEINEKQKTIDELKDLNQKLQLELEKLQADYEKLKSEEHEKSTKLQELTFLYERHEQSKQDLKGLEETVARELQTLHNLRKLFVQDVTTRVKKSAEMEPEDSGGIHSQKQKISFLENNLEQLTKVHKQLVRDNADLRCELPKLEKRLRATAERVKALEGALKEAKEGAMKDKRRYQQEVDRIKEAVRYKSSGKRAHSAQIAKPVRPGHYPASSPTNPYGTRSPECISYTNSLFQNYQNLYLQATPSSTSDMYFANSCTSSGATSSGGPLASYQKANMDNGNATDINDNRSDLPCGYEAEDQAKLFPLHQETAAS

SEQ ID NO: 8461 - protein, 837 aa, Homo sapiens
MAAPGAPAEYGYIRTVLGQQILGQLDSSSLALPSEAKLKLAGSSGRGGQTVKSLRIQEQVQQTLARKGRSSVGNGNLHRTSSVPEYVYNLHLVENDFVGGRSPVPKTYDMLKAGTTATYEGRWGRGTAQYSSQKSVEERSLRHPLRRLEISPDSSPERAHYTHSDYQYSQRSQAGHTLHHQESRRAALLVPPRYARSEIVGVSRAGTTSRQRHFDTYHRQYQHGSVSDTVFDSIPANPALLTYPRPGTSRSMGNLLEKENYLTAGLTVGQVRPLVPLQPVTQNRASRSSWHQSSFHSTRTLREAGPSVAVDSSGRRAHLTVGQAAAGGSGNLLTERSTFTDSQLGNADMEMTLERAVSMLEADHMPPSRISAAATFIQHECFQKSEARKRVNQLRGILKLLQLLKVQNEDVQRAVCGALRNLVFEDNDNKLEVAELNGVPRLLQVLKQTRDLETKKQITGLLWNLSSNDKLKNLMITEALLTLTENIIIPFSGWPEGDYPKANGLLDFDIFYNVTGCLRNMSSAGADGRKAMRRCDGLIDSLVHYVRGTIADYQPDDKATENCVCILHNLSYQLEAELPEKYSQNIYIQNRNIQTDNNKSIGCFGSRSRKVKEQYQDVPMPEEKSNPKGVEWLWHSIVIRMYLSLIAKSVRNYTQEASLGALQNLTAGSGPMPTSVAQTVVQKESGLQHTRKMLHVGDPSVKKTAISLLRNLSRNLSLQNEIAKETLPDLVSIIPDTVPSTDLLIETTASACYTLNNIIQNSYQNARDLLNTGGIQKIMAISAGDAYASNKASKAASVLLYSLWAHTELHHAYKKAQFKKTDFVNSRTAKAYHSLKD

SEQ ID NO: 8462 - protein, 881 aa, Homo sapiens
MAAPGAPAEYGYIRTVLGQQILGQLDSSSLALPSEAKLKLAGSSGRGGQTVKSLRIQEQVQQTLARKGRSSVGNGNLHRTSSVPEYVYNLHLVENDFVGGRSPVPKTYDMLKAGTTATYEGRWGRGTAQYSSQKSVEERSLRHPLRRLEISPDSSPERAHYTHSDYQYSQRSQAGHTLHHQESRRAALLVPPRYARSEIVGVSRAGTTSRQRHFDTYHRQYQHGSVSDTVFDSIPANPALLTYPRPGTSRSMGNLLEKENYLTAGLTVGQVRPLVPLQPVTQNRASRSSWHQSSFHSTRTLREAGPSVAVDSSGRRAHLTVGQAAAGGSGNLLTERSTFTDSQLGNADMEMTLERAVSMLEADHMPPSRISAAATFIQHECFQKSEARKRVNQLRGILKLLQLLKVQNEDVQRAVCGALRNLVFEDNDNKLEVAELNGVPRLLQVLKQTRDLETKKQITDHTVNLRSRNGWPGAVAHACNPSTLGGQGGRITRSGVRDQPDQHGLLWNLSSNDKLKNLMITEALLTLTENIIIPFSGWPEGDYPKANGLLDFDIFYNVTGCLRNMSSAGADGRKAMRRCDGLIDSLVHYVRGTIADYQPDDKATENCVCILHNLSYQLEAELPEKYSQNIYIQNRNIQTDNNKSIGCFGSRSRKVKEQYQDVPMPEEKSNPKGVEWLWHSIVIRMYLSLIAKSVRNYTQEASLGALQNLTAGSGPMPTSVAQTVVQKESGLQHTRKMLHVGDPSVKKTAISLLRNLSRNLSLQNEIAKETLPDLVSIIPDTVPSTDLLIETTASACYTLNNIIQNSYQNARDLLNTGGIQKIMAISAGDAYASNKASKAASVLLYSLWAHTELHHAYKKAQFKKTDFVNSRTAKAYHSLKD

SEQ ID NO: 8463 - protein, 674 aa, Homo sapiens
MPSYTVTVATGSQWFAGTDDYIYLSLVGSAGCSEKHLLDKPFYNDFERGAVDSYDVTVDEELGEIQLVRIEKRKYWLNDDWYLKYITLKTPHGDYIEFPCYRWITGDVEVVLRDGRAKLARDDQIHILKQHRRKELETRQKQYRWMEWNPGFPLSIDAKCHKDLPRDIQFDSEKGVDFVLNYSKAMENLFINRFMHMFQSSWNDFADFEKIFVKISNTISERVMNHWQEDLMFGYQFLNGCNPVLIRRCTELPEKLPVTTEMVECSLERQLSLEQEVQQGNIFIVDFELLDGIDANKTDPCTLQFLAAPICLLYKNLANKIVPIAIQLNQIPGDENPIFLPSDAKYDWLLAKIWVRSSDFHVHQTITHLLRTHLVSEVFGIAMYRQLPAVHPIFKLLVAHVRFTIAINTKAREQLICECGLFDKANATGGGGHVQMVQRAMKDLTYASLCFPEAIKARGMESKEDIPYYFYRDDGLLVWEAIRTFTAEVVDIYYEGDQVVEEDPELQDFVNDVYVYGMRGRKSSGFPKSVKSREQLSEYLTVVIFTASAQHAAVNFGQYDWCSWIPNAPPTMRAPPPTAKGVVTIEQIVDTLPDRGRSCWHLGAVWALSQFQENELFLGMYPEEHFIEKPVKEAMARFRKNLEAIVSVIAERNKKKQLPYYYLSPDRIPNSVAI

SEQ ID NO: 8464 - protein, 599 aa, Homo sapiens [sequence omitted]

SEQ ID NO: 8465 - protein, 481 aa, Homo sapiens
MDIKNSPSSLNSPSSYNCSQSILPLEHGSIYIPSSYVDSHHEYPAMTFYSPAVMNYSIPSNVTNLEGGPGRQTTSPNVLWPTPGHLSPLVVHRQLSHLYAEPQKSPWCEARSLEHTLPVNRETLKRKVSGNRCASPVTGPGSKRDAHFCAVCSDYASGYHYGVWSCEGCKAFFKRSIQGHNDYICPATNQCTIDKNRRKSCQACRLRKCYEVGMVKCGSRRERCGYRLVRRQRSADEQLHCAGKAKRSGGHAPRVRELLLDALSPEQLVLTLLEAEPPHVLISRPSAPFTEASMMMSLTKLADKELVHMISWAKKIPGFVELSLFDQVRLLESCWMEVLMMGLMWRSIDHPGKLIFAPDLVLDRDEGKCVEGILEIFDMLLATTSRFRELKLQHKEYLCVKAMILLNSSMYPLVTATQDADSSRKLAHLLNAVTDALVWVIAKSGISSQQQSMRLANLLMLLSHVRHARWGEKQFIHLKLS

SEQ ID NO: 8466 - protein, 472 aa, Homo sapiens
MDIKNSPSSLNSPSSYNCSQSILPLEHGSIYIPSSYVDSHHEYPAMTFYSPAVMNYSIPSNVTNLEGGPGRQTTSPNVLWPTPGHLSPLVVHRQLSHLYAEPQKSPWCEARSLEHTLPVNRETLKRKVSGNRCASPVTGPGSKRDAHFCAVCSDYASGYHYGVWSCEGCKAFFKRSIQGHNDYICPATNQCTIDKNRRKSCQACRLRKCYEVGMVKCGSRRERCGYRLVRRQRSADEQLHCAGKAKRSGGHAPRVRELLLDALSPEQLVLTLLEAEPPHVLISRPSAPFTEASMMMSLTKLADKELVHMISWAKKIPGFVELSLFDQVRLLESCWMEVLMMGLMWRSIDHPGKLIFAPDLVLDRDEGKCVEGILEIFDMLLATTSRFRELKLQHKEYLCVKAMILLNSSMYPLVTATQDADSSRKLAHLLNAVTDALVWVIAKSGISSQQQSMRLANLLMLLSHVRHARYAP

SEQ ID NO: 8467 - protein, 495 aa, Homo sapiens
MDIKNSPSSLNSPSSYNCSQSILPLEHGSIYIPSSYVDSHHEYPAMTFYSPAVMNYSIPSNVTNLEGGPGRQTTSPNVLWPTPGHLSPLVVHRQLSHLYAEPQKSPWCEARSLEHTLPVNRETLKRKVSGNRCASPVTGPGSKRDAHFCAVCSDYASGYHYGVWSCEGCKAFFKRSIQGHNDYICPATNQCTIDKNRRKSCQACRLRKCYEVGMVKCGSRRERCGYRLVRRQRSADEQLHCAGKAKRSGGHAPRVRELLLDALSPEQLVLTLLEAEPPHVLISRPSAPFTEASMMMSLTKLADKELVHMISWAKKIPGFVELSLFDQVRLLESCWMEVLMMGLMWRSIDHPGKLIFAPDLVLDRDEGKCVEGILEIFDMLLATTSRFRELKLQHKEYLCVKAMILLNSSMYPLVTATQDADSSRKLAHLLNAVTDALVWVIAKSGISSQQQSMRLANLLMLLSHVRHARAEKASQTLTSFGMKMETLLPEATMEQ

SEQ ID NO: 8468 - protein, 513 aa, Homo sapiens
MDIKNSPSSLNSPSSYNCSQSILPLEHGSIYIPSSYVDSHHEYPAMTFYSPAVMNYSIPSNVTNLEGGPGRQTTSPNVLWPTPGHLSPLVVHRQLSHLYAEPQKSPWCEARSLEHTLPVNRETLKRKVSGNRCASPVTGPGSKRDAHFCAVCSDYASGYHYGVWSCEGCKAFFKRSIQGHNDYICPATNQCTIDKNRRKSCQACRLRKCYEVGMVKCGSRRERCGYRLVRRQRSADEQLHCAGKAKRSGGHAPRVRELLLDALSPEQLVLTLLEAEPPHVLISRPSAPFTEASMMMSLTKLADKELVHMISWAKKIPGFVELSLFDQVRLLESCWMEVLMMGLMWRSIDHPGKLIFAPDLVLDRDEGKCVEGILEIFDMLLATTSRFRELKLQHKEYLCVKAMILLNSSMYPLVTATQDADSSRKLAHLLNAVTDALVWVIAKSGISSQQQSMRLANLLMLLSHVRHASSLSLSWRLFMLREASCHGVRQTPGGAHMSVSRSRSFEACQQPRE

SEQ ID NO: 8469 - protein, 530 aa, Homo sapiens
MDIKNSPSSLNSPSSYNCSQSILPLEHGSIYIPSSYVDSHHEYPAMTFYSPAVMNYSIPSNVTNLEGGPGRQTTSPNVLWPTPGHLSPLVVHRQLSHLYAEPQKSPWCEARSLEHTLPVNRETLKRKVSGNRCASPVTGPGSKRDAHFCAVCSDYASGYHYGVWSCEGCKAFFKRSIQGHNDYICPATNQCTIDKNRRKSCQACRLRKCYEVGMVKCGSRRERCGYRLVRRQRSADEQLHCAGKAKRSGGHAPRVRELLLDALSPEQLVLTLLEAEPPHVLISRPSAPFTEASMMMSLTKLADKELVHMISWAKKIPGFVELSLFDQVRLLESCWMEVLMMGLMWRSIDHPGKLIFAPDLVLDRDEGKCVEGILEIFDMLLATTSRFRELKLQHKEYLCVKAMILLNSSMYPLVTATQDADSSRKLAHLLNAVTDALVWVIAKSGISSQQQSMRLANLLMLLSHVRHASNKGMEHLLNMKCKNVVPVYDLLLEMLNAHVLRGCKSSITGSECSPAEDSKSKEGSQNPQSQ

SEQ ID NO: 8470 - protein, 5184 aa, Homo sapiens
MATSGGEEAAAAAPAPGTPATGADTTPGWEVAVRPLLSASYSAFEMKELPQLVASVIESESEILHHEKQYEPFYSSFVALSTHYITTVCSLIPRNQLQSVAAACKVLIEFSLLRLENPDEACAVSQKHLILLIKGLCTGCSRLDRTEIITFTAMMKSAKLPQTVKTLSDVEDQKELASPVSPELRQKEVQMNFLNQLTSVFNPRTVASQPISTQTLVEGENDEQSSTDQASAIKTKNVFIAQNVASLQELGGSEKLLRVCLNLPYFLRYINRFQDAVLANSFFIMPATVADATAVRNGFHSLVIDVTMALDTLSLPVLEPLNPSRLQDVTVLSLSCLYAGVSVATCMAILHVGSAQQVRTGSTSSKEDDYESDAATIVQKCLEIYDMIGQAISSSRRAGGEHYQNFQLLGAWCLLNSLFLILNLSPTALADKGKEKDPLAALRVRDILSRTKEGVGSPKLGPGKGHQGFGVLSVILANHAIKLLTSLFQDLQVEALHKGWETDGPPAALSIMAQSTSIQRIQRLIDSVPLMNLLLTLLSTSYRKACVLQRQRKGSMSSDASASTDSNTYYEDDFSSTEEDSSQDDDSEPILGQWFEETISPSKEKAAPPPPPPPPPLESSPRVKSPSKQAPGEKGNILASRKDPELFLGLASNILNFITSSMLNSRNNFIRNYLSVSLSEHHMATLASIIKEVDKDGLKGSSDEEFAAALYHFNHSLVTSDLQSPNLQNTLLQQLGVAPFSEGPWPLYIHPQSLSVLSRLLLIWQHKASAQGDPDVPECLKVWDRFLSTMKQNALQGVVPSETEDLNVEHLQMLLLIFHNFTETGRRAILSLFVQIIQELSVNMDAQMRFVPLILARLLLIFDYLLHQYSKAPVYLFEQVQHNLLSPPFGWASGSQDSNSRRATTPLYHGFKEVEENWSKHFSSDAVPHPRFYCVLSPEASEDDLNRLDSVACDVLFSKLVKYDELYAALTALLAAGSQLDTVRRKENKNVTALEACALQYYFLILWRILGILPPSKTYINQLSMNSPEMSECDILHTLRWSSRLRISSYVNWIKDHLIKQGMKAEHASSLLELASTTKCSSVKYDVEIVEEYFARQISSFCSIDCTTILQLHEIPSLQSIYTLDAAISKVQVSLDEHFSKMAAETDPHKSSEITKNLLPATLQLIDTYASFTRAYLLQNFNEEGTTEKPSKEKLQGFAAVLAIGSSRCKANTLGPTLVQNLPSSVQTVCESWNNINTNEFPNIGSWRNAFANDTIPSESYISAVQAAHLGTLCSQSLPLAASLKHTLLSLVRLTGDLIVWSDEMNPPQVIRTLLPLLLESSTESVAEISSNSLERILGPAESDEFLARVYEKLITGCYNILANHADPNSGLDESILEECLQYLEKQLESSQARKAMEEFFSDSGELVQIMMATANENLSAKFCNRVLKFFTKLFQLTEKSPNPSLLHLCGSLAQLACVEPVRLQAWLTRMTTSPPKDSDQLDVIQENRQLLQLLTTYIVRENSQVGEGVCAVLLGTLTPMATEMLANGDGTGFPELMVVMATLASAGQGAGHLQLHNAAVDWLSRCKKYLSQKNVVEKLNANVMHGKHVMILECTCHIMSYLADVTNALSQSNGQGPSHLSVDGEERAIEVDSDWVEELAVEEEDSQAEDSDEDSLCNKLCTFTITQKEFMNQHWYHCHTCKMVDGVGVCTVCAKVCHKDHEISYAKYGSFFCDCGAKEDGSCLALVKRTPSSGMSSTMKESAFQSEPRISESLVRHASTSSPADKAKVTISDGKVADEEKPKKSSLCRTVEGCREELQNQANFSFAPLVLDMLNFLMDAIQTNFQQASAVGSSSRAQQALSELHTVEKAVEMTDQLMVPTLGSQEGAFENVRMNYSGDQGQTIRQLISAHVLRRVAMCVLSSPHGRRQHLAVSHEKGKITVLQLSALLKQADSSKRKLTLTRLASAPVPFTVLSLTGNPCKEDYLAVCGLKDCHVLTFSSSGSVSDHLVLHPQLATGNFIIKAVWLPGSQTELAIVTADFVKIYDLCVDALSPTFYFLLPSSKIRDVTFLFNEEGKNIIVIMSSAGYIYTQLMEEASSAQQGPFYVTNVLEINHEDLKDSNSQVAGGGVSVYYSHVLQMLFFSYCQGKSFAATISRTTLEVLQLFPINIKSSNGGSKTSPALCQWSEVMNHPGLVCCVQQTTGVPLVVMVKPDTFLIQEIKTLPAKAKIQDMVAIRHTACNEQQRTTMILLCEDGSLRIYMANVENTSYWLQPSLQPSSVISIMKPVRKRKTATITTRTSSQVTFPIDFFEHNQQLTDVEFGGNDLLQVYNAQQIKHRLNSTGMYVANTKPGGFTIEISNNNSTMVMTGMRIQIGTQAIERAPSYIEIFGRTMQLNLSRSRWFDFPFTREEALQADKKLNLFIGASVDPAGVTMIDAVKIYGKTKEQFGWPDEPPEEFPSASVSNICPSNLNQSNGTGDSDSAAPTTTSGTVLERLVVSSLEALESCFAVGPIIEKARRNKNAAQELATLLLSLPAPASVQQQSKSLLASLHTSRSAYHSHKDQALLSKAVQCLNTSSKEGKDLDPEVFQRLVITARSIAIMRPNNLVHFTESKLPQMETEGMDEGKEPQKQLEGDCCSFITQLVNHFWKLHASKPKNAFLAPACLPGLTHIEATVNALVDIIHGYCTCELDCINTASKIYMQMLLCPDPAVSFSCKQALIRVLRPRNKRRHVTLPSSPRSNTPMGDKDDDDDDDADEKMQSSGIPNGGHIRQESQEQSEVDHGDFEMVSESMVLETAENVNNGNPSPLEALLAGAEGFPPMLDIPPDADDETMVELAIALSLQQDQQGSSSSALGLQSLGLSGQAPSSSSLDAGTLSDTTASAPASDDEGSTAATDGSTLRTSPADHGGSVGSESGGSAVDSVAGEHSVSGRSSAYGDATAEGHPAGPGSVSSSTGAISTTTGHQEGDGSEGEGEGETEGDVHTSNRLHMVRLMLLERLLQTLPQLRNVGGVRAIPYMQVILMLTTDLDGEDEKDKGALDNLLSQLIAELGMDKKDVSKKNERSALNEVHLVVMRLLSVFMSRTKSGSKSSICESSSLISSATAAALLSSGAVDYCLHVLKSLLEYWKSQQNDEEPVATSQLLKPHTTSSPPDMSPFFLRQYVKGHAADVFEAYTQLLTEMVLRLPYQIKKITDTNSRIPPPVFDHSWFYFLSEYLMIQQTPFVRRQVRKLLLFICGSKEKYRQLRDLHTLDSHVRGIKKLLEEQGIFLRASVVTASSGSALQYDTLISLMEHLKACAEIAAQRTINWQKFCIKDDSVLYFLLQVSFLVDEGVSPVLLQLLSCALCGSKVLAALAASSGSSSASSSSAPVAASSGQATTQSKSSTKKSKKEEKEKEKDGETSGSQEDQLCTALVNQLNKFADKETLIQFLRCFLLESNSSSVRWQAHCLTLHIYRNSSKSQQELLLDLMWSIWPELPAYGRKAAQFVDLLGYFSLKTPQTEKKLKEYSQKAVEILRTQNHILTNHPNSNIYNTLSGLVEFDGYYLESDPCLVCNNPEVPFCYIKLSSIKVDTRYTTTQQVVKLIGSHTISKVTVKIGDLKRTKMVRTINLYYNNRTVQAIVELKNKPARWHKAKKVQLTPGQTEVKIDLPLPIVASNLMIEFADFYENYQASTETLQCPRCSASVPANPGVCGNCGENVYQCHKCRSINYDEKDPFLCNACGFCKYARFDFMLYAKPCCAVDPIENEEDRKKAVSNINTLLDKADRVYHQLMGHRPQLENLLCKVNEAAPEKPQDDSGTAGGISSTSASVNRYILQLAQEYCGDCKNSFDELSKIIQKVFASRKELLEYDLQQREAATKSSRTSVQPTFTASQYRALSVLGCGHTSSTKCYGCASAVTEHCITLLRALATNPALRHILVSQGLIRELFDYNLRRGAAAMREEVRQLMCLLTRDNPEATQQMNDLIIGKVSTALKGHWANPDLASSLQYEMLLLTDSISKEDSCWELRLRCALSLFLMAVNIKTPVVVENITLMCLRILQKLIKPPAPTSKKNKDVPVEALTTVKPYCNEIHAQAQLWLKRDPKASYDAWKKCLPIRGIDGNGKAPSKSELRHLYLTEKYVWRWKQFLSRRGKRTSPLDLKLGHNNWLRQVLFTPATQAARQAACTIVEALATIPSRKQQVLDLLTSYLDELSIAGECAAEYLALYQKLITSAHWKVYLAARGVLPYVGNLITKEIARLLALEEATLSTDLQQGYALKSLTGLLSSFVEVESIKRHFKSRLVGTVLNGYLCLRKLVVQRTKLIDETQDMLLEMLEDMTTGTESETKAFMAVCIETAKRYNLDDYRTPVFIFERLCSIIYPEENEVTEFFVTLEKDPQQEDFLQGRMPGNPYSSNEPGIGPLMRDIKNKICQDCDLVALLEDDSGMELLVNNKIISLDLPVAEVYKKVWCTTNEGEPMRIVYRMRGLLGDATEEFIESLDSTTDEEEDEEEVYKMAGVMAQCGGLECMLNRLAGIRDFKQGRHLLTVLLKLFSYCVKVKVNRQQLVKLEMNTLNVMLGTLNLALVAEQESKDSGGAAVAEQVLSIMEIILDESNAEPLSEDKGNLLLTGDKDQLVMLLDQINSTFVRSNPSVLQGLLRIIPYLSFGEVEKMQILVERFKPYCNFDKYDEDHSGDDKVFLDCFCKIAAGIKNNSNGHQLKDLILQKGITQNALDYMKKHIPSAKNLDADIWKKFLSRPALPFILRLLRGLAIQHPGTQVLIGTDSIPNLHKLEQVSSDEGIGTLAENLLEALREHPDVNKKIDAARRETRAEKKRMAMAMRQKALGTLGMTTNEKGQVVTKTALLKQMEELIEEPGLTCCICREGYKFQPTKVLGIYTFTKRVALEEMENKPRKQQGYSTVSHFNIVHYDCHLAAVRLARGREEWESAALQNANTKCNGLLPVWGPHVPESAFATCLARHNTYLQECTGQREPTYQLNIHDIKLLFLRFAMEQSFSADTGGGGRESNIHLIPYIIHTVLYVLNTTRATSREEKNLQGFLEQPKEKWVESAFEVDGPYYFTVLALHILPPEQWRATRVEILRRLLVTSQARAVAPGGATRLTDKAVKDYSAYRSSLLFWALVDLIYNMFKKVPTSNTEGGWSCSLAEYIRHNDMPIYEAADKALKTFQEEFMPVETFSEFLDVAGLLSEITDPESFLKDLLNSVP

SEQ ID NO: 8471 - protein, 1091 aa, Homo sapiens
MCRKKPDTMILTQIEAKEACDWLRATGFPQYAQLYEDFLFPIDISLVKREHDFLDRDAIEALCRRLNTLNKCAVMKLEISPHRKRSDDSDEDEPCAISGKWTFQRDSKRWSRLEEFDVFSPKQDLVPGSPDDSHPKDGPSPGGTLMDLSERQEVSSVRSLSSTGSLPSHAPPSEDAATPRTNSVISVCSSSNLAGNDDSFGSLPSPKELSSFSFSMKGHEKTAKSKTRSLLKRMESLKLKSSHHSKHKAPSKLGLIISGPILQEGMDEEKLKQLNCVEISALNGNRINVPMVRKRSVSNSTQTSSSSSQSETSSAVSTPSPVTRTRSLSACNKRVGMYLEGFDPFNQSTFNNVMEQNFKNRESYPEDTVFYIPEDHKPGTFPKALTNGSFSPSGNNGSVNWRTGSFHGPGHISLRRENSSDSPKELKRRNSSSSMSSRLSIYDNVPGSILYSSSGDLADLENEDIFPELDDILYHVKGMQRIVNQWSEKFSDEGDSDSALDSVSPCPSSPKQIHLDVDNDRTTPSDLDSTGNSLNEPEEPSEIPERRDSGVGASLTRSNRHRLRWHSFQSSHRPSLNSVSLQINCQSVAQMNLLQKYSLLKLTALLEKYTPSNKHGFSWAVPKFMKRIKVPDYKDRSVFGVPLTVNVQRTGQPLPQSIQQAMRYLRNHCLDQVGLFRKSGVKSRIQALRQMNEGAIDCVNYEGQSAYDVADMLKQYFRDLPEPLMTNKLSETFLQIYQYVPKDQRLQAIKAAIMLLPDENREVLQTLLYFLSDVTAAVKENQMTPTNLAVCLAPSLFHLNTLKRENSSPRVMQRKQSLGKPDQKDLNENLAATQGLAHMIAECKKLFQVPEEMSRCRNSYTEQELKPLTLEALGHLGNDDSADYQHFLQDCVDGLFKEVKEKFKGWVSYSTSEQAELSYKKVSEGPPLRLWRSVIEVPAVPEEILKRLLKEQHLWDVDLLDSKVIEILDSQTEIYQYVQNSMAPHPARDYVVLRTWRTNLPKGACALLLTSVDHDRAPVVGVRVNVLLSRYLIEPCGPGKSKLTYMCRVDLRGHMPEWYTKSFGHLCAAEVVKIRDSFSNQNTETKDTKSR

SEQ ID NO: 8472 - protein, 1528 aa, Homo sapiens
MSVAIRKRSWEEHVTHWMGQPFNSDDRNTACHHGLVADSLQASMEKDATLNVDRKEKCVSLPDCCHGSELRDFPGRPMGHLSKDVDENDSHEGEDQFLSLEASTETLVHVSDEDNNADLCLTDDKQVLNTQGQKTSGQHMIQGAGSLEKALPIIQSNQVSSNSWGIAGETELALVKESGERKVTDSISKSLELCNEISLSEIKDAPKVNAVDTLNVKDIAPEKQLLNSAVIAQQRRKPDPPKDENERSTCNVVQDEFLDTPCTNRGLPLLKTDFGSCLLQPPSCPNGMSAENGLEKSGFSQHQNKSPPKVKAEDGMQCLQLKETLATQEPTDNQVRLRKRKEIREDRDRARLDSMVLLIMKLDQLDQDIENALSTSSSPSGTPTNLRRHVPDLESGSESGADTISVNQTRVNLSSDTESTDLPSSTPVANSGTKPKTTAIQGISEKEKAEIEAKEACDWLRATGFPQYAQLYEDFLFPIDISLVKREHDFLDRDAIEALCRRLNTLNKCAVMKLEISPHRKRSDDSDEDEPCAISGKWTFQRDSKRWSRLEEFDVFSPKQDLVPGSPDDSHPKDGPSPGGTLMDLSERQEVSSVRSLSSTGSLPSHAPPSEDAATPRTNSVISVCSSSNLAGNDDSFGSLPSPKELSSFSFSMKGHEKTAKSKTRSLLKRMESLKLKSSHHSKHKAPSKLGLIISGPILQEGMDEEKLKQLNCVEISALNGNRINVPMVRKRSVSNSTQTSSSSSQSETSSAVSTPSPVTRTRSLSACNKRVGMYLEGFDPFNQSTFNNVVEQNFKNRESYPEDTVFYIPEDHKPGTFPKALTNGSFSPSGNNGSVNWRTGSFHGPGHISLRRENSSDSPKELKRRNSSSSMSSRLSIYDNVPGSILYSSSGDLADLENEDIFPELDDILYHVKGMQRIVNQWSEKFSDEGDSDSALDSVSPCPSSPKQIHLDVDNDRTTPSDLDSTGNSLNEPEEPSEIPERRDSGVGASLTRSNRHRLRWHSFQSSHRPSLNSVSLQINCQSVAQMNLLQKYSLLKLTALLEKYTPSNKHGFSWAVPKFMKRIKVPDYKDRSVFGVPLTVNVQRTGQPLPQSIQQAMRYLRNHCLDQVGLFRKSGVKSRIQALRQMNEGAIDCVNYEGQSAYDVADMLKQYFRDLPEPLMTNKLSETFLQIYQYVPKDQRLQAIKAAIMLLPDENREVLQTLLYFLSDVTAAVKENQMTPTNLAVCLAPSLFHLNTLKRENSSPRVMQRKQSLGKPDQKDLNENLAATQGLAHMIAECKKLFQVPEEMSRCRNSYTEQELKPLTLEALGHLGNDDSADYQHFLQDCVDGLFKEVKEKFKGWVSYSTSEQAELSYKKVSEGPPLRLWRSVIEVPAVPEEILKRLLKEQHLWDVDLLDSKVIEILDSQTEIYQYVQNSMAPHPARDYVVLRTWRTNLPKGACALLLTSVDHDRAPVVGVRVNVLLSRYLIEPCGPGKSKLTYMCRVDLRGHMPEWYTKSFGHLCAAEVVKIRDSFSNQNTETKDTKSR

SEQ ID NO: 8473 - protein, 459 aa, Homo sapiens
  VARIANT 25: Xaa = Any Amino Acid
MASRDPTGLSRPCTINLTQEDMEEXQAFKRSRNTDEMVELRILLQTKNAGAVIGKGGKNIKALRTDYNASVSVPDSSGPEHILSISAGIDTIGEILKKIIPTLEEGLQFPSPTATSQLPLESVAVECLSYQHYKGSDFDCELRLLIHQSLAGGIIGVEGAKIKELRENTQTTIKLFQECCPYSTDRVVLIGGKPDRVVECIKIILDLIYESPIKGRAQPYDPNFYDETYDYGGFTIMFDDRCGRPVGFPMRGRGGFDRMPPGQGGRPMPPSRRDYDDMSPRQGPPPPPPGQGGEGGSRARNLPLPPPPPPRGGDLMAYDRRGRPGDCYHGMVGFSADETWDSAIDTWSPSEWQMAYEPQGGSRYDYSYAGGRGSYGNLGGLIITTQVTIPKDLAGSIIGKGGLQIKQIRHESGASIKIDEPLEGLEDWIITIRETQDQIQNAQYLLQNSVKQCADVEGV

SEQ ID NO: 8474 - protein, 1037 aa, Homo sapiens
MVAEVDSMPAASSVKKPFVLRSKMGKWCRHCFPCCRGSGKSNVGTSGDQDDSTMKTLRSKMGKWCCHCFPCCRGSGKSNVGTSGDHDDSAMKTLRSKMGKWCCHCFPCCRGSGKSNVGAWGDYDDSAFVEPRYHVRREDLDKLHRAAWWGKVARKDLIVMLRDTDVNKQDKQKSALQFPKKSCHSHRTALHLASANGNSGVVKLLLDRRCQLNVLDNKKRTALTKAVQCQEDECALMLLEHGTDPNIPDEYGNTTLHYAIYNEDKLMAKALLLYGADIESKNKHGLTPLLLGVHEQKQQVVKFLIKKKANLNALDRYGRTALILAVCCGSASIVSLLLEQNIDVSSQDLSGQTAREYAVSSHHHVICQLLSDYKEKQMLKISSENSNPEQDLKLTSEEESQRGKNKFQNFVLLFLQHPNMMKKVEEEMKKHESNNVGLLENLSNGVTAGNGDDGLIPQRKSRTPENQQFPDNESEEYHRICELVSDYKEKQMPKYSSENSNPEMKKHGSTHVGFPENLTNGATAGNGDDGLIPPRKSRTPESQQFPDTENEEYHSDEQNDTQKQFCEEQNTGILHDEILIHEEKQIEVVEKMNSELSLSCKKEKDFLHENSTLREEIAMLRLELDTMKHQSQLRKKKYLEDIESVKKKNDNLLKALQLNELTMDDDTAVLVIDNGSGMCKAGFAGDDAPRAVFPSIVGRPRQQGMMGGMHQKESYVGKEAQSKRGILTLKYPMEHGIITNWDDMEKIWHHTFYNELRVAPEEHPILLTEAPLNPKANREKMTQIMFETFNTPAMYVAIQAMLSLYTSGRTTGIVMDSGDGVTHTVPIYDGNALPHATLRLDLAGRELTDYLMKILTERGYRFTTMAEREIVRDIKEKLCYVALDFEQEMAMAASSSSLEKSYELPDGQVITIGNEWFRCPEALFQPCFLGMESCGIHETTFNSIMKSDVDIRKDLYTNTVLSGGTTMYPGMAHRMQKEIAALAPSMLKIRIIAPPKRKYSVWVGGSILASLSTFQQMWISKQEYDESGPSIVHRKCF

SEQ ID NO: 8475 - protein, 685 aa, Homo sapiens
MVAEVDSMPAASSVKKPFGLRSKMGKWCCHCFPCCRGSGKSNVGTSGDRNDSSVKTLGSKRCKWCCHCFPCCRGSGKSNVGAWGDYDDSAFMDPRYHVHGEDLDKLHRAAWWGKVPRKDLIVMLRDTDVNKRDKQKRTALHLASANGNSEVVKLVLDRRCQLNVLDNKKRTALTKVCSSQLYQREAVQCQEDECALMLLEHGTDPNIPDEYGNTTLHYAVYNEDKLMAKALLLYGADIESKNKLSLSYKKEKDFLHENSTLQEEVAMLRLELDIMKHQSQLREKKYLEEIESVEKKNDNLLKALQLNELTMDDDTAVLVIDNGSGMCKAGFAGDDAPQAVFPSIVGRPRHQGMMEGMHQKESYVGKEAQSKRGMLTLKYPMEHGIITNWDDMEKIWHHTFYNELRVAPEEHPILLTEAPLNPKANREKMTQIMFETFNTPAMYVAIQAVLSLYTSGRTTGIVMDSGDGFTHTVPIYEGNALPHATLRLDLAGRELTDYLMKILTERGYRFTTTAEQEIVRDIKEKLCYVALDSEQEMAMAASSSSVEKSYELPDGQVITIGNERFRCPEALFQPCFLGMESCGIHKTTFNSIVKSDVDIRKDLYTNTVLSGGTTMYPGIAHRMQKEITALAPSIMKIKIIAPPKRKYSVWVGGSILASLSTFQQMWISKQEYDESGPSIVHRKCF

SEQ ID NO: 8476 - protein, 1038 aa, Homo sapiens
MVVEVDSMPAASSVKKPFGLRSKMGKWCCRCFPCYRESGKSNVGTSGDHDDSAMKTLRSKMGKWCHHCFPCCRGSGKSNVGASGDHDDSAMKTLRNKMGKWCCHCFPCCRGSGKSKVGAWGDYDDSAFMEPRYHVRGEDLDKLHRAAWWGKVPRKDLIVMLRDTDVNKKDKQKRPHTTLDVETSERTALHLASANGNSEVVKLLLDRRCQLNVLDNKKRTALIKVCSSQLYQHEAVQCQEDECALMLLEHGTDPNIPDEYGNTTLHYAIYNEDKLMAKALLLYGADIESKNKHGLTPLLLGVHEQKQQVVKFLIKKKANLNALDRYGRTALILAVCCGSASIVSLLLEQNIDVSSQDLSGQTAREYAVSSHHHVICQLLSDYKEKQMLKISSENSNPVITILNIPLKVEEEMKKHESNNVGLLENLTNGVTAGNGDNGLIPQRKSRTPENQQFPDNESEEYHRICELLSDYKEKQMPKYSSENSNPEQDLKLTSEEESQRLKGKMKKHGSTHVGFPENLTNGATAGNGDDGLIPPRKSRTPESQQFPDTENEEYHSDEQNDTQKQFCEEQNTGILHDEILIHEEKQIEVVEKMNSELSLSCKKEKDVLHENSTLREEIAMLRLELDTMKHQSQLREKKYLEDIESVKKKNDNLLKALQLNELTMDDDTAVLVIDNGSGMCKAGFAGDDAPRAVFPSIVGRPRQQGMMGGMHQKESYVGKEAQSKRGILTLKYPMEHGIITNWDDMEKIWHHTFYNELRVAPEEHPILLTEAPLNPKANREKMTQIMFETFNTPAMYVAIQAVPSLYTSGRTTGIVMDSGDGVTHTVPIYEGNALPHATLRLDLAGRELPDYLMKILTERGYRFTTMAEREIVRDIKEKLCYVALDFEQEMATAASSSSLEKSYELPDGQVITIGNERFRCPEALFQPCFLGMESCGIHETTFNSIMKSDVDIRKDLYTNTVLSGGTTMYPGMAHRMQKEIAALAPSMMKIRIIAPPKRKYSVWVGGSILASLSTFQQMWISKQEYDESGPSIVHRKCF

SEQ ID NO: 8477 - protein, 960 aa, Homo sapiens
MVVEVDSMPAASSVKKPFGLRSKMGKWCCRCFPCCRESGKSNVGTSGDHDDSAMKTLRSKMGKWCRHCFPCCRGSGKSNVGASGDHDDSAMKTLRNKMGKWCCHCFPCCRGSSKSKVGAWGDYDDSAFMEPRYHVRGEDLDKLHRAAWWGKVPRKDLIVMLRDTDVNKQDKQKRPHTTLDVETSERTALHLASANGNSEVVKLLLDRRCQLNVLDNKKRTALIKAVQCQEDECALMLLEHGTDPNIPDEYGNTTLHYAIYNEDKLMAKALLLYGADIESKNKHGLTPLLLGVHEQKQQVVKFLIKKKANLNALDRYGRTALILAVCCGSASIVSLLLEQNIDVSSQDLSGQTAREYAVSSHHHVICQLLSDYKEKQMLKISSENSNPEQDLKLTSEEESQRGKNKLQNFVLLFLQHPNMMKKVEEEMKKHESNNVGLLENLTNGVTAGNGDNGLIPQRKSRTPENQQFPDNESEEYHSDEQNDTQKQFCEEQNTGILHDEILIHEEKQIEVVEKMNSELSLSCKKEKDILHENSTLREEIAMLRLELDTMKHQSQLREKKYLEDIESVKKRNDNLLKALQLNELTMDDDTAVLVIDNGSGMCKAGFAGDDAPRAVFPSIVGRPRQQGMMGGMHQKESYVGKEAQSKRGILTLKYPMEHGIITNWDDMEKIWHHTFYNELRVAPEEHPVLLTEATLNPKANREKMTQIMFETFNTPAMYVAIQAVLSLYTSGRTTGIVMDSGDGVTHTVPIYEGNALPHATLRLDLAGRELPDYLMKILTEHGYRFTTMAEREIVRDIKEKLCYVALDFEQEMATVASSSSLEKSYELPDGQVITIGNERFRCPEALFQPCFLGMESCGIHETTFNSIMKSDVDIRKDLYTNTVLSGGTTMYPGMAHRMQKEIAALAPSMMKIRIIAPPKRKYSVWVGGSILASLSTFQQMWISKQEYDESGPSIVHRKCL

SEQ ID NO: 8478 - protein, 534 aa, Homo sapiens
MKKHGSTHVGFPENLTNGATAGNGDDGLIPPRKSRTPESQQFPDTENEEYHSDEQNDTQKQFCEEQNTGILHDEILIHEEKQIEVVEKMNSELSLSCKKEKDFLHENSTLREEIAMLRLELDTMKHQSQLRKKKYLEDIESVKKKNDNLLKALQLNELTMDDDTAVLVIDNGSGMCKAGFAGDDAPRAVFPSIVGRPRQQGMMGGMHQKESYVGKEAQSKRGILTLKYPMEHGIITNWDDMEKIWHHTFYNELRVAPEEHPILLTEAPLNPKANREKMTQIMFETFNTPAMYVAIQAMLSLYTSGRTTGIVMDSGDGVTHTVPIYDGNALPHATLRLDLAGRELTDYLMKILTERGYRFTTMAEREIVRDIKEKLCYVALDFEQEMAMAASSSSLEKSYELPDGQVITIGNEWFRCPEALFQPCFLGMESCGIHETTFNSIMKSDVDIRKDLYTNTVLSGGTTMYPGMAHRMQKEIAALAPSMLKIRIIAPPKRKYSVWVGGSILASLSTFQQMWISKQEYDESGPSIVHRKCF

SEQ ID NO: 8479 - protein, 370 aa, Homo sapiens
MKIKDAKKPSFPWFGMDIGGTLVKLSYFEPIDITAEEEQEEVESLKSIRKYLTSNVAYGSTGIRDVHLELKDLTLFGRRGNLHFIRFPTQDLPTFIQMGRDKNFSTLQTVLCATGGGAYKFEKDFRTIGNLHLHKLDELDCLVKGLLYIDSVSFNGQAECYYFANASEPERCQKMPFNLDDPYPLLVVNIGSGVSILAVHSKDNYKRVTGTSLGGGTFLGLCSLLTGCESFEEALEMASKGDSTQADKLVRDIYGGDYERFGLPGWAVASSFGNMIYKEKRESVSKEDLARATLVTITNNIGSVARMCAVNEKINRVVFVGNFLRVNTLSMKLLAYALDYWSKGQLKALFLEHEGYFGAVGALLGLPNFS

SEQ ID NO: 8480 - protein, 289 aa, Homo sapiens
MRGTECPGLVNYQISVKCSNQFKLEVCLLNAENKVVDNQAGTQGQLKVLGANLWWPYLMHEHPAYLYSWEGRPDGAQAVGALTAGTLAVVGVADCTEVTGAFDFYTLPVGLRTVAVTESQFLISGKPFYFHGVNKHEDADIQGKGFDCPLLVKDFNLLCWLGANTFCPSHYPYTEEMLQICYRYGIVVIDECPAPIHSCVQELFQEVNLIFGSVQSSDLSCVYLAGWLRLWGNWIQRMVIAHTKALDPSQPVTFVTNSTYAADKGVNKEHQKFSVFGKYREENILTKLS

SEQ ID NO: 8481 - protein, 2073 aa, Homo sapiens [sequence omitted]

SEQ ID NO: 8482 - protein, 2029 aa, Homo sapiens
MDELDQDQHGRLKDLFDSFDTTGTGSLGQEELTDLCHMLSLEEVAPVLQQTLLQDNLLGRVHFDQFKEALILILSRTLSNEEHFQEPDCSLEAQPKYVRGGKRYGRRSLPEFQESVEEFPEVTVIEPLDEEARASHIPAGDCSEHWKTQRSEEYEAEGQLRFWNPDDLNASQSGSSPPQDWIEEKLQEVCEDLGITRDGHLNRKKLVSICEQYGLQNVDGEMLEEVFHNLDPDGTMSVEDFFYGLFKNGKSLTPSASTPYRQTKKAPFSMQSFDESGRRTTTSSAMTSTIGFRVFSCLDDGMGHASVERILDTWQEEGIENSQEILKALDFSLDGNINLTELTLALEYELLVTKNSTHQAALASFKAEIRHLLERVDQVVREKEKLRSDLDKAEKLKSLMASEVDDHHAAIERRNEYNLRKLDEEYKERIAALKNELRKEREQILQQAGKQRLELEQEIEKAKTEENYIRDRLALSLKENSRLENELLENAENVLAEKFGDLDPSSAEFFLQEERLTQMRNEYERQCRVLQDQVDELQSELEEYRAQGRVLRLPLKNSPSEEVEANSGGIEPEHGLGSEECNPLNMSIEAELVIEQMKEQHHRDICCLRLELEDKVRHYEKQLDETVVSCKKAQENMKQRHENETHTLEKQISDLKNEIAELQGQAAVLKEAHHEATCRHEEEKKQLQVKLEEEKTHLQEKLRLQHEMELKARLTQAQASFEREREGLQSSAWTEEKVRGLTQELEQFHQEQLTSLVEKHTLEKEELRKELLEKHQRELQEGREKMETECNRRTSQIEAQFQSDCQKVTERCESALQSLEGRYRQELKDLQEQQREEKSQWEFEKDELTQECAEAQELLKETLKREKTTSLVLTQEREMLEKTYKEHLNSMVVERQQLLQDLEDLRNVSETQQSMLSDQILELKSSHKRELREREEVLCQAGASEQLASQRLERLEMEHDQERQEMMSKLLAMENIHKATCETADRERAEMSTEISRLQSKIKEMQQATSPLSMLQNGCQVIGEEEVEGDGALSLLQQGEQLLEENGDVLLSLQRAHEQAVKENVKMATEISRLQQRLQKLEPGLVMSSCLDEPATEFFGNTAEQTEPFLQQNRTKQVEGVTRRHVLSDLEDDEVRDLGSTGTSSVQRQEAKIEESEASVEGFSELENSEETRTESWELKNQISQLQEQLMMLCADCDRASEKKQDLLFDVSVLKKKLKMLERIPEASPKYKLLYEDVSRENDCLQEELRMMETRYDEALENNKELTAEVFRLQDELKKMEEVTETFLSLEKSYDEVKIENEELNVLVLRLQGKIEKLQESVVQRCDCCLWEASLENLEIEPDGNILQLNQTLEECVPRVRSVHHVIEECKQENQYLEGNTQLLEKVKAHEIAWLHGTIQTHQERPRVQNQVILEENTTLLGFQDKHFQHQATIAELELEKTKLQELTRKLKERVTILVKQKDVLSHGEKEEELKAMMHDLQITCSEMQQKVELLRYESEKLQQENSILRNEITTLNEEDSISNLKLGTLYWNSGRMRQKTETVKQENAAVQKMVENLKKQISELKIKNQQLDLENTELSQKNSQNQEKLQELNQRLTEMLCQKEKEPGNSALEEREQEKFNLKEELERCKVQSSTLVSSLEAELSEVKIQTHIVQQENHLLKDELEKMKQLHRCPDLSDFQQKISSVLSYNEKLLKEKEALSEELNSCVDKLAKSSLLEHRIATMKQEQKSWEHQSASLKSQLVASQEKVQNLEDTVQNVNLQMSRMKSDLRVTQQEKEALKQEVMSLHKQLQNAGGKSWAPEIATHPSGLHNQQKRLSWDKLDHLMNEEQQLLWQENERSQTMVQNTKAELTHSREKVRQLESNLLPKHQKHLNPSGTMNPTEQEKLSLKRECDQFQKEQSPANRKVSQMNSLEQELETIHLENEGLKKKQVKLDEQLMEMQHLRSTATPSPSPHAWDLQLLQQQACPMVPREQFLQLQRQLLQAERINQHLQEELENRTSETNTPQALLPEQRAVHADSYRRIGHL

SEQ ID NO: 8483 - protein, 1322 aa, Homo sapiens
MPVVWPTLLDLSRDECKRILRKLELEAYAGVISALRAQGDLTKEKKDLLGELSKVLSISTERHRAEVRRAVNDERLTTIAHNMSGPNSSSEWSIEGRRLVPLMPRLVPQTAFTVTANAVANAAIQHNASLPVPAETGSKEVVCYSYTSTTSTPTSTPVPSGSIATVKSPRPASPASNVVVLPSGSTVYVKSVSCSDEDEKPRKRRRTNSSSSSPVVLKEVPKAVVPVSKTITVPVSGSPKMSNIMQSIANSLPPHMSPVKITFTKPSTQTTNTTTQKVIIVTTSPSSTFVPNILSKSHNYAAVTKLVPTSVIASTTQKPPVVITASQSSLVSNSSSGSSSSTPSPIPNTVAVTAVVSSTPSVVMSTVAQGVSTSAIKMASTRLPSPKSLVSAPTQILAQFPKQHQQSPKQQLYQVQQQTQQQVAQPSPVSHQQQPQQSPLPPGIKPTIQIKQESGVKIITQQVQPSKILPKPVTATLPTSSNSPIMVVSSNGAIMTTKLVTTPTGTQATYTRPTVSPSIGRMAATPGAATYVKTTSGSIITVVPKSLATLGGKIISSNIVSGTTTKITTIPMTSKPNVIVVQKTTGKGTTIQGLPGKNVVTTLLNAGGEKTIQTVPTGAKPAILTATRPITKMIVTQPKGIGSTVQPAAKIIPTKIVYGQQGKTQVLIKPKPVTFQATVVSEQTRQLVTETLQQASRVAEAGNSSIQEGKEEPQNYTDSSSSSTESSQSSQDSQPVVHVIASRRQDWSEHEIAMETSPTIIYQDVSSESQSATSTIKALLELQQTTVKEKLESKPRQPTIDLSQMAVPIQMTQEKRHSPESPSIAVVESELVAEYITTERTDEGTEVAFPLLVSHRSQPQQPSQPQRTLLQHVAQSQTATQTSVVVKSIPASSPGAITHIMQQALSSHTAFTKHSEELGTEEGEVEEMDTLDPQTGLFYRSALTQSQSAKQQKLSQPPLEQTQLQVKTLQCFQTKQKQTIHLQADQLQHKLPQMPQLSIRHQKLTPLQQEQAQPKPDVQHTQHPMVAKDRQLPTLMAQPPQTVVQVLAVKTTQQLPKLQQAPNQPKIYVQPQTPQSQMSLPASSEKQTASQVEQPIITQGSSVTKITFEGRQPPTVTKITGGSSVPKLTSPVTSISPIQASEKTAVSDILKMSLMEAQIDTNVEHMIVDPPKKALATSMLTGEAGSLPSTHMVVAGMANSTPQQQKCRESCSSPSTVGSSLTTRKIDPPAVPATGQFMRIQNVGQKKAEESPAEIIIQAIPQYAIPCHSSSNVVVEPSGLLELNNFTSQQLDDEETAMEQDIDSSTEDGTEPSPSQSSAERS

SEQ ID NO: 8484 - protein, 786 aa, Homo sapiens
MKGTGIMDCAPKALLARALYDNCPDCSDELAFSRGDILTILEQHVPESEGWWKCLLHGRQGLAPANRLQILTEVAADRPCPPFLRGLEEAPASSEETYQVPTLPRPPTPGPVYEQMRSWAEGPQPPTAQVYEFPDPPTSARIICEKTLSFPKQAILTLPRPVRASLPTLPSQVYDVPTQHRGPVVLKEPEKQQLYDIPASPKKAGLHPPDSQASGQGVPLISVTTLRRGGYSTLPNPQKSEWIYDTPVSPGKASVRNTPLTSFAEESRPHALPSSSSTFYNPPSGRSRSLTPQLNNNVPMQKKLSLPEIPSYGFLVPRGTFPLDEDVSYKVPSSFLIPRVEQQNTKPNIYDIPKATSSVSQAGKELEKAKEVSENSAGHNSSWFSRRTTSPSPEPDRLSGSSSDSRASIVSSCSTTSTDDSSSSSSEESAKELSLDLDVAKETVMALQHKVVSSVAGLMLFVSRKWRFRDYLEANIDAIHRSTDHIEESVREFLDFARGVHGTACNLTDSNLQNRIRDQMQTISNSYRILLETKESLDNRNWPLEVLVTDSVQNSPDDLERFVMVARMLPEDIKRFASIVIANGRLLFKRNCEKEETVQLTPNAEFKCEKYIQPPQRETESHQKSTPSTKQREDEHSSELLKKNRANICGQNPGPLIPQPSSQQTPERKPRLSEHCRLYFGALFKAISAFHGSLSSSQPAEIITQSKLVIMVGQKLVDTLCMETQERDVRNEILRGSSHLCSLLKDVALATKNAVLTYPSPAALGHLQAEAEKLEQHTRQFRGTLG

SEQ ID NO: 8485 - protein, 672 aa, Homo sapiens
MKGTGIMDCAPKALLARALYDNCPDCSDELAFSRGDILTILEQHVPESEGWWKCLLHGRQGLAPANRLQILTEVAADRPCPPFLRGLEEAPASSEETYQVPTLPRPPTPGPVYEQMRSWAEGPQPPTAQVYEFPDPPTSARIICEKTLSFPKQAILTLPRPVRASLPTLPSQVYDVPTQHRGPVVLKEPEKQQLYDIPASPKKAGLHPPDSQASGQGVPLISVTTLRRGGYSTLPNPQKSEWIYDTPVSPGKASVRNTPLTSFAEESRPHALPSSSSTFYNPPSGRSRSLTPQLNNNVPMQKKLSLPEIPSYGFLVPRGTFPLDEDVSYKVPSSFLIPRVEQQNTKPNIYDIPKATSSVSQAGKELEKAKEVSENSAGHNSSWFSRRTTSPSPEPDRLSGSSSDSRASIVSSCSTTSTDDSSSSSSEESAKELSLDLDVAKETVMALQHKVVSSVAGLMLFVSRKWRFRDYLEANIDAIHRSTDHIEESVREFLDFARGVHGTACNLTDSNLQNRIRDQMQTISNSYRILLETKESLDNRNWPLEVLVTDSVQNSPDDLERFVMVARMLPEDIKRFASIVIANGRLLFKRNCEKEETVQLTPNAEFKCEKYIQPPQRETESHQKSTPSTKQREDEHSSELLKKNRANICGQVSSEFQVIEKGASIVTWSSGY

SEQ ID NO: 8486 - protein, 351 aa, Homo sapiens
  VARIANT 287: Xaa = Any Amino Acid
MTEMSFLSSEVLVGDLMSPFDQSGLGAEESLGLLDNYLEVAKHFKPHGFSRDKAKAGFSEWLAVDGLGSPSNNSKEDAFSGTDWMLEKMDLKEFVFDALLGIDNLETMPDELLTTLDDTCDLFAPLVQETNKETPQTVNPIGHLPGSLTKPDQVAPFTFLQPLPLSPGVLSSTPGHSFSLELGSEVDIPEGDRKPDSTAYVAMIPQCIKEEDTPSDNDSGICMSPESYLGSPQHSPSTRGSPNRSLPSPGVLCGSARPKPYNPPGETMVAAKVKGEKLDKKLKKMEXNKTAATGYRQKKRVEQEALTGECKELEKKNEALKERADSLAKEIQYLKDLIEEVRKTRGKKRVP

SEQ ID NO: 8487 - protein, 1146 aa, Homo sapiens
MKTPCIPSPKQGSKGRGQSPAAQVRGPTWNAPAREGRPGAGHLGHLRVGACARGAQARAFFPFLSFLCYPRFRCLFCLQFAIPASRMEQLNELELLMEKSFWEEAELPAELFQKKVVASFPRTVLSTGMDNRYLVLAVNTVQNKEGNCEKRLVITASQSLENKELCILRNDWCSVPVEPGDIIHLEGDCTSDTWIIDKDFGYLILYPDMLISGTSIASSIRCMRRAVLSETFRSSDPATRQMLIGTVLHEVFQKAINNSFAPEKLQELAFQTIQEIRHLKEMYRLNLSQDEIKQEVEDYLPSFCKWAGDFMHKNTSTDFPQMQLSLPSDNSKDNSTCNIEVVKPMDIEESIWSPRFGLKGKIDVTVGVKIHRGYKTKYKIMPLELKTGKESNSIEHRSQVVLYTLLSQERRADPEAGLLLYLKTGQMYPVPANHLDKRELLKLRNQMAFSLFHRISKSATRQKTQLASLPQIIEEEKTCKYCSQIGNCALYSRAVEQQMDCSSVPIVMLPKIEEETQHLKQTHLEYFSLWCLMLTLESQSKDNKKNHQNIWLMPASEMEKSGSCIGNLIRMEHVKIVCDGQYLHNFQCKHGAIPVTNLMAGDRVIVSGEERSLFALSRGYVKEINMTTVTCLLDRNLSVLPESTLFRLDQEEKNCDIDTPLGNLSKLMENTFVSKKLRDLIIDFREPQFISYLSSVLPHDAKDTVACILKGLNKPQRQAMKKVLLSKDYTLIVGMPGTGKTTTICTLVRILYACGFSVLLTSYTHSAVDNILLKLAKFKIGFLRLGQIQKVHPAIQQFTEQEICRSKSIKSLALLEELYNSQLIVATTCMGINHPIFSRKIFDFCIVDEASQISQPICLGPLFFSRRFVLVGDHQQLPPLVLNREARALGMSESLFKRLEQNKSAVVQLTVQYRMNSKIMSLSNKLTYEGKLECGSDKVANAVINLRHFKDVKLELEFYADYSDNPWLMGVFEPNNPVCFLNTDKVPAPEQVEKGGVSNVTEAKLIVFLTSIFVKAGCSPSDIGIIAPYRQQLKIINDLLARSIGMVEVNTVDKYQGRDKSIVLVSFVRSNKDGTVGELLKDWRRLNVAITRAKHKLILLGCVPSLNCYPPLEKLLNHLNSEKLIIDLPSREHESLCHILGDFQRE

SEQ ID NO: 8488 - protein, 358 aa, Homo sapiens
MSTAREQPIFSTRAHVFQIDPATKRNWIPAGKHALTVSYFYDATRNVYRIISIGGAKAIINSTVTPNMTFTKTSQKFGQWADSRANTVYGLGFASEQHLTQFAEKFQEVKEAARLAREKSQDGGELTSPALGLASHQVPPSPLVSANGPGEEKLFRSQSADAPGPTERERLKKMLSEGSVGEVQWEAEFFALQDSNNKLAGALREANAAAAQWRQQLEAQRAEAERLRQRVAELEAQAASEVTPTGEKEGLGQGQSLEQLEALVQTKDQEIQTLKSQTGGPREALEAAEREETQQKVQTRNAELEHQLRAMERSLEEARAERERARAEVGRAAQLLDVSLFELSELREGLARLAEAAP

SEQ ID NO: 8489 - protein, 121 aa, Homo sapiens
MSTAREQPIFSTRAHVFQIDPATKRNWIPAGKHALTVSYFYDATRNVYRIISIGGAKAIINSTVTPNMTFTKTSQKFGQWADSRANTVYGLGFASEQHLTQFAEKFQEVKEAARLARQLQR

SEQ ID NO: 8490 - protein, 325 aa, Homo sapiens [sequence omitted]

SEQ ID NO: 8491 - protein, 146 aa, Homo sapiens
TLSPRREQPIFSTRAHVFQIDPATKRNWIPAGKHALTVSYFYDATRNVYRIISIGGAKAIINSTVTPNMTFTKTSQKFGQWADSRANTVYGLGFASEQHLTQFAEKFQEVKEAARLAREKSQDGWGGPQSALVVGSFGAVFELLIV

SEQ ID NO: 8492 - protein, 361 aa, Homo sapiens
MSTAREQPIFSTRAHVFQIDPATKRNWIPAGKHALTVSYFYDATRNVYRIISIGGAKAIINSTVTPNMTFTKTSQKFGQWADSRANTVYGLGFASEQHLTQFAEKFQEVKEAARLAREKSQDGGELTSPALGLASHQVPPSPLVSANGPGEEKLFRSQSADAPGPTERERLKKMLSEGSVGEVQWEAEFFALQDSNNKLAGALREANAAAAQWRQQLEAQRAEAERLRQRVAELEAQAASEVTPTGEKEGLGQGQSLEQLEALVQTKDQEIQTLKSQTGGPREALEAAEREETQQKVQDLETRNAELEHQLRAMERSLEEARAERERARAEVGRAAQLLDVSLFELSELREGLARLAEAAP

SEQ ID NO: 8493 - protein, 161 aa, Homo sapiens
MIHLPRLPKVLGLQVGATAPGLTTTKIPKRRIGSSCGLLEGKNGSKSWGSCARTRSPVRAAKAIESGTEWNLSLLKLLRMTPGPGKMILSWSSLHLCISRTDVPPVKGAGSPFVTQAGVQWRDHDSLQASTSQAQVILLNSWDHRNTNSRMAPSLLKTSIN

SEQ ID NO: 8494 - protein, 394 aa, Homo sapiens
MALEVGDMEDGQLSDSDSDMTVAPSDRPLQLPKVLGGDSAMRAFQNTATACAPVSHYRAVESVDSSEESFSDSDDDSCLWKRKRQKCFNPPPKPEPFQFGQSSQKPPVAGGKKINNIWGAVLQEQNQDAVATELGILGMEGTIDRSRQSETYNYLLAKKLRKESQEHTKDLDKELDEYMHGGKKMGSKEEENGQGHLKRKRPVKDRLGNRPEMNYKGRYEITAEDSQEKVADEISFRLQEPKKDLIARVVRIIGNKKAIELLMETAEVEQNGGLFIMNGSRRRTPGGVFLNLLKNTPSISEEQIKDIFYIENQKEYENKKAARKRRTQVLGKKMKQAIKSLNFQEDDDTSRETFASDTNEALASLDESQEGHAEAKLEAEEAIEVDHSHDLDIF

SEQ ID NO: 8495 - protein, 430 aa, Homo sapiens
MAANMYRVGDYVYFENSSSNPYLIRRIEELNKTANGNVEAKVVCFYRRRDISSTLIALADKHATLSVCYKAGPGADNGEEGEIEEEMENPEMVDLPEKLKHQLRHRELFLSRQLESLPATHIRGKCSVTLLNETESLKSYLEREDFFFYSLVYDPQQKTLLADKGEIRVGNRYQADITDLLKEGEEDGRDQSRLETQVWEAHNPLTDKQIDQFLVVARSVGTFARALDCSSSVRQPSLHMSAAAASRDITLFHAMDTLHKNIYDISKAISALVPQGGPVLCRDEMEEWSASEANLFEEALEKYGKDFTDIQQDFLPWKSLTSIIEYYYMWKTTDRYVQQKRLKAAEAESKLKQVYIPNYNKPNPNQISVNNVKAGVVNGTGAPGQSPGAGRACESCYMSSLRILLDILEEIWWLENANPVRWREARTKPQ

SEQ ID NO: 8496 - protein, 543 aa, Homo sapiens
MEGPAGYLRRASVAQLTQELGTAFFQQQQLPAAMADTFLEHLCLLDIDSEPVAARSTSIIATIGPASRSVERLKEMIKAGMNIARLNFSHGSHEYHAESIANVREAVESFAGSPLSYRPVAIALDTKGPEIRTGILQGGPESEVELVKGSQVLVTVDPAFRTRGNANTVWVDYPNIVRVVPVGGRIYIDDGLISLVVQKIGPEGLVTQVENGGVLGSRKGVNLPGAQVDLPGLSEQDVRDLRFGVEHGVDIVFASFVRKASDVAAVRAALGPEGHGIKIISKIENHEGVKRFDEILEVSDGIMVARGDLGIEIPAEKVFLAQKMMIGRCNLAGKPVVCATQMLESMITKPRPTRAETSDVANAVLDGADCIMLSGETAKGNFPVEAVKMQHAIAREAEAAVYHRQLFEELRRAAPLSRDPTEVTAIGAVEAAFKCCAAAIIVLTTTGRSAQLLSRYRPRAAVIAVTRSAQAARQVHLCRGVFPLLYREPPEAIWADDVDRRVQFGIESGKLRGFLRVGDLVIVVTGWRPGSGYTNIMRVLSIS

SEQ ID NO: 8497 - protein, 604 aa, Homo sapiens
MSIQENISSLQLRSWVSKSQRDLAKSILIGAPGAQLGLMPLTTQQCGADPQRGRPREVCSGMEGPAGYLRRASVAQLTQELGTAFFQQQQLPAAMADTFLEHLCLLDIDSEPVAARSTSIIATIGPASRSVERLKEMIKAGMNIARLNFSHGSHEYHAESIANVREAVESFAGSPLSYRPVAIALDTKGPEIRTGILQGGPESEVELVKGSQVLVTVDPAFRTRGNANTVWVDYPNIVRVVPVGGRIYIDDGLISLVVQKIGPEGLVTQVENGGVLGSRKGVNLPGAQVDLPGLSEQDVRDLRFGVEHGVDIVFASFVRKASDVAAVRAALGPEGHGIKIISKIENHEGVKRFDEILEVSDGIMVARGDLGIEIPAEKVFLAQKMMIGRCNLAGKPVVCATQMLESMITKPRPTRAETSDVANAVLDGADCIMLSGETAKGNFPVEAVKMQHAIAREAEAAVYHRQLFEELRRAAPLSRDPTEVTAIGAVEAAFKCCAAAIIVLTTTGRSAQLLSRYRPRAAVIAVTRSAQAARQVHLCRGVFPLLYREPPEAIWADDVDRRVQFGIESGKLRGFLRVGDLVIVVTGWRPGSGYTNIMRVLSIS

SEQ ID NO: 8498 - protein, 574 aa, Homo sapiens
MSIQENISSLQLRSWVSKSQRDLAKSILIGAPGGPAGYLRRASVAQLTQELGTAFFQQQQLPAAMADTFLEHLCLLDIDSEPVAARSTSIIATIGPASRSVERLKEMIKAGMNIARLNFSHGSHEYHAESIANVREAVESFAGSPLSYRPVAIALDTKGPEIRTGILQGGPESEVELVKGSQVLVTVDPAFRTRGNANTVWVDYPNIVRVVPVGGRIYIDDGLISLVVQKIGPEGLVTQVENGGVLGSRKGVNLPGAQVDLPGLSEQDVRDLRFGVEHGVDIVFASFVRKASDVAAVRAALGPEGHGIKIISKIENHEGVKRFDEILEVSDGIMVARGDLGIEIPAEKVFLAQKMMIGRCNLAGKPVVCATQMLESMITKPRPTRAETSDVANAVLDGADCIMLSGETAKGNFPVEAVKMQHAIAREAEAAVYHRQLFEELRRAAPLSRDPTEVTAIGAVEAAFKCCAAAIIVLTTTGRSAQLLSRYRPRAAVIAVTRSAQAARQVHLCRGVFPLLYREPPEAIWADDVDRRVQFGIESGKLRGFLRVGDLVIVVTGWRPGSGYTNIMRVLSIS

SEQ ID NO: 8499 - protein, 1213 aa, Homo sapiens
MRSRNQGGESASDGHISCPKPSIIGNAGEKSLSEDAKKKKKSNRKEDDVMASGTVKRHLKTSGECERKTKKSLELSKEDLIQLLSIMEGELQAREDVIHMLKTEKTKPEVLEAHYGSAEPEKVLRVLHRDAILAQEKSIGEDVYEKPISELDRLEEKQKETYRRMLEQLLLAEKCHRRTVYELENEKHKHTDYMNKSDDFTNLLEQERERLKKLLEQEKAYQARKEKENAKRLNKLRDELVKLKSFALMLVDERQMHIEQLGLQSQKVQDLTQKLREEEEKLKAITSKSKEDRQKLLKLEVDFEHKASRFSQEHEEMNAKLANQESHNRQLRLKLVGLTQRIEELEETNKNLQKAEEELQELRDKIAKGECGNSSLMAEVENLRKRVLEMEGKDEEITKTESQCRELRKKLQEEEHHSKELRLEVEKLQKRMSELEKLEEAFSKSKSECTQLHLNLEKEKNLTKDLLNELEVVKSRVKELECSESRLEKAELSLKDDLTKLKSFTVMLVDERKNMMEKIKQEERKVDGLNKNFKVEQGKVMDVTEKLIEESKKLLKLKSEMEEKVYNLTRERDELIGKLKSEEEKSSELSCSVDLLKKRLDGIEEVEREITRGRSRKGSELTCPEDNKIKELTLEIERLKKRLQQLEVVEGDLMKTEDEYDQLEQKFRTEQDKANFLSQQLEEIKHQIAKNKAIEKGEVVSQEAELRHRFRLEEAKSRDLKAEVQALKEKIHELMNKEDQLSQLQVDYSVLQQRFMEEENKNKNMGQEVLNLTKELELSKRYSRALRPSVNGRRMVDVPVTSTGVQTDAVSGEAAEEETPAVFIRKSFQEENHIMSNLRQVGLKKPVERSSVLDRYPPAANELTMRKSWIPWMRKRENGPSITQEKGPRTNSSPGHPGEVVLSPKQGQPLHIRVTPDHENSTATLEITSPTSEEFFSSTTVIPTLGNQKPRITIIPSPNVMPQKQKSGDTTLGPERAMSPVTITTFSREKTPESGRGAFADRPTSPIQIMTVSTSAAPAEIAVSPESQEMPMGRTILKVTPEKQTVPTPVRKYNSNANIITTEDNKIHIHLGSQFKRSPGTSGEGVSPVITVRPVNVTAEKEVSTGTVLRSPRNHLSSRPGASKVTSTITITPVTTSSARGTQSVSGQDGSSQRPTPTRIPMSKGMKAGKPVVAAPGAGNLTKFEPRAETQSMKIELKKSAASSTTSLGGGKG

SEQ ID NO: 8500 - protein, 1917 aa, Homo sapiens
LELIEKLLQNRITIVDRFLNSSNDHRFQALQDNCKKILGENAKPNYGCQVTIQSEQEKQLMKQYRREEKRIARREKKAGEDLEVSEGLMCFDPKELRIQREQALLNARSVPILSRQRDADVEKIHYPHVYDSQAEAMKTSAFIAGAKMILPEGIQRENNKLYEEVRIPYSEPMPLSFEEKPVYIQDLDEIGQLAFKGMKRLNRIQSIVFETAYNTNENMLICAPTGAGKTNIAMLTVLHEIRQHFQQGVIKKNEFKIVYVAPMKALAAEMTDYFSRRLEPLGIIVKELTGDMQLSKSEILRTQMLVTTPEKWDVVTRKSVGDVALSQIVRLLILDEVHLLHEDRGPVLESIVARTLRQVESTQSMIRILGLSATLPNYLDVATFLHVNPYIGLFFFDGRFRPVPLGQTFLGIKCANKMQQLNNMDEVCYENVLKQVKAGHQVMVFVHARNATVRTAMSLIERAKNCGHIPFFFPTQGHDYVLAEKQVQRSRNKQVRELFPDGFSIHHAGMLRQDRNLVENLFSNGHIKVLVCTATLAWGVNLPAHAVIIKGTQIYAAKRGSFVDLGILDVMQIFGRAGRPQFDKFGEGIIITTHDKLSHYLTLLTQRNPIESQFLESLADNLNAEIALGTVTNVEEAVKWISYTYLYVRMRANPLAYGISHKAYQIDPTLRKHREQLVIEVGRKLDKAQMIRFEERTGYFSSTDLGRTASHYYIKYNTIETFNELFDAHKTEGDIFAIVSKAEEFDQIKVREEEIEELDTLLSNFCELSTPGGVENSYGKINILLQTYISRGEMDSFSLISDSAYVAQNAARIVRALFEIALRKRWPTMTYRLLNLSKVIDKRLWGWASPLRQFSILPPHILTRLEEKKLTVDKLKDMRKDEIGHILHHVNIGLKVKQCVHQIPSVMMEASIQPITRTVLRVTLSIYADFTWNDQVHGTVGEPWWIWVEDPTNDHIYHSEYFLALKKQVISKEAQLLVFTIPIFEPLPSQYYIRAVSDRWLGAEAVCIINFQHLILPERHPPHTELLDLQPLPITALGCKAYEALYNFSHFNPVQTQIFHTLYHTDCNVLLGAPTGSGKTVAAELAIFRVFNKYPTSKAVYIAPLKALVRERMDDWKVRIEEKLGKKVIELTGDVTPDMKSIAKADLIVTTPEKWDGVSRSWQNRNYVQQVTILIIDEIHLLGEERGPVLEVIVSRTNFISSHTEKPVRIVGLSTALANARDLADWLNIKQMGLFNFRPSVRPVPLEVHIQGFPGQHYCPRMASMNKPAFQAIRSHSPAKPVLIFVSSRRQTRLTALELIAFLATEEDPKQWLNMDEREMENIIATVRDSNLKLTLAFGIGMHHAGLHERDRKTVEELFVNCKVQVLIATSTLAWGVNFPAHLVIIKGTEYYDGKTRRYVDFPITDVLQMMGRAGRPQFDDQGKAVILVHDIKKDFYKKFLYEPFPVESSLLGVLSDHLNAEIAGGTITSKQDALDYITWTYFFRRLIMNPSYYNLGDVSHDSVNKFLSHLIEKSLIELELSYCIEIGEDNRSIEPLTYGRIASYYYLKHQTVKMFKDRLKPECSTEELLSILSDAEEYTDLPVRHNEDHMNSELAKCLPIESNPHSFDSPHTKAHLLLQAHLSRAMLPCPDYDTDTKTVLDQALRVCQAMLDVAANQGWLVTVLNITNLIQMVIQGRWLKDSSLLTLPNIENHHLHLFKKWKPIMKGPHARGRTSIECLPELIHACGGKDHVFSSMVESELHAAKTKQAWNFLSHLPVINVGISVKGSWDDLVEGHNELSVSTLTADKRDDNKWIKLHADQEYVLQVSLQRVHFGFHKGKPESCAVTPRFPKSKDEGWFLILGEVDKRELIALKRVGYIRNHHVASLSFYTPEIPGRYIYTLYFMSDCYLGLDQQYDNLSQRYTSESFCTGQHQGL

SEQ ID NO: 8501 - protein, 2202 aa, Homo sapiens
MALPRLTGALRSFSNVTKQDNYNEEVADLKIKRSKLHEQVLDLGLTWKKIIKFLNEKLEKSKMQSINEDLKDILHAAKQIVGTDNGREAIESGAAFLFMTFHLKDSVGHKETKAIKQMFGPFPSSSATAACNATNRIISHFSQDDFTALVQMTEKEHGDRVFFGKNLAFSFDMHDLDHFDELPINGETQKTISLDYKKFLNEHLQEACTPELKPVEKTNGSFLWCEVEKYLNSTLKEMTEVPRVEDLCCTLYDMLASIKSGDELQDELFELLGPEGLELIEKLLQNRITIVDRFLNSSNDHRFQALQDNCKKILGENAKPNYGCQVTIQSEQEKQLMKQYRREEKRIARREKKAGEDLEVSEGLMCFDPKELRIQREQALLNARSVPILSRQRDADVEKIHYPHVYDSQAEAMKTSAFIAGAKMILPEGIQRENNKLYEEVRISYSEPMPLSFEEKPVYIQDLDEIGQLAFKGMKRLNRIQSIVFETAYNTNENMLICAPTGAGKTNIAMLTVLHEIRQHFQQGVIKKNEFKIVYVAPMKALAAEMTDYFSRRLEPLGIIVKELTGDMQLSKSEILRTQMLVTTPEKWDVVTRKSVGDVALSQIVRLLILDEVHLLHEDRGPVLESIVARTLRQVESTQSMIRILGLSATLPNYLDVATFLHVNPYIGLFFFDGRFRPVPLGQTFLGIKCANKMQQLNNMDEVCYENVLKQVKAGHQVMVFVHARNATVRTAMSLIERAKNCGHIPFFFSTQGHDYVLAEKQVQRSRNKQVRELFPDGFSIHHAGMLRQDRNLVENLFSNGHIKVLVCTATLAWGVNLPAHAVIIKGTQIYAAKRGSFVDLGILDVMQIFGRAGRPQFDKFGEGIIITTHDKLSHYLTLLTQRNPIESQFLESLADNLNAEIALGTVTNVEEAVKWISYTYLYVRMRANPLAYGISHKAYQIDPTLRKHREQLVIEVGRKLDKAQMIRFEERTGYFSSTDLGRTASHYYIKYNTIETFNELFDAHKTEGDIFAIVSKAEEFDQIKVREEEIEELDTLLSNFCELSTPGGVENSYGKINILLQTYISRGEMDSFSLISDSAYVAQNAARIVRALFEIALRKRWPTMTYRLLNLSKVIDKRLWGWASPLRQFSILPPHILTRLEEKKLTVDKLKDMRKDEIGHILHHVNIGLKVKQCVHQIPSVMMEASIQPITRTVLRVTLSIYADFTWNDQVHGTVGEPWWIWVEDPTNDHIYHSEYFLALKKQVISKEAQLLVFTIPIFEPLPSQYYIRAVSDRWLGAEAVCIINFQHLILPERHPPHTELLDLQPLPITALGCKAYEALYNFSHFNPVQTQIFHTLYHTDCNVLLGAPTGSGKTVAAELAIFRVFNKYPTSKAVYIAPLKALVRERMDDWKVRIEEKLGKKVIELTGDVTPDMKSIAKADLIVTTPEKWDGVSRSWQNRNYVQQVTILIIDEIHLLGEERGPVLEVIVSRTNFISSHTEKPVRIVGLSTALANARDLADWLNIKQMGLFNFRPSVRPVPLEVHIQGFPGQHYCPRMASMNKPAFQAIRSHSPAKPVLIFVSSRRQTRLTALELIAFLATEEDPKQWLNMDEREMENIIATVRDSNLKLTLAFGIGMHHAGLHERDRKTVEELFVNCKVQVLIATSTLAWGVNFPAHLVIIKGTEYYDGKTRRYVDFPITDVLQMMGRAGRPQFDDQGKAVILVHDIKKDFYKKFLYEPFPVESSLLGVLSDHLNAEIAGGTITSKQDALDYITWTYFFRRLIMNPSYYNLGDVSHDSVNKFLSHLIEKSLIELELSYCIEIGEDNRSIEPLTYGRIASYYYLKHQTVKMFKDRLKPECSTEELLSILSDAEEYTDLPVRHNEDHMNSELAKCLPIESNPHSFDSPHTKAHLLLQAHLSRAMLPCPDYDTDTKTVLDQALRVCQAMLDVAANQGWLVTVLNITNLIQMVIQGRWLKDSSLLTLPNIENHHLHLFKKWKPIMKGPHARGRTSIESLPELIHACGGKDHVFSSMVESELHAAKTKQAWNFLSHLPVINVGISVKGSWDDLVEGHNELSVSTLTADKRDDNKWIKLHADQEYVLQVSLQRVHFGFHKGKPESCAVTPRFPKSKDEGWFLILGEVDKRELIALKRVGYIRNHHVASLSFYTPEIPGRYIYTLYFMSDCYLGLDQQYDIYLNVTQASLSAQVNTKVSDSLTDLALK

SEQ ID NO: 8502 - protein, 607 aa, Homo sapiens
FVCVFQGLLTFRDVAIEFSPEEWQCLDTAQQNLYRNVMLENYRNLAFLEKSYKCEECGKAFLWSSTLRRHKRIHTGEKPYKCEECGKAFSHSSALAKHKRIHTGEKPYKCKECGKAFSNSSTLANHKITHTEEKPYKCKECDKTFKRLSTLTKHKIIHAGEKLYKCEECGKAFNRSSNLTIHKFIHTGEKPYKCEECGKAFNWSSSLTKHKRIHTREKPFKCKECGKAFIWSSTLTRHKRIHTGEKPYKCEECGKAFSRSSTLTKHKTIHTGEKPYKCKECGKAFKHSSALAKHKIIHAGEKLYKCEECGKAFNQSSNLTTHKIIHTKEKPSKSEECDKAFIWSSTLTEHKRIHTREKTYKCEECGKAFSQPSHLTTHKRMHTGEKPYKCEECGKAFSQSSTLTTHKIIHTGEKPYKCEECGKAFRKSSTLTEHKIIHTGEKPYKCEECGKAFSQSSTLTRHTRMHTGEKPYKCEECGKAFNRSSKLTTHKIIHTGEKPYKCEECGKAFISSSTLNGHKRIHTREKPYKCEECGKAFSQSSTLTRHKRLHTGEKPYKCGECGKAFKESSALTKHKIIHTGEKPYKCEKCGKAFNQSSILTNHKKIHT

SEQ ID NO: 8503 - protein, 1191 aa, Homo sapiens
MPGTPGSLEMGLLTFRDVAIEFSPEEWQCLDTAQQNLYRNVMLENYRNLAFLGIALSKPDLITYLEQGKEPWNMKQHEMVDEPTGICPHFPQDFWPEQSMEDSFQKVLLRKYEKCGHENLQLRKGCKSVDECKVHKEGYNKLNQCLTTAQSKVFQCGKYLKVFYKFLNSNRHTIRHTGKKCFKCKKCVKSFCIRLHKTQHKCVYITEKSCKCKECEKTFHWSSTLTNHKEIHTEDKPYKCEECGKAFKQLSTLTTHKIICAKEKIYKCEECGKAFLWSSTLTRHKRIHTGEKPYKCEECGKAFSHSSTLAKHKRIHTGEKPYKCEECGKAFSHSSALAKHKRIHTGEKPYKCKECGKAFSNSSTLANHKITHTEEKPYKCKECDKTFKRLSTLTKHKIIHAGEKLYKCEECGKAFNRSSNLTIHKFIHTGEKPYKCEECGKAFNWSSSLTKHKRFHTREKPFKCKECGKGFIWSSTLTRHKRIHTGEKPYKCEECGKAFRQSSTLTKHKIIHTGEKPYKFEECGKAFRQSLTLNKHKIIHSREKPYKCKECGKAFKQFSTLTTHKIIHAGKKLYKCEECGKAFNHSSSLSTHKIIHTGEKSYKCEECGKAFLWSSTLRRHKRIHTGEKPYKCEECGKAFSHSSALAKHKRIHTGEKPYKCKECGKAFSNSSTLANHKITHTEEKPYKCKECDKTFKRLSTLTKHKIIHAGEKLYKCEECGKAFNRSSNLTIHKFIHTGEKPYKCEECGKAFNWSSSLTKHKRIHTREKPFKCKECGKAFIWSSTLTRHKRIHTGEKPYKCEECGKAFSRSSTLTKHKTIHTGEKPYKCKECGKAFKHSSALAKHKIIHAGEKLYKCEECGKAFNQSSNLTTHKIIHTKEKPSKSEECDKAFIWSSTLTEHKRIHTREKPYKCEECGKAFSQPSHLTTHKRMHTGEKPYKCEECGKAFSQSSTLTTHKIIHTGEKPYKCEECGKAFRKSSTLTEHKIIHTGEKPYKCEECGKAFSQSSTLTRHTRMHTGEKPYKCEECGKAFNRSSKLTTHKIIHTGEKPYKCEECGKAFISSSTLNGHKRIHTREKPYKCEECGKAFSQSSTLTRHKRLHTGEKPYKCGECGKAFKESSALTKHKIIHTGEKPYKCEKCCKAFNQSSILTNHKKIHTITPVIPLLWEAEAGGSRGQEMETILANTVKPLLY

SEQ ID NO: 8504 - protein, 538 aa, Homo sapiens
HTEEKPYKCKECDKAFKRLSTLTKHKIIHAGEKLYKCEECGKAFNRSSNLTIHKFIHTGEKPYKCEECGKAFNWSSSLTKHKRFHTREKPFKCKECGKAFIWSSTLTRHKRIHTGEKPYKCEECGKAFRQSSTLTKHKIIHTGEKPYKFEECGKAFRQSLTLNKHKIIHSREKPYKCKECGKAFKQFSTLTTHKIIHAGKKLYKCEECGKAFNHSSSLSTHKIIHTGEKSYKCEECGKAFLWSSTLRRHKRIHTGEKPYKCEECGKAFSHSSALAKHKRIHTGEKPYKCKECGKAFSNSSTLANHKITHTEEKPYKCKECDKTFKRLSTLTKHKIIHAGEKLYKCEECGKAFNRSSNLTIHKFIHTGEKPYKEKTYKCEECGKAFSQPSHLTTHKRMHTGEKPYKCEECGKAFSQSSTLTTHKIIHTGEKPYKCEECGKAFRKSSTLTEHKIIHTGEKPYKCEECGKAFSQSSTLTRHTRMHTGEKPYKCEECGKAFNRSSKLTTHKIIHTGEKPYKCEECGKAFISSSTLNGHKRIH

SEQ ID NO: 8505 - protein, 961 aa, Homo sapiens
MVFQLKCGSGPVYISGQHLVSVEEDAESEDEEEEDVKLLSISGKQSALEVEARFHKKDDAVEPEPHRSRLPRAKPPLTSAPGTAAPKLPLSPWGMPAGLTEPAGAAPPAAVSASGTVTMAPAGALPVRVESTPVALGAVTKAPVSVCVEPTASQPLRSPVGTLVTKVAPVSAPPKVSSGPRLPAPQIVAVKAPNTTTIQFPANLQLPPGTVLIKSNSGPLMLVSPQQTVTRAETTSNITSRPAVPANPQTVKICTVPNSSSQLIKKVAVTPVKKLAQIGTTVVTTVPKPSSVQSVAVPTSVVTVTPGKPLNTVTTLKPSSLGASSTPSNEPNLKAENSAAVQINLSPTMLENVKKCKNFLAMLIKLACSGSQSPEMGQNVKKLVEQLLDAKIEAEEFTRKLYVELKSSPQPHLVPFLKKSVVALRQLLPNSQSFIQQCVQQTSSDMVIATCTTTVTTSPVVTTTVSSSQSEKSIIVSGATAPRTVSVQTLNPLAGPVGAKAGVVTLHSVGPTAATGGTTAGTGLLQTSKPLVTSVANTVTTVSLQPEKPVVSGTAVTLSLPAVTFGETSGAAICLPSVKPVVSSAGTTSDKPVIGTPVQIKLAQPGPVLSQPAGIPQAVQVKQLFSLFQVVQQPSGGNEKQVTTISHSSTLTIQKCGQKTMPVNTIIPTSQFPPASILKQITLPGNKILSLQASPTQKNRIKENVTSCFRDEDDINDVTSMAGVNLNEENACILATNSELVGTLIQSCKDEPFLFIGALQKRILDIGKKHDITELNSDAVNLISQATQERLRGLLEKLTAIAQHRMTTYKASENYILCSDTRSQLKFLEKLDQLEKQRKDLEEREMLLKAAKSRSNKEDPEQLRLKQKAKELQQLELAQIQHRDANLTALAAIGPRKKRPLESGIEGLKDNLLASGTSSLTATKQLHRPRITRICLRDLIFCMEQEREMKYSRALYLALLK

SEQ ID NO: 8506 - protein, 863 aa, Homo sapiens
MGNREMEELIPLVNRLQDAFSALGQSCLLELPQIAVVGGQSAGKSSVLENFVGRDFLPRGSGIVTRRPLVLQLVTSKAEYAEFLHCKGKKFTDFDEVRLEIEAETDRVTGMNKGISSIPINLRVYSPHVLNLTLIDLPGITKVPVGDQPPDIEYQIREMIMQFITRENCLILAVTPANTDLANSDALKLAKEVDPQGLRTIGVITKLDLMDEGTDARDVLENKLLPLRRGYVGVVNRSQKDIDGKKDIKAAMLAERKFFLSHPAYRHIADRMGTPHLQKVLNQQLTNHIRDTLPNFRNKLQGQLLSIEHEVEAYKNFKPEDPSRKTKALLQMVQQFAVDFEKRIEGSGDQVDTLELSGGAKINRIFHERFPFEIVKMEFNEKELRREISYAIKNIHGIRTGLFTPDMAFEATVKKQIVKLKGPSLKSVDLVIQELINTVKKCTKKLANFPRLCEETERIVANHIREREGKTKDQVLLLIDIQVSYINTNHEDFIGFANAQQRSSQVHKKTTVGNQVIRKGWLTISNIGIMKGGSKGYWFVLTAESLSWYKDDEEKEKKYMLPLDNLKVRDVEKSFMSSKHIFALFNTEQRNVYKDYRFLELACDSQEDVDSWKASLLRAGVYPDKSVGNNKAENDENGQAENFSMDPQLERQVETIRNLVDSYMSIINKCIRDLIPKTIMHLMINNVKDFINSELLAQLYSSEDQNTLMEESAEQAQRRDEMLRMYQALKEALGIIGDISTATVSTPAPPPVDDSWIQHSRRSPPPSPTTQRRPTLSAPLARPTSGRGPAPAIPSPGPHSGAPPVPFRPGPLPPFPSSSDSFGAPPQVPSRPTRAPPRVPSRRPPPSPTRPTIIRPLESSLLD

SEQ ID NO: 8507 - protein, 235 aa, Homo sapiens
MGHVQLVDVCTFSTAGKLLRFGFSAMFGFGGRTLALAEKYRWMSPNQRRDFAVVKALAKLKAEDCEISFLPFNSSDDVQERRAQGSPKSDCNDQWQMIQGQFLNVSIMAIPCLCSVAPRGLAPNTRLNNGSMALIIARNTSRPEFIKHLKRYASVKNQFNFPFVETYTVEEVKVHPRNNTGGYNPEEEEDETASENCFPWNVDGDLMEVASEVHIRLHPRLISLYGGSMEEMIPK

SEQ ID NO: 8508 - protein, 536 aa, Homo sapiens
MEEPPQEALAEPLKHESPAAPSSAGHTKGQEEDDQKNQAERKADNHTAHRIADQTALRVPSQAESSIFSQATNGVAEQNGHSTPGQAGRRASNPADVSDLRADDQVNQTPSEQTKGKASSQANNVQHEQSDGQVSGLTEERTAEQTERRLPTQAERRTSGQIDGRLAMPSDQRGSRQTDHRMAGQSERRASEQMDRRMSGEAERRTSEQITHRLSKLSERRPSVQIDSGSSVPSDQSPSVQIDSGSSVPSDQRPSVQIDRRMSGKVRRRSSEKTDYRLAGLADPGTSEQTDLRLYGLVDHKTSVKTHHQVYGQATELAEHQAIDQAHSNADQPPVDNAHYTESDQTDHLADRQANHKDQLSYYETRGQSEDRIFPQLGNSKEDKEADYRVQPCKFEDSQVDLNSKPSVEMETQNATTIPPYNPVDARFTSNFQAKDQALFPRLPSILSKLNYTSSQEKTQAIVTKSDEFSEIDQGKGYHIRNQTYRRFPSIVYEDPYQVSLQYMEKHHILQIFQQITENLVYEKPEDPLNFMLCQV

SEQ ID NO: 8509 - protein, 799 aa, Homo sapiens [sequence omitted]

SEQ ID NO: 8510 - protein, 1227 aa, Homo sapiens
MDSFDLALLQEWDLESLCVYEPDRNALRRKERERRNQETQQDDGTFNSSYSLFSEPYKTNKGDELSNRIQNTLGNYDEMKDFLTDRTNQSHLVGVPKPGVPQTPVNKIDEHFVADSRAQNQPSSICSTTTSTPAAVPVQQSKRGTMGWQKAGHPPSDGQQRATQQGSLRTLLGDGVGRQQPRAKQVCNVEVGLQTQERPPAMAAKHSSSGHCVQNFPPSLASKPSLVQQKPTAYVRPMDGQDQAPDESPKLKSSSETSVHCTSYRGVPASKPEPARAKAKLSKFSIPKQGEESRSGETNSCVEEIIREMTWLPPLSAIQAPGKVEPTKFPFPNKDSQLVSSGHNNPKKGDAEPESPDNGTSNTSMLEDDLKLSSDEEENEQQAAQRTALRALSDSAVVQQPNCRTSVPSSKGSSSSSSSGTSSSSSDSESSSGSDSETESSSSESEGSKPPHFSSPEAEPASSNKWQLDKWLNKVNPHKPPILIQNESHGSESNQYYNPVKEDVQDCGKVPDVCQPSLREKEIKSTCKEEQRPRTANKAPGSKGVKQKSPPAAVAVAVSAAAPPPAVPCAPAENAPAPARRSAGKKPTRRTERTSAGDGANCHRPEEPAAADALGTSVVVPPEPTKTRPCGNNRASHRKELRSSVTCEKRRTRGLSRIVPKSKEFIETESSSSSSSSDSDLESEQEEYPLSKAQTVAASASSGNDQRLKEAAANGGSGPRAPVGSINARTTSDIAKELEEQFYTLVPFGRNELLSPLKDSDEIRSLWVKIDLTLLSRIPEHLPQEPGVLSAPATKDSESAPPSHTSDTPAEKALPKSKRKRKCDNEDDYREIKKSQGEKDSSSRLATSTSNTLSANHCNMNINSVAIPINKNEKMLRSPISPLSDASKHKYTSEDLTSSSRPNGNSLFTSASSSKKPKADSQLQPHGGDLTKAAHNNSENIPLHKSRPQTKPWSPGSNGHRDCKRQKLVFDDMPRSADYFMQEAKRMKHKADAMVEKFGKALNYAEAALSFIECGNAMEQGPMESKSPYYLMYSETVELIRYAMRLKTHSGPNATPEDKQLAALCYRCLALLYWRMFRLKRDHAVKYSKALIDYFKNSSKAAQAPSPWGASGKSTGTPSPISPNPFPGSSVGSQGSLSNASALSPSTIVSIPQRIHQMAANHVSITNSILHSYDYWEMADNLAKENREFFNDLDLLMGPVTLHSSMEHLVQYSQQGLHWLRNSAHLS

SEQ ID NO: 8511 - protein, 643 aa, Homo sapiens
MCGICCSVNFSAEHFSQDLKEDLLYNLKQRGPNSSKQLLKSDVNYQCLFSAHVLHLRGVLTTQPVEDERGNVFLWNGEIFSGIKVEAEENDTQILFNYLSSCKNESEILSLFSEVQGPWSFIYYQASSHYLWFGRDFFGRRSLLWHFSNLGKSFCLSSVGTQTSGLANQWQEVPASGLFRIDLKSTVISRCIILQLYPWKYISRENIIEENVNSLSQISADLPAFVSVVANEAKLYLEKPVVPLNMMLPQAALETHCSNISNVPPTREILQVFLTDVHMKEVIQQFIDVLSVAVKKRVLCLPRDENLTANEVLKTCDRKANVAILFSGGIDSMVIATLADRHIPLDEPIDLLNVAFIAEEKTMPTTFNREGNKQKNKCEIPSEEFSKDVAAAAADSPNKHVSVPDRITGRAGLKELQAVSPSRIWNFVEINVSMEELQKLRRTRICHLIRPLDTVLDDSIGCAVWFASRGIGWLVAQEGVKSYQSNAKVVLTGIGADEQLAGYSRHRVRFQSHGLEGLNKEIMMELGRISSRNLGRDDRVIGDHGKEARFPFLDENVVSFLNSLPIWEKANLTLPRGIGEKLLLRLAAVELGLTASALLPKRAMQFGSRIAKMEKINEKASDKCGRLQIMSLENLSIEKETKL

SEQ ID NO: 8512 - protein, 1791 aa, Homo sapiens
METRSSKTRRSLASRTNECQGTMWAPTSPPAGSSSPSQPTWKSSLYSSLAYSEAFHYSFAARPRRLTQLALAQRPEPQLLRLRPSSLRTQDISHLLTGVFRNLYSAEVIGDEVSASLIKARGSENERHEEFVDQLQQIRELYKQRLDEFEMLERHITQAQARAIAENERVMSQAGVQDLESLVRLPPVKSVSRWCIDSELLRKHHLISPEDYYTDTVPFHSAPKGISLPGCSKLTFSCEKRSVQKKELNKKLEDSCRKKLAEFEDELDHTVDSLTWNLTPKAKERTREPLKKASQPRNKNWMNHLRVPQRELDRLLLARMESRNHFLKNPRFFPPNTRYGGKSLVFPPKKPAPIGEFQSTEPEQSCADTPVFLAKPPIGFFTDYEIGPVYEMVIALQNTTTTSRYLRVLPPSTPYFALGLGMFPGKGGMVAPGMTCQYIVQFFPDCLGDFDDFILVETQSAHTLLIPLQARRPPPVLTLSPVLDCGYCLIGGVKMTRFICKNVGFSVGRFCIMPKTSWPPLSFKAIATVGFVEQPPFGILPSVFELAPGHAILVEVLFSPKSLGKAEQTFIIMCDNCQIKELVTIGIGQLIALDLIYISGEKSQPDPGELTDLTAQHFIRFEPENLRSTARKQLIIRNATHVELAFYWQIMKPNLQPLMPGETFSMDSIKCYPDKETAFSIMPRKGVLSPHTDHEFILSFSPHELRDFHSVLQMVLEEVPEPVSSEAESLGHSSYSVDDVIVLEIEVKGSVEPFQVLLEPYALIIPGENYIGINVKKAFKMWNNSKSPIRYLWGKISDCHIIEVEPGTGVIEPSEVGDFELNFTGGVPGPTSQDLLCEIEDSPSPVVLHIEAVFKGPALIINVSALQFGLLRLGQKATNSIQIRNVSQLPATWRMKESPVSLQERPEDVSPFDIEPSSGQLHSLGECRVDITLEALHCQHLETVLELEVENGAWSYLPVYAEVQKPHVYLQSSQVEVRNLYLGVPTKTTITLINGTLLPTQFHWGKLLGHQAEFCMVTVSPKHGLLGPSEECQLKLELTAHTQEELTHLALPCHVSGMKKPLVLGISGKPQGLQVAITISKESSDCSTEQWPGHPKELRLDFGSAVPLRTRVTRQLILTNRSPIRTRFSLKFEYFGSPQNSLSKKTSLPNMPPALLKTVRMQEHLAKREQLDFMESMLSHGKGAAFFPHFSQGMLGPYQQLCIDITGCANMWGEYWDNLICTVGDLLPEVIPVHMAAVGCPISSLRTTSYTIDQAQKEPAMRFGTQVSGGDTVTRTLRLNNSSPCDIRLDWETYVPEDKEDRLVELLVFYGPPFPLRDQAGNELVCPDTPEGGCLLWSPGPSSSSEFSHETDSSVEGSSSASNRVAQKLISVILQAHEGVPSGHLYCISPKQVVVPAGGSSTIYISFTPMVLSPEILHKVECTGYALGFMSLDSKVEREIPGKRHRLQDFAVGPLKLDLHSYVRPAQLSVELDYGGSMEFQCQASDLIPEQPCSGVLSELVTTHHLKLTNTTEIPHYFRLMVSRPFSVSQDGASQDHRAPGPGQKQECEEETASADKQLVLQAQENMLVNVSFSLSLELLSYQKLPADQTLPGVDIQQSASGEREMVFTQNLLLEYTNQTTQARPRPTYMWRRVEVVPLRAVVAVPELQLSTSWVDFGTCFVSQQRVREVYLMNLSGCRSYWTMLMGVVSCTSPRWWWKVCSVRSPAPCGSGAKAPMMRDTCCLTSPEAPPQPSAPGPSWRKNIAQGLGAALQHKDTDLGTWGPLGSSWNGRTPFHNGLSLGPHDMSSELT

SEQ ID NO: 8513 - protein, 1768 aa, Homo sapiens
METRSSKTRRSLASRTNECQGTMWAPTSPPAGSSSPSQPTWKSSLYSSLAYSEAFHYSFAARPRRLTQLALAQRPEPQLLRLRPSSLRTQDISHLLTGVFRNLYSAEVIGDEVSASLIKARGSENERHEEFVDQLQQIRELYKQRLDEFEMLERHITQAQARAIAENERVMSQAGVQDLESLVRLPPVKSVSRWCIDSELLRKHHLISPEDYYTDTVPFHSAPKGISLPGCSKLTFSCEKRSVQKKELNKKLEDSCRKKLAEFEDELDHTVDSLTWNLTPKAKERTREPLKKASQPRNKNWMNHLRVPQRELDRLLLARMESRNHFLKNPRFFPPNTRYGGKSLVFPPKKPAPIGEFQSTEPEQSCADTPVFLAKPPIGFFTDYEIGPVYEMVIALQNTTTTSRYLRVLPPSTPYFALGLGMFPGKGGMVAPGMTCQYIVQFFPDCLGDFDDFILVETQSAHTLLIPLQARRPPPVLTLSPVLDCGYCLIGGVKMTRFICKNVGFSVGRFCIMPKTSWPPLSFKAIATVGFVEQPPFGILPSVFELAPGHAILVEVLFSPKSLGKAEQTFIIMCDNCQIKELVTIGIGQLIALDLIYISGEKSQPDPGELTDLTAQHFIRFEPENLRSTARKQLIIRNATHVELAFYWQIMKPNLQPLMPGETFSMDSIKCYPDKETAFSIMPRKGVLSPHTDHEFILSFSPHELRDFHSVLQMVLEEVPEPVSSEAESLGHSSYSVDDVIVLEIEVKGSVEPFQVLLEPYALIIPGENYIGINVKKAFKMWNNSKSPIRYLWGKISDCHIIEVEPGTGVIEPSEVGDFELNFTGGVPGPTSQDLLCEIEDSPSPVVLHIEAVFKGPALIINVSALQFGLLRLGQKATNSIQIRNVSQLPATWRMKESPVSLQERPEDVSPFDIEPSSGQLHSLGECRVDITLEALHCQHLETVLELEVENGAWSYLPVYAEVQKPHVYLQSSQVEVRNLYLGVPTKTTITLINGTLLPTQFHWGKLLGHQAEFCMVTVSPKHGLLGPSEECQLKLELTAHTQEELTHLALPCHVSGMKKPLVLGISGKPQGLQVAITISKESSDCSTEQWPGHPKELRLDFGSAVPLRTRVTRQLILTNRSPIRTRFSLKFEYFGSPQNSLSKKTSLPNMPPALLKTVRMQEHLAKREQLDFMESMLSHGKGAAFFPHFSQGMLGPYQQLCIDITGCANMWGEYWDNLICTVGDLLPEVIPVHMAAVGCPISSLRTTSYTIDQAQKEPAMRFGTQVSGGDTVTRTLRLNNSSPCDIRLDWETYVPEDKEDRLVELLVFYGPPFPLRDQAGNELVCPDTPEGGCLLWSPGPSSSSEFSHETDSSVEGSSSASNRVAQKLISVILQAHEGVPSGHLYCISPKQVVVPAGGSSTIYISFTPMVLSPEILHKVECTGYALGFMSLDSKVEREIPGKRHRLQDFAVGPLKLDLHSYVRPAQLSVELDYGGSMEFQCQASDLIPEQPCSGVLSELVTTHHLKLTNTTEIPHYFRLMVSRPFSVSQDGASQDHRAPGPGQKQECEEETASADKQLVLQAQENMLVNVSFSLSLELLSYQKLPADQTLPGVDIQQSASGEREMVFTQNLLLEYTNQTTQARPRPTYMWRRVEVVPLRAVVAVPELQLSTSWVDFGTCFVSQQRVREVYLMNLSGCRSYWTMLMGQQEPAKAAVAFRVSPNSGLLEARSANAPPTSIALQVFFTARSSELYESTMVVEGVLGEKSCTLRLRGQGSYDERYMLPHQP

SEQ ID NO: 8514 - protein, 420 aa, Homo sapiens
MSGRPRTTSFAESCKPVQQPSAFGSMKVSRDKDGSKVTTVVATPGQGPDRPQEVSYTDTKVIGNGSFGVVYQAKLCDSGELVAIKKVLQDKRFKNRELQIMRKLDHCNIVRLRYFFYSSGEKKDEVYLNLVLDYVPETVYRVARHYSRAKQTLPVIYVKLYMYQLFRSLAYIHSFGICHRDIKPQNLLLDPDTAVLKLCDFGSAKQLVRGEPNVSYICSRYYRAPELIFGATDYTSSIDVWSAGCVLAELLLGQPIFPGDSGVDQLVEIIKVLGTPTREQIREMNPNYTEFKFPQIKAHPWTKVFRPRTPPEAIALCSRLLEYTPTARLTPLEACAHSFFDELRDPNVKLPNGRDTPALFNFTTQELSSNPPLATILIPPHARIQAAASTPTNATAASDANTGDRGQTNNAASASASNST

SEQ ID NO: 8515 - protein, 433 aa, Homo sapiens
MSGRPRTTSFAESCKPVQQPSAFGSMKVSRDKDGSKVTTVVATPGQGPDRPQEVSYTDTKVIGNGSFGVVYQAKLCDSGELVAIKKVLQDKRFKNRELQIMRKLDHCNIVRLRYFFYSSGEKKDEVYLNLVLDYVPETVYRVARHYSRAKQTLPVIYVKLYMYQLFRSLAYIHSFGICHRDIKPQNLLLDPDTAVLKLCDFGSAKQLVRGEPNVSYICSRYYRAPELIFGATDYTSSIDVWSAGCVLAELLLGQPIFPGDSGVDQLVEIIKVLGTPTREQIREMNPNYTEFKFPQIKAHPWTKDSSGTGHFTSGVRVFRPRTPPEAIALCSRLLEYTPTARLTPLEACAHSFFDELRDPNVKLPNGRDTPALFNFTTQELSSNPPLATILIPPHARIQAAASTPTNATAASDANTGDRGQTNNAASASASNST

SEQ ID NO: 8516 - protein, 672 aa, Homo sapiens
QGKALYDFEMKDKDQDKDCLTFTKDEILTVLRRVDENWAEGMLGDKIGIFPLLYVELNDSAKQLIEMDKPCPAAASSCNASLPSDSGAVASVAPSPTLSSSGAVSAFQRRVDGKKNTKKRHSFTALSVTHRSSQAASHRHSMEISAPVLISSSDPRAAARIGDLAHLSCAAPTQVTSRGPGQASLGSLGFYPQLRARARSSEHLHSSSPCLQLLVASELLSLLQPFHRTYPALPSPLASSAAPDSTPAVGLPCRVGAAPRWKRYLALYAYKPQKSDELELHKGEMYRVLEKCQDGWFKGASLRTGVSGVFPGNYVTPVSRVPAGGAGPPRNNVVGGSPLAKGITTTMHPGSGSLSSLATATRPALPITTPQAHAQHPTASPPTGSCLRHSAQPTASQARSTISTAAHSAAQAQDRPTATVSPLRTQNSPSRLPATSLRPHSVVSPQHSHQPPVQMCPRPAIPLTSAASAITPPNVSAANLNGEAGGGPIGVLSTSSPTNTGCKLDEKKSEKLCHMRSQSFDLLSPCLSPPQAAGAGVAFPVNSSCDCPHQQPHHPLLSWLGSSEAPLQPGPHPADCMAFKPPTTPAIPVPPPLSQLLGCSQHGDCLCGAHPLCCFPRYRVVVSYPPQSEAEIELKEGDIVFVHKKREDGWYKGTLQRNGRTGLFPGSFVESF

SEQ ID NO: 8517 - protein, 452 aa, Homo sapiens
MDESSLLDLLECSVCLERLDTTAKVLPCQHTFCRRCLESIVCSRHELRCPECRILVGCGVDELPANILLVRLLDGIQTMQWVGRGGHRKPLRSPGLPRQIHCGALGRGMPGDHMLSVACRIPLLPYGKALYSYEGKEPGDLKFNKGDIIVLRRKVDEQWYHGELHGTQGFLPASYIQCIQPLPHAPPQGKALYDFEMKDKDQDKDCLTFTKDEILTVLRRVDENWAEGMLGDKIGIFPLLYVELNDSAKQLIEMDKPCPAAASSCNASLPSDSGAVASVAPSPTLSSSGAVSAFQRRVDGKKNTKKRHSFTALSVTHRSSQAASHRHSMEISAPVLISSSDPRAAARIGDLAHLSCAAPTQVTSRGPGQASLGSLGFYPQLRGLPLTLAPCFARRYLALYAYKPQKSDELELHKGEMYRVLEKCQDGWFKGASLRTGVSGVFPGNYVTPVSR

SEQ ID NO: 8518 - protein, 883 aa, Homo sapiens
MDESSLLDLLECSVCLERLDTTAKVLPCQHTFCRRCLESIVCSRHELRCPECRILVGCGVDELPANILLVRLLDGIRQCPRPGPVRPTQANTLHMGQCPQPCQCSPPRCVFPPHHQTSAPQPGQCPRQPWNPCLLPYGKALYSYEGKEPGDLKFNKGDIIVLRRKVDEQWYHGELHGTQGFLPASYIQCIQPLPHAPPQGKALYDFEMKDKDQDKDCLTFTKDEILTVLRRVDENWAEGMLGDKIGIFPLLYVELNDSAKQLIEMDKPCPAAASSCNASLPSDSGAVASVAPSPTLSSSGAVSAFQRRVDGKKNTKKRHSFTALSVTHRSSQAASHRHSMEISAPVLISSSDPRAAARIGDLAHLSCAAPTQVTSRGPGQASLGSLGASATITGATVAAAIPTNSPLSVSRPPPDSLALCRCRLGSLALPDGFPAKLQVLAVAAFSLPVLQGRRALRLKTRTLSGGPTQPVLIPYLALYAYKPQKSDELELHKGEMYRVLEKCQDGWFKGASLRTGVSGVFPGNYVTPVSRVPAGGAGPPRNNVVGGSPLAKGITTTMHPGSGSLSSLATATRPALPITTPQAHAQHPTASPPTGSCLRHSAQPTASQARSTISTAAHSAAQAQDRPTATVSPLRTQNSPSRLPATSLRPHSVVSPQHSHQPPVQMCPRPAIPLTSAASAITPPNVSAANLNGEAGGGPIGVLSTSSPTNTGCKLDEKKSEKLCHMRSQSFDLLSPCLSPPQAAGAGVAFPVNSSCDCPHQQPHHPLLSWLGSSEAPLQPGPHPADCMAFKPPTTPAIPVPPPLSQLLGCSQHGDCLCGAHPLCCFPRYRVVVSYPPQSEAEIELKEGDIVFVHKKREDGWYKGTLQRNGRTGLFPGSFVESF

SEQ ID NO: 8519 - protein, 683 aa, Homo sapiens
MDESSLLDLLECSVCLERLDTTAKVLPCQHTFCRRCLESIVCSRHELRCPECRILVGCGVDELPANILLVRLLDGIRQCPRPGPVRPTQANTLHMGQCPQPCQCSPPRCVFPPHHQTSAPQPGQCPRQPWNPCLLPYGKALYSYEGKEPGDLKFNKGDIIVLRRKVDEQWYHGELHGTQGFLPASYIQCIQPLPHAPPQGKALYDFEMKDKDQDKDCLTFTKDEILTVLRRVDENWAEGMLGDKIGIFPLLYVELNDSAKQLIEMDKPCPAAASSCNASLPSDSGAVASVAPSPTLSSSGAVSAFQRRVDGKKNTKKRHSFTALSVTHRSSQAASHRHSMEISAPVLISSSDPRAAARIGDLAHLSCAAPTQVTSRGAGIPGFSGVLSSAPCSVSPVPQLAWRPPQNCLLGLSGVCPLLPGTGAPLEAWRMVSVPSLVQKMASWYLALYAYKPQKSDELELHKGEMYRVLEKCQDGWFKGASLRTGVSGVFPGNYVTPVSRKCTPSNPATWVPAGGAGPPRNNVVGGSPLAKGITTTMHPGSGSLSSLATATRPALPITTPQAHAQHPTASPPTGSCLRHSAQPTASQARSTISTAAHSAAQAQDRPTATVSPLRTQNSPSRLPATSLRPHSVVSPQHSHQPPVQMCPRPAIPLTSAASAITPPNVSAANLNGEAGGGPIGVL

SEQ ID NO: 8520 - protein, 1121 aa, Homo sapiens
MSLENEDKRARTRSKALRGPPETTAADLSCPTPGCTGSGHVRGKYSRHRSLQSCPLAKKRKLEGAEAEHLVSKRKSHPLKLALDEGYGVDSDGSEDTEVKDASVSDESEGTLEGAEAETSGQDEIHRPETAEGRSPVKSHFGSNPIGSATASSKGSYSSYQGIIATSLLNLGQIAEETLVEEDLGQAAKPGPGIVHLLQEAAEGAASEEGEKGLFIQPEDAEEVVEVTTERSQDLCPQSLEDAASEESSKQKGILSHEEEDEEEEEEEEEEEEDEEEEEEEEEEEEEEEEEEEEEEEEEEEEEEEEAAPDVIFQEDTSHTSAQKAPELRGPESPSPKPEYSVIVEVRSDDDKDEDTHSRKSTVTDESEMQDMMTRGNLGLLEQAIALKAEQVRTVCEPGCPPAEQSQLGLGEPGKAAKPLDTVRKSYYSKDPSRAEKREIKCPTPGCDGTGHVTGLYPHHRSLSGCPHKDRIPPEILAMHENVLKCPTPGCTGQGHVNSNRNTHRSLSGCPIAAAEKLAKSHEKQQPQTGDPSKSSSNSDRILRPMCFVKQLEVPPYGSYRPNVAPATPRANLAKELEKFSKVTFDYASFDAQVFGKRMLAPKIQTSETSPKAFQCFDYSQDAEAAHMAATAILNLSTRCWEMPENLSTKPQDLPSKSVDIEVDENGTLDLSMHKHRKRENAFPSSSSCSSSPGVKSPDASQRHSSTSAPSSSMTSPQSSQASRQDEWDRPLDYTKPSRLREEEPEESEPAAHSFASSEADDQEVSEENFEERKYPGEVTLTNFKLKFLSKDIKKELLTCPTPGCDGSGHITGNYASHRSLSGCPLADKSLRNLMAAHSADLKCPTPGCDGSGHITGNYASHRSLSGCPRAKKSGVKVAPTKDDKEDPELMKCPVPGCVGLGHISGKYASHRSASGCPLAARRQKEGSLNGSSFSWKSLKNEGPTCPTPGCDGSGHANGSFLTHRSLSGCPRATFAGKKGKLSGDEVLSPKFKTSDVLENDEEIKQLNQEIRDLNESNSEMEAAMVQLQSQISSMEKNLKNIEEENKLIEEQNEALFLELSGLSQALIQSLANIRLPHMEPICEQNFDAYVSTLTDMYSNQDPENKDLLESIKQAVRGIQV

SEQ ID NO: 8521 - protein, 1105 aa, Homo sapiens
MAAMAPALTDAAAEAHHIRFKLAPPSSTLSPGSAENNGNANILIAANGTKRKAIAAEDPSLDFRNNPTKEDLGKLQPLVASYLCSDVTSVPSKESLKLQGVFSKQTVLKSHPLLSQSYELRAELLGRQPVLEFSLENLRTMNTSGQTALPQAPVNGLAKKLTKSSTHSDHDNSTSLNGGKRALTSSALHGGEMGGSESGDLKGGMTNCTLPHRSLDVEHTTLYSNNSTANKSSVNSMEQPALQGSSRLSPGTDSSSNLGGVKLEGKKSPLSSILFSALDSDTRITALLRRQADIESRARRLQKRLQVVQAKQVERHIQHQLGGFLEKTLSKLPNLESLRPRSQLMLTRKAEAALRKAASETTTSEGLSNFLKSNSISEELERFTASGIANLRCSEQAFDSDVTDSSSGGESDIEEEELTRADPEQRHVPLRRRSEWKWAADRAAIVSRWNWLQAHVSDLEYRIRQQTDIYKQIRANKGLIVLGEVPPPEHTTDLFLPLSSEVKTDHGTDKLIESVSQPLENHGAPIIGHISESLSTKSCGALRPVNGVINTLQPVLADHIPGDSSDAEEQLHKKQRLNLVSSSSDGTCVAARTRPVLSCKKRRLVRPNSIVPLSKKVHRNSTIRPGCDVNPSCALCGSGSINTMPPEIHYEAPLLERLSQLDSCVHPVLAFPDDVPTSLHFQSMLKSQWQNKPFDKIKPPKKLSLKHRAPMPGSLPDSARKDRHKLVSSFLTTAKLSHHQTRPDRTHRQHLDDVGAVPMVERVTAPKAERLLNPPPPVHDPNHSKMRLRDHSSERSEVLKHHTDMSSSSYLAATHHPPHSPLVRQLSTSSDSPAPASSSSQVTASTSQQPVRRRRGESSFDINNIVIPMSVAATTRVEKLQYKEILTPSWREVDLQSLKGSPDEENEEIEDLSDAAFAALHAKCEEMERARWLWTTSVPPQRRGSRSYRSSDGRTTPQLGSANPSTPQPASPDVSSSHSLSEYSHGQSPRSPISPELHSAPLTPVARDTLRHLASEDTRCSTPELGLDEQSVQPWERRTFPLAHSPQAECEDQLDAQERAARCTRRTSGSKTGRETEAAPTSPPIVPLKSRHLVAAATAQRPTHR

SEQ ID NO: 8522 - protein, 1105 aa, Homo sapiens
MAAMAPALTDAAAEAHHIRFKLAPPSSTLSPGSAENNGNANILIAANGTKRKAIAAEDPSLDFRNNPTKEDLGKLQPLVASYLCSDVTSVPSKESLKLQGVFSKQTVLKSHPLLSQSYELRAELLGRQPVLEFSLENLRTMNTSGQTALPQAPVNGLAKKLTKSSTHSDHDNSTSLNGGKRALTSSALHGGEMGGSESGDLKGGMTNCTLPHRSLDVEHTTLYSNNSTANKSSVNSMEQPALQGSSRLSPGTDSSSNLGGVKLEGKKSPLSSILFSALDSDTRITALLRRQADIESRARRLQKRLQVVQAKQVERHIQHQLGGFLEKTLSKLPNLESLRPRSQLMLTRKAEAALRKAASETTTSEGLSNFLKSNSISEELERFTASGIANLRCSEQAFDSDVTDSSSGGESDIEEEELTRADPEQRHVPLRRRSEWKWAADRAAIVSRWNWLQAHVSDLEYRIRQQTDIYKQIRANKGLIVLGEVPPPEHTTDLFLPLSSEVKTDHGTDKLIESVSQPLENHGAPIIGHISESLSTKSCGALRPVNGVINTLQPVLADHIPGDSSDAEEQLHKKQRLNLVSSSSDGTCVAARTRPVLSCKKRRLVRPNSIVPLSKKVHRNSTIRPGCDVNPSCALCGSGSINTMPPEIHYEAPLLERLSQLDSCVHPVLAFPDDVPTSLHFQSMLKSQWQNKPFDKIKPPKKLSLKHRAPMPGSLPDSARKDRHKLVSSFLTTAKLSHHQTRPDRTHRQHLDDVGAVPMVERVTAPKAERLLNPPPPVHDPNHSKMRLRDHSSERSEVLKHHTDMSSSSYLAATHHPPHSPLVRQLSTSSDSPAPASSSSQVTASTSQQPVRRRRGESSFDINNIVIPMSVAATTRVEKLQYKEILTPSWREVDLQSLKGSPDEENEEIEDLSDAAFAALHAKCEEMERARWLWTTSVPPQRRGSRSYRSSDGRTTPQLGSANPSTPQPASPDVSSSHSLSEYSHGQSPRSPISPELHSAPLTPVARDTPRHLASEDTRCSTPELGLDEQSVQPWERRTFPLAHSPQAECEDQLDAQERAARCTRRTSGSKTGRETEAAPTSPPIVPLKSRHLVAAATAQRPTHR

SEQ ID NO: 8523 - protein, 1245 aa, Homo sapiens
MNNQKVVAVLLQECKQVLDQLLLEAPDVSEEDKSEDQRCRALLPSELRTLIQEAKEMKWPFVPEKWQYKQAVGPEDKTNLKDVIGAGLQQLLASLRASILARDCAAAAAIVFLVDRFLYGLDVSGKLLQVAKGLHKLQPATPIAPQVVIRQARISVNSGKLLKAEYILSSLISNNGATGTWLYRNESDKVLVQSVCIQIRGQILQKLGMWYEAAELIWASIVGYLALPQPDKKVGLSTSLGILADIFVSMSKNDYEKFKNNPQINLSLLKEFDHHLLSAAEACKLAAAFSAYTPLFVLTAVNIRGTCLLSYSSSNDCPPELKNLHLCEAKEAFEIGLLTKRDDEPVTGKQELHSFVKAAFGLTTVHRRLHGETGTVHAASQLCKEAMGKLYNFSTSSRSQDREALSQEVMSVIAQVKEHLQVQSFSNVDDRSYVPESFECRLDKLILHGQGDFQKILDTYSQHHTSVCEVFESDCGNNKNEQKDAKTGVCITALKTEIKNIDTVSTTQEKPHCQRDTGISSSLMGKNVQRELRRGGRRNWTHSDAFRVSLDQDVETETEPSDYSNGEGAVFNKSLSGSQTSSAWSNLSGFSSSASWEEVNYHVDDRSARKEPGKEHLVDTQCSTALSEELENDREGRAMHSLHSQLHDLSLQEPNNDNLEPSQNQPQQQMPLTPFSPHNTPGIFLAPGAGLLEGAPEGIQEVRNMGPRNTSAHSRPSYRSASWSSDSGRPKNMGTHPSVQKEEAFEIIVEFPETNCDVKDRQGKEQGEEISERGAGPTFKASPSWVDPEGETAESTEDAPLDFHRVLHNSLGNISMLPCSSFTPNWPVQNPDSRKSGGPVAEQGIDPDASTVDEEGQLLDSMDVPCTNGHGSHRLCILRQPPGQRAETPNSSVSGNILFPVLSEDCTTTEEGNQPGNMLNCSQNSSSSSVWWLKSPAFSSGSSEGDSPWSYLNSSGSSWVSLPGKMRKEILEARTLQPDDFEKLLAGVRHDWLFQRLENTGVFKPSQLHRAHSALLLKYSKKSELWTAQETIVYLGDYLTVKKKGRQRNAFWVHHLHQEEILGRYVGKDYKEQKGLWHHFTDVERQMTAQHYVTEFNKRLYEQNIPTQIFYIPSTILLILEDKTIKGCISVEPYILGEFVKLSNNTKVVKTEYKATEYGLAYGHFSYEFSNHRDVVVDLQGWVTGNGKGLIYLTDPQIHSVDQKVFTTNFGKRGIFYFFNNQHVECNEICHRLSLTRPSMEKPCT

SEQ ID NO: 8524 - protein, 1568 aa, Homo sapiens
EAGEGILSERRFEDSVIVRTMKPHAELEGSRRFLHHRGEPRLLEKHAQGRPRFDWLQDEDEQGSPQDAGLHLDLPAQPPPLAPFRRVFVPVEDTPKTLDMAVVGGREDLEDLEGLAQPSEWGLPTSASEVATQTWTVNSEASVERLQPLLPPIRTGPYLCELLEEVAEGVASPDEDEDEEPAVFPCIECSIYFKQKEHLLEHMSQHRRAPGQEPPADLAPLACGECGWAFADPTALEQHRQLHQASREKIIEEIQKLKQVPGDEGREARLQCPKCVFGTNSSRAYVQHAKLHMREPPGQTTKEPFGGSSGAGSPSPEASALLYQPYGAAVGLSACVFCGFPAPSESLLREHVRLVHAHPHWEEDGEAYEEDPASQPGTSQDAHACFPDTAVDYFGKAEPSLAPMWRENPAGYDPSLAFGPGCQQLSIRDFPLSKPLLHGTGQRPLGRLAFPSTLASTPYSLQLGRNKSTVHPQGLGERRRPWSEEEEEEEEEEDVVLTSEMDFSPENGVFSPLATPSLIPQAALELKQAFREALQAVEATQGQQQQLRGMVPIVLVAKLGPQVMAAARVPPRLQPEELGLAGAHPLDFLLLDAPLGGPLGLDTLLDGDPAMALKHEERKCPYCPDRFHNGIGLANHVRGHLNRVGVSYNVRHFISAEEVKAIERRFSFQKKKKKVANFDPGTFSLMRCDFCGAGFDTRAGLSSHARAHLRDFGITNWELTVSPINILQELLATSAAEQPPSPLGREPGGPPGSFLTSRRPRLPLTVPFPPTWAEDPGPAYGDAQSLTTCEVCGACFETRKGLSSHARSHLRQLGVAESESSGAPIDLLYELVKQKGLPDAHLGLPPGLAKKSSSLKEVVAGAPRPGLLSLAKPLDAPAVNKAIKSPPGFSAKGLGHPPSSPLLKKTPLALAGSPTPKNPEDKSPQLSLSPRPASPKAQWPQSEDEGPLNLTSGPEPARDIRCEFCGEFFENRKGLSSHARSHLRQMGVTEWYVNGSPIDTLREILKRRTQSRPGGPPNPPGPSPKALAKMMGGAGPGSSLEARSPSDLHISPLAKKLPPPPGSPLGHSPTASPPPTARKMFPGLAAPSLPKKLKPEQIRVEIKREMLPGALHGELHPSEGPWGAPREDMTPLNLSSRAEPVRDIRCEFCGEFFENRKGLSSHARSHLRQMGVTEWSVNGSPIDTLREILKKKSKPCLIKKEPPAGDLAPALAEDGPPTVAPGPVQSPLPLSPLAGRPGKPGAGPAQVPRELSLTPITGAKPSATGYLGSVAAKRPLQEDRLLPAEVKAKTYIQTELPFKAKTLHEKTSHSSTEACCELCGLYFENRKALASHARAHLRQFGVTEWCVNGSPIETLSEWIKHRPQKVGAYRSYIQGGRPFTKKFRSAGHGRDSDKRPSLGLAPGGLAVVGRSAGGEPGPEAGRAADGGERPLAASPPGTVKAEEHQRQNINKFERRQARPPDASAARGGEDTNDLQQKLEEVRQPPPRVRPVPSLVPRPPQTSLVKFVGNIYTLKCRFCEVEFQGPLSIQEEWVRHLQRHILEMNFSKADPPPEESQAPQAQTAAAEAP

SEQ ID NO: 8525 - protein, 154 aa, Homo sapiens
DTLFCKYQLPAPPESSSILYKVFAVTRDGRILAAGGKSNHLHLWCLEARQLFRIIQMPTKVRAIRHLEFLPDSFDAGSNQVLGVLSQDGIMRFINMQTCKLLFEIGSLDEGISSSAISPHGRYIASIMENGSLNIYSVQALTQEINKEEVRAQN

SEQ ID NO: 8526 - protein, 211 aa, Homo sapiens
MKIWTSEHVFDHPWETVTTAAMQKYPNPMNPSVVGVDVLDRHIDPSGKLHSHRLLSTEWGLPSIVKSLIGAARTKTYVQEHSVVDPVEKTMELKSTNISFTNMVSVDERLIYKPHPQDPEKTVLTQEAIITVKGVSLSSYLEGLMASTISSNASKGREAMEWVIHKLNAEIEELTASARGTIRTPMAAAAFCREVIVTVGRQHRVLQVSPN

SEQ ID NO: 8527 - protein, 194 aa, Homo sapiens
MKIWTSEHVFDHPWETVTTAAMQKYPNPMNPSVVGVDVLDRHIDPSGKLHSHRLLSTEWGLPSIVKSLIGAARTKTYVQEHSVVDPVEKTMELKSTNISFTNMVSVDERLIYKPHPQDPEKTVLTQEAIITVKGVSLSSYLEGLMASTISSNASKGREAMEWVIHKLNAEIEELTASARGTIRTPMAAAAFAEK

SEQ ID NO: 8528 - protein, 301 aa, Homo sapiens
SKSESPKGPEQLRKLIGGLSLETTDESPRIHSEQWGMLTDCVIMRDPNTKHSRGFGFVSYATVEEVDAAMNARPHKVDEELWNQRELSEDSQRPGAHSTVKKTFVAGIKEDTEEHHLRDYFQQYRKIEKRGFAFVTFDDHDFVDKTVIQKHHTVNGHNCEVRKALSNQEMASASSSQRGQSGSGNFGPGYSGGSRGYGSGGQGYGNQGSGYGRSDSYDSYNNGGRGGFGGGSGSNFGGGGSYNDFGNYNNSSNFGTMKVGNFGGRNSGSYGVGGQYFAKPRHQGGYGGSSSSGSYDSGRRF

SEQ ID NO: 8529 - protein, 2651 aa, Homo sapiens
LQHRPPGFSRLKMSSSHSRAGQSAAGAAPGGGVDTRDAEMPATEKDLAEDAPWKKIQQNTFTRWCNEHLKCVSKRIANLQTDLSDGLRLIALLEVLSQKKMHRKHNQRPTFRQMQLENVSVALEFLDRESIKLVSIDSKAIVDGNLKLILGLIWTLILHYSISMPMWDEEEDEEAKKQTPKQRLLGWIQNKLPQLPITNFSRDWQSGRALGALVDSCAPGLCPDWDSWDASKPVTNAREAMQQADDWLGIPQVITPEEIVDPNVDEHSVMTYLSQFPKAKLKPGAPLRPKLNPKKARAYGPGIEPTGNMVKKRAEFTVETRSAGQGEVLVYVEDPAGHQEEAKVTANNDKNRTFSVWYVPEVTGTHKVTVLFAGQHIAKSPFEVYVDKSQGDASKVTAQGPGLEPSGNIANKTTYFEIFTAGAGTGEVEVVIQDPMGQKGTVEPQLEARGDSTYRCSYQPTMEGVHTVHVTFAGVPIPRSPYTVTVGQACNPSACRAVGRGLQPKGVRVKETADFKVYTKGAGSGELKVTVKGPKGEERVKQKDLGDGVYGFEYYPMVPGTYIVTITWGGQNIGRSPFEVKVGTECGNQKVRAWGPGLEGGVVGKSADFVVEAIGDDVGTLGFSVEGPSQAKIECDDKGDGSCDVRYWPQEAGEYAVHVLCNSEDIRLSPFMADIRDAPQDFHPDRVKARGPGLEKTGVAVNKPAELTVDAKHGGKAPLRVQVQDNEGCPVEALVKDNGNGTYSCSYVPRKPVKHTAMVSWGGVSIPNSPFRVNVGAGSHPNKVKVYGPGVAKTGLKAHEPTYFTVDCAEAGQGDVSIGIKCAPGVVGPAEADIDFDIIRNDNDTFTVKYTPRGAGSYTIMVLFADQATPTSPIRVKVEPSHDASKVKAEGPGLSRTGVELGKPTHFTVNAKAAGKGKLDVQFSGLTKGDAVRDVDIIDHHDNTYTVKYTPVQQGPVGVNVTYGGDPIPKSPFSVAVSPSLDLSKIKVSGLGEKVDVGKDQEFTVKSKGAGGQGKVASKIVGPSGAAVPCKVEPGLGADNSVVRFLPREEGPYEVEVTYDGVPVPGSPFPLEAVAPTKPSKVKAFGPGLQGGSAGSPARFTIDTKGAGTGGLGLTVEGPCEAQLECLDNGDGTCSVSYVPTEPGDYNINILFADTHIPGSPFKAHVVPCFDASKVKCSGPGLERATAGEVGQFQVDCSSAGSAELTIEICSEAGLPAEVYIQDHGDGTHTITYIPLCPGAYTVTIKYGGQPVPNFPSKLQVEPAVDTSGVQCYGPGIEGQGVFREATTEFSVDARALTQTGGPHVKARVANPSGNLTETYVQDRGDGMYKVEYTPYEEGLHSVDVTYDGSPVPSSPFQVPVTEGCDPSRVRVHGPGIQSGTTNKPNKFTVETRGAGTGGLGLAVEGPSEAKMSCMDNKDGSCSVEYIPYEAGTYSLNVTYGGHQVPGSPFKVPVHDVTDASKVKCSGPGLSPGMVRANLPQSFQVDTSKAGVAPLQVKVQGPKGLVEPVDVVDNADGTQTVNYVPSREGPYSISVLYGDEEVPRSPFKVKVLPTHDASKVKASGPGLNTTGVPASLPVEFTIDAKDAGEGLLAVQITDPEGKPKKTHIQDNHDGTYTVAYVPDVTGRYTILIKYGGDEIPFSPYRVRAVPTGDASKCTVTGAGIGPTIQIGEETVITVDTKAAGKGKVTCTVCTPDGSEVDVDVVENEDGTFDIFYTAPQPGKYVICVRFGGEHVPNSPFQVTALAGDQPSVQPPLRSQQLAPQYTYAQGGQQTWAPERPLVGVNGLDVTSLRPFDLVIPFTIKKGEITGEVRMPSGKVAQPTITDNKDGTVTVRYAPSEAGLHEMDIRYDNMHIPGSPLQFYVDYVNCGHVTAYGPGLTHGVVNKPATFTVNTKDAGEGGLSLAIEGPSKAEISCTDNQDGTCSVSYLPVLPGDYSILVKYNEQHVPGSPFTARVTGDDSMRMSHLKVGSAADIPINISETDLSLLTATVVPPSGREEPCLLKRLRNGHVGISFVPKETGEHLVHVKKNGQHVASSPIPVVISQSEIGDASRVRVSGQGLHEGHTFEPAEFIIDTRDAGYGGLSLSIEGPSKVDINTEDLEDGTCRVTYCPTEPGNYIINIKFADQHVPGSPFSVKVTGEGRVKESITRRRRAPSVANVGSHCDLSLKIPEISIQDMTAQVTSPSGKTHEAEIVEGENHTYCIRFVPAEMGTHTVSVKYKGQHVPGSPFQFTVGPLGEGGAHKVRAGGPGLERAEAGVPAEFSIWTREAGAGGLAIAVEGPSKAEISFEDRKDGSCGVAYVVQEPGDYEVSVKFNEEHIPDSPFVVPVASPSGDARRLTVSSLRESGLKVNQPASFAVSLNGAKGAIDAKVHSPSGALEECYVTEIDQDKYAVRFIPRENGVYLIDVKFNGTHIPGSPFKIRVGEPGHGGDPGLVSAYGAGLEGGVTGNPAEFVVNTSNAGAGALSVTIDGPSKVKMDCQECPEGYRVTYTPMAPGSYLISIKYGGPYHIGGSPFKAKVTGPRLVSNHSLHETSSVFVDSLTKATCAPQHGAPGPGPADASKVVAKGLGLSKAYVGQKSSFTVDCSKAGNNMLLVGVHGPRTPCEEILVKHVGSRLYSVSYLLKDKGEYTLVVKWGDEHIPGSPYRVVVP

SEQ ID NO: 8530 - protein, 2647 aa, Homo sapiens
MSSSHSRAGQSAAGAAPGGGVDTRDAEMPATEKDLAEDAPWKKIQQNTFTRWCNEHLKCVSKRIANLQTDLSDGLRLIALLEVLSQKKMHRKHNQRPTFRQMQLENVSVALEFLDRESIKLVSIDSKAIVDGNLKLILGLIWTLILHYSISMPMWDEEEDEEAKKQTPKQRLLGWIQNKLPQLPITNFSRDWQSGRALGALVDSCAPGLCPDWDSWDASKPVTNAREAMQQADDWLGIPQVITPEEIVDPNVDEHSVMTYLSQFPKAKLKPGAPLRPKLNPKKARAYGPGIEPTGNMVKKRAEFTVETRSAGQGEVLVYVEDPAGHQEEAKVTANNDKNRTFSVWYVPEVTGTHKVTVLFAGQHIAKSPFEVYVDKSQGDASKVTAQGPGLEPSGNIANKTTYFEIFTAGAGTGEVEVVIQDPMGQKGTVEPQLEARGDSTYRCSYQPTMEGVHTVHVTFAGVPIPRSPYTVTVGQACNPSACRAVGRGLQPKGVRVKETADFKVYTKGAGSGELKVTVKGPKGEERVKQKDLGDGVYGFEYYPMVPGTYIVTITWGGQNIGRSPFEVKVGTECGNQKVRAWGPGLEGGVVGKSADFVVEAIGDDVGTLGFSVEGPSQAKIECDDKGDGSCDVRYWPQEAGEYAVHVLCNSEDIRLSPFMADIRDAPQDFHPDRVKARGPGLEKTGVAVNKPAEFTVDAKHGGKAPLRVQVQDNEGCPVEALVKDNGNGTYSCSYVPRKPVKHTAMVSWGGVSIPNSPFRVNVGAGSHPNKVKVYGPGVAKTGLKAHEPTYFTVDCAEAGQGDVSIGIKCAPGVVGPAEADIDFDIIRNDNDTFTVKYTPRGAGSYTIMVLFADQATPTSPIRVKVEPSHDASKVKAEGPGLSRTGVELGKPTHFTVNAKAAGKGKLDVQFSGLTKGDAVRDVDIIDHHDNTYTVKYTPVQQGPVGVNVTYGGDPIPKSPFSVAVSPSLDLSKIKVSGLGEKVDVGKDQEFTVKSKGAGGQGKVASKIVGPSGAAVPCKVEPGLGADNSVVRFLPREEGPYEVEVTYDGVPVPGSPFPLEAVAPTKPSKVKAFGPGLQGGSAGSPARFTIDTKGAGTGGLGLTVEGPCEAQLECLDNGDGTCSVSYVPTEPGDYNINILFADTHIPGSPFKAHVVPCFDASKVKCSGPGLERATAGEVGQFQVDCSSAGSAELTIEICSEAGLPAEVYIQDHGDGTHTITYIPLCPGAYTVTIKYGGQPVPNFPSKLQVEPAVDTSGVQCYGPGIEGQGVFREATTEFSVDARALTQTGGPHVKARVANPSGNLTETYVQDRGDGMYKVEYTPYEEGLHSVDVTYDGSPVPSSPFQVPVTEGCDPSRVRVHGPGIQSGTTNKPNKFTVETRGAGTGGLGLAVEGPSEAKMSCMDNKDGSCSVEYIPYEAGTYSLNVTYGGHQVPGSPFKVPVHDVTDASKVKCSGPGLSPGMVRANLPQSFQVDTSKAGVAPLQVKVQGPKGLVEPVDVVDNADGTQTVNYVPSREGPYSISVLYGDEEVPRSPFKVKVLPTHDASKVKASGPGLNTTGVPASLPVEFTIDAKDAGEGLLAVQITDPEGKPKKTHIQDNHDGTYTVAYVPDVTGRYTILIKYGGDEIPFSPYRVRAVPTGDASKCTVTVSIGGHGLGAGIGPTIQIGEETVITVDTKAAGKGKVTCTVCTPDGSEVDVDVVENEDGTFDIFYTAPQPGKYVICVRFGGEHVPNSPFQVTALAGDQPSVQPPLRSQQLAPQYTYAQGGQQTWAPERPLVGVNGLDVTSLRPFDLVIPFTIKKGEITGEVRMPSGKVAQPTITDNKDGTVTVRYAPSEAGLHEMDIRYDNMHIPGSPLQFYVDYVNCGHVTAYGPGLTHGVVNKPATFTVNTKDAGEGGLSLAIEGPSKAEISCTDNQDGTCSVSYLPVLPGDYSILVKYNEQHVPGSPFTARVTGDDSMRMSHLKVGSAADIPINISETDLSLLTATVVPPSGREEPCLLKRLRNGHVGISFVPKETGEHLVHVKKNGQHVASSPIPVVISQSEIGDASRVRVSGQGLHEGHTFEPAEFIIDTRDAGYGGLSLSIEGPSKVDINTEDLEDGTCRVTYCPTEPGNYIINIKFADQHVPGSPFSVKVTGEGRVKESITRRRRAPSVANVGSHCDLSLKIPEISIQDMTAQVTSPSGKTHEAEIVEGENHTYCIRFVPAEMGTHTVSVKYKGQHVPGSPFQFTVGPLGEGGAHKVRAGGPGLERAEAGVPAEFSIWTREAGAGGLAIAVEGPSKAEISFEDRKDGSCGVAYVVQEPGDYEVSVKFNEEHIPDSPFVVPVASPSGDARRLTVSSLQESGLKVNQPASFAVSLNGAKGAIDAKVHSPSGALEECYVTEIDQDKYAVRFIPRENGVYLIDVKFNGTHIPGSPFKIRVGEPGHGGDPGLVSAYGAGLEGGVTGNPAEFVVNTSNAGAGALSVTIDGPSKVKMDCQECPEGYRVTYTPMAPGSYLISIKYGGPYHIGGSPFKAKVTGPRLVSNHSLHETSSVFVDSLTKATCAPQHGAPGPGPADASKVVAKGLGLSKAYVGQKSSFTVDCSKAGNNMLLVGVHGPRTPCEEILVKHVGSRLYSVSYLLKDKGEYTLVVKWGHEHIPGSPYRVVVP

SEQ ID NO: 8531 - protein, 605 aa, Homo sapiens
MVSNHYFLLCVNLPLREIHTPGPSPSCLGDSLAETTLSEDTTDSVGSASPHGSSEKSSSFSLSSTEVHMVRPGYSHRVSLPTSPGILATSPYPETDSAFFEPSHLTSAADEGAVQVSRRTISSNSFSPEVFVLPVDVEKENAHFYVADMIISAMEKMKCNILSQQQTESWSKEVSGLLGSDQPDSEMTFDTNIKQESGSSTSSYSGYEGKLGKYEKAVCCAVLQVSPVTETRTYHDVKEICKCDVDEFVILELGDFNDITETCSCSCSSSKSVTYEPDFNSAELLAKELYRVFQKCWILSVVNSQLAGSLSAAGSIVVNEECVRKDFESSMNVVQEIKFKSRIRGTEDWAPPRFQIIFNIHPPLKRDLVVAAQNFFCAGCGTPVEPKFVKRLRYCEYLGKYFCDCCHSYAESCIPARILMMWDFKKYYVSNFSKQLLDSIWHQPIFNLLSIGQSLYAKAKELDRVKEIQEQLFHIKKLLKTCRFANSALKEFEQVPGHLTDELHLFSLEDLVRIKKGLLAPLLKDILKASLAHVAGCELCQGKGFICEFCQNTTVIFPFQTATCRRCSACRACFHKQCFQSSECPRCARITARRKLLESVASAAT

SEQ ID NO: 8532 - protein, 465 aa, Homo sapiens
PLKKALRMMGAPNLISDNLDCGLSYSVISYLKKLSQQTKLESERILASVGKKPPQEIGIKVKNHSGGGMSLTHNKNFRKLLKEITGETALRLTELNTKEFAGFQIGLLNKDLKPQTYRNAYDIPRRGLLDQLTRMRSNLLKTHKFIVGQDEDSLHSVPVAQMGNYQEYLKTLASPLREIDPDQPKRLHTFGNPFKQDKKGMMIDEADEFVAGPQNKVKRPGEPNSPMSSKRRRSMSLLLRKPQTPPTVTNHVGGKGPPSASWFPSYPNLIKPTLVHTDATIIHDGHEEKMENGQITPDGFLSKSAPSELINMTGDLMPPNQVDSLSDDFTSLSKDGLIQKPGSNAFVGGAKNCSLSVDDQKDPVASTLGAMPNTLQITPAMAQGINADIKHQLMKEVRKFGRKYERIFILLEEVQGPLEMKKQFVEFTIKEAARFKRRVLIQYLEKVLEKINSHHLHNNISHINS

SEQ ID NO: 8533 - protein, 642 aa, Homo sapiens
MIPNGYLMFEDENFIESSVAKLNALRKSGQFCDVRLQVCGHEMLAHRAVLACCSPYLFEIFNSDSDPHGISHVKFDDLNPEAVEVLLNYAYTAQLKADKELVKDVYSAAKKLKMDRVKQVCGDYLLSRMDVTSCISYRNFASCMGDSRLLNKVDAYIQEHLLQISEEEEFLKLPRLKLEVMLEDNVCLPSNGKLYTKVINWVQRSIWENGDSLEELMEEVQTLYYSADHKLLDGNLLDGQAEVFGSDDDHIQFVQKKPPRENGHKQISSSSTGCLSSPNATVQSPKHEWKIVASEKTSNNTYLCLAVLDGIFCVIFLHGRNSPQSSPTSTPKLSKSLSFEMQQDELIEKPMSPMQYARSGLGTAEMNGKLIAAGGYNREECLRTVECYNPHTDHWSFLAPMRTPRARFQMAVLMGQLYVVGGSNGHSDDLSCGEMYDSNIDDWIPVPELRTNRCNAGVCALNGKLYIVGGSDPYGQKGLKNCDVFDPVTKLWTSCAPLNIRRHQSAVCELGGYLYIIGGAESWNCLNTVERYNPENNTWTLIAPMNVARRGAGVAVLNGKLFVCGGFDGSHAISCVEMYDPTRNEWKMMGNMTSPRSNAGIATVGNTIYAVGGFDGNEFLNTVEVYNLESNEWSPYTKIFQF

SEQ ID NO: 8534 - protein, 195 aa, Homo sapiens
MGSRASTLLRDEELEEIKKETGFSHSQITRLYSRFTSLDKGENGTLSREDFQRIPELAINPLGDRIINAFFPEGEDQVNFRGFMRTLAHFRPIEDNEKSKDVNGPEPLNSRSNKLHFAFRLYDLDKDEKISRDELLQVLRMMVGVNISDEQLGSIADRTIQEADQDGDSAISFTEFVKVLEKVDVEQKMSIRFLH

SEQ ID NO: 8535 - protein, 606 aa, Homo sapiens
VRFRDVAVVFSPEEWDHLTPEQRNLYKDVMLDNCKYLASLGNWTYKAHVMSSLKQGKEPWMMEREVTDKAFTMENTEHIVLLSSIMNVMTVAWLLGMCHNLLDIRKSIRPSKVIQHQSMHSGLKPYKCDVCQKAFRFLSSLSIHQRFHVGNRVNLTRHQKTHTQRKPFSCNFCGKTFHRFSEKTQHLLIHTRKKYYTCNYCKKEFNPYSKFILHQRTHTGEKPHKCDVCEKSFKSISNLNKHQKTHTGEKPFSCNECKKTFAQRTDLARHQQIHTGKKSFICSSCKKTFVRLSDLTQHKGTHTGERPYQCTTCEKAFKYRSNFTKHQKTHSIGRPFACNECGKTYRLNWELNQHKKIHTGEKPYECGECGKRFNNNSNLNKHKKIHTGEKHFVCNQCGKAFSLNSKLSRHQRTHNKKENSSKSVSNLNKHQKTHAGEKPFPCNECKKAFAQRMDLARHQQIHTGRKPFICSSCKKTFVRLSDLTQHKGTHTGERPYQCTTCEKAFKYQSNFTKHQKTHSIGRPFTCNECGKTFRLNWKLNQHKKIHTGEKPYECGECGKCFNNNSNLSKHKKIHTGEKHFVCNQCGKAFSLNSKLSRHQITHNKKK

SEQ ID NO: 8536 - protein, 586 aa, Homo sapiens
LVRFRDVAVVFSPEEWDHLTPEQRNLYKDVMLDNCKYLASLGNWTYKAHVMSSLKQGKEPWMMEREVTGDPCPGNKQMEVITAHTSTQSNLDTPPPTPTRRICTLYKHFECNQCGETFNRPSKVIQHQSMHSGLKPYKCDVCQKAFRFLSSLSIHQRFHVGNRVNLTRHQKTHTQRKPFSCNFCGKTFHRFSEKTQHLLIHTRKKYYTCNYCKKEFNPYSKFILHQRTHTGEKPHKCDVCEKSFKSISNLNKHQKTHTGEKPFSCNECKKTFAQRTDLARHQQIHTGKKSFICSSCKKTFVRLSDLTQHKGTHTGERPYQCTTCEKAFKYRSNFTKHQKTHSIGRPFACNECGKTYRLNWELNQHKKIHTGEKPYECGECGKRFNNNSNLNKHKKIHTGEKHFVCNQCGKAFSLNSKLSRHQRTHNKKENSSKSVSNLNKHQKTHAGEKPFPCNECKKAFAQRMDLARHQQIHTGRKPFICSSCKKTFVRLSDLTQHKGTHTGERPYQCTTCEKAFKYQSNFTKHQKTHSIGRPFTCNECGKTFRLNWKLNQHKKIHTGEKPYECGECGKCFNNNSNLSKHKKIHT

SEQ ID NO: 8537 - protein, 684 aa, Homo sapiens
MSLMGHGKVEMLLYAVPLLKAPNCLSSSMQLPHGGGRHQELVRFRDVAVVFSPEEWDHLTPEQRNLYKDVMLDNCKYLASLACQPALATFRALNESGNAFRQSFHHGEYRTHRTFVQHYECDDCGMAFGHVSQLTGHQKIHKVGETHEYGENTRGFRHRSSFTMLQRICTLYKHFECNQCGETFNRPSKVIQHQSMHSGLKPYKCDVCQKAFRFLSSLSIHQRFHVGNRVNLTRHQKTHTQRKPFSCNFCGKTFHRFSEKTQHLLIHTRKKYYTCNYCKKEFNPYSKFILHQRTHTGEKPHKCDVCEKSFKSISNLNKHQKTHTGEKPFSCNECKKTFAQRTDLARHQQIHTGKKSFICSSCKKTFVRLSDLTQHKGTHTGERPYQCTTCEKAFKYRSNFTKHQKTHSIGRPFACNECGKTYRLNWELNQHKKIHTGEKPYECGECGKRFNNNSNLNKHKKIHTGEKHFVCNQCGKAFSLNSKLSRHQRTHNKKENSSKSVSNLNKHQKTHAGEKPFPCNECKKAFAQRMDLARHQQIHTGRKPFICSSCKKTFVRLSDLTQHKGTHTGERPYQCTTCEKAFKYQSNFTKHQKTHSIGRPFTCNECGKTFRLNWKLNQHKKIHTGEKPYECGECGKCFNNNSNLSKHKKIHTGEKHFVCNQCGKAFSLNSKLSRHQITHNKKKP

SEQ ID NO: 8538 - protein, 411 aa, Homo sapiens
  VARIANT 225, 281, 363: Xaa = Any Amino Acid
MDFRSMQGGAALQAGEPSRVTPVLGLRLASGIPERVVCLVSQALSHCWKRFLVFLDLRPEGRFQGNQEEALKLGAKKVFIEDVSREFVEEFIWPAIQFSALHEDRYLLGTSLTRPCIACKQVEIAHREGAKYVSHGVTGKGSDQVQFELNCYSLAPQIKVIAPWSMPEFYNRFKGHNDLMEYAKHHGIPILVTPKNLWSMNKNLMHISYEAGILENPKNQAPPDXVKKGVPVKVTDIKDGSTYQTSLELFMYLNEVAGKHGVGRTDIVENRFIGMKSRGIXEAPAGTILYHAHLDIKAFTMDWEVHKIKQGLGLKFAELVYTGFWHSTECEFACHCFAKSQEPVEGKVQVSVFKGQVYILGRXSPLSLYNEKLVSVNMQGDYEPIDATGFINISSLRLKEYHHLQSKVTAK

SEQ ID NO: 8539 - protein, 336 aa, Homo sapiens
MSQAVQTNGTQPLSKTWELSLYELQRTPQEAITDGLEIVVSPRSLHSELMCPICLDMLKNTMTTKECLHRFCADCIITALRSGNKECPTCRKKLVSKRSLRPDPNFDALISKIYPSRDEYEAHQERVLARINKHNNQQALSHSIEEGLKIQAMNRLQRGKKQQIENGSGAEDNGDSSHCSNASTHSNQEAGPSNKRTKTSDDSGLELDNNNAAMAIDPVMDGASEIELVFRPHPTLMEKDDSAQTRYIKTSGNATVDHLSKYLAVRLALEELRSKGESNQMNLDTASEKQYTIYIATASGQFTVLNGSFSLELVSEKYWKVNKPMELYYAPTKEHK

SEQ ID NO: 8540 - protein, 86 aa, Homo sapiens
MAPQKHGGGGGGGSGPSAGSGGGGFGGSAATASSGKSGGGGCGGGGSYSASSSSAALPVNKSKMEHVQADHELFLQAFEKIQGFRL

SEQ ID NO: 8541 - protein, 527 aa, Homo sapiens
MGKRQHQKDKMYITCAEYTHFYGGKKPDLPQTNFRRLPFDHCSLSLQPFVYPVCTPDGIVFDLLNIVPWLKKYGTNPSNGEKLDGRSLIKLNFSKNSEGKYHCPVLFTVFTNNTHIVAVRTTGNVYAYEAVEQLNIKAKNFRDLLTDEPFSRQDIITLQDPTNLDKFNVSNFYHVKNNMKIIDPDEEKAKQDPSYYLKNTNAETRETLQELYKEFKGDEILAATMKAPEKKKVDKLNAAHYSTGKVSASFTSTAMVPETTHEAAAIDEDVLRYQFVKKKGYVRLHTNKGDLNLELHCDLTPKTCENFIRLCKKHYYDGTIFHRSIRNFVIQGGDPTGTGTGGESYWGKPFKDEFRPNLSHTGRGILSMANSGPNSNRSQFFITFRSCAYLDKKHTIFGRVVGGFDVLTAMENVESDPKTDRPKEEIRIDATTVFVDPYEEADAQIAQERKTQLKVAPETKVKSSQPQAGSQGPQTFRQGVGKYINPAATEQQRKSPQPVPLSPCPRRSPVGVLGTSAPGSSRLPDDH

SEQ ID NO: 8542 - protein, 350 aa, Homo sapiens
FRNIVPWLKKYGTNPSNGEKLDGRSLIKLNFSKNSEGKYHCPVLFTVFTNNTHIVAVRTTGNVYAYEAVEQLNIKAKNFRDLLTDEPFSRQDIITLQVSVPCLPAPAAFSTCSQPRPLQGPTPTGGVWLASRQATRPHPTASHGTAEVPPWFPWQAHYSTGKVSASFTSTAMVPETTHEAGAELGPWLVAAIDEDVLRYQFVKKKGYVRLHTNKGDLNLELHCDLTPKTCENFIRLCKKHYYDGTIFHRSIRNFVIQGGDPTGTGTGGESYWGKPFKDEFRPNLSHTGRGILSMANSGPNSNRSQFFITFRSCAYLDKKHTIFGRVVGGFDVLTAMENVESDPKTDRPKV

SEQ ID NO: 8543 - protein, 520 aa, Homo sapiens
MGKRQHQKDKMYITCAEYTHFYGGKKPDLPQTNFRRLPFDHCSLSLQPFVYPVCTPDGIVFDLLNIVPWLKKYGTNPSNGEKLDGRSLIKLNFSKNSEGKYHCPVLFTVFTNNTHIVAVRTTGNVYAYEAVEQLNIKAKNFRDLLTDEPFSRQDIITLQDPTNLDKFNVSNFYHVKNNMKIIDPDEEKAKQDPSYYLKNTNAETRETLQELYKEFKGDEILAATMKAPEKKKVDKLNAAHYSTGKVSASFTSTAMVPETTHEAAAIDEDVLRYQFVKKKGYVRLHTNKGDLNLELHCDLTPKTCENFIRLCKKHYYDGTIFHRSIRNFVIQGGDPTGTGTGGESYWGKPFKDEFRPNLSHTGRGILSMANSGPNSNRSQFFITFRSCAYLDKKHTIFGRVVGGFDVLTAMENVESDPKTDRPKEEIRIDATTVFVDPYEEADAQIAQERKTQLKVAPETKVKSSQPQAGSQGPQTFRQGVGKYINPAATKRAAEEEPSTSATVPMSKKKPSRGFGDFSSW

SEQ ID NO: 8544 - protein, 402 aa, Homo sapiens
TDLPQTNFRRLPFDHCSLSLQPFVYPVCTPDGIVFDLLNIVPWLKKYGTNPSNGEPTEVTGLPVCAFSLGKYHCPVLFTVFTNNTHIVAVRTTGNVYAYEAVEQLNIKAKNFRDLLTDEPFSRQDIITLQDPTNLDKFNVSNFYHVKNNMKIIDPGPCYCFVDEEKAKQDPSYYLKNTNAETRETLQELYKEFKGDEILAATMKAPEKKKVDKLNAAHYSTGKVSASFTSTAMVPETTHEAAAIDEDVLRYQFVKKKGYVRLHTNKGDLNLELHCDLTPKTCENFIRLCKKHYYDGTIFHRSIRNFVIQGGDPTGTGTGGESYWGKPFKDEFRPNLSHTGRGILSMANSGPNSNRSQFFITFRSCAYLDKKHTIFGRVVGGFDVLTAMENVESDPKTDRPKV

SEQ ID NO: 8545 - protein, 1054 aa, Homo sapiens
MARLRGGRIPAMPQPSPGQPAGTQWCFQGTVFALQLRDFHSVLQMVLEEVPEPVSSEAESLGHSSYSVDDVIVLEIEVKGSVEPFQVLLEPYALIIPGENYIGINVKKAFKMWNNSKSPIRYLWGKISDCHIIEVEPGTGVIEPSEVGDFELNFTGGVPGPTSQDLLCEIEDSPSPVVLHIEAVFKPFSLVCSAWGRKPQTPSRSGTSASSQPHGMKESPVSLQERPEDVSPFDIEPSSGQLHSLGECRVDITLEALHCQHLETVLELEVENGAWSYLPVYAEVQKPHVYLQSSQVEVRNLYLGVPTKTTITLINGTLLPTQFHWGKLLGHQAEFCMVTVSPKHGLLGPSEECQLKLELTAHTQEELTHLALPCHVSGMKKPLVLGISGKPQGLQVAITISKESSDCSTEQWPGHPKELRLDFGSAVPLRTRVTRQLILTNRSPIRTRFSLKFEYFGSPQNSLSKKTSLPNMPPALLKTVRMQEHLAKREQLGCANMWGEYWDNLICTVGDLLPEVIPVHMAAVGCPISSLRTTSYTIDQAQKEPAMRFGTQVSGGDTVTRTLRLNNSSPCDIRLDWETYVPEDKEDRLVELLVFYGPPFPLRDQAGNELVCPDTPEGGCLLWSPGPSSSSEFSHETDSSVEGSSSASNRVAQKLISVILQAHEGVPSGHLYCISPKQVVVPAGGSSTIYISFTPMVLSPEILHKVECTGYALGFMSLDSKVEREIPGKRHRLQDFAVGPLKLDLHSYVRPAQLSVELDYGGSMEFQCQASDLIPEQPCSGVLSELVTTHHLKLTNTTEIPHYFRLMVSRPFSVSQDGASQDHRAPGPGQKQECEEETASADKQLVLQAQENMLVNVSFSLSLELLSYQKLPADQTLPGVDIQQSASGEREMVFTQNLLLEYTNQTTQARPRPTYMWRRVEVVPLRAVVAVPELQLSTSWVDFGTCFVSQQRVREVYLMNLSGCRSYWTMLMGQQEPAKAAVAFRVSPNSGLLEARSANAPPTSIALQVFFTARSSELYESTMVVEGVLGEKSCTLRLRGQGSYDERYMLPHQP

SEQ ID NO: 8546 - protein, 1262 aa, Homo sapiens
MEDGKPVWAPHPTDGFQMGNIVDIGPDSLTIEPLNQKGKTFLALINQVFPAEEDSKKDVEDNCSLMYLNEATLLHNIKVRYSKDRIYTYVANILIAVNPYFDIPKIYSSEAIKSYQGKSLGTRPPHVFAIADKAFRDMKVLKMSQSIIVSGESGAGKTENTKFVLRYLTESYGTGQDIDDRIVEANPLLEAFGNAKTVRNNNSSRFGKFVEIHFNEKSSVVGGFVSHYLLEKSRICVQGKEERNYHIFYRLCAGASEDIREKLHLSSPDNFRYLNRGCTRYFANKETDKQILQNRKSPEYLKAGSMKDPLLDDHGDFIRMCTAMKKIGLDDEEKLDLFRVVAGVLHLGNIDFEEAGSTSGGCNLKNKSAQSLEYCAELLGLDQDDLRVSLTTRVMLTTAGGTKGTVIKVPLKVEQANNARDALAKTVYSHLFDHVVNRVNQCFPFETSSYFIGVLDIAGFEYFEHNSFEQFCINYCNEKLQQFFNERILKEEQELYQKEGLGVNEVHYVDNQDCIDLIEAKLVGILDILDEENRLPQPSDQHFTSAVHQKHKDHFRLTIPRKSKLAVHRNIRDDEGFIIRHFAGAVCYETTQFVEKNNDALHMSLESLICESRDKFIRELFESSTNNNKDTKQKAGKLSFISVGNKFKTQLNLLLDKLRSTGASFIRCIKPNLKMTSHHFEGAQILSQLQCSGMVSVLDLMQGGYPSRASFHELYNMYKKYMPDKLARLDPRLFCKALFKALGLNENDYKFGLTKVFFRPGKFAEFDQIMKSDPDHLAELVKRVNHWLTCSRWKKVQWCSLSVIKLKNKIKYRAEACIKMQKTIRMWLCKRRHKPRIDGLVKVGTLKKRLDKFNEVVSVLKDGKPEMNKQIKNLEISIDTLMAKIKSTMMTQEQIQKEYDALVKSSEELLSALQKKKQQEEEAERLRRIQEEMEKERKRREEDEKRRRKEEEERRMKLEMEAKRKQEEEERKKREDDEKRIQAEVEAQLARQKEEESQQQAVLEQERRDRELALRIAQSEAELISDEAQADLALRRGPAVLATKAAAGTKKYDLSKWKYAELRDTINTSCDIELLAACREEFHRRLKVYHAWKSKNKKRNTETEQRAPKSVTDYDFAPFLNNSPQQNPAAQIPARQREIEMNRQQRFFRIPFIRPADQYKDPQSKKKGWWYAHFDGPWIARQMELHPDKPPILLVAGKDDMEMCELNLEETGLTRKRGAEILPRQFEEIWERCGGIQYLQNAIESRQARPTYATAMLQSLLK

SEQ ID NO: 8547 - protein, 1285 aa, Homo sapiens
MEDGKPVWAPHPTDGFQMGNIVDIGPDSLTIEPLNQKGKTFLALINQVFPAEEDSKKDVEDNCSLMYLNEATLLHNIKVRYSKDRIYTYVANILIAVNPYFDIPKIYSSEAIKSYQGKSLGTRPPHVFAIADKAFRDMKVLKMSQSIIVSGESGAGKTENTKFVLRYLTESYGTGQDIDDRIVEANPLLEAFGNAKTVRNNNSSRFGKFVEIHFNEKSSVVGGFVSHYLLEKSRICVQGKEERNYHIFYRLCAGASEDIREKLHLSSPDNFRYLNRGCTRYFANKETDKQILQNRKSPEYLKAGSMKDPLLDDHGDFIRMCTAMKKIGLDDEEKLDLFRVVAGVLHLGNIDFEEAGSTSGGCNLKNKSAQSLEYCAELLGLDQDDLRVSLTTRVMLTTAGGTKGTVIKVPLKVEQANNARDALAKTVYSHLFDHVVNRVNQCFPFETSSYFIGVLDIAGFEYFEHNSFEQFCINYCNEKLQQFFNERILKEEQELYQKEGLGVNEVHYVDNQDCIDLIEAKLVGILDILDEENRLPQPSDQHFTSAVHQKHKDHFRLTIPRKSKLAVHRNIRDDEGFIIRHFAGAVCYETTQFVEKNNDALHMSLESLICESRDKFIRELFESSTNNNKDTKQKAGKLSFISVGNKFKTQLNLLLDKLRSTGASFIRCIKPNLKMTSHHFEGAQILSQLQCSGMVSVLDLMQGGYPSRASFHELYNMYKKYMPDKLARLDPRLFCKALFKALGLNENDYKFGLTKVFFRPGKFAEFDQIMKSDPDHLAELVKRVNHWLTCSRWKKVQWCSLSVIKLKNKIKYRAEACIKMQKTIRMWLCKRRHKPRIDGLVKVGTLKKRLDKFNEVVSVLKDGKPEMNKQIKNLEISIDTLMAKIKSTMMTQEQIQKEYDALVKSSEELLSALQKKKQQEEEAERLRRIQEEMEKERKRREEDEKRRRKEEEERRMKLEMEAKRKQEEEERKKREDDEKRIQAEVEAQLARQKEEESQQQAVLEQERRDRELALRIAQSEAELISDEAQADLALRRNDGTRPKMTPEQMAKEMSEFLSRGPAVLATKAAAGTKKYDLSKWKYAELRDTINTSCDIELLAACREEFHRRLKVYHAWKSKNKKRNTETEQRAPKSVTDYDFAPFLNNSPQQNPAAQIPARQREIEMNRQQRFFRIPFIRPADQYKDPQSKKKGWWYAHFDGPWIARQMELHPDKPPILLVAGKDDMEMCELNLEETGLTRKRGAEILPRQFEEIWERCGGIQYLQNAIESRQARPTYATAMLQSLLK

SEQ ID NO: 8548 - protein, 1179 aa, Homo sapiens
GNLAVTSKEDLILYFWTAYIYNKAIKMSGASVKVAVRVRPFNSRETSKESKCIIQMQGNSTSIINPKNPKEAPKSFSFDYSYWSHTSPEDPCFASQNRVYNDIGKEMLLHAFEGYNVCIFAYGQTGAGKSYTMMGKQEESQAGIIPQLCEELFEKINDNCNEEMSYSVEVSYMEIYCERVRDLLNPKNKGNLRVREHPLLGPYVEDLSKLAVTSYTDIADLMDAGNKARTVAATNMNETSSRSHAVFTIVFTQKKHDNETNLSTEKVSKISLVDLAGSERADSTGAKGTRLKEGANINKSLTTLGKVISALAEVSKKKKKTDFIPYRDSVLTWLLRENLGGNSRTAMVAALSPADINYDETLSTLRYADRAKQIKCNAVINEDPNAKLVRELKEEVTRLKDLLRAQGLGDIIDTSMGSLTSSPSSCSLSSQVGLTSVTSIQERIMSTPGGEEAIERLKESEKIIAELNETWEEKLRKTEAIRMEREALLAEMGVAIREDGGTLGVFSPKKTPHLVNLNEDPLMSECLLYYIKDGITRVGQADAERRQDIVLSGAHIKEEHCIFRSERSNSGEVIVTLEPCERSETYVNGKRVSQPVQLRSGNRIIMGKNHVFRFNHPEQARAEREKTPSAETPSEPVDWTFAQRELLEKQGIDMKQEMEKRLQEMEILYKKEKEEADLLLEQQRLDADSDSGDDSDKRSCEESWKLITSLREKLPPSKLQTIVKKCGLPSSGKKREPIKMYQIPQRRRLSKDSKWVTISDLKIQAVKEICYEVALNDFRHSRQEIEALAIVKMKELCAMYGKKDPNERDSWRAVARDVWDTVGVGDEKIEDVMATGKGSTDVDDLKVHIDKLEDILQEVKKQNNMKDEEIKVLRNKMLKMEKVLPLIGSQEQKSPGSHKAKEPVGAGVSSTSENNVSKGDNGELAKEERVSQLMNGDPAFRRGRLRWMRQEQIRFKNLQQQEITKQLRRQNVPHRFIPPENRKPRFPFKSNPKHRNSWSPGTHIIITEDEVIELRIPKDDEARKGNKEESQEKGGKGAFKDPQFPWGSQGMRSQDHIQVSKQHINNQQQPPQLRWRSNSLNNGQPKSTRCQASASAESLNSHSGHPTADVQTFQAKRHIHQHRQSYCNYNTGGQLEGNAATSYQKQTDKPSHCSQFVTPPRMRRQFSAPNLKAGRETTV

SEQ ID NO: 8549 - protein, 1153 aa, Homo sapiens
MSGASVKVAVRVRPFNSRETSKESKCIIQMQGNSTSIINPKNPKEAPKSFSFDYSYWSHTSPEDPCFASQNRVYNDIGKEMLLHAFEGYNVCIFAYGQTGAGKSYTMMGKQEESQAGIIPQLCEELFETNHDNCNEEMSYSVEVSYMEIYCERVRDLLNPKNKGNLRVRDHPLRGPYVEDLSKLAVTSYTDIADLMDAGNKARTVAATNMNETSSRSHVVYTIVFTQKKHDNETILATVKVSKTSLVDLAGSDRAASTGAKGTRLKEGAIINKSLTTLGKVISALAEVSKKKKKTDFIPYRDSVLTWLLRENLGGNSRTAMVAALSPADINYDETLSTLRYADRAKQIKCNAVINEDPNAKLVRELKEEVTRLKDLLRAQGLGDIIDTSMGSLTSSPSSCSLSSQVGLTSVTSIQERIMSTPGGEEAIERLKESEKIIAELNETWEEKLRKTEAIRMEREALLAEMGVAIREDGGTLGVFSPKKTPHLVNLNEDPLMSECLLYYIKDGITRVGQADAERRQDIVLSGAHIKEEHCIFRSERSNSGEVIVTLEPCERSETYVNGKRVSQPVQLRSGNRIIMGKNHVFRFNHPEQARAEREKTPSAETPSEPVDWTFAQRELLEKQGIDMKQEMEKRLQEMEILYKKEKEEADLLLEQQRLDADSDSGDDSDKRSCEESWKLITSLREKLPPSKLQTIVKKCGLPSSGKKREPIKMYQIPQRRRLSKDSKWVTISDLKIQAVKEICYEVALNDFRHSRQEIEALAIVKMKELCAMYGKKDPNERDSWRAVARDVWDTVGVGDEKIEDVMATGKGSTDVDDLKVHIDKLEDILQEVKKQNNMKDEEIKVLRNKMLKMEKVLPLIGSQEQKSPGSHKAKEPVGAGVSSTSENNVSKGDNGELAKEERVSQLMNGDPAFRRGRLRWMRQEQIRFKNLQQQEITKQLRRQNVPHRFIPPENRKPRFPFKSNPKHRNSWSPGTHIIITEDEVIELRIPKDDEARKGNKEESQEKGGKGAFKDPQFPWGSQGMRSQDHIQVSKQHINNQQQPPQLRWRSNSLNNGQPKSTRCQASASAESLNSHSGHPTADVQTFQAKRHIHQHRQSYCNYNTGGQLEGNAATSYQKQTDKPSHCSQFVTPPRMRRQFSAPNLKAGRETTV

SEQ ID NO: 8550 - protein, 1520 aa, Homo sapiens
EVIFMDNQQDKAIVASANGENTLINGVKENDSEDQDVAMKSFAALEAAAPIQPTPVAQKETLMYPRGLLPLPSKKPCMQSPPSPLGLIEAPEHAANSASVNAISLTSGIAKGLNTWSLPNECEKAPFAIMEPAGMSALNGDCLMQPSRTCLGCFMESKDAVDPEPGISLKVGDLNRDYETCAVSDIGIQCINAGENMKYGEQLLSDQLLGFPLHKSRAGDRRETEKPDIDLEDPAQKSYYEALLLDKCNTEEALLANSNQDWGYFETFISESKIELLDLCSKNELSVNLFSEEDVDNYMFDDDESTLGSDVCSLKIRYESFQDNVRDKTTLLMQEDAQFNFFPSVFTTCPKRESKSGALKQSSDFSQFKVPDVSIIWGEEDKNLDKKKGKEEGQEDKGVEKKDGKDNGEKPALNKPCSGTEVEQLKNPKQGHLANSLETSGSFSDDSSFIEISYDAMGEIKDCSRYMARDTNSGSSSSQQNYGLRAKRKVRYSEDYLYDVDSLEGEKVNERKEWLPVGSKEEDDDEWCPKKRRKVTRKEPPVIIKYIIINRFKGEKNMLVKLGKVDASETTVNLSENQLNKYAKLAPLKGFWQKKKKQRNTNTDSIKTPFSQKQSFEPGSFEVSFLPPARKRKSKLGNRHRIQRIPSIEISASSKQISLCNDQRHASNHKEDGGLKGTLKSAPLGAPSCANGSHLNDITGPDSVKVKAQDTEFKGPERKVLNKIKFKSEARLKSKKVKAAGQESKPIVQMSPLLENQSSKANLKNEVIPGTSNSSRLSEFHEAKAAKSSTFLPTTCSSEMPLSSANVTTNIPVIPGGYLQTLLDASDLSNNTSISYFSHHSPEQNEGSLTQTEKSFVPLQPTQDCVLTSSSDSELQQSSHNFKMESSNYRNVWPNKATSGTQEFMAEVSREIAPTQSSEFGASQVVSMENNLTPTTYNPICLNSGGSNCNKVLYDSMQDTQLPSDDSYQLCHFNNGEICFPFQQGPVNMDDGRLFSFDSMAPLSVSSSNYCSLSLKSCEKDGDDDITDDFLAHCSPKLVIQQSIDEIAPLKESTDLLDISNFTPDKFRHSSLSEMSPPDTPSLSPQITRCESMKTLGTLKGFQEGVPGPLDSVEKIKWDCSTLSRQVQMEDGFTLNNHQFQFHMFNDEDSVSLLQKNPCLSTFNDPSGQISTNNKVSKSRKKSSPSKSGAMNQSSSQKNTRKKSLKGNNKGIEKPPGKNSRQVPKSTKKGKYMAAINGEKMQIGIGRGGSQTNTISSTGKTLAECIQHGGPMASMKMPSQKGLSGDWALGKESSPGWSDMSMGTNTNSLLDDDQREFQEPSYILSNIASGMADVQRFMMASIEPLWEPMEHHGDPNIFYSPESNSLKLKTLKILAGTPQESKKKINSGSQGATKNHRSIKGVSKSNGKTAIGDPGRANMPGYNEDSRSTFFDKKYSNMSTLGNNGPTHKKLYRHKSSSKALRDEKCKGKHMEREQVHKDESGTASFEKLRDSDYNLLKAETTFWVLPVFEEETRIFQKDI

SEQ ID NO: 8551 - protein, 101 aa, Homo sapiens
MPRKITEVLVRKVPDNQQFLDLRVAVLGNVDSGKSTLLGVLTQGELDNGRGRARLNLFRHLHEIQSGRTSSISFEILGFNSKGEVHGINGTQWGQTLRMGW

SEQ ID NO: 8552 - protein, 285 aa, Homo sapiens
MGTPGEGLGRCSHALIRGVPESLASGEGAGAGLPALDLAKAQREHGVLGGKLRQRLGLQLLELPPEESLPLGPLLGDTAVIQGDTALITRPWSPARRPEVDGVRKALQDLGLRIVEIGDENATLDGTDVLFTGREFFVGLSKWTNHRGAEIVADTFRDFAVSTVPVSGPSHLRGLCGMGGPRTVVAGSSDAAQKAVRAMAVLTDHPYASLTLPDDAAADCLFLRPGLPGVPPFLLHRGGGDLPNSQEALQKLSDVTLVPVSCSELEKAGAGLSSLCLVLSTRPHS

SEQ ID NO: 8553 - protein, 425 aa, Homo sapiens
MGSGWKKKKEQMERDGCSEQESQPCAFIGIGNSDQEMQQLNLEGKNYCTAKTLYISDSDKRKHFIFSVKMFYGNSDDIGVFLSKRIKVISKPSKKKQSLKNADLCIASGTKVALFNRLRSQTVSTRYLHVEGGNFHASSQQWGAFFIHLLDDDESEGEEFTVRDVYIHYGQTCKLVCSVTGMALPRLIIMKVDKHTALLDADDPVSQLHKCAFYLKDTERMYLCLSQERIIQFQATPCPKEPNKEMINDGASWTIISTDKAEYTFYEGMGPVLAPVTPVPVVESLQLNGGGDVAMLELTGQNFTPNLRVWFGDVEAETMYRCGESMLCVVPDISAFREGWRWVRQPVQVPVTLVRNDGIIYSTSLTFTYTPEPGPRPHCSVAGAILPANSSQVPPNESNTNSEGSYTNASTNSTSVTSSTATVVS

SEQ ID NO: 8554 - protein, 500 aa, Homo sapiens
MDHTEGLPAEEPPAHAPSPGKFGERPPPKRLTREAMRNYLKERGDQTVLILHAKVAQKSYGNEKRFFCPPPCVYLMGSGWKKKKEQMERDGCSEQESQPCAFIGIGNSDQEMQQLNLEGKNYCTAKTLYISDSDKRKHFIFSVKMFYGNSDDIGVFLSKRIKVISKPSKKKQSLKNADLCIASGTKVALFNRLRSQTVSTRYLHVEGGNFHASSQQWGAFFIHLLDDDESEGEEFTVRDVYIHYGQTCKLVCSVTGMALPRLIIMKVDKHTALLDADDPVSQLHKCAFYLKDTERMYLCLSQERIIQFQATPCPKEPNKEMINDGASWTIISTDKAEYTFYEGMGPVLAPVTPVPVVESLQLNGGGDVAMLELTGQNFTPNLRVWFGDVEAETMYRCGESMLCVVPDISAFREGWRWVRQPVQVPVTLVRNDGIIYSTSLTFTYTPEPGPRPHCSVAGAILPANSSQVPPNESNTNSEGSYTNASTNSTSVTSSTATVVS

SEQ ID NO: 8555 - protein, 411 aa, Homo sapiens
MAWIKRESQPCAFIGIGNSDQEMQQLNLEGKNYCTAKTLYISDSDKRKHFIFSVKMFYGNSDDIGVFLSKRIKVISKPSKKKQSLKNADLCIASGTKVALFNRLRSQTVSTRYLHVEGGNFHASSQQWGAFFIHLLDDDESEGEEFTVRDVYIHYGQTCKLVCSVTGMALPRLIIMKVDKHTALLDADDPVSQLHKCAFYLKDTERMYLCLSQERIIQFQATPCPKEPNKEMINDGASWTIISTDKAEYTFYEGMGPVLAPVTPVPVVESLQLNGGGDVAMLELTGQNFTPNLRVWFGDVEAETMYRCGESMLCVVPDISAFREGWRWVRQPVQVPVTLVRNDGIIYSTSLTFTYTPEPGPRPHCSVAGAILPANSSQVPPNESNTNSEGSYTNASTNSTSVTSSTATVVS

SEQ ID NO: 8556 - protein, 485 aa, Homo sapiens
MGGCRKFGERPPPKRLTREAMRNYLKERGDQTVLILHAKVAQKSYGNEKRFFCPPPCVYLMGSGWKKKKEQMERDGCSEQESQPCAFIGIGNSDQEMQQLNLEGKNYCTAKTLYISDSDKRKHFMLSVKMFYGNSDDIGVFLSKRIKVISKPSKKKQSLKNADLCIASGTKVALFNRLRSQTVSTRYLHVEGGNFHASSQQWGAFFIHLLDDDESEGEEFTVRDGYIHYGQTVKLVCSVTGMALPRLIIRKVDKQTALLDADDPVSQLHKCAFYLKDTERMYLCLSQERIIQFQATPCPKEPNKEMINDGASWTIISTDKAEYTFYEGMGPVLAPVTPVPVVESLQLNGGGDVAMLELTGQNFTPNLRVWFGDVEAETMYRCGESMLCVVPDISAFREGWRWVRQPVQVPVTLVRNDGIIYSTSLTFTYTPEPGPRPHCSAAGAILRANSSQVPPNESNTNSEGSYTNASTNSTSVTSSTATVVS

SEQ ID NO: 8557 - protein, 46 aa, Homo sapiens
MTLTKGSFTYSSGEEYRGEWKEGEKDPWGVSMMNTSFAGGQIHQDI

SEQ ID NO: 8558 - protein, 462 aa, Homo sapiens
MSIAGVAAQEIRVPLKTGFLHNGRAMGNMRKTYWSSRSEFKNNFLNIDPITMAYSLNSSAQERLIPLGHASKSAPMNGHCFAENGPSQKSSLPPLLIPPSENLGPHEEDQVVCGFKKLTVNGVCASTPPLTPIKNSPSLFPCAPLCERGSRPLPPLPISEALSLDDTDCEVEFLTSSDTDFLLEDSTLSDFKYDVPGRRSFRGCGQINYAYFDTPAVSAADLSYVSDQNGGVPDPNPPPPQTHRRLRRSHSGPAGSFNKPAIRISNCCIHRASPNSDEDKPEVPPRVPIPPRPVKPDYRRWSAEVTSSTYSDEDRPPKVPPREPLSPSNSRTPSPKSLPSYLNGVMPPTQSFAPDPKYVSSKALQRQNSEGSASKVPCILPIIENGKKVSSTHYYLLPERPPYLDKYEKFFREAEETNGGAQIQPLPADCGISSATEKPDSKTKMDLGGHVKRKHLSYVVSP

SEQ ID NO: 8559 - protein, 328 aa, Homo sapiens
MSMLAERRRKQKWAVDPQNTAWSNDDSKFGQRMLEKMGWSKGKGLGAQEQGATDHIKVQVKNNHLGLGATINNEDNWIAHQDDFNQLLAELNTCHGQETTDSSDKKEKKSFSLEEKSKISKNRVHYMKFTKGKDLSSRSKTDLDCIFGKRQSKKTPEGDASPSTPEENETTTTSAFTIQEYFAKRMAALKNKPQVPVPGSDISETQVERKRGKKRNKEATGKDVESYLQPKAKRHTEGKPERAEAQERVAKKKSAPAEEQLRGPCWDQSSKASAQDAGDHVQPPEGRDFTLKPKKRRGKKKLQKPVEIAEDATLEETLVKKKKKKDSK

SEQ ID NO: 8560 - protein, 1209 aa, Homo sapiens
GWRVDLKDQQTVIMTECTSLQFVSPFAFEAMQKVDVVCLASLSDPELRLLLPCLVRMALCAPADQSQSWAQDKKLILRLLSGVEAVNSIVALLSVDFHALEQDASKEQQLRHKLGGGSGESILVSQLQHGLTLEFEHSDSPRRLRLVLSELLAIMNKVSESNGEFFFKSSELFESPVYLEEAADVLCILQAELPSLLPIVDVAEALLHVRNGAWFLCLLVANVPDSFNEVCRGLIKNGERQDEESLGGRRRTDALRFLCKMNPSQALKVRGMVVEECHLPGLGVALTLDHTKNEACEDGVSDLVCFVSGLLLGTNAKVRTWFGTFIRNGQQRKRETSSSVLWQMRRQLLLELMGILPTVRSTRIVEEADVDMEPNVSVYSGLKEEHVVKASALLRLYCALMGIAGLKPTEEEAEQLLQLMTSRPPATPAGVRFVSLSFCMLLAFSTLVSTPEQEQLMVVWLSWMIKEEAYFESTSGVSASFGEMLLLVAMYFHSNQLSAIIDLVCSTLGMKIVIKPSSLSRMKTIFTQEIFTEQVVTAHAVRVPVTSNLSANITGFLPIHCIYQLLRSRSFTKHKVSIKDWIYRQLCETSTPLHPQLLPLIDVYINSILTPASKSNPEATNQPVTEQEILNIFQGVIGGDNIRLNQRFSITAQLLVLYYILSYEEALLANTKTLAAMQRKPKSYSSSLMDQIPIKFLIRQAQGLQQELGGLHSALLRLLATNYPHLCIVDDWICEEEITGTDALLRRMLLTNNAKNHSPKQLQEAFSAVPVNHTQVMQIIEHLTLLSASELIPYAEVLTSNMSQLLNSGVPRRILQTVNKLWMVLNTVMPRRLWVMTVNALQPSIKFVRQQKYTQNDLMIDPLIVLRCDQRVHRCPPLMDITLHMLNGYLLASKAYLSAHLKETEQDRPSQNNTIGLVGQTDAPEVTREELKNALLAAQDSAAVQILLEICLPTEEEKANGVNPDSLLRNVQSVITTSAPNKGMEEGEDNLLCNLREVQCLICCLLHQMYIADPNIAKLVHFQGYPCELLPLTVAGIPSMHICLDFIPELIAQPELEKQIFAIQLLSHLCIQYALPKSLSVARLAVNVMGTLLTVLTQAKRYAFFMPTLPSLVSFCRAFPPLYEDIMSLLIQIGQVCASDVATQTRDIDPIITRLQQIKEKPSGWSQICKDSSYKNGSRDTGSMDPDVQLCHCIERTVIEIINMSVSGI

SEQ ID NO: 8561 - protein, 1204 aa, Homo sapiens
MKDQQTVIMTECTSLQFVSPFAFEAMQKVDVVCLASLSDPELRLLLPCLVRMALCAPADQSQSWAQDKKLILRLLSGVEAVNSIVALLSVDFHALEQDASKEQQLRHKLGGGSGESILVSQLQHGLTLEFEHSDSPRRLRLVLSELLAIMNKVSESNGEFFFKSSELFESPVYLEEAADVLCILQAELPSLLPIVDVAEALLHVRNGAWFLCLLVANVPDSFNEVCRGLIKNGERQDEESLGGRRRTDALRFLCKMNPSQALKVRGMVVEECHLPGLGVALTLDHTKNEACEDGVSDLVCFVSGLLLGTNAKVRTWFGTFIRNGQQRKRETSSSVLWQMRRQLLLELMGILPTVRSTRIVEEADVDMEPNVSVYSGLKEEHVVKASALLRLYCALMGIAGLKPTEEEAEQLLQLMTSRPPATPAGVRFVSLSFCMLLAFSTLVSTPEQEQLMVVWLSWMIKEEAYFESTSGVSASFGEMLLLVAMYFHSNQLSAIIDLVCSTLGMKIVIKPSSLSRMKTIFTQEIFTEQVVTAHAVRVPVTSNLSANITGFLPIHCIYQLLRSRSFTKHKVSIKDWIYRQLCETSTPLHPQLLPLIDVYINSILTPASKSNPEATNQPVTEQEILNIFQGVIGGDNIRLNQRFSITAQLLVLYYILSYEEALLANTKTLAAMQRKPKSYSSSLMDQIPIKFLIRQAQGLQQELGGLHSALLRLLATNYPHLCIVDDWICEEEITGTDALLRRMLLTNNAKNHSPKQLQEAFSAVPVNHTQVMQIIEHLTLLSASELIPYAEVLTSNMSQLLNSGVPRRILQTVNKLWMVLNTVMPRRLWVMTVNALQPSIKFVRQQKYTQNDLMIDPLIVLRCDQRVHRCPPLMDITLHMLNGYLLASKAYLSAHLKETEQDRPSQNNTIGLVGQTDAPEVTREELKNALLAAQDSAAVQILLEICLPTEEEKANGVNPDSLLRNVQSVITTSAPNKGMEEGEDNLLCNLREVQCLICCLLHQMYIADPNIAKLVHFQGYPCELLPLTVAGIPSMHICLDFIPELIAQPELEKQIFAIQLLSHLCIQYALPKSLSVARLAVNVMGTLLTVLTQAKRYAFFMPTLPSLVSFCRAFPPLYEDIMSLLIQIGQVCASDVATQTRDIDPIITRLQQIKEKPSGWSQICKDSSYKNGSRDTGSMDPDVQLCHCIERTVIEIINMSVSGI

SEQ ID NO: 8562 - protein, 1148 aa, Homo sapiens
MPEPTKKEENEVPAPAPPPEEPSKEKEAGTTPAKDEEEVSPPSALPPGLGSRALERKDSDWTLVETPPGEEQAKQNANSQLSILFIEKPQGGTVKVGEDITFIAKVKAEDLLRKPTIKWFKGKWMDLASKAGKHLQLKETFERHSRVYTFEMQIIKAKDNFAGNYRCEVTYKDKFDSCSFDLEVHESTGTTPNIDIRSAFKRSGEGQEDAGELDFSGLLKRREVKQQEEEPQVDVWELLKNAKPSEYEKIAFQYGITDLRGMLKRLKRMRREEKKSAAFAKILDPAYQVDKGGRVRFVVELADPKLEVKWYKNGQEIRPSTKYIFEHKGCQRILFINNCQMTDDSEYYVTAGDEKCSTELFVREPPIMVTKQLEDTTAYCGERVELECEVSEDDANVKWFKNGEEIIPGPKSRYRIRVEGKKHILIIEGATKADAAEYSVMTTGGQSSAKLSVDLKPLKILTPLTDQTVNLGKEICLKCEISENIPGKWTKNGLPVQESDRLKVVHKGRIHKLVIANALTEDEGDYVFAPDAYNVTLPAKVHVIDPPKIILDGLDADNTVTVIAGNKLRLEIPISGEPPPKAMWSRGDKAIMEGSGRIRTESYPDSSTLVIDIAERDDSGVYHINLKNEAGEAHASIKVKVVDFPDPPVAPTVTEVGDDWCIMNWEPPAYDGGSPILGYFIERKKKQSSRWMRLNFDLCKETTFEPKKMIEGVAYEVRIFAVNAIGISKPSMPSRPFVPLAVTSPPTLLTVDSVTDTTVTMRWRPPDHIGAAGLDGHVLEYCFEGTEDWIVANKDLIDKTKFTITGLPTDAKIFVRVKAVNAAGASEPKYYSQPILVKEIIEPPKIRIPRHLKQTYIRRVGEAVNLVIPFQGKPRPELTWKKDGAEIDKNQINIRNSETDTIIFIRKAERSHSGKYDLQVKVDKFVETASIDIQIIDRPGPPQIVKIEDVWGENVALTWTPPKDDGNAAITGYTIQKADKKSMEWFTVIEHYHRTSATITELVIGNEYYFRVFSENMCGLSEDATMTKESAVIARDGKIYKNPVYEDFDFSEAPMFTQPLVNTYAIAGYNATLNCSVRGNPKPKITWMKNKVAIVDDPRYRMFSNQGVCTLEIRKPSPYDGGTYCCKAVNDLGTVEIECKLEVKVIAQ

SEQ ID NO: 8563 - protein, 1141 aa, Homo sapiens
MPEPTKKEENEVPAPAPPPEEPSKEKEAGTTPAKDWTLVETPPGEEQAKQNANSQLSILFIEKPQGGTVKVGEDITFIAKVKAEDLLRKPTIKWFKGKWMDLASKAGKHLQLKETFERHSRVYTFEMQIIKAKDNFAGNYRCEVTYKDKFDSCSFDLEVHESTGTTPNIDIRSAFKRSGEGQEDAGELDFSGLLKRREVKQQEEEPQVDVWELLKNAKPSEYEKIAFQYGITDLRGMLKRLKRMRREEKKSAAFAKILDPAYQVDKGGRVRFVVELADPKLEVKWYKNGQEIRPSTKYIFEHKGCQRILFINNCQMTDDSEYYVTAGDEKCSTELFVREPPIMVTKQLEDTTAYCGERVELECEVSEDDANVKWFKNGEEIIPGPKSRYRIRVEGKKHILIIEGATKADAAEYSVMTTGGQSSAKLSVDLKPLKILTPLTDQTVNLGKEICLKCEISENIPGKWTKNGLPVQESDRLKVVHKGRIHKLVIANALTEDEGDYVFAPDAYNVTLPAKVHVIDPPKIILDGLDADNTVTVIAGNKLRLEIPISGEPPPKAMWSRGDKAIMEGSGRIRTESYPDSSTLVIDIAERDDSGVYHINLKNEAGEAHASIKVKVVDFPDPPVAPTVTEVGDDWCIMNWEPPAYDGGSPILGYFIERKKKQSSRWMRLNFDLCKETTFEPKKMIEGVAYEVRIFAVNAIGISKPSMPSRPFVPLAVTSPPTLLTVDSVTDTTVTMRWRPPDHIGAAGLDGYVLEYCFEGSTSAKQSDENGEAAYDLPAEDWIVANKDLIDKTKFTITGLPTDAKIFVRVKAVNAAGASEPKYYSQPILVKEIIEPPKIRIPRHLKQTYIRRVGEAVNLVIPFQGKPRPELTWKKDGAEIDKNQINIRNSETDTIIFIRKAERSHSGKYDLQVKVDKFVETASIDIQIIDRPGPPQIVKIEDVWGENVALTWTPPKDDGNAAITGYTIQKADKKSMEWFTVIEHYHRTSATITELVIGNEYYFRVFSENMCGLSEDATMTKESAVIARDGKIYKNPVYEDFDFSEAPMFTQPLVNTYAIAGYNATLNCSVRGNPKPKITWMKNKVAIVDDPRYRMFSNQGVCTLEIRKPSPYDGGTYCCKAVNDLGTVEIECKLEVKVIAQ

SEQ ID NO: 8564 - protein, 1031 aa, Homo sapiens
MGFFSLSSERNESVIHYPESTEPEIQQEMSTSQPDCNVDSCSVSSGYGTFCISELNLYKSKDPKEFMEHIDVPKGQYVAPAVPAESLVDGVKNENFYIQTPEECHVSLKEDVSISPGEFEHNFLGENKVSEVYSGKTNSNAITSWAQKLKQNQPKRAHVEDGGSRSKQGNEQSKKTPIEKSDFAAATHPRAFYLSKPDETPNAWMSDSGTGLTYWKLEEKDMHHSLPETLEKTFISLSSTDVSPNQSNTSNEMKLPSLKDIYYKKQRENKQLPERNLTSASNPNHPPEVLTLDPTLHMKPKQQISGIQPHGLPNALDDRISFSPDSVLEPSMSSPSDIDSFSQASNVTSQLPGFPKYPSHTKASPVDSWKNQTFQNESRTSSTFPSVYTITSNDISVNTVDEENTVMVASASVSQSQLPGTANSVPECISLTSLEDPVILSKIRQNLKEKHARHIADLRAYYESEINSLKQKLEAKEISGVEDWKITNQILVDRCGQLDSALHEATSRVRTLENKNNLLEIEVNDLRERFSAASSASKILQERIEEMRTSSKEKDNTIIRLKSRLQDLEEAFENAYKLSDDKEAQLKQENKMFQDLLGEYESLGKEHRRVKDALNTTENKLLDAYTQISDLKRMISKLEAQVKQVEHENMLSLRHNSRIHVRPSRANTLATSDVSRRKWLIPGAEYSIFTGQPLDTQDSNVDNQLEETCSLGHRSPLEKDSSPGSSSTSLLIKKQRETSDTPIMRALKELDEGKIFKNWGTQTEKEDTSNINPRQTETSVNASRSPEKCAQQRQKRLNSASQRSSSLPPSNRKSSTPTKREIMLTPVTVAYSPKRSPKENLSPGFSHLLSKNESSPIRFDILLDDLDTVPVSTLQRTNPRKQLQFLPLDDSEEKTYSEKATDNHVNHSSCPEPVPNGVKKVSVRTAWEKNKSVSYEQCKPVSVTPQGNDFEYTAKIRTLAETERFFDELTKEKDQIEAALSRMPSPGGRITLQTRLNQEALEDRLERINRELGSVRMTLKKFHVLRTSANL

SEQ ID NO: 8565 - protein, 561 aa, Homo sapiens
MWYIIDERGDSKESPEEDAGEPNGFIDCPSRSAFPEFCPFQKEDGMIKFQERVIFKDVAVVLTKEELALLDKAQINLYQDVMLENFRNLMSNETDKIHTPPRTLIYLLLLEKSQCLSNVLDKPVLMESWENFDFVGSYNSQHLWVYKSWRKANIMTEPQNSQGRYKGIYMEEKLYRRAQHDDSLNWTSHDHHESQECKGEDPGRHPNCRKNFGMKSTVEQHNAVHVLPQPFTCNNCGVPFADDTDPHVHHSTHLGEKSYKCDQYGKNFSQSQDLIVHCKTHSGETPYEFHEWPMGCKQSSDLPRYQKVPSGNKPYKCKECGKGFRCNSFLYNHHGVHTREMPYKCDACGKGFGFRSLLCIHQGRVHAGEKPYKCSECGKCFSSSSVLQVHWRFHTGEKPYRCDECGKGFSQSTHLHIHQRVHTGEKPYKCNVCGKDFAYSSVLHTHLSSTREKPYKCKVCGKCFSYSSYFHLHQRDHTREKPYKCDECGKDFSQNSDLRVHLRVHTGERPYKCKACGKGFSRNSYLLAHQRVHIDETQYTHCERGKDLPTHQKLHKQRETL

SEQ ID NO: 8566 - protein, 590 aa, Homo sapiens
MIKFQERVTFKDVAVVFTKEELALLDKAQINLYQDVMLENFRNLMLVRDGIKNNILNLQAKGLSYLSQEVLHCWQIWKQRIRDLTVSQDYIVNLQEECSPHLEDVSLSEEWAGISLQISENENYVVNAIIKNQDITAWQSLTQVLTPESWRKANIMTEPQNSQGRYKGIYMEEKLYRRAQHDDSLSWTSCDHHESQECKGEDPGRHPSCGKNLGMKSTVEKRNAAHVLPQPFPCNNCGVAFADDTDPHVHHSTHLGEKSYKCDQYGKNFSQSQDLIVHCKTHSGKTPYEFHEWPMGCKQSSDLPRYQKVSSGDKPYKCKECGKGFRRSSSLHNHHRVHTGEMPYKCDECGKGFGFRSLLCIHQGVHTGKKPYKCEECGKGFDQSSNLLVHQRVHTGEKPYKCSECGKCFSSSSVLQVHWRFHTGEKPYRCGECGKGFSQCTHLHIHQRVHTGEKPYKCNVCGKDFAYSSVLHTHQRVHTGEKPYKCEVCGKCFSYSSYFHLHQRDHIREKPYKCDECGKGFSRNSDLNVHLRVHTRERPYKCKACGKGFSRNSYLLAHQRVHIDETQYTHCERGKDLLTHQRLHEQRETL

SEQ ID NO: 8567 - protein, 328 aa, Homo sapiens
MNMTAYNKGRLQSSFWIVDKQHVYIGSAGLDWQSLGQMKELGVIFYNCSCLVLDLQRIFALYSSLKFKSRVPQTWSKRLYGVYDNEKKLQLQLNETKSQAFVSNSPKLFCPKNRSFDIDAIYSVIDDAKQYVYIAVMDYLPISSTSTKRTYWPDLDAKIREALVLRSVRVRLLLSFWKETDPLTFNFISSLKAICTEIANCSLKVKFFDLERENACATKEQKNHTFPRLNRNKYMVTDGAAYIGNFDWVGNDFTQNAGTGLVINQADVRNNRSIIKQLKDVFERDWYSPYAKTLQPTKQPNCSSLFKLKPLSNKTATDDTGGKDPRNV

SEQ ID NO: 8568 - protein, 444 aa, Homo sapiens
MRMDSQKKIAKINVGKRIALVENIPEGLNYSENAPFHLSLFQGWMNLLNMAKKSVDIVSSHWDLNHTHPSACQGQRLFEKLLQLTSQNIEIKLVSDVTADSKVLEALKLKGAEVTYMNMTAYNKGRLQSSFWIVDKQHVYIGSAGLDWQSLGQMKELGVIFYNCSCLVLDLQRIFALYSSLKFKSRVPQTWSKRLYGVYDNEKKLQLQLNETKSQAFVSNSPKLFCPKNRSFDIDAIYSVIDDAKQYVYIAVMDYLPISSTSTKRTYWPDLDAKIREALVLRSVRVRLLLSFWKETDPLTFNFISSLKAICTEIANCSLKVKFFDLERENACATKEQKNHTFPRLNRNKYMVTDGAAYIGNFDWVGNDFTQNAGTGLVINQADVRNNRSIIKQLKDVFERDWYSPYAKTLQPTKQPNCSSLFKLKPLSNKTATDDTGGKDPRNV

SEQ ID NO: 8569 - protein, 1214 aa, Homo sapiens
MKQPIMADGPRCKRRKQANPRRKNVVNYDNVVDTGSETDEEDKLHIAEDDGIANPLDQETSPASVPNHESSPHVSQALLPREEEEDEIREGGVEHPWHNNEILQASVDGPEEMKEDYDTMGPEATIQTAINNGTVKNANCTSDFEEYFAKRKLEERDGHAVSIEEYLQRSDTAIIYPEAPEELSRLGTPEANGQEENDLPPGTPDAFAQLLTCPYCDRGYKRLTSLKEHIKYRHEKNEENFSCPLCSYTFAYRTQLERHMVTHKPGTDQHQMLTQGAGNRKFKCTECGKAFKYKHHLKEHLRIHSGEKPYECPNCKKRFSHSGSYSSHISSKKCIGLISVNGRMRNNIKTGSSPNSVSSSPTNSAITQLRNKLENGKPLSMSEQTGLLKIKTEPLDFNDYKVLMATHGFSGTSPFMNGGLGATSPLGVHPSAQSPMQHLGVGMEAPLLGFPTMNSNLSEVQKVLQIVDNTVSRQKMDCKAEEISKLKGYHMKDPCSQPEEQGVTSPNIPPVGLPVVSHNGATKSIIDYTLEKVNEAKACLQSLTTDSRRQISNIKKEKLRTLIDLVTDDKMIENHNISTPFSCQFCKESFPGPIPLHQHERYLCKMNEEIKAVLQPHENIVPNKAGVFVDNKALLLSSVLSEKGMTSPINPYKDHMSVLKAYYAMNMEPNSDELLKISIAVGLPQEFVKEWFEQRKVYQYSNSRSPSLERSSKPLAPNSNPPTKDSLLPRSPVKPMDSITSPSIAELHNSVTNCDPPLRLTKPSHFTNIKPVEKLDHSRSNTPSPLNLSSTSSKNSHSSSYTPNSFSSEELQAEPLDLSLPKQMKEPKSIIATKNKTKASSISLDHNSVSSSSENSDEPLNLTFIKKEFSNSNNLDNKSTNPVFSMNPFSAKPLYTALPPQSAFPPATFMPPVQTSIPGLRPYPGLDQMSFLPHMAYTYPTGAATFADMQQRRKYQRKQGFQGELLDGAQDYMSGLDDMTDSDSCLSRKKIKKTESGMYACDLCDKTFQKSSSLLRHKYEHTGKRPHQCQICKKAFKHKHHLIEHSRLHSGEKPYQCDKCGKRFSHSGSYSQHMNHRYSYCKREAEEREAAEREAREKGHLEPTELLMNRAYLQSITPQGYSDSEERESMPRDGESEKEHEKEGEDGYGKLGRQDGDEEFEEEEEESENKSMDTDPETIRDEEETGDHSMDDSSEDGKMETKSDHEEDNMEDGM

SEQ ID NO: 8570 - protein, 1748 aa, Homo sapiens
MSARAAAAKSTAMEETAIWEQHTVTLHRAPGFGFGIAISGGRDNPHFQSGETSIVISDVLKGGPAEGQLQENDRVAMVNGVSMDNVEHAFAVQQLRKSGKNAKITIRRKKKVQIPVSRPDPEPVSDNEEDSYDEEIHDPRSGRSGVVNRRSEKIWPRDRSASRERSLSPRSDRRSVASSQPAKPTKVTLVKSRKNEEYGLRLASHIFVKEISQDSLAARDGNIQEGDVVLKINGTVTENMSLTDAKTLIERSKGKLKMVVQRDERATLLNVPDLSDSIHSANASERDDISEIQSLASDHSGRSHDRPPRRSRSRSPDQRSEPSDHSRHSPQQPSNGSLRSRDEERISKPGAVSTPVKHADDHTPKTVEEVTVERNEKQTPSLPEPKPVYAQVGNQMWIYLSVHLMVSYLIQLMKMGFLRPSMKLVKFRKGDSVGLRLAGGNDVGIFVAGVLEDSPAAKEGLEEGDQILRVNNVDFTNIIREEAVLFLLDLPKGEEVTILAQKKKDVYRRIVESDVGDSFYIRTHFEYEKESPYGLSFNKGEVFRVVDTLYNGKLGSWLAIRIGKNHKEVERGIIPNKNRAEQLASVQYTLPKTAGGDRADFWRFRGLRSSKRNLRKSREDLSAQPVQTKFPAYERVVLREAGFLRPVTIFGPIADVAREKLAREEPDIYQIAKSEPRDAGTDQRSSGIIRLHTIKQIIDQDKHALLDVTPNAVDRLNYAQWYPIVVFLNPDSKQGVKTMRMRLCPESRKSARKLYERSHKLRKNNHHLFTTTINLNSMNDGWYGALKEAIQQQQNQLVWVSEGKADGATSDDLDLHDDRLSYLSAPGSEYSMYSTDSRHTSDYEDTDTEGGAYTDQELDETLNDEVGTPPESAITRSSEPVREDSSGMHHENQTYPPYSPQAQPQPIHRIDSPGFKPASQQKAEASSPVPYLSPETNPASSTSAVNHNVNLTNVRLEEPTPAPSTSYSPQADSLRTPSTEAAHIMLRDQEPSLSSHVDPTKVYRKDPYPEEMMRQNHVLKQPAVSHPGHRPDKEPNLTYEPQLPYVEKQASRDLEQPTYRYESSSYTDQFSRNYEHRLRYEDRVPMYEEQWSYYDDKQPYPSRPPFDNQHSQDLDSRQHPEESSERGYFPRFEEPAPLSYDSRPRYEQAPRASALRHEEQPAPGYDTHGRLRPEAQPHPSAGPKPAESKQYFEQYSRSYEQVPPQGFTSRAGHFEPLHGAAAVPPLIPSSQHKPEALPSNTKPLPPPPTQTEEEEDPAMKPQSVLTRVKMFENKRSASLETKKDVNDTGSFKPPEVASKPSGAPIIGPKPTSQNQFSEHDKTLYRIPEPQKPQLKPPEDIVRSNHYDPEEDEEYYRKQLSYFDRRSFENKPPAHIAASHLSEPAKPAHSQNQSNFSSYSSKGKPPEADGVDRSFGEKRYEPIQATPPPPPLPSQYAQPSQPVTSASLHIHSKGAHGEGNSVSLDFQNSLVSKPDPPPSQNKPATFRPPNREDTAQAAFYPQKSFPDKAPVNGTEQTQKTVTPAYNRFTPKPYTSSARPFERKFESPKFNHNLLPSETAHKPDLSSKTPTSPKTLVKSHSLAQPPEFDSGVETFSIHAEKPKYQINNISTVPKAIPVSPSAVEEDEDEDGHTVVATARGIFNSNGGVLSSIETGVSIIIPQGAIPEGVEQEIYFKVCRDNSILPPLDKEKGETLLSPLVMCGPHGLKFLKPVELRLPHCDPKTWQNKCLPGDPNYLVGANCVSVLIDHF

SEQ ID NO: 8571 - protein, 1656 aa, Homo sapiens
MEETAIWEQHTVTLHRAPGFGFGIAISGGRDNPHFQSGETSIVISDVLKGGPAEGQLQENDRVAMVNGVSMDNVEHAFAVQQLRKSGKNAKITIRRKKKVQIPVSRPDPEPVSDNEEDSYDEEIHDPRSGRSGVVNRRSEKIWPRDRSASRERSLSPRSDRRSVASSQPAKPTKVTLVKSRKNEEYGLRLASHIFVKEISQDSLAARDGNIQEGDVVLKINGTVTENMSLTDAKTLIERSKGKLKMVVQRDERATLLNVPDLSDSIHSANASERDDISEIQSLASDHSGRSHDRPPRRSRSRSPDQRSEPSDHSRHSPQQPSNGSLRSRDEERISKPGAVSTPVKHADDHTPKTVEEVTVERNEKQTPSLPEPKPVYAQVGNQMWIYLSVHLMVSYLIQLMKMGFLRPSMKLVKFRKGDSVGLRLAGGNDVGIFVAGVLEDSPAAKEGLEEGDQILRVNNVDFTNIIREEAVLFLLDLPKGEEVTILAQKKKDVYRRIVESDVGDSFYIRTHFEYEKESPYGLSFNKGEVFRAVDTLYNGKLGSWLAIRIGKNHKEVERGIIPNKNRAEQLASVQYTLPKTAGGDRADFWRFRGLRSSKRNLRKSREDLSAQPVQTKFPAYERVVLREAGFLRPVTIFGPIADVAREKLAREEPDIYQIAKSEPRDAGTDQRSSGYIRLHTIKQIIDQDKHALLDVTPNAVDRLNYAQWYPIVVFLNPDSKQGVKTMRMRLCPESRKSARKLYERSHKLAKNNHHLFTTTINLNSMNDGWYGALKEAVQQQQNQLVWVSEGKADGATSDDLDLHDDRLSYLSAPGSEYSMYSTDSRHTSDYEDTDTEGGAYTDQELDETLNDEVGTPPESAITRSSEPVREDSSGMHHENQTYPPYSPQAQPQPIHRIDSPGFKPASQQVYRKDPYPEEMMRQNHVLKQPAVSHPGHRPDKEPNLTYEPQLPYVEKQASRDLEQPTYRYESSSYTDQFSRNYEHRLRYEDRVPMYEEQWSYYDDKQPYPSRPPFDNQHSQDLDSRQHPEESSERGYFPRFEEPAPLSYDSRPRYEQAPRASALRHEEQPAPGYDTHGRLRPEAQPHPSAGPKPAESKQYFEQYSRSYEQVPPQGFTSRAGHFEPLHGAAAVPPLIPSSQHKPEALPSNTKPLPPPPTQTEEEEDPAMKPQSVLTRVKMFENKRSASLETKKDVNDTGSFKPPEVASKPSGAPIIGPKPTSQNQFSEHDKTLYRIPEPQKPQLKPPEDIVRSNHYDPEEDEEYYRKQLSYFDRRSFENKPPAHIAASHLSEPAKPAHSQNQSNFSSYSSKGKPPEADGVDRSFGEKRYEPIQATPPPPPLPSQYAQPSQPVTSASLHIHSKGAHGEGNSVSLDFQNSLVSKPDPPPSQNKPATFRPPNREDTAQAAFYPQKSFPDKAPVNGTEQTQKTVTPAYNRFTPKPYTSSARPFERKFESPKFNHNLLPSETAHKPDLSSKTPTSPKTLVKSHSLAQPPEFDSGVETFSIHAEKPKYQINNISTVPKAIPVSPSAVEEDEDEDGHTVVATARGIFNSNGGVLSSIETGVSIIIPQGAIPEGVEQEIYFKVCRDNSILPPLDKEKGETLLSPLVMCGPHGLKFLKPVELRLPHCDPKTWQNKCLPGDPNYLVGANCVSVLIDHF

SEQ ID NO: 8572 - protein, 441 aa, Homo sapiens
MEIRLDTLSASLGRSSTLNDCNLEDKLAWYEGEAYMWHHWKPFPENPLWTCLDFQIAQVGPWDYCSSCIRHTRLKSSCSDMDLLHSWRSSSFGNFDRFRNNSLSKPDDSTEAHEGDPTNGSGEQSKTSNNGGGLGKKMRAISWTMKKKVGKKYIKALSEEKDEEDGENAHPYRNSDPVIGTHTEKVSLKASDSMDSLYSGQSSSSGITSCSDGTSNRDSFRLDDDGPYSGPFCGRARVHTDFTPSPYDTDSLKIKKGDIIDIICKTPMGMWTGMLNNKVGNFKFIYVDVISEEEAAPKKIKANRRSNSKKSKTLQEFLERIHLQEYTSTLLLNGYETLEDLKDIKESHLIELNIENPDDRRRLLSAAENFLEEEIIQEQENEPEPLSLSSDISLNKSQLDDCPRDSGCYISSGNSDNGKEDLESENLSDMVHKIIITEPSD

SEQ ID NO: 8573 - protein, 373 aa, Homo sapiens
MLKRKPSNVSEKEKHQKPKRSSSFGNFDRFRNNSLSKPDDSTEAHEGDPTNGSGEQSKTSNNGGGLGKKMRAISWTMKKKVGKKYIKALSEEKDEEDGENAHPYRNSDPVIGTHTEKVSLKASDSMDSLYSGQSSSSGITSCSDGTSNRDSFRLDDDGPYSGPFCGRARVHTDFTPSPYDTDSLKIKKGDIIDIICKTPMGMWTGMLNNKVGNFKFIYVDVISEEEAAPKKIKANRRSNSKKSKTLQEFLERIHLQEYTSTLLLNGYETLEDLKDIKESHLIELNIENPDDRRRLLSAAENFLEEEIIQEQENEPEPLSLSSDISLNKSQLDDCPRDSGCYISSGNSDNGKEDLESENLSDMVHKIIITEPSD

SEQ ID NO: 8574 - protein, 1544 aa, Homo sapiens
MAAPQDLDIAVWLATVHLEQYADTFRRHGLATAGAARGLGHEELKQLGISATGHRKRILRLLQTGTEEGSLDPKSDSAMEPSPSPAPQAQPPKPVPKPRTVFGGLSGPATTQRPGLSPALGGPGVSRSPEPSPRPPPLPTSSSEQSSALNTVEMMPNSIYFGLDSRGRAQAAQDKAPDSSQISAPTPALRPTTGTVHIMDPGCLYYGVQPVGTPGAPDRRESRGVCQGRAEHRLSRQDLEAREDAGYASLELPGDSTLLSPTLETEETSDDLISPYASFSFTADRLTPLLSGWLDKLSPQGNYVFQRRFVQFNGRSLMYFGSDKDPFPKGVIPLTAIEMTRSSKDNKFQVITGQRVFVFRTESEAQRDMWCSTLQSCLKEQRLLGHPRPPQPPRPLRTGMLELRGHKAKVFAALSPGELALYKSEQAFSLGIGICFIELQGCSVRETKSRSFDLLTPHRCFSFTAESGGARQSWAAALQEAVTETLSDYEVAEKIWSNRANRQCADCGSSRPDWAAVNLGVVICKQCAGQHRALGSGISKVQSLKLDTSVWSNEIVQLFIVLGNDRANRFWAGTLPPGEGLHPDATPGPRGEFISRKYRLGLFRKPHPQYPDHSQLLQALCAAVARPNLLKNMTQLLCVEAFEGEEPWFPPAPDGSCPGLLPSDPSPGVYNEVVVRATYSGFLYCSPVSNKAGPSPPRRGRDAPPRLWCVLGAALEMFASENSPEPLSLIQPQDIVCLGVSPPPTDPGDRFPFSFELILAGGRIQHFGTDGADSLEAWTSAVGKWFSPLSCHQLLGPGLLRLGRLWLRSPSHTAPAPGLWLSGFGLLRGDHLFLCSAPGPGPPAPEDMVHLRRLQEISVVSAADTPDKKEHLVLVETGRTLYLQGEGRLDFTAWNAAIGGAAGGGGTGLQEQQMSRGDIPIIVDACISFVTQHGLRLEGVYRKGGARARSLRLLAEFRRDARSVKLRPGEHFVEDVTDTLKRFFRELDDPVTSARLLPRWREAAELPQKNQRLEKYKDVIGCLPRVNRRTLATLIGHLYRVQKCAALNQMCTRNLALLFAPSVFQTDGRGEHEVRVLQELIDGYISVFDIDSDQVAQIDLEVSLITTWKDVQLSQAGDLIMEVYIEQQLPDNCVTLKVSPTLTAEELTNQVLEMRGTAAGMDLWVTFEIREHGELERPLHPKEKVLEQALQWCQLPEPCSASLLLKKVPLAQAGCLFTGIRRESPRVGLLRCREEPPRLLGSRFQERFFLLRGRCLLLLKEKKSSKPEREWPLEGAKVYLGIRKKLKPPTPWGFTLILEKMHLYLSCTDEDEMWDWTTSILKAQHDDQQPVVLRRHSSSDLARQKFGTMPLLPIRGDDSGATLLSANQTLRRLHNRRTLSMFFPMKSSQGSVEEQEELEEPVYEEPVYEEVGAFPELIQDTSTSFSTTREWTVKPENPLTSQKSLDQPFLSKSSTLGQEERPPEPPPGPPSKSSPQARGSLEEQLLQELSSLILRKGETTAGLGSPSQPSSPQSPSPTGLPTQTPGFPTQPPCTSSPPSSQPLT

SEQ ID NO: 8575 - protein, 462 aa, Homo sapiens [sequence omitted]

SEQ ID NO: 8576 - protein, 462 aa, Homo sapiens
MQLRKMQTVKKEQASLDASSNVDKMMVLNSALTEVSEDSTTGEDVLLSEGSVGKNKSSACRRKREFIPDEKKDAMYWEKRRKNNEAAKRSREKRRLNDLVLENKLIALGEENATLKAELLSLKLKFGLISSTAYAQEIQKLSNSTAVYFQDYQTSKSNVSSFVDEHEPSMVSSSCISVIKHSPQSSLSDVSEVSSVEHTQESSVQGSCRSPENKFQIIKQEPMELESYTREPRDDRGSYTASIYQNYMGNSFSGYSHSPPLLQVNRSSSNSPGTSETDDGVVGKSSDGEDEQQVPKGPIHSPVELKHVHATVVKVPEVNSSALPHKLRIKAKAMQIKVEAFDNEFEATQKLSSPIDMTSKRHFELEKHSAPSMVHSSLTPFSVQVTNIQDWSLKSEHWHQKELSGKTQNSFKTGVVEMKDSGYKVSDPENLYLKQGIANLSAEVVSLKRLIATQPISASDSG

SEQ ID NO: 8577 - protein, 483 aa, Homo sapiens
MVARSESVLLHMPQPVNPELTIGPITGPVDRLNHFRVETSFTWEVTNYNIRLFEDVRSLMFRCGSLNSDRSDNFAAWGAWVFSSGKHYWELDVDNSWDWALGVYILRLLECMENNLPSDDNSTFNSTQSHMDWGKVAFKNFSGEMYRLRWLEISCNLRKFGTLKELVLEAKKCVKKMNKSQKSRNRPDFPKRPLTAYNRFFVESWLQYSQMYPGMRSQELTKILSKKYKELPEQMKQKYIQDFQKAKQEFEEKLARFSEEHPDLVQKAKKSGVSKRTQNKVQKKVQKNIEEVRSLPKTDRFFKKVKFHGEPQKPPMNGYHKFHQDSWSSKELQHLSVRERMVEIGRRWQRIPQSQKDHFKSQAEELQKQYKVKLDLWLKTLSPENYAAYKESTYAKGKNMAMTGGPDPRLKQADPQSSSTKGLQEGFGEGQGLQAAGTDSSQTIWVNCHVSMEPEENRKKDGEEEESSNSSDCSSGEEMEVDV

SEQ ID NO: 8578 - protein, 521 aa, Homo sapiens [sequence omitted]

SEQ ID NO: 8579 - protein, 521 aa, Homo sapiens
MANKGNKKRRQFSLEEKMKVVGAVDSGKRKGDVAKEFGITPSTLSTFLKDRTKFEEKVREASVGPQRKRMRSALYDDIDKAVFAWFQEIHAKNILVTGSVIRKKALNLANMLGYDNFQASVGWLNRFRDRHGIALKAVCREDSDRLMNGLGIDKINEWHAGEIIKLIADYSPDDIFNADETGVFFQLLPQHTLAAKGDHCRGGKKAKQRLTALFCCNASGTEKMRPLIVGRSASPHCLKNIHSLPCDYRANQWAWMTRDLFNEWLMQVDARMKRAERRILLLIDNCSAHNMLPHLERIQVGYLPSNCTAVLQPLNLGIIHTMKVLYQSHLLKQILLKLNSSEDQEEVDIKQAIDMIAAAWWSVKPSTVVKCWQKAGIVPMEFAECDTESAASEPDIAIEKLWHTVAIATCVPNEVNFQDFVTADDDLIISQDTDIIQDMVAGENTSEAGSEDEGEVSLPEQPKVTITEAISSVQKLRQFLSTCVDIPDAIFGQLNGIDEYLMKRVTQTLIDSKITDFLQTK

SEQ ID NO: 8580 - protein, 330 aa, Homo sapiens
MATKESRDAKAQLALSSSANQSKEVPENPNYALKCTLVGHTEAVSSVKFSPNGEWLASSSADRLIIIWGAYDGKYEKTLYGHNLEISDVAWSSDSSRLVSASDDKTLKLWDVRSGKCLKTLKGHSNYVFCCNFNPPSNLIISGSFDETVKIWEVKTGKCLKTLSAHSDPVSAVHFNCSGSLIVSGSYDGLCRIWDAASGQCLKTLVDDDNPPVSFVKFSPNGKYILTATLDNTLKLWDYSRGRCLKTYTGHKNEKYCIFANFSVTGGKWIVSGSEDNLVYIWNLQTKEIVQKLQGHTDVVISAACHPTENLIASAALENDKTIKLWMSNH

SEQ ID NO: 8581 - protein, 131 aa, Homo sapiens
MFSDNSHCPDCGQQWFPSLELGHWLYQTELVENECYQVFLDRINRADYCPECYPDNPANRSLVLPWSFPLEWAPQNLTRWTFEKACHPFLLGPPLVRKRIHDSRVAGFNPALQLILTRTDKTLNKKLGQNK

SEQ ID NO: 8582 - protein, 636 aa, Homo sapiens
MAAEEEAAAGGKVLREENQCIAPVVSSRVSPGTRPTAMGSFSSHMTEFPRKRKGSDSDPSQSGIMTEKVVEKLSQNPLTYLLSTRIEISASSGSRVEDGEHQVKMKAFREAHSQTEKRRRDKMNNLIEELSAMIPQCNPMARKLDKLTVLRMAVQHLRSLKGLTNSYVGSNYRPSFLQDNELRHLILKTAEGFLFVVGCERGKILFVSKSVSKILNYDQASLTGQSLFDFLHPKDVAKVKEQLSSFDISPREKLIDAKTGLQVHSNLHAGRTRVYSGSRRSFFCRIKSCKISVKEEHGCLPNSKKKEHRKFYTIHCTGYLRSWPPNIVGMEEERNSKKDNSNFTCLVAIGRLQPYIVPQNSGEINVKPTEFITRFAVNGKFVYVDQRATAILGYLPQELLGTSCYEYFHQDDHNNLTDKHKAVLQSKEKILTDSYKFRAKDGSFVTLKSQWFSFTNPWTKELEYIVSVNTLVLGHSEPGEASFLPCSSQSSEESSRQSCMSVPGMSTGTVLGAGSIGTDIANEILDLQRLQSSSYLDDSSPTGLMKDTHTVNCRSMSNKELFPPSPSEMGELEATRQNQSTVAVHSHEPLLSDGAQLDFDALCDNDDTAMAAFMNYLEAEGGLGDPGDFSDIQWTL

SEQ ID NO: 8583 - protein, 622 aa, Homo sapiens
MAAEEEAAAGGKVLREENQCIAPVVSSRVSPGTRPTAMGSFSSHMTEFPRKRKGSDSDPSQSGIMTEKVVEKLSQNPLTYLLSTRIEISASSGSREAHSQTEKRRRDKMNNLIEELSAMIPQCNPMARKLDKLTVLRMAVQHLRSLKGLTNSYVGSNYRPSFLQDNELRHLILKTAEGFLFVVGCERGKILFVSKSVSKILNYDQASLTGQSLFDFLHPKDVAKVKEQLSSFDISPREKLIDAKTGLQVHSNLHAGRTRVYSGSRRSFFCRIKSCKISVKEEHGCLPNSKKKEHRKFYTIHCTGYLRSWPPNIVGMEEERNSKKDNSNFTCLVAIGRLQPYIVPQNSGEINVKPTEFITRFAVNGKFVYVDQRATAILGYLPQELLGTSCYEYFHQDDHNNLTDKHKAVLQSKEKILTDSYKFRAKDGSFVTLKSQWFSFTNPWTKELEYIVSVNTLVLGHSEPGEASFLPCSSQSSEESSRQSCMSVPGMSTGTVLGAGSIGTDIANEILDLQRLQSSSYLDDSSPTGLMKDTHTVNCRSMSNKELFPPSPSEMGELEATRQNQSTVAVHSHEPLLSDGAQLDFDALCDNDDTAMAAFMNYLEAEGGLGDPGDFSDIQWTL

SEQ ID NO: 8584 - protein, 599 aa, Homo sapiens
MAAEEEAAAGGEVAGGEATAPGKVLREENQCIAPVVSSRVSPGTRPTAMGSFSSHMTEFPRKRKGSDSDPSQEAHSQTEKRRRDKMNNLIEELSAMIPQCNPMARKLDKLTVLRMAVQHLRSLKGLTNSYVGSNYRPSFLQDNELRHLILKTAEGFLFVVGCERGKILFVSKSVSKILNYDQASLTGQSLFDFLHPKDVAKVKEQLSSFDISPREKLIDAKTGLQVHSNLHAGRTRVYSGSRRSFFCRIKSCKISVKEEHGCLPNSKKKEHRKFYTIHCTGYLRSWPPNIVGMEEERNSKKDNSNFTCLVAIGRLQPYIVPQNSGEINVKPTEFITRFAVNGKFVYVDQRATAILGYLPQELLGTSCYEYFHQDDHNNLTDKHKAVLQSKEKILTDSYKFRAKDGSFVTLKSQWFSFTNPWTKELEYIVSVNTLVLGHSEPGEASFLPCSSQSSEESSRQSCMSVPGMSTGTVLGAGSIGTDIANEILDLQRLQSSSYLDDSSPTGLMKDTHTVNCRSMSNKELFPPSPSEMGELEATRQNQSTVAVHSHEPLLSDGAQLDFDALCDNDDTAMAAFMNYLEAEGGLGDPGDFSDIQWTL

SEQ ID NO: 8585 - protein, 726 aa, Homo sapiens
TACPCVLQPSAGPAEQQQRTLLTARQPPPPAVALLSRWSVRPAHVTMGKSRTKRFKRPQFSPTGDCQAEAAAAANGTGGEEDDGPAAELLEKLQHPSAEVRECACAGLARLVQQRPALPGLARRDAVRRLGPLLLDPSLAVRETAAGALRNLSACGGFEVCDDMVTKDIMTPLVALLKECSAGLDSNEMSLQEKKDQNRNSIENIANETVNVLWNICECSSRAVSIFNKEGCLEIVLKYLSRFPTNVDLAISVAYCLQTVTEDNPELLKSFSATALNMLESALLSPVSSMESLLLKTLVAGTIWNLKDIIPCKSQAEIINALLKILSEVLGMDAGEMVIQMKEAETQRLKTAAEAEEILENTNGDDLIEDDEMEGISHKRRVRRKTFVSDLLPPTDKELRETIALLTAQQTALEIIVNMCCNEDPSDDEWEELSSSDESDAFMENSFSECGGQLFSPLCLSHEVHTALTNYLIPKKIFEKTAFPNSIAVDLCSRNPTWKPLIRKMNTIQCRALFCLQSLVSLLDVEHLGGAAALQTLAQHLSQLLFSQPDFAKHVDFLEAISSALRALLQTMASKNISQCMTPDQLMTLCKAGIHSSNVGVRVNVVSILGITGSVLAKEDGTLETLKNIGCFLLEVTTKDPSLVVAGEALDALFDVFADGKEAERASIQIKLLSALKEFQPVFKMKIRKEGRGNYSTDQLCVLDNVKMNLRRFIAYQETVEKRLTS

SEQ ID NO: 8586 - protein, 911 aa, Homo sapiens
MAASQTSQTVASHVPFADLCSTLERIQKSKGRAEKIRHFREFLDSWRKFHDALHKNHKDVTDSFYPAMRLILPQLERERMAYGIKETMLAKLYIELLNLPRDGKDALKLLNYRTPTGTHGDAGDFAMIAYFVLKPRCLQKGSLTIQQVNDLLDSIASNNSAKRKDLIKKSLLQLITQSSALEQKWLIRMIIKDLKLGVSQQTIFSVFHNDAAELHNVTTDLEKVCRQLHDPSVGLSDISITLFSAFKPMLAAIADIEHIEKDMKHQSFYIETKLDGERMQMHKDGDVYKYFSRNGYNYTDQFGASPTEGSLTPFIHNAFKADIQICILDGEMMAYNPNTQTFMQKGTKFDIKRMVEDSDLQTCYCVFDVLMVNNKKLGHETLRKRYEILSSIFTPIPGRIEIVQKTQAHTKNEVIDALNEAIDKREEGIMVKQPLSIYKPDKRGEGWLKIKPEYVSGLMDELDILIVGGYWGKGSRGGMMSHFLCAVAEKPPPGEKPSVFHTLSRVGSGCTMKELYDLGLKLAKYWKPFHRKAPPSSILCGTEKPEVYIEPCNSVIVQIKAAEIVPSDMYKTGCTLRFPRIEKIRDDKEWHECMTLDDLEQLRGKASGKLASKHLYIGGDDEPQEKKRKAAPKMKKVIGIIEHLKAPNLTNVNKISNIFEDVEFCVMSGTDSQPKPDLENRIAEFGGYIVQNPGPDTYCVIAGSENIRVKNIILSNKHDVVKPAWLLECFKTKSFVPWQPRFMIHMCPSTKEHFAREYDCYGDSYFIDTDLNQLKEVFSGIKNSNEQTPEEMASLIADLEYRYSWDCSPLSMFRRHTVYLDSYAVINDLSTKNEGTRLAIKALELRFHGAKVVSCLAEGVSHVIIGEDHSRVADFKAFRRTFKRKFKILKESWVTDSIDKCELQEENQYLI

SEQ ID NO: 8587 - protein, 735 aa, Homo sapiens
MTPELMIKACSFYTGHLVKTHFCTWRDIARTNENVVLAEKMNRAVTCYNFRLQKSVFHHWHSYMEDQKEKLKNMLLRIQQIIYCHKLTIILTKWRNTARHKSKKKEDELILKHELQLKKWKNRLILKRAAAEESNFPERSSSEVFLVDETLKCDISLLPERAILQIFFYLSLKDVIICGQVNHAWMLMTQLNSLWNAIDFSSVKNVIPDKYIVSTLQRWRLNVLRLNFRGCLLRPKTFRSVSHCRNLQELNVSDCPTFTDESMRHISEGCPGVLCLNLSNTTITNRTMRLLPRHFHNLQNLSLAYCRRFTDKGLQYLNLGNGCHKLIYLDLSGCTQISVQGFRYIANSCTGIMHLTINDMPTLTDNCVKALVEKCSRITSLVFTGAPHISDCTFRALSACKLRKIRFEGNKRVTDASFKFIDKNYPNLSHIYMADCKGITDSSLRSLSPLKQLTVLNLANCVRIGDMGLKQFLDGPASMRIRELNLSNCVRLSDASVMKLSERCPNLNYLSLRNCEHLTAQGIGYIVNIFSLVSIDLSGTDISNEGLNVLSRHKKLKELSVSECYRITDDGIQAFCKSSLILEHLDVSYCSQLSDMIIKALAIYCINLTSLSIAGCPKITDSAMEMLSAKCHYLHILDISGCVLLTDQILEDLQIGCKQLRILKMQYCTNISKKAAQRMSSKVQQQEYNTNDPPRWFGYDREGNPVTELDNITSSKGALELTVKKSTYSSEDQAA

SEQ ID NO: 8588 - protein, 1938 aa, Homo sapiens
MSSDAEMAIFGEAAPYLRKPEKERIEAQNRPFDSKKACFVADNKEMYVKGMIQTRENDKVIVKTLDDRMLTLNNDQVFPMNPPKFDKIEDMAMMTHLHEPAVLYNLKERYAAWMIYTYSGLFCVTVNPYKWLPVYKPEVVAAYRGKKRQEAPPHIFSISDNAYQFMLTDRDNQSILITGESGAGKTVNTKRVIQYFATIAVTGDKKKETQPGKMQGTLEDQIIQANPLLEAFGNAKTVRNDNSSRFGKFIRIHFGATGKLASADIETYLLEKSRVTFQLSSERSYHIFYQIMSNKKPELIDLLLISTNPFDFPFVSQGEVTVASIDDSEELLATDNAIDILGFSSEEKVGIYKLTGAVMHYGNMKFKQKQREEQAEPDGTEVADKAGYLMGLNSAEMLKGLCCPRVKVGNEYVTKGQNVQQVTNSVGALAKAVYEKMFLWMVTRINQQLDTKQPRQYFIGVLDIAGFEIFDFNSLEQLCINFTNEKLQQFFNHHMFVLEQEEYKKEGIEWEFIDFGMDLAACIELIEKPMGIFSILEEECMFPKATDTSFKNKLYDQHLGKSNNFQKPKPAKGKAEAHFSLVHYAGTVDYNIAGWLDKNKDPLNETVVGLYQKSSLKLLSFLFSNYAGAETGDSGGSKKGGKKKGSSFQTVSAVFRENLNKLMTNLRSTHPHFVRCLIPNETKTPGVMDHYLVMHQLRCNGVLEGIRICRKGFPSRILYADFKQRYRILNASAIPEGQFIDSKNASEKLLNSIDVDREQFRFGNTKVFFKAGLLGLLEEMRDEKLVTLMTSTQAVCRGYLMRVEFKKMMERRDSIFCIQYNIRSFMNVKHWPWMNLFFKIKPLLKSAEAEKEMATMKEDFERTKEELARSEARRKELEEKMVSLLQEKNDLQLQVQSETENLMDAEERCEGLIKSKILLEAKVKELTERLEEEEEMNSELVAKKRNLEDKCSSLKRDIDDLELTLTKVEKEKHATENKVKNLSEEMTALEENISKLTKEKKSLQEAHQQTLDDLQVEEDKVNGLIKINAKLEQQTDDLEGSLEQEKKLRADLERAKRKLEGDLKMSQESIMDLENEKQQIEEKLKKKEFELSQLQARIDDEQVHSLQFQKKIKELQARIEELEEEIEAEHTLRAKIEKQRSDLARELEEISERLEEASGATSAQIEMNKKREAEFQKMRRDLEEATLQHEATAATLRKKQADSVAELGEQIDNLQRVKQKLEKEKSELKMEIDDMASNIEALSKSKSNIERTCRTVEDQFSEIKAKDEQQTQLIHDLNMQKARLQTQNGELSHRVEEKESLISQLTKSKQALTQQLEELKRQMEEETKAKNAMAHALQSSRHDCDLLREQYEEEQEAKAELQRALSKANSEVAQWKTKYETDAIQRTEELEEAKKKLAQRLQEAEEKTETANSKCASLEKTKQRLQGEVEDLMRDLERSHTACATLDKKQRNFDKVLAEWKQKLDESQAELEAAQKESRSLSTELFKMRNAYEEVVDQLETLRRENKNLQEEISDLTEQIAETGKNLQEAEKTKKLVEQEKSDLQVALEEVEGSLEHEESKILRVQLELSQVKSELDRKVIEKDEEIEQLKRNSQRAAEALQSVLDAEIRSRNDALRLKKKMEGDLNEMEIQLGHSNRQMAETQRHLRTVQGQLKDSQLHLDDALRSNEDLKEQLAIVERRNGLLLEELEEMKVALEQTERTRRLSEQELLDASDRVQLLHSQNTSLINTKKKLEADIAQCQAEVENSIQESRNAEEKAKKAITDAAMMAEELKKEQDTSAHLERMKKNLEQTVKDLQHRLDEAEQLALKGGKKQIQKLENRVRELENELDVEQKRGAEALKGAHKYERKVKEMTYQAEEDRKNILRLQDLVDKLQAKVKSYKRQAEEAEEQANTQLSRCRRVQHELEEAAERADIAESQVNKLRAKSRDVGSQKMEE

SEQ ID NO: 8589 - protein, 1770 aa, Homo sapiens
MSGASVKVAVRVRPFNSRETSKESKCIIQMQGNSTSIINPKNPKEAPKSFSFDYSYWSHTSPEDPCFASQNRVYNDIGKEMLLHAFEGYNVCIFAYGQTGAGKSYTMMGKQEESQAGIIPQLCEELFETNHDNCNEEMSYSVEVSYMEIYCERVRDLLNPKNKGNLRVRDHPLRGPYVEDLSKLAVTSYTDIADLMDAGNKARTVAATNMNETSSRSHVVYTIVFTQKKHDNETILATVKVSKTSLVDLAGSDRAASTGAKGTRLKEGAIINKSLTTLGKVISALAEVSKKKKKTDFIPYRDSVLTWLLRENLGGNSRTAMVAALSPADINYDETLSTLRYADRAKQIKCNAVINEDPNAKLVRELKEEVTRLKDLLRAQGLGDIIDTSMGSLTSSPSSCSLSSQVGLTSVTSIQERIMSTPGGEEAIERLKESEKIIAELNETWEEKLRKTEAIRMEREALLAEMGVAIREDGGTLGVFSPKKTPHLVNLNEDPLMSECLLYYIKDGITRVGQADAERRQDIVLSGAHIKEEHCIFRSERSNSGEVIVTLEPCERSETYVNGKRVSQPVQLRSGNRIIMGKNHVFRFNHPEQARAEREKTPSAETPSEPVDWTFAQRELLEKQGIDMKQEMEKRLQEMEILYKKEKEEADLLLEQQRLDYESKLQALQKQVETRSLAAETTEEEEEEEEVPWTQHEFELAQWAFRKWKSHQFTSLRDLLWGNAVYLKEANAISVELKKKVQFQFVLLTDTLYSPLPPELLPTEMEKTHEDRPFPRTVVAVEVQDLKNGATHYWSLEKLKQRLDLMREMYDRAGEMASSAQDESETTVTGSDPFYDRFHWFKLVGSSPIFHGCVNERLADRTPSPTFSTADSDITELADEQQDEMEDFDDEAFVDDAGSDAGTEEGSDLFSDGHDPFYDRSPWFILVGRAFVYLSNLLYPVPLIHRVAIVSEKGEVRGFLRVAVQAIAADEEAPDYGSGIRQSGTAKISFDNEYFNQSDFSSVAMTRSGLSLEELRIVEGQGQSSEVITPPEEISRINDLDLKSSTLLDGKMVMEGFSEEIGNHLKLGSAFTFRVTVLQASGILPEYADIFCQFNFLHRHDEAFSTEPLKNNGRGSPLAFYHVQNIAVEITESFVDYIKTKPIVFEVFGHYQQHPLHLQGQELNSPPQPCRRFFPPPMPLSKPVPATKLNTMSKTSLGQSMSKYDLLVWFEISELEPTGEYIPAVVDHTAGLPCQGTFLLHQGIQRRITVTIIHEKGSELHWKDVRELVVGRIRNKPEVDEAAVDAILSLNIISAKYLKSSHNSSRTFYRFEAVWDSSLHNSLLLNRVTPYGEKIYMTLSAYLELDHCIQPAVITKDVCMVFYSRDAKISPPRSLRSLFGSGYSKSPDSNRVTGIYELSLCKMSDTGSPGMQRRRRKILDTSVAYVRGEENLAGWRPRGDSLILEHQWELEKLELLHEVEKTRHFLLLRERLGDSIPKSLSDSLSPSLSSGTLSTSTSISSQISTTTFESAITPSESSGYDSGDIESLVDREKELATKCLQLLTHTFNREFSQVHGSVSDCKLSDISPIGRDPSESSFSSATLTPSSTCPSLVDSRSNSLDQKTPEANSRASSPCPEFEQFQIVPAVETPYLARAGKNEFLNLVPDIEEIRPSSVVSKKGYLHFKEPLYSNWAKHFVVVRRPYVFIYNSDKDPVERGIINLSTAQVEYSEDQQAMVKTPNTFAVCTKHRGVLLQALNDKDMNDWLYAFNPLLAGTIRSKLSRRCPSQSKY

SEQ ID NO: 8590 - protein, 1816 aa, Homo sapiens
MSGASVKVAVRVRPFNSRETSKESKCIIQMQGNSTSIINPKNPKEAPKSFSFDYSYWSHTSPEDPCFASQNRVYNDIGKEMLLHAFEGYNVCIFAYGQTGAGKSYTMMGKQEESQAGIIPQLCEELFETNHDNCNEEMSYSVEVSYMEIYCERVRDLLNPKNKGNLRVRDHPLRGPYVEDLSKLAVTSYTDIADLMDAGNKARTVAATNMNETSSRSHVVYTIVFTQKKHDNETILATVKVSKTSLVDLAGSDRAASTGAKGTRLKEGAIINKSLTTLGKVISALAEVDNCTSKSKKKKKTDFIPYRDSVLTWLLRENLGGNSRTAMVAALSPADINYDETLSTLRYADRAKQIKCNAVINEDPNAKLVRELKEEVTRLKDLLRAQGLGDIIDIDPLIDDYSGSGSKYLKDFQNNKHRYLLASENQRPGHFSTASMGSLTSSPSSCSLSSQVGLTSVTSIQERIMSTPGGEEAIERLKESEKIIAELNETWEEKLRKTEAIRMEREALLAEMGVAIREDGGTLGVFSPKKTPHLVNLNEDPLMSECLLYYIKDGITRVGQADAERRQDIVLSGAHIKEEHCIFRSERSNSGEVIVTLEPCERSETYVNGKRVSQPVQLRSGNRIIMGKNHVFRFNHPEQARAEREKTPSAETPSEPVDWTFAQRELLEKQGIDMKQEMEKRLQEMEILYKKEKEEADLLLEQQRLDYESKLQALQKQVETRSLAAETTEEEEEEEEVPWTQHEFELAQWAFRKWKSHQFTSLRDLLWGNAVYLKEANAISVELKKKVQFQFVLLTDTLYSPLPPELLPTEMEKTHEDRPFPRTVVAVEVQDLKNGATHYWSLEKLKQRLDLMREMYDRAGEMASSAQDESETTVTGSDPFYDRFHWFKLVGSSPIFHGCVNERLADRTPSPTFSTADSDITELADEQQDEMEDFDDEAFVDDAGSDAGTEEGSDLFSDGHDPFYDRSPWFILVGRAFVYLSNLLYPVPLIHRVAIVSEKGEVRGFLRVAVQAIAADEEAPDYGSGIRQSGTAKISFDNEYFNQSDFSSVAMTRSGLSLEELRIVEGQGQSSEVITPPEEISRINDLDLKSSTLLDGKMVMEGFSEEIGNHLKLGSAFTFRVTVLQASGILPEYADIFCQFNFLHRHDEAFSTEPLKNNGRGSPLAFYHVQNIAVEITESFVDYIKTKPIVFEVFGHYQQHPLHLQGQELNSPPQPCRRFFPPPMPLSKPVPATKLNTMSKTSLGQSMSKYDLLVWFEISELEPTGEYIPAVVDHTAGLPCQGTFLLHQGIQRRITVTIIHEKGSELHWKDVRELVVGRIRNKPEVDEAAVDAILSLNIISAKYLKSSHNSSRTFYRFEAVWDSSLHNSLLLNRVTPYGEKIYMTLSAYLELDHCIQPAVITKDVCMVFYSRDAKISPPRSLRSLFGSGYSKSPDSNRVTGIYELSLCKMSDTGSPGMQRRRRKILDTSVAYVRGEENLAGWRPRGDSLILEHQWELEKLELLHEVEKTRHFLLLRERLGDSIPKSLSDSLSPSLSSGTLSTSTSISSQISTTTFESAITPSESSGYDSGDIESLVDREKELATKCLQLLTHTFNREFSQVHGSVSDCKLSDISPIGRDPSESSFSSATLTPSSTCPSLVDSRSNSLDQKTPEANSRASSPCPEFEQFQIVPAVETPYLARAGKNEFLNLVPDIEEIRPSSVVSKKGYLHFKEPLYSNWAKHFVVVRRPYVFIYNSDKDPVERGIINLSTAQVEYSEDQQAMVKTPNTFAVCTKHRGVLLQALNDKDMNDWLYAFNPLLAGTIRSKLSRRCPSQSKY

SEQ ID NO: 8591 - protein, 2785 aa, Homo sapiens
MKTKPVSHKTENTYRFLTFAERLGNVNIDIIHRIDRTASYEEEVETYFFEGLLKWRELNLTEHFGKFYKEVIDKCQSFNQLVYHQNEIVQSLKTHLQVKNSFAYQPLLDLVVQLARDLQMDFYPHFPEFFLTITSILETQDTELLEWAFTSLSYLYKYLWRLMVKDMSSIYSMYSTLLAHKKLHIRNFAAESFTFLMRKVSDKNALFNLMFLDLDKHPEKVEGVGQLLFEMCKGVRNMFHSCTGQAVKLILRKLGPVTETETQLPWMLIGETLKNMVKSTVSYISKEHFGTFFECLQESLLDLHTKVTKTNCCESSEQIKRLLETYLILVKHGSGTKIPTPADVCKVLSQTLQVASLSTSCWETLLDVISALILGENVSLPETLIKETIEKIFESRFEKRLIFSFSEVMFAMKQFEQLFLPSFLSYIVNCFLIDDAVVKDEALAILAKLILNKAAPPTAGSMAIEKYPLVFSPQMVGFYIKQKKTRSKGRNEQFPVLDHLLSIIKLPPNKDTTYLSQSWAALVVLPHIRPLEKEKVIPLVTGFIEALFMTVDKGSFGKGNLFVLCQAVNTLLSLEESSELLHLVPVERVKNLVLTFPLEPSVLLLTDLYYQRLALCGCKGPLSQEALMELFPKLQANISTGVSKIRLLTIRILNHFDVQLPESMEDDGLSERQSVFAILRQAELVPATVNDYREKLLHLRKLRHDVVQTAVPDGPLQEVPLRYLLGMLYINFSALWDPVIELISSHAHEMENKQFWKVYYEHLEKAATHAEKELQNDMTDEKSVGDESWEQTQEGDVGALYHEQLALKTDCQERLDHTNFRFLLWRALTKFPERVEPRSRELSPLFLRFINNEYYPADLQVAPTQDLRRKGKGMVAEEIEEEPAAGDDEELEEEAVPQDESSQKKKTRRAAAKQLIAHLQVFSKFSNPRALYLESKLYELYLQLLLHQDQMVQKITLDCIMTYKHPHVLPYRENLQRLLEDRSFKEEIVHFSISEDNAVVKTAHRADLFPILMRILYGRMKNKTGSKTQGKSASGTRMAIVLRFLAGTQPEEIQIFLDLLFEPVRHFKNGECHSAVIQAVEDLDLSKVLPLGRQHGILNSLEIVLKNISHLISAYLPKILQILLCMTATVSHILDQREKIQLRFINPLKNLRRLGIKMVTDIFLDWESYQFRTEEIDAVFHGAVWPQISRLGSESQYSPTPLLKLISIWSRNARYFPLLAKQKPGHPECDILTNVFAILSAKNLSDATASIVMDIVDDLLNLPDFEPTETVLNLLVTGCVYPGIAENIGESITIGGRLILPHVPAILQYLSKTTISAEKVKKKKNRAQVSKELGILSKISKFMKDKEQSSVLITLLLPFLHRGNIAEDTEVDILVTVQNLLKHCVDPTSFLKPIAKLFSVIKNKLSRKLLCTVFETLSDFESGLKYITDVVKLNAFDQRHLDDINFDVRFETFQTITSYIKEMQIVDVNYLIPVMHNCFYNLELGDMSLSDNASMCLMSIIKKLPALNVTEKDYREIIHRSLLEKLRKGLKSQTESIQQDYTTILSCLIQTFPNQLEFKDLVQLTHYHDPEMDFFENMKHIQIHRRARALKKLAKQLMEGKVVLSSKSLQNYIMPYAMTPIFDEKMLKHENITTAATEIIGAICKHLSWSAYMYYLKHFIHVLQTGQINQKLGVSLLVIVLEAFHFDHKTLEEQMGKIENEENAIEAIELPEPEAMELERVDEEEKEYTCKSLSDNGQPGTPDPADSGGTSAKESECITKPVSFLPQNKEEIERTIKNIQGTITGDILPRLHKCLASTTKREEEHKLVKSKVVNDEEVVRVPLAFAMVKLMQSLPQEVMEANLPSILLKVCALLKNRAQEIRDIARSTLAKIIEDLGVHFLQYVLKELQTTLVRGYQVHVLTFTVHMLLQGLTNKLQVGDLDSCLDIMIEIFNHELFGAVAEEKEVKQILSKVMEARRSKSYDSYEILGKFVGKDQVTKLILPLKEILQNTTSLKLARKVHETLRRITVGLIVNQEMTAESILLLSYGLISENLPLLTEKEKNPVAPAPDPRLPPQSCLLLPPTPVRGGQKAVVSRKTNMHIFIESGLRLLHLSLKTSKIKSSGECVLEMLDPFVSLLIDCLGSMDVKVITGALQCLIWVLRFPLPSIETKAEQLTKHLFLLLKDYAKLGAARGQNFHLVVNCFKCVTILVKKVKSYQITEKQLQVLLAYAEEDIYDTSRQATAFGLLKAILSRKLLVPEIDEVMRKVSKLAVSAQSEPARVQCRQVFLKYILDYPLGDKLRPNLEFMLAQLNYEHETGRESTLEMIAYLFDTFPQGLLHENCGMFFIPLCLMTINDDSATCKKMASMTIKSLLGKISLEKKDWLFDMVTTWFGAKKRLNRQLAALICGLFVESEGVDFEKRLGTVLPVIEKEIDPENFKDIMEETEEKAADRLLFSFLTLITKLIKECNIIQFTKPAETLSKIWSHVHSHLRHPHNWVWLTAAQIFGLLFASCQPEELIQKWNTKKTKKHLPEPVAIKFLASDLDQKMKSISLASCHQLHSKFLDQSLGEQVVKNLLFAAKVLYLLELYCEDKQSKIKEDLEEQEALEDGVACADEKAESDGEEKEEVKEELGRPATLLWLIQKLSRIAKLEAAYSPRNPLKRTCIFKFLGAVAMDLGIDKVKPYLPMIIAPLFRELNSTYSEQDPLLKNLSQEIIELLKKLVGLESFSLAFASVQKQANEKRALRKKRKALEFVTNPDIAAKKKMKKHKNKSEAKKRKIEFLRPGYKAKRQKSHSLKDLAMVE

SEQ ID NO: 8592 - protein, 693 aa, Homo sapiens
MIAPLLCILSYNFNTFAILNVYSKLTMFCTTNSLPMDLLLKQGSLKQEVESFCYQIVSESNDQKVGILQSEDKQLQPSVSKKSEGELSRVKFISNSNKITFSKKPKRRKYDESYLSFGFTYFGNRDAPHAQCVLCKKILSNSSLAPSKLRRHLETKHAAYKDKDISFFKQHLDSPENNKPPTPKIVNTDNESATEASYNVSYHIALSGEAHTIGELLIKPCAKDVVMRMFDEQYSKKIDAVQLSNSTVARRIKDLAADIEEELVCRLKICDGFSLQLDESADVSGLAVLLVFVRYRFNKSIEEDLLLCESLQSNATGEEIFNCINSFMQKHEIEWEKCVDVCSDASRAVDGKIAEAVTLIKYVAPESTSSHCLLYRHALAVKIMPTSLKNVLDQAVQIINYIKARPHQSRLLKILCEEMGAQHTALLLNTEVRWLSRGKVLVRLFELRRELLVFMDSAFRLSDCLTNSSWLLRLAYLADVFTKLNEVNLSMQGKNVTVFTVFDKMSSLLRKLEFWASSVEEENFDCFPTLSDFLTEINSTVDKDICSAIVQHLRGLRATLLKYFPVTNDNNAWVRNPFTVTVKPASLVARDYESLIDLTSDSQVKQNFSELSLNDFWSSLIQEYPSIARRAVRVLLPFATMHLCETGFSYYAATKTKYRKRLDAAPHMRIRLSNITPNIKRICDKKTQKHCSH

SEQ ID NO: 8593 - protein, 335 aa, Homo sapiens
CCLSEEAKEARRINDEIERQLRRDKRDARRELKLLLLRTGESGKSTFIKQLRIIHGSGYSDEDKRGFTKLVYRNIFTAMQAMIRAIDSLKIPYKYEHREVDVEKGSAFENPYVDAIKSLWNDPGIQECYDRRREYQLSDSTKYYLNDLDHVADLATQQDVLRVRVPTTGIVEYPFDLQSVIFRMFDVGGQRSERRKWIHCFENVTSIMFLVALSEYDRVLVESDNENRMEESKALFSTIITYPWFQNSSVILLLNKKDLPEEKIMYSHLVDYFPEYDGPQRDAQAAREFILKMFVPEPSDQIIYSHFTCATDTENIRFVFAAVKDTILQLNLKDY

SEQ ID NO: 8594 - protein, 1180 aa, Homo sapiens
MTLQGRADLSGNQGNAAGRLATVHEPVVTQWAVHPPAPAHPSLLDKMEKAPPQPQHEGLKSKEHLPQQPAEGKTASRRVPRLRAVVESQAFKNILVDEMDMMHARAATLIQANWRGYWLRQKLISQMMAAKAIQEAWRRFNKRHILHSSKSLVKKTRAEEGDIPYHAPQQVRFQHPEENRLLSPPIMVNKETQFPSCDNLVLCRPQSSPLLQPPAAQGTPEPCVQGPHAARVRGLAFLPHQTVTIRFPCPVSLDAKCQPCLLTRTIRSTCLVHIEGDSVKTKRVSARTNKARAPETPLSRRYDQAVTRPSRAQTQGPVKAETPKAPFQICPGPMITKTLLQTYPVVSVTLPQTYPASTMTTTPPKTSPVPKVTIIKTPAQMYPGPTVTKTAPHTCPMPTMTKIQVHPTASRTGTPRQTCPATITAKNRPQVSLLASIMKSLPQVCPGPAMAKTPPQMHPVTTPAKNPLQTCLSATMSKTSSQRSPVGVTKPSPQTRLPAMITKTPAQLRSVATILKTLCLASPTVANVKAPPQVAVAAGTPNTSGSIHENPPKAKATVNVKQAAKVVKASSPSYLAEGKIRCLAQPHPGTGVPRAAAELPLEAEKIKTGTQKQAKTDMAFKTSVAVEMAGAPSWTKVAEEGDKPPHVYVPVDMAVTLPRGQLAAPLTNASSQRHPPCLSQRPLAAPLTKASSQGHLPTELTKTPSLAHLDTCLSKMHSQTHLATGAVKVQSQAPLATCLTKTQSRGQPITDITTCLIPAHQAADLSSNTHSQVLLTGSKVSNHACQRLGGLSAPPWAKPEDRQTQPQPHGHVPGKTTQGGPCPAACEVQGMLVPPMAPTGHSTCNVESWGDNGATRAQPSMPGQAVPCQEDTGPADAGVVGGQSWNRAWEPARGAASWDTWRNKAVVPPRRSGEPMVSMQAAEEIRILAVITIQAGVRGYLARRRIRLWHRGAMVIQATWRGYRVRRNLAHLCRATTTIQSAWRGYSTRRDQARHWQMLHPVTWVELGSRAGVMSDRSWFQDGRARTVSDHRCFQSCQAHACSVCHSLSSRIGSPPSVVMLVGSSPRTCHTCGRTQPTRVVQGMGQGTEGPGAVSWASAYQLAALSPRQPHRQDKAATAIQSAWRGFKIRQQMRQQQMAAKIVQATWRGHHTRSCLKNTEALLGPADPSASSRHMHWPGI

SEQ ID NO: 8595 - protein, 907 aa, Homo sapiens
MSGQTLTDRIAAAQYSVTGSAVARAVCKATTHEVMGPKKKHLDYLIQATNETNVNIPQMADTLFERATNSSWVVVFKALVTTHHLMVHGNERFIQYLASRNTLFNLSNFLDKSGSHGYDMSTFIRRYSRYLNEKAFSYRQMAFDFARVKKGADGVMRTMAPEKLLKSMPILQGQIDALLEFDVHPNELTNGVINAAFMLLFKDLIKLFACYNDGVINLLEKFFEMKKGQCKDALEIYKRFLTRMTRVSEFLKVAEQVGIDKGDIPDLTQAPSSLMETLEQHLNTLEGKKPGNNEGSGAPSPLSKSSPATTVTSPNSTPAKTIDTSPPVDLFATASAAVPVSTSKPSSDLLDLQPDFSSGGAAAAAAPAPPPPAGGATAWGDLLGEDSLAALSSVPSEAQISDPFAPEPTPPTTTAEIATASASASTTTTVTAVTAEVDLFGDAFAASPGEAPAASEGAAAPATPTPVAAALDACSGNDPFAPSEGSAEAAPELDLFAMKPPETSVPVVTPTASTAPPVPATAPSPAPAVAAAAAATTAATAAATTTTTTSAATATTAPPALDIFGDLFESTPEVAAAPKPDAAPSIDLFSTDAFSSPPQGASPVPESSLTADLLSVDAFAAPSPATTASPAKVDSSGVIDLFGDAFGSSASEPQPASQAASSSSASADLLAGFGGSFMAPSPSPVTPAQNNLLQPNFEAAFGTTPSTSSSSSFDPSVFDGLGDLLMPTMAPAGQPAPVSMVPPSPAMAASKALGSDLDSSLASLVGNLGISGTTTKKGDLQWNAGEKKLTGGANWQPKVAPATWSAGVPPSAPLQGAVPPTSSVPPVAGAPSVGQPGAGFGMPPAGTGMPMMPQQPVMFAQPMMRPPFGAAAVPGTQLSPSPTPASQSPKKPPAKDPLADLNIKDFL

SEQ ID NO: 8596 - protein, 573 aa, Homo sapiens
MSQLHFYRFYLEFGCLRKAFRHKFRLPPPSSDFLADVVGLQTEQRAGDLPKTMEGPLPSNAKAAINLQDDPIIQKYGSKKVGLTRCLLTKEEMRTFHFPLQGFPDCENFLLTKCNGSIADNSPLFGLDCEMARTTFNFSIGVLQAECLTSKGRELTRISLVAEGGCCVMDELVKPENKILDYLTSFSGITKKILNPVTTKLKDVQRQLKALLPPDAVLVGHSLDLDLRALKMIHPYVIDTSLLYVREQGRRFKLKFLAKVILGKDIQCPDRLGHDATEDARTILELARYFLKHGPKKIAELNLEALANHQEIQAAGQEPKNTAEVLQHPNTSVLECLDSVGQKLLFLTRETDAGELPSSRNCQTIKCLSNKEVQRPVTELTLDCDTLVNELEGDSENQGSIYLSGVSETFKEQLLQEPRLFLGLEAVILPKDLKSGKQKKYCFLKFKSFGSAQQALNILTGKDWKLKGRHALTPRHLHAWLRGLPPESTRLPGLRVVPPPFEQEALQTLKLDHPKIAAWRWSRKIGKLYNSLCPGTLCLILLPGTKSTHGSLSGLGLMGIKEEEESAGPGLCS

SEQ ID NO: 8597 - protein, 763 aa, Homo sapiens
MKTSPRRPLILKRRRLPLPVQNAPSETSEEEPKRSPAQQESNQAEASKEVAESNSCKFPAGIKIINHPTMPNTQVVAIPNNANIHSIITALTAKGKESGSSGPNKFILISCGGAPTQPPGLRPQTQTSYDAKRTEVTLETLGPKPAARDVNLPRPPGALCEQKRETCADGEAAGCTINNSLSNIQWLRKMSSDGLGSRSIKQEMEEKENCHLEQRQVKVEEPSRPSASWQNSVSERPPYSYMAMIQFAINSTERKRMTLKDIYTWIEDHFPYFKHIAKPGWKNSIRHNLSLHDMFVRETSANGKVSFWTIHPSANRYLTLDQVFKPLDPGSPQLPEHLESQQKRPNPELRRNMTIKTELPLGARRKMKPLLPRVSSYLVPIQFPVNQSLVLQPSVKVPLPLAASLMSSELARHSKRVRIAPKVLLAEEGIAPLSSAGPGKEEKLLFGEGFSPLLPVQTIKEEEIQPGEEMPHLARPIKVESPPLEEWPSPAPSFKEESSHSWEDSSQSPTPRPKKSYSGLRSPTRCVSEMLVIQHRERRERSRSRRKQHLLPPCVDEPELLFSEGPSTSRWAAELPFPADSSDPASQLSYSQEVGGPFKTPIKETLPISSTPSKSVLPRTPESWRLTPPAKVGGLDFSPVQTSQGASDPLPDPLGLMDLSTTPLQSAPPLESPQRLLSSEPLDLISVPFGNSSPSDIDVPKPGSPEPQVSGLAANRSLTEGLVLDTMNDSLSKILLDISFPGLDEDPLGPDNINWSQFIPELQ

SEQ ID NO: 8598 - protein, 800 aa, Homo sapiens
MKTSPRRPLILKRRRLPLPVQNAPSETSEEEPKRSPAQQESNQAEASKEVAESNSCKFPAGIKIINHPTMPNTQVVAIPNNANIHSIITALTAKGKESGSSGPNKFILISCGGAPTQPPGLRPQTQTSYDAKRTEVTLETLGPKPAARDVNLPRPPGALCEQKRETCADGEAAGCTINNSLSNIQWLRKMSSDGLGSRSIKQEMEEKENCHLEQRQVKVEEPSRPSASWQNSVSERPPYSYMAMIQFAINSTERKRMTLKDIYTWIEDHFPYFKHIAKPGWKNSIRHNLSLHDMFVRETSANGKVSFWTIHPSANRYLTLDQVFKPLDPGSPQLPEHLESQQKRPNPELRRNMTIKTELPLGARRKMKPLLPRVSSYLVPIQFPVNQSLVLQPSVKVPLPLAASLMSSELARHSKRVRIAPKFGEQVVFGYMSKFFSGDLRDFGTPITSLFNFIFLCLSVLLAEEGIAPLSSAGPGKEEKLLFGEGFSPLLPVQTIKEEEIQPGEEMPHLARPIKVESPPLEEWPSPAPSFKEESSHSWEDSSQSPTPRPKKSYSGLRSPTRCVSEMLVIQHRERRERSRSRRKQHLLPPCVDEPELLFSEGPSTSRWAAELPFPADSSDPASQLSYSQEVGGPFKTPIKETLPISSTPSKSVLPRTPESWRLTPPAKVGGLDFSPVQTSQGASDPLPDPLGLMDLSTTPLQSAPPLESPQRLLSSEPLDLISVPFGNSSPSDIDVPKPGSPEPQVSGLAANRSLTEGLVLDTMNDSLSKILLDISFPGLDEDPLGPDNINWSQFIPELQ

SEQ ID NO: 8599 - protein, 748 aa, Homo sapiens
MKTSPRRPLILKRRRLPLPVQNAPSETSEEEPKRSPAQQESNQAEASKEVAESNSCKFPAGIKIINHPTMPNTQVVAIPNNANIHSIITALTAKGKESGSSGPNKFILISCGGAPTQPPGLRPQTQTSYDAKRTEVTLETLGPKPAARDVNLPRPPGALCEQKRETCADGEAAGCTINNSLSNIQWLRKMSSDGLGSRSIKQEMEEKENCHLEQRQVKVEEPSRPSASWQNSVSERPPYSYMAMIQFAINSTERKRMTLKDIYTWIEDHFPYFKHIAKPGWKNSIRHNLSLHDMFVRETSANGKVSFWTIHPSANRYLTLDQVFKQQKRPNPELRRNMTIKTELPLGARRKMKPLLPRVSSYLVPIQFPVNQSLVLQPSVKVPLPLAASLMSSELARHSKRVRIAPKVLLAEEGIAPLSSAGPGKEEKLLFGEGFSPLLPVQTIKEEEIQPGEEMPHLARPIKVESPPLEEWPSPAPSFKEESSHSWEDSSQSPTPRPKKSYSGLRSPTRCVSEMLVIQHRERRERSRSRRKQHLLPPCVDEPELLFSEGPSTSRWAAELPFPADSSDPASQLSYSQEVGGPFKTPIKETLPISSTPSKSVLPRTPESWRLTPPAKVGGLDFSPVQTSQGASDPLPDPLGLMDLSTTPLQSAPPLESPQRLLSSEPLDLISVPFGNSSPSDIDVPKPGSPEPQVSGLAANRSLTEGLVLDTMNDSLSKILLDISFPGLDEDPLGPDNINWSQFIPELQ

SEQ ID NO: 8600 - protein, 509 aa, Homo sapiens
MQSWSRVYCSLAKRGHFNRISHGLQGLSAVPLRTYADQPIDADVTVIGSGPGGYVAAIKAAQLGFKTVCIEKNETLGGTCLNVGCIPSKALLNNSHYYHMAHGTDFASRGIEMSEVRLNLDKMMEQKSTAVKALTGGIAHLFKQNKVVHVNGYGKITGKNQVTATKADGGTQVIDTKNILIATGSEVTPFPGITIDEDTIVSSTGALSLKKVPEKMVVIGAGVIGVELGSVWQRLGADVTAVEFLGHVGGVGIDMEISKNFQRILQKQGFKFKLNTKVTGATKKSDGKIDVSIEAASGGKAEVITCDVLLVCIGRRPFTKNLGLEELGIELDPRGRIPVNTRFQTKIPNIYAIGDVVAGPMLAHKAEDEGIICVEGMAGGAVHIDYNCVPSVIYTHPEVAWVGKSEEQLKEEGIEYKVGKFPFAANSRAKTNADTDGMVKILGQKSTDRVLGAHILGPGAGEMVNEAALALEYGASCEDIARVCHAHPTLSEAFREANLAASFGKSINF

SEQ ID NO: 8601 - protein, 505 aa, Homo sapiens [sequence omitted]

SEQ ID NO: 8602 - protein, 1101 aa, Homo sapiens
MDECGSRIRRRVSLPKRNRPSLGCIFGAPTAAELEPGDEGKEEEEMVAENRRRKTAGVLPVEVQPLLLSDSPECLVLGGGDTNPDLLRHMPTDRGVGDQPNDSEVDMFGDYDSFTENSFIAQVDDLEQKYMQLPEHKKHATDFATENLCSESIKNKLSITTIGNLTELQTDKHTENQSGYEGVTIEPGADLLYDVPSSQAIYFENLQNSSNDLGDHSMKERDWKSSSHNTVNEELPHNCIEQPQQNDESSSKVRTSSDMNRRKSIKDHLKNAMTGNAKAQTPIFSRSKQLKDTLLSEEINVAKKTIESSSNDLGPFYSLPSKVRDLYAQFKGIEKLYEWQHTCLTLNSVQERKNLIYSLPTSGGKTLVAEILMLQELLCCRKDVLMILPYVAIVQEKISGLSSFGIELGFFVEEYAGSKGRFPPTKRREKKSLYIATIEKGHSLVNSLIETGRIDSLGLVVVDELHMIGEGSRGATLEMTLAKILYTSKTTQIIGMSATLNNVEDLQKFLQAEYYTSQFRPVELKEYLKINDTIYEVDSKAENGMTFSRLLNYKYSDTLKKMDPDHLVALVTEVIPNYSCLVFCPSKKNCENVAEMICKFLSKEYLKHKEKEKCEVIKNLKNIGNGNLCPVLKRTIPFGVAYHHSGLTSDERKLLEEAYSTGVLCLFTCTSTLAAGVNLPARRVILRAPYVAKEFLKRNQYKQMIGRAGRAGIDTIGESILILQEKDKQQVLELITKPLENCYSHLVQEFTKGIQTLFLSLIGLKIATNLDDIYHFMNGTFFGVQQKVLLKEKSLWEITVESLRYLTEKGLLQKDTIYKSEEEVQYNFHITKLGRASFKGTIDLAYCDILYRDLKKGLEGLVLESLLHLIYLTTPYDLVSQCNPDWMIYFRQFSQLSPAEQNVAAILGVSESFIGKKASGQAIGKKVDKNVVNRLYLSFVLYTLLKETNIWTVSEKFNMPRGYIQNLLTGTASFSSCVLHFCEELEEFWVYRALLVELTKKLTYCVKAELIPLMEVTGVLEGRAKQLYSAGYKSLMHLANANPEVLVRTIDHLSRRQAKQIVSSAKMLLHEKAEALQEEVEELLRLPSDFPGAVASSTDKA

SEQ ID NO: 8603 - protein, 629 aa, Homo sapiens
MEQGHSDLEKMQDLYSESLIMDWWYNAEKDGDSKHQKEICSMISTPEKCAKPQSDVDSTQTSSLNMLKGPWGLSDQKVQKKKVLHAESTKTSLLRSQMSSLRSSACSERKDGLSNASSRRTALSDKEMSILLAEEWLDDKSSEKVTREGSQVYDHDSSDVSSENWLKTYGLVAKKLTLMDALSVAAVPHSSTYVPVLDKHVMSKVFDEVFPLAHVCNDTNKMTLINPQGAKLNIYKRKVEQAIQSYEKRLNKIVWRALSQEEKEKLDANKPIQYLENKTVLNQALERLNWPISLKELSMLESEILAGKMYIQQAMELQEAAKKNYANKAPGEQQKLQGNPTKKTKSKRPDPLKGQKVIARCDENGFYFPGVVKKCVSRTQALVGFSYGDTKVVSTSFITPVGGAMPCPLLQVGDYVFAKIVIPKGFDFYVPAIVIALPNKHVATEKFYTVLKCNNRREFCPRSALIKISQNKYALSCSHIKSPPIPEDPEVEDVEARNSAFLFWPLKEADTQDSREPRREKPRRKKRPAKQPLQQAAPSDSDGSSHGISSHGSCQGTHPEPKVWVMGGEHNIAYLRNTLKSLSRIVHLTSSFRFWACLGSSAAKTLTSLSNAELCFPRQPTSTSPRPGV

SEQ ID NO: 8604 - protein, 686 aa, Homo sapiens
MCIIPPETVIDQVKRFQEIPIYTISFNYNDEIANRFLKEVAALTGGEFHFYNFGCKDPTPPEAVQNEDVTLLVKEMEQGHSDLEKMQDLYSESLIMDWWYNAEKDGDSKHQKEICSMISTPEKCAKPQSDVDSTQTSSLNMLKGPWGLSDQKVQKKKVLHAESTKTSLLRSQMSSLRSSACSERKDGLSNASSRRTALSDKEMSILLAEEWLDDKSSEKVTREGSQVYDHDSSDVSSENWLKTYGLVAKKLTLMDALSVAAVPHSSTYVPVLDKHVMSKVFDEVFPLAHVCNDTNKMTLINPQGAKLNIYKRKVEQAIQSYEKRLNKIVWRALSQEEKEKLDANKPIQYLENKTVLNQALERLNWPISLKELSMLESEILAGKMYIQQAMELQEAAKKNYANKAPGEQQKLQGNPTKKTKSKRPDPLKGQKVIARCDENGFYFPGVVKKCVSRTQALVGFSYGDTKVVSTSFITPVGGAMPCPLLQVGDYVFAKIVIPKGFDFYVPAIVIALPNKHVATEKFYTVLKCNNRREFCPRSALIKISQNKYALSCSHIKSPPIPEDPEVEDVEARNSAFLFWPLKEADTQDSREPRREKPRRKKRPAKQPLQQAAPSDSDGSSHGISSHGSCQGTHPEPKTAHLHFPAAGRLGLSSHAIIATPPPRAALPCTLQATHSSKGLRSVPETL

SEQ ID NO: 8605 - protein, 1060 aa, Homo sapiens
MEKSGPSSTISEQQLQRQEGWINTKTDLAEQSLISSEKWLQLHGLKSNKLTLKQILSQIGFPHCEDYVASLGRPVASRYADGLFPQLYRAEDGRVYNLTAKSELIYQFVEHLTQAVESYKQRMDWLTSKSRQIFGVILEQCVTIVLDFGGILEGELDLCREALTMVLQEQVAHITEFNIIRVSQEPVKWQENATPVTEQSIATAISWVEKLTVELTVSEAGRLDALLEAGRDKTIESIYYFVVGDVPEESKELLLQRALEIPCPVYTVSFNARGEGTIAFLKDLSAKTHSRFHAFAERTECVEFPAFSTKDGDNVMTWNSRKLKGKLPPGAGVREDVFLVWQEMEEARSTLAQIQRLVAEPPKPDVATVDCESETTSVEIASNPEDTWDSKTWLQKYGLKAQKLSLYDVLADCSFCHADGVVDIKAKPENESVQTSAETNKKTVHAKYCSRFVHAPWKDGSLVHVNITKEKCKWYSERIHTALARIRRRIKWLQDGSQSLFGRLHNDCIYILIDTSHSMKSKLDLVKDKIIQFIQEQLKYKSKFNFVKFDGQAVAWREQLAEVNEDNLEQAQSWIRDIKIGSSTNTLSALKTAFADKETQAIYLLTDGRPDQPPETVIDQVKRFQEIPIYTISFNYNDEIANRFLKEVAALTGGEFHFYNFGCKDPTPPEAVQNEDVTLLVKEMEQGHSDLEKMQDLYSESLIMDWWYNAEKDGDSKHQKEICSMISTPERCAKPQSDVDSTQTSSLNMLKGPWGLSDQKVQKKKVLHAESTKTSLLRSQMSSLRSSACSERKDGLSNASSRRTALSDKEMSILLAEEWLDDKSSEKVTREGSQVYDHDSSDVSSENWLKTYGLVAKKLTLMDALSVAAVPHSSTYVPVLDKHVMSKVLDEVFPLAHVCNDTNKMTLINPQGAKLNIYKRKVEQAIQSYEKRLNKIVWRALSQEEKEKLDANKPIQYLENKTVLNQALERLNWPISLKELSMLESEILAGKMYIQQAMELQEAAKKNYANKAPGEQQKLQGNPTKKTKSKRPDPLKGQKVIARCDENGFYFPGSFFFLIS

SEQ ID NO: 8606 - protein, 803 aa, Homo sapiens
WLQDGSQSLFGRLHNDCIYILIDTSHSMKSKLDLVKDKIIQFIQEQLKYKSKFNFVKFDGQAVAWREQLAEVNEDNLEQAQSWIRDIKIGSSTNTLSALKTAFADKETQAIYLLTDGRPDQPPETVIDQVKRFQEIPIYTISFNYNDEIANRFLKEVAALTGGEFHFYNFGCKDPTPPEAVQNEDLTLLVKEMEQGHSDLEKMQDLYSESLIMDWWYNAEKDGDSKHQKEICSMISTPEKCAKPQSDVDSTQTSSLNMLKGPWGLSDQKVQKKKVLHAESTKTSLLRSQMSSLRSSACSERKDGLSNASSRRTALSDKEMSILLAEEWLDDKSSEKVTREGSQVYDHDSSDVSSENWLKTYGLVAKKLTLMDALSVAAVPHSSTYVPVLDKHVVSKVFDEVFPLAHVCNDTNKMTLINPQGAKLNIYKRKVEQAIQSYEKRLNKIVWRALSQEEKEKLDANKPIQYLENKTVLNQALERLNWPISLKELSMLESEILAGKMYIQQAMELQEAAKKNYANKAPGEQQKLQGNPTKKTKSKRPDPLKGQKVIARCDENGFYFPGVVKKCVSRTQALVGFSYGDTKVVSTSFITPVGGAMPCPLLQVGDYVFAKIVIPKGFDFYVPAIVIALPNKHVATEKFYTVLKCNNRREFCPRSALIKISQNKYALSCSHIKSPPIPEDPEVEDVEARNSAFLFWPLKEADTQDSREPRREKPRRKKRPAKQPLQQAAPSDSDGSSHGISSHGSCQGTHPEPKTAHLHFPAAGRLGLSSHAIIATPPPRAALPCTLQATHSSKGLRSVPETL

SEQ ID NO: 8607 - protein, 401 aa, Homo sapiens
MATKGMRLKSTKEVFPLAHVCNDTNKMTLINPQGAKLNIYKRKVEQAIQSYEKRLNKIVWRALSQEEKEKLDANKPIQYLENKTVLNQALERLNWPISLKELSMLESEILAGKMYIQQAMELQEAAKKNYANKAPGEQQKLQGNPTKKTKSKRPDPLKGQKVIARCDENGFYFPGVVKKCVSRTQALVGFSYGDTKVVSTSFITPVGGAMPCPLLQVGDYVFAKIVIPKGFDFYVPAIVIALPNKHVATEKFYTVLKCNNRREFCPRSALIKISQNKYALSCSHIKSPPIPEDPEVEDVEARNSAFLFWPLKEADTQDSREPRREKPRRKKRPAKQPLQQAAPSDSDGSSHGISSHGPPPLPRGRASRTQQPRHHCHTSTSSSPALYSPSHPQQQRAEERP

SEQ ID NO: 8608 - protein, 337 aa, Homo sapiens
MADAAPQLGKRKRELDVEEAHAASTEEKEAGVGNGTCAPVRLPFSGFRLQKVLRESARDKIIFLHGKVNEASGDGDGEDAVVILEKTPFQVEQVAQLLTGSPELQLQFSNDIYSTYHLFPPRQLNDVKTTVVYPATEKHLQKYLRQDLRLIRETGDDYRNITLPHLESQSLSIQWVYNILDKKAEADRIVFENPDPSDGFVLIPDLKWNQQQLDDLYLIAICHRRGIRSLRDLTPEHLPLLRNILHQGQEAILQRYRMKGDHLRVYLHYLPSYYHLHVHFTALGFEAPGSGVERAHLLAEVIENLECDPRHYQQRTLTFALRADDPLLKLLQEAQQS

SEQ ID NO: 8609 - protein, 337 aa, Homo sapiens
MADAAPQLGKRKRELDVEEAHAASTEEKEAGVGNGTCAPVRLPFSGFRLQKVLRESARDKIIFLHGKVNEASEDGDGEDAVVILEKTPFQVEQVAQLLTGSPELQLQFSNDIYSTYHLFPPRQLNDVKTTVVYPATEKHLQKYLRQDLRLIRETGDDYRNITLPHLESQSLSIQWVYNILDKKAEADRIVFENPDPSDGFVLIPDLKWNQQQLDDLYLIAICHRRGIRSLRDLTPEHLPLLRNILHQGQEAILQRYRMKGDHLRVYLHYLPSYYHLHVHFTALGFEAPGSGVERAHLLAEVIENLECDPRHYQQRTLTFALRADDPLLKLLQEAQQS

SEQ ID NO: 8610 - protein, 1778 aa, Homo sapiens
QAQNCLTKLYKLDKMQFRQTMRDYVNKDSLNNVVDFLHALLGFCMEPVTDNKAGFGNNFTTVDNKSTAQNVEGIIVSAMFKSLITRCASTTHELHSPENLGLYCDIRQLVQFIKEAHGNVFRRVALSALLDSAEKLAPGKKVEENEQESKPAGSKRSEAGSIVDKGQVSSAPEECRSFMSGRPSQTPEHDEQMQGANLGRKDFWRKMFKSQSAASDTSSQSEQDTSECTTAHSGTTSDRRARSRSRRISLRKKLKLPIGKRNWLKRSSLSGLADGVEDLLDISSVDRLSFIRQSSKVKFTSAVKLSEGGPGSGMENGRDEEENFFKRLGCHSFDDHLSPNQDGGKSKNVVNLGAIRQGMKRFQFLLNCCEPGTIPDASILAAALDLEAPVVARAALFLECARFVHRCNRGNWPEWMKGHHVNITKKGLSRGRSPIVGNKRNQKLQWNAAKLFYQWGDAIGVRLNELCHGESESPANLLGLIYDEETKRRLRKEDEEEDFLDDSTVNPSKCGCPFALKMAACQLLLEITTFLRETFSCLPRPRTEPLVDLESCRLRLDPELDRHRYERKISFAGVLDENEDSKDSLHSSSHTLKSDAGVEEKKEGSPWSASEPSIEPEGMSNAGAEENYHRNMSWLHVMILLCNQQSFICTHVDYCHPHCYLHHSRSCARLVRAIKLLYGDSVDSLRESSNISSVALRGKKQKECSDKSCLRTPSLKKRVSDANLEGKKDSGMLKYIRLQVMSLSPAPLSLLIKAAPILTEEMYGDIQPAAWELLLSMDEHMAGAAAAMFLLCAVKVPEAVSDMLMSEFHHPETVQRLNAVLKFHTLWRFRYQVWPRMEEGAQQIFKIPPPSINFTLPSPVLGMPSVPMFDPPWVPQCSGSVQDPINEDQSKSFSARAVSRSHQRAEHILKNLQQEEEKKRLGREASLITAIPITQEACYEPTCTPNSEPEEEVEEVTNLASRRLSVSPSCTSSTSHRNYSFRRGSVWSVRSAVSAEDEEHTTEHTPNHHVPQPPQAVFPACICAAVLPIVHLMEDGEVREDGVAVSAVAQQVLWNCLIEDPSTVLRHFLEKLTISNRQDELMYMLRKLLLNIGDFPAQTSHILFNYLVGLIMYFVRTPCEWGMDAISATLTFLWEVVGYVEGLFFKDLKQTMKKEQCEVKLLVTASMPGTKTLVVHGQNECDIPTQLPVHEDTQFEALLKECLEFFNIPESQSTHYFLMDKRWNLIHYNKTYVRDIYPFRRSVSPQLNLVHMHPEKGQELIQKQVFTRKLEEVGRVLFLISLTQKIPTAHKQSHVSMLQEDLLRLPSFPRSAIDAEFSLFSDPQAGKELFGLDTLQKSLWIQLLEEMFLGMPSEFPWGDEIMLFLNVFNGALILHPEDSALLRQYAATVINTAVHFNHLFSLSGYQWILPTMLQVYSDYESNPQLRQAIEFACHQFYILHRKPFVLQLFASVAPLLEFPDAANNGPSKGVSAQCLFDLLQSLEGETTDILDILELVKAEKPLKSLDFCYGNEDLTFSISEAIKLCVTVVAYAPESFRSLQMLMVLEALVPCYLQKLKRQTSQVETVPAAREEIAATAALATSLQALLYSVEVLTRPMTAPQMSRCDQGHKGTTTANHTMSSGVNTRYQEQGAKLHFIRENLHLLEEGQGIPREELDERIAREEFRRPRESLLNICTEFYKHCGPRLKILQNLAGEPRVIALELLDVKSHMRLAEIAHSLLKLAPYDTQTMESRGLRRYIMEMLPITDWTAEAVRPALILILKRLDRMFNKIHKMPTLR

SEQ ID NO: 8611 - protein, 641 aa, Homo sapiens
MAKAAAIGIDLGTTYSCVGVFQHGKVEIIANDQGNRTTPSYVAFTDTERLIGDAAKNQVALNPQNTVFDAKRLIGRKFGDPVVQSDMKHWPFQVINDGDKPKVQVSYKGETKAFYPEEISSMVLTKMKEIAEAYLGYPVTNAVITVPAYFNDSQRQATKDAGVIAGLNVLRIINEPTAAAIAYGLDRTGKGERNVLIFDLGGGTFDVSILTIDDGIFEVKATAGDTHLGGEDFDNRLVNHFVEEFKRKHKKDISQNKRAVRRLRTACERAKRTLSSSTQASLEIDSLFEGIDFYTSITRARFEELCSDLFRSTLEPVEKALRDAKLDKAQIHDLVLVGGSTRIPKVQKLLQDFFNGRDLNKSINPDEAVAYGAAVQAAILMGDKSENVQDLLLLDVAPLSLGLETAGGVMTALIKRNSTIPTKQTQIFTTYSDNQPGVLIQVYEGERAMTKDNNLLGRFELSGIPPAPRGVPQIEVTFDIDANGILNVTATDKSTGKASKITITNDKGRLSKEEIERMVQEAEKYKAEDEVQRERVSAKNALESYAFNMKSAVEDEGLKGKISEADKKKVLDKCQEVISWLDANTLAEKDEFEHKRKELEQVCNPIISGLYQGAGGPGPGGFGAQGPKGGSGSGPTIEEVD

SEQ ID NO: 8612 - protein, 641 aa, Homo sapiens
MAKAAAIGIDLGTTYSCVGVFQHGKVEIIANDQGNRTTPSYVAFTDTERLIGDAAKNQVALNPQNTVFDAKRLIGRKFGDPVVQSDMKHWPFQVINDGDKPKVQVSYKGETKAFYPEEISSMVLTKMKEIAEAYLGYPVTNAVITVPAYFNDSQRQATKDAGVIAGLNVLRIINEPTAAAIAYGLDRTGKGERNVLIFDLGGGTFDVSILTIDDGIFEVKATAGDTHLGGEDFDNRLVNHFVEEFKRKHKKDISQNKRAVRRLRTACERAKRTLSSSTQASLEIDSLFEGIDFYTSITRARFEELCSDLFRSTLEPVEKALRDAKLDKAQIHDLVLVGGSTRIPKVQKLLQDFFNGRDLNKSINPDEAVAYGAAVQAAILMGDKSENVQDLLLLDVAPLSLGLETAGGVMTALIKRNSTIPTKQTQIFTTYSDNQPGVLIQVYEGERAMTKDNNLLGRFELSGIPPAPRGVPQIEVTFDIDANGILNVTATDKSTGKANKITITNDKGRLSKEEIERMVQEAEKYKAEDEVQRERVSAKNALESYAFNMKSAVEDEGLKGKISEADKKKVLDKCQEVISWLDANTLAEKDEFEHKRKELEQVCNPIISGLYQGAGGPGPGGFGAQGPKGGSGSGPTIEEVD

SEQ ID NO: 8613 - protein, 1053 aa, Homo sapiens
MAEFTSYKETASSRHLRFKLQSLSRRLDELEEATKNLQKAEDELLDLQDKVIQAEGSNSSMLAEIEVLRQRVLRIEGKDEEIKRAEDLCRLMKEKLEEEENLTRELKSEIERLQKRMAELEKLEEAFSRSKNDCTQLCLSLNEERNLTKKISSELEMLRVKVKELESSEDRLDKTEQSLASELEKLKSLTLSFVSERKYLNEKEKENEKLIKELTQKLEQNKKMNRDYTRNASNLERNDLRIEDGISSTLPSKESRRKGGLDYLKQVENETRNKSENEKNRNQEDNKVKDLNQEIEKLKTQIKHFESLEEELKKMKSKNNDLQDNYLSEQNKNKLLASQLEEIKLQIKKQKELENGEVEGEDAFLSSKGRHERTKFRGHGSEASVSKHTARELSPQHKRERLRNREFALNNENYSLSNRQVSSPSFTNRRAAKASHMGVSTDSGTQETKKTEDRFVPSSSKSEGKKSREQPSVLSRYPPAAQEHSKAWKGTSKPGTESGLKGKVEKTTRTFSDTTHGSVPSDPLGRADKASDTSSETVFGKRGHVLGNGSQVTQAANSGCSKAIGALASSRRSSSEGLSKGKKAANGLEADNSCPNSKAPVLSKYPYSCRSQENILQGFSTSHKEGVNQPAAVVMEDSSPHEALRCRVIKSSGREKPDSDDDLDIASLVTAKLVNTTITPEPEPKPQPNSREKAKTRGAPRTSLFENDKDAGMENESVKSVRASTNTMELPDTNGAGVKSQRPFSPREALRSRAIIKPVIVDKDVKKIMGGSGTETTLEKQKPVSKPGPNKVTSSITIYPSDSSSPRAAPGEALRERHTSTSNIQVGLAELTSVSNHVSSPFELSIHKHDITLQLAEAERMADGPLKNRPETVVSRSSIIIKPSDPVERNSHAPPAETIRWKSHSAPSEVGFSDARHVTVRNAWKSRRDLKSLEDPPTRIGKNVESTNSNAYTQRSSTDFSELEQPRSCLFEQGTRRVGPSSGDAPEPSSRRTQSSLTVSEVLTRRNRVGDTITVAAWNHSASMVSSSLSPLSLFSLPFPSLPFPFSPLLWPV

SEQ ID NO: 8614 - protein, 354 aa, Homo sapiens
MMSYLKQPPYGMNGLGLAGPAMDLLHPSVGYPATPRKQRRERTTFTRSQLDVLEALFAKTRYPDIFMREEVALKINLPESRVQVWFKNRRAKCRQQQQSGSGTKSRPAKKKSSPVRESSGSESSGQFTPPAVSSSASSSSSASSSSANPAAAAAAGLGGNPVAAASSLSTPAASSIWSPASISPGSAPASVSVPEPLAAPSNTSCMQRSVAAGAATAAASYPMSYGQGGSYGQGYPTPSSSYFGGVDCSSYLAPMHSHHHPHQLSPMAPSSMAGHHHHHPHAHHPLSQSSGHHHHHHHHHHQGYGGSGLAFNSADCLDYKEPGAAAASSAWKLNFNSPDCLDYKDQASWRFQVL

SEQ ID NO: 8615 - protein, 686 aa, Homo sapiens
RPRRELSRQRRGARGLEGAEMEQEPQNGEPAEIKIIREAYKKAFLFVNKGLNTDELGQKEEAKNYYKQGIGHLLRGISISSKESEHTGPGWESARQMQQKMKETLQNVRTRLEILEKGLATSLQNDLQEVPKLYPEFPPKDMCEKLPEPQSFSSAPQHAEVNGNTSTPSAGAVAAPASLSLPSQSCPAEAPPAYTPQAAEGHYTVSYGTDSGEFSSVGEEFYRNHSQPPPLETLGLDADELILIPNGVQIFFVNPAGEVSAPSYPGYLRIVRFLDNSLDTVLNRPPGFLQVCDWLYPLVPDRSPVLKCTAGAYMFPDTMLQAAGCFVGVVLSSELPEDDRELFEDLLRQMSDLRLQANWNRAEEENEFQIPGRTRPSSDQLKEASGTDVKQLDQGNKDVRHKGKRGKRAKDTSSEEVNLSHIVPCEPVPEEKPKELPEWSEKVAHNILSGASWVSWGLVKGAEITGKAIQKGASKLRERIQPEEKPVEVSPAVTKGLYIAKQATGGAAKVSQFLVDGVCTVANCVGKELAPHVKKHGSKLVPESLKKDKDGKSPLDGAMVVAASSVQGFSTVWQGLECAAKCIVNNVSAETVQTVRYKYGYNAGEATHHAVDSAVNVGVTAYNINNIGIKAMVKKTATQTGHTLLEDYQIVDNSQRENQEGAANVNVRGEKDEQTKEVKEAKKKDK

SEQ ID NO: 8616 - protein, 666 aa, Homo sapiens
MEQEPQNGEPAEIKIIREAYKKAFLFVNKGLNTDELGQKEEAKNYYKQGIGHLLRGISISSKESEHTGPGWESARQMQQKMKETLQNVRTRLEILEKGLATSLQNDLQEVPKLYPEFPPKDMCEKLPEPQSFSSAPQHAEVNGNTSTPSAGAVAAPASLSLPSQSCPAEAPPAYTPQAAEGHYTVSYGTDSGEFSSVGEEFYRNHSQPPPLETLGLDADELILIPNGVQIFFVNPAGEVSAPSYPGYLRIVRFLDNSLDTVLNRPPGFLQVCDWLYPLVPDRSPVLKCTAGAYMFPDTMLQAAGCFVGVVLSSELPEDDRELFEDLLRQMSDLRLQANWNRAEEENEFQIPGRTRPSSDQLKEASGTDVKQLDQGNKDVRHKGKRGKRAKDTSSEEVNLSHIVPCEPVPEEKPKELPEWSEKVAHNILSGASWVSWGLVKGAEITGKAIQKGASKLRERIQPEEKPVEVSPAVTKGLYIAKQATGGAAKVSQFLVDGVCTVANCVGKELAPHVKKHGSKLVPESLKKDKDGKSPLDGAMVVAASSVQGFSTVWQGLECAAKCIVNNVSAETVQTVRYKYGYNAGEATHHAVDSAVNVGVTAYNINNIGIKAMVKKTATQTGHTLLEDYQIVDNSQRENQEGAANVNVRGEKDEQTKEVKEAKKKDK

SEQ ID NO: 8617 - protein, 93 aa, Homo sapiens
MVYLTSYLLPSLMSNTSLSAKDIKKILDRVGMEATDDWLNKVISELNGKNIEDIIAQGIGELASVPAGGAVALSASLGSAGPAAGSTPAAEER

SEQ ID NO: 8618 - protein, 115 aa, Homo sapiens
MVTVTLKDINLSWLDVDEGFPRDGGLDGRQVLVAHDGCILQVPSTTRLSMAKLNWLSVDSNHWKDWEDGSDEAMSDFDYFSEMMNHMGGEEDVDLADGADDHSQDSDDEKMPDLE

SEQ ID NO: 8619 - protein, 82 aa, Homo sapiens
MVDLLSMSQNISPYKNPMRFIFFSPILREEKFSSESCRNIGDISKSQPIGGSHQCVLEGTNIELLNSYSRNYGAVVKSWLGA

SEQ ID NO: 8620 - protein, 366 aa, Homo sapiens
MTVRNIASICNMGTNASALEKDIGPEQFPINEHYFGLVNFGNTCYCNSVLQALYFCRPFRENVLAYKAQQKKKENLLTCLADLFHSIATQKKKVGVIPPKKFISRLRKENDLFDNYMQQDAHEFLNYLLNTIADILQEEKKQEKQNGKLKNGNMNEPAENNKPELTWVHEIFQGTLTNETRCLNCETVSSKDEDFLDLSVDVEQNTSITHCLRDFSNTETLCSEQKYYCETCCSKQEAQKRMRVKKLPMILALHLKRFKYMEQLHRYTKLSYRVVFPLELRLFNTSSDAVNLDRMYDLVAVVVHCGSGPNRGHYITIVKSHGFWLLFDDDIVEKIDAQAIEEFYGLTSDISKNSESGYILFYQSRE

SEQ ID NO: 8621 - protein, 341 aa, Homo sapiens
MTGSNMSDALANAVCQRCQARFSPAERIVNSNGELYHEHCFVCAQCFRPFPEGLFYEFEGRKYCEHDFQMLFAPCCGSCGEFIIGRVIKAMNNNWHPGCFRCELCDVELADLGFVKNAGRHLCRPCHNREKAKGLGKYICQRCHLVIDEQPLMFRSDAYHPDHFNCTHCGKELTAEARELKGELYCLPCHDKMGVPICGACRRPIEGRVVNALGKQWHVEHFVCAKCEKPFLGHRHYEKKGLAYCETHYNQLFGDVCYNCSHVIEGDVVSALNKAWCVSCFSCSTCNSKLTLKNKFVEFDMKPVCKRCYEKFPLELKKRLKKLSELTSRKAQPKATDLNSA

SEQ ID NO: 8622 - protein, 206 aa, Homo sapiens
MTGSNMSDALANAVCQRCQARFSPAERIVNSNGELYHEHCFVCAQCFRPFPEGLFYEFEGRKYCEHDFQMLFAPCCGSCGEFIIGRVIKAKCEKPFLGHRHYEKKGLAYCETHYNQLFGDVCYNCSHVIEGDVVSALNKAWCVSCFSCSTCNSKLTLKNKFVEFDMKPVCKRCYEKFPLELKKRLKKLSELTSRKAQPKATDLNSA

SEQ ID NO: 8623 - protein, 36 aa, Homo sapiens
MSRINKYLFSNSDSNFSHFSVSNVSTYCVPGNKDTN

SEQ ID NO: 8624 - protein, 583 aa, Homo sapiens
MPKPINVRVTTMDAELEFAIQPNTTGKQLFDQVVKTVGLREVWFFGLQYVDSKGYSTWLKLNKKVTQQDVKKENPLQFKFRAKFFPEDVSEELIQEITQRLFFLQVKEAILNDEIYCPPETAVLLASYAVQAKYGDYNKEIHKPGYLANDRLLPQRVLEQHKLTKEQWEERIQNWHEEHRGMLREDSMMEYLKIAQDLEMYGVNYFEIKNKKGTELWLGVDALGLNIYEHDDKLTPKIGFPWSEIRNISFNDKKFVIKPIDKKAPDFVFYAPRLRINKRILALCMGNHELYMRRRKPDTIEVQQMKAQAREEKHQKQLERAQLENEKKKREIAEKEKERIEREKEELMERLKQIEEQTIKAQKELEEQTRKALELDQERKRAKEEAERLEKERRAAEEAKSAIAKQAADQMKNQEQLAAELAEFTAKIALLEEAKKKKEEEATEWQHKAFAAQEDLEKTKEELKTVMSAPPPPPPPPVIPPTENEHDEHDENNAEASAELSNEGVMNHRSEEERVTETQKNERVKKQLQALSSELAQARDETKKTQNDVLHAENVKAGRDKYKTLRQIRQGNTKQRIDEFEAM

SEQ ID NO: 8625 - protein, 586 aa, Homo sapiens
MPKPINVRVTTMDAELEFAIQPNTTGKQLFDQVVKTIGLREVWYFGLHYVDNKGFPTWLKLDKKVSAQEVRKENPLQFKFRAKFYPEDVAEELIQDITQKLFFLQVKEGILSDEIYCPPETAVLLGSYAVQAKFGDYNKEVHKSGYLSSERLIPQRVMDQHKLTRDQWEDRIQVWHAEHRGMLKDNAMLEYLKIAQDLEMYGINYFEIKNKKGTDLWLGVDALGLNIYEKDDKLTPKIGFPWSEIRNISFNDKKFVIKPIDKKAPDFVFYAPRLRINKRILQLCMGNHELYMRRRKPDTIEVQQMKAQAREEKHQKQLERQQLETEKKRRETVEREKEQMMREKEELMLRLQDYEEKTKKAERELSEQIQRALQLEEERKRAQEEAERLEADRMAALRAKEELERQAVDQIKSQEQLAAELAEYTAKIALLEEARRRKEDEVEEWQHRAKEAQDDLVKTKEELHLVMTAPPPPPPPVYEPVSYHVQESLQDEGAEPTGYSAELSSEGIRDDRNEEKRITEAEKNERVQRQLLTLSSELSQARDENKRTHNDIIHNENMRQGRDKYKTLRQIRQGNTKQRIDEFEAL

SEQ ID NO: 8626 - protein, 161 aa, Homo sapiens
MNQFGPSALINLSNFSSIKPEPASTPPQGSMANSTAVVKIPGTPGAGGRLSPENNQVLTKKKLQDLVREVDPNEQLDEDVEEMLLQIADDFIESVVTAACQLARHRKSSTLEVKDVQLHLERQWNMWIPGFGSEEIRPYKKACTTEAHKQRMALIRKTTKK

SEQ ID NO: 8627 - protein, 755 aa, Homo sapiens
MLDCSDYVLDSRMNNPSETSKPSMESGDGNTGTQTNGLDFQKQPVPVGGAISTAQAQAFLGHLHQVQLAGTSLQAAAQSLNVQSKSNEESGDSQQPSQPSQQPSVQAAIPQTQLMLAGGQITGLTLTPAQQQLLLQQAQAQAQLLAAAVQQHSASQQHSAAGATISASAATPMTQIPLSQPIQIAQDLQQLQQLQQQNLNLQQFVLVHPTTNLQPAQFIISQTPQGQQGLLQAQNLLTQLPQQSQANLLQSQPSITLTSQPATPTRTIAATPIQTLPQSQSTPKRIDTPSLEEPSDLEELEQFAKTFKQRRIKLGFTQGDVGLAMGKLYGNDFSQTTISRFEALNLSFKNMCKLKPLLEKWLNDAENLSSDSSLSSPSALNSPGIEGLSRRRKKRTSIETNIRVALEKSFLENQKPTSEEITMIADQLNMEKEVIRVWFCNRRQKEKRINPPSSGGTSSSPIKAIFPSPTSLVATTPSLVTSSAATTLTVSPVLPLTSAAVTNLSVTGTSDTTSNNTATVISTAPPASSAVTSPSLSPSPSASASTSEASSASETSTTQTTSTPLSSPLGTSQVMVTASGLQTAAAAALQGAAQLPANASLAAMAAAAGLNPSLMAPSQFAAGGALLSLNPGTLSGALSPALMSNSTLATIQALASGGSLPITSLDATGNLVFANAGGAPNIVTAPLFLNPQNLSLLTSNPVSLVSAAAASAGNSAPVASLHATSTSAESIQNSLFTVASASGAASTTTTASKAQ

SEQ ID NO: 8628 - protein, 743 aa, Homo sapiens
MNNPSETSKPSMESGDGNTGTQTNGLDFQKQPVPVGGAISTAQAQAFLGHLHQVQLAGTSLQAAAQSLNVQSKSNEESGDSQQPSQPSQQPSVQAAIPQTQLMLAGGQITGLTLTPAQQQLLLQQAQAQAQLLAAAVQQHSASQQHSAAGATISASAATPMTQIPLSQPIQIAQDLQQLQQLQQQNLNLQQFVLVHPTTNLQPAQFIISQTPQGQQGLLQAQNLLTQLPQQSQANLLQSQPSITLTSQPATPTRTIAATPIQTLPQSQSTPKRIDTPSLEEPSDLEELEQFAKTFKQRRIKLGFTQGDVGLAMGKLYGNDFSQTTISRFEALNLSFKNMCKLKPLLEKWLNDAENLSSDSSLSSPSALNSPGIEGLSRRRKKRTSIETNIRVALEKSFLENQKPTSEEITMIADQLNMEKEVIRVWFCNRRQKEKRINPPSSGGTSSSPIKAIFPSPTSLVATTPSLVTSSAATTLTVSPVLPLTSAAVTNLSVTGTSDTTSNNTATVISTAPPASSAVTSPSLSPSPSASASTSEASSASETSTTQTTSTPLSSPLGTSQVMVTASGLQTAAAAALQGAAQLPANASLAAMAAAAGLNPSLMAPSQFAAGGALLSLNPGTLSGALSPALMSNSTLATIQALASGGSLPITSLDATGNLVFANAGGAPNIVTAPLFLNPQNLSLLTSNPVSLVSAAAASAGNSAPVASLHATSTSAESIQNSLFTVASASGAASTTTTASKAQ

SEQ ID NO: 8629 - protein, 740 aa, Homo sapiens
MMQESATETISNSSMNQNGMSTLSSQLDAGSRDGRSSGDTSSEVSTVELLHLQQQQALQAARQLLLQQQTSGLKSPKSSDKQRPLQELLPETKLCICGHSSGDGHPHNTFAVPVSVAMMTPQVITPQQMQQILQQQVLSPQQLQALLQQQQAVMLQQQQLQEFYKKQQEQLHLQLLQQQQQQQQQQQQQQQQQQQQQQQQQQQQQQQQQQQQQQQQHPGKQAKEQQQQQQQQQQLAAQQLVFQQQLLQMQQLQQQQHLLSLQRQGLISIPPGQAALPVQSLPQAGLSPAEIQQLWKEVTGVHSMEDNGIKHGGLDLTTNNSSSTTSSNTSKASPPITHHSIVNGQSSVLSARRDSSSHEETGASHTLYGHGVCKWPGCESICEDFGQFLKHLNNEHALDDRSTAQCRVQMQVVQQLEIQLSKERERLQAMMTHLHMRPSEPKPSPKPVNLVSSVTMSKNMLETSPQSLPQTPTTPTAPVTPITQGPSVITPASVPNVGAIRRRHSDKYNIPMSSEIAPNYEFYKNADVRPPFTYATLIRQAIMESSDRQLTLNEIYSWFTRTFAYFRRNAATWKNAVRHNLSLHKCFVRVENVKGAVWTVDEVEYQKRRSQKITGSPTLVKNIPTSLGYGAALNASLQAALAESSLPLLSNPGLINNASSGLLQAVHEDLNGSLDHIDSNGNSSPGCSPQPHIHSIHVKEEPVIAEDEDCPMSLVTTANHSPELEDDREIEEEPLSEDLE

SEQ ID NO: 8630 - protein, 168 aa, Homo sapiens
MMQESATETISNSSMNQNGMSTLSSQLDAGSRDGRSSGDTSSEVSTVELLHLQQQQALQAARQLLLQQQTSGLKSPKSSDKQRPLQELLPETKLCICGHSSGDGHPHNTFAVPVSVAMMTPQVITPQQMQQILQQQVLSPQQLQALLQQQQAVMLQQVMWVTCFGVLA

SEQ ID NO: 8631 - protein, 740 aa, Homo sapiens
MMQESATETISNSSMNQNGMSTLSSQLDAGSRDGRSSGDTSSEVSTVELLHLQQQQALQAARQLLLQQQTSGLKSPKSSDKQRPLQELLPETKLCICGHSSGDGHPHNTFAVPVSVAMMTPQVITPQQMQQILQQQVLSPQQLQALLQQQQAVMLQQQQLQEFYKKQQEQLHLQLLQQQQQQQQQQQQQQQQQQQQQQQQQQQQQQQQQQQQQQQQHPGKQAKEQQQQQQQQQQLAAQQLVFQQQLLQMQQLQQQQHLLSLQRQGLISIPPGQAALPVQSLPQAGLSPAEIQQLWKEVTGVHSMEDNGIKHGGLDLTTNNSSSTTSSNTSKASPPITHHSIVNGQSSVLSARRDSSSHEETGASHTLYGHGVCKWPGCESICEDFGQFLKHLNNEHALDDRSTAQCRVQMQVVQQLEIQLSKERERLQAMMTHLHMRPSEPKPSPKPLNLVSSVTMSKNMLETSPQSLPQTPTTPTAPVTPITQGPSVITPASVPNVGAIRRRHSDKYNIPMSSEIAPNYEFYKNADVRPPFTYATLIRQAIMESSDRQLTLNEIYSWFTRTFAYFRRNAATWKNAVRHNLSLHKCFVRVENVKGAVWTVDEVEYQKRRSQKITGSPTLVKNIPTSLGYGAALNASLQAALAESSLPLLSNPGLINNASSGLLQAVHEDLNGSLDHIDSNGNSSPGCSPQPHIHSIHVKEEPVIAEDEDCPMSLVTTANHSPELEDDREIEEEPLSEDLE

SEQ ID NO: 8632 - protein, 715 aa, Homo sapiens
MMQESATETISNSSMNQNGMSTLSSQLDAGSRDGRSSGDTSSEVSTVELLHLQQQQALQAARQLLLQQQTSGLKSPKSSDKQRPLQVPVSVAMMTPQVITPQQMQQILQQQVLSPQQLQALLQQQQAVMLQQQQLQEFYKKQQEQLHLQLLQQQQQQQQQQQQQQQQQQQQQQQQQQQQQQQQQQQQQQQQHPGKQAKEQQQQQQQQQQLAAQQLVFQQQLLQMQQLQQQQHLLSLQRQGLISIPPGQAALPVQSLPQAGLSPAEIQQLWKEVTGVHSMEDNGIKHGGLDLTTNNSSSTTSSNTSKASPPITHHSIVNGQSSVLSARRDSSSHEETGASHTLYGHGVCKWPGCESICEDFGQFLKHLNNEHALDDRSTAQCRVQMQVVQQLEIQLSKERERLQAMMTHLHMRPSEPKPSPKPLNLVSSVTMSKNMLETSPQSLPQTPTTPTAPVTPITQGPSVITPASVPNVGAIRRRHSDKYNIPMSSEIAPNYEFYKNADVRPPFTYATLIRQAIMESSDRQLTLNEIYSWFTRTFAYFRRNAATWKNAVRHNLSLHKCFVRVENVKGAVWTVDEVEYQKRRSQKITGSPTLVKNIPTSLGYGAALNASLQAALAESSLPLLSNPGLINNASSGLLQAVHEDLNGSLDHIDSNGNSSPGCSPQPHIHSIHVKEEPVIAEDEDCPMSLVTTANHSPELEDDREIEEEPLSEDLE

SEQ ID NO: 8633 - protein, 67 aa, Homo sapiens
MMQESATETISNSSMNQNGMSTLSSQLDAGSRDGRSSGDTSSEVSTVELLHLQQQQEDVVSYTQVIC

SEQ ID NO: 8634 - protein, 286 aa, Homo sapiens
MMATPNQTACNAESPVALEEAKTSGAPGSPQTPPERHDSGGSLPLTPRMESHSEDEDLAGAVGGLGWNSRSPRTQSPGGCSAEAVLARKKHRRRPSKRKRHWRPYLELSWAEKQQRDERQSQRASRVREEMFAKGQPVAPYNTTQFLMNDRDPEEPNLDVPHGISHPGSSGESEAGDSDGRGRAHGEFQRKDFSETYERFHTESLQGRSKQELVRDYLELEKRLSQAEEETRRLQQLQACTGQQSCRQVEELAAEVQRLRTENQRLRQENQMWNREGCRCDEEPGT

SEQ ID NO: 8635 - protein, 419 aa, Homo sapiens
MNNQKQQKPTLSGQRFKTRKRDEKERFDPTQFQDCIIQGLTETGTDLEAVAKFLDASGAKLDYRRYAETLFDILVAGGMLAPGGTLADDMMRTDVCVFAAQEDLETMQAFAQVFNKLIRRYKYLEKGFEDEVKKLLLFLKGFSESERNKLAMLTGVLLANGTLNASILNSLYNENLVKEGVSAAFAVKLFKSWINEKDINAVAASLRKVSMDNRLMELFPANKQSVEHFTKYFTEAGLKELSEYVRNQQTIGARKELQKELQEQMSRGDPFKDIILYVKEEMKKNNIPEPVVIGIVWSSVMSTVEWNKKEELVAEQAIKHLKQYSPLLAAFTTQGQSELTLLLKIQEYCYDNIHFMKAFQKIVVLFYKAEVLSEEPILKWYKDAHVAKGKSVFLEQMKKFVEWLKNAEEESESEAEEGD

SEQ ID NO: 8636 - protein, 356 aa, Homo sapiens
MNNQKQQKPTLSGQRFKTRKRDEKERFDPTQFQDCIIQGLTETGTDLEAVAKFLDASGAKLDYRRYAETLFDILVAGGMLAPGGTLADDMMRTDVCVFAAQEDLETMQAFAQVFNKLIRRYKYLEKGFEDEVKKLLLFLKGFSESERNKLAMLTGVLLANGTLNASILNSLYNENLVKEGVSAAFAVKLFKSWINEKDINAVAASLRKVSMDNRLMELFPANKQSVEHFTKYFTEAGLKELSEYVRNQQTIGARKELQKELQEQMSRGDPFKDSELTLLLKIQEYCYDNIHFMKAFQKIVVLFYKAEVLSEEPILKWYKDAHVAKGKSVFLEQMKKFVEWLKNAEEESESEAEEGD

SEQ ID NO: 8637 - protein, 234 aa, Homo sapiens
MLTGVLLANGTLNASILNSLYNENLVKEGVSAAFAVKLFKSWINEKDINAVAASLRKVSMDNRLMELFPANKQSVEHFTKYFTEAGLKELSEYVRNQQTIGARKELQKELQEQMSRGDPFKDIILYVKEEMKKNNIPEPVVIGIVWSSVMSTVEWNKKEELVAEQAIKHLKQYSPLLAAFTTQAEVLSEEPILKWYKDAHVAKGKSVFLEQMKKFVEWLKNAEEESESEAEEGD

SEQ ID NO: 8638 - protein, 488 aa, Homo sapiens
MENLTKHSIECSSFRGDWECKNQFERKQGSQEGHFSEMIFTPEDMPTFSIQHQRIHTDEKLLECKECGKDFSFVSVLVRHQRIHTGEKPYECKECGKAFGSGANLAYHQRIHTGEKPFECKECGKAFGSGSNLTHHQRIHTGEKPYECKECGKAFSFGSGLIRHQIIHSGEKPYECKECGKSFSFESALIRHHRIHTGEKPYECIDCGKAFGSGSNLTQHRRIHTGEKPYECKACGMAFSSGSALTRHQRIHTGEKPYICNECGKAFSFGSALTRHQRIHTGEKPYVCKECGKAFNSGSDLTQHQRIHTGEKPYECKECEKAFRSGSKLIQHQRMHTGEKPYECKECGKTFSSGSDLTQHHRIHTGEKPYECKECGKAFGSGSKLIQHQLIHTGERPYECKECGKSFSSGSALNRHQRIHTGEKPYECKECGKAFYSGSSLTQHQRIHTGEKLYECKNCGKAYGRDSEFQQHKKSHNGKKLCELETIN

SEQ ID NO: 8639 - protein, 194 aa, Homo sapiens
MENFTALFGAQADPPPPPTALGFGPGKPPPPPPPPAGGGPGTAPPPTAATAPPGADKSGAGCGPFYLMRELPGSTELTGSTNLITHYNLEQAYNKFCGKKVKEKLSNFLPDLPGMIDLPGSHDNSSLRSLIEKPPILSSSFNPITGTMLAGFRLHTGPLPEQCRLMHIQPPKKKNKHKHKQSRTQDPVPPGKPS

SEQ ID NO: 8640 - protein, 261 aa, Homo sapiens
MENFSLLSISGPPISSSALSAFPDIMFSRATSLPDIAKTAVPTEASSPAQALPPQYQSIIVRQGIQNTVLSPDCSLGDTQHGEKLRRNCTIYRPWFSPYSYFVCADKESQLEAYDFPEVQQDEGKWDNCLSEDMAENICSSSSSPENTCPREATKKSRHGLDSITSQDILMASRWHPAQQNGYKCVACCRMYPTLDFLKSHIKRGFREGFSCKVYYHKLKALWSKEQKARLGDRLSSGSCQAFNSPAEHLRQIGGEAYLCL

SEQ ID NO: 8641 - protein, 471 aa, Homo sapiens
MDSSCHNATTKMLATAPARGNMMSTSKPLAFSIERIMARTPEPKALPVPHFLQGALPKGEPKHSLHLNSSIPCMIPFVPVAYDTSPKAGVTGSEPRKASLEAPAAPAAVPSAPAFSCSDLLNCALSLKGDLARDALPLQQYKLVRPRVVNHSSFHAMGALCYLNRGDGPCHPAAGVNIHPVASYFLSSPLHPQPKTYLAERNKLVVPAVEKYPSGVAFKDLSQAQLQHYMKESAQLLSEKIAFKTSDFSRGSPNAKPKVFTCEVFNAHYNLTRHMPVHTGARPFVCKVCGKGFRQASTLCRHKIIHTQEKPHKCNQCGKAFNRSSTLNTHTRIHAGYKPFVCEFCGKGFHQKGNYKNHKLTHSGEKQFKCNICNKAFHQVYNLTFHMHTHNDKKPFTCPTCGKGFCRNFDLKKHVRKLHDSSLGLARTPAGEPGTEPPPPLPQQPPMTLPPLQPPLPTPGPLQPGLHQGHQ

SEQ ID NO: 8642 - protein, 61 aa, Homo sapiens
MDPNCSCSTSSSCTCTTSSKSRECKCTSCKTSCCSCCPVGCAKCAQGCVCKGTSDKCSCCS

SEQ ID NO: 8643 - protein, 61 aa, Homo sapiens
MDPNCSCSTIGSCACAGSCKCKECKCTSCKKSCCSCCPVGCAKCAQGCICKGTSDKCSCCA

SEQ ID NO: 8644 - protein, 61 aa, Homo sapiens
MDPNCSCAAGVSCTCASSCKCKECKCTSCKKSCCSCCPVGCAKCAQGCICKGASEKCSCCA

SEQ ID NO: 8645 - protein, 494 aa, Homo sapiens
MDLSNNTMSLSVRTPGLSRRLSSQSVIGRPRGMSASSVGSGYGGSAFGFGASCGGGFSAASMFGSSSGFGGGSGSSMAGGLGAGYGRALGGGSFGGLGMGFGGSPGGGSLGILSGNDGGLLSGSEKETMQNLNDRLASYLDKVRALEEANTELENKIREWYETRGTGTADASQSDYSKYYPLIEDLRNKIISASIGNAQLLLQIDNARLAAEDFRMKYENELALRQGVEADINGLRRVLDELTLTRTDLEMQIESLNEELAYMKKNHEDELQSFRVGGPGEVSVEMDAAPGVDLTRLLNDMRAQYETIAEQNRKDAEAWFIEKSGELRKEISTNTEQLQSSKSEVTDLRRAFQNLEIELQSQLAMKKSLEDSLAEAEGDYCAQLSQVQQLISNLEAQLLQVRADAERQNVDHQRLLNVKARLELEIETYRRLLDGEAQGDGLEESLFVTDSKSQAQSTDSSKDPTKTRKIKTVVQEMVNGEVVSSQVQEIEELM

SEQ ID NO: 8646 - protein, 374 aa, Homo sapiens
MDDLCEANGTFAISLFKILGEEDNSRNVFFSPMSISSALAMVFMGAKGSTAAQMSQALCLYKDGDIHRGFQSLLSEVNRTGTQYLLRTANRLFGEKTCDFLPDFKEYCQKFYQAELEELSFAEDTEECRKHINDWVAEKTEGKISEVLDAGTVDPLTKLVLVNAIYFKGKWNEQFDRKYTRGMLFKTNEEKKTVQMMFKEAKFKMGYADEVHTQVLELPYVEEELSMVILLPDDNTDLAVVEKALTYEKFKAWTNSEKLTKSKVQVFLPRLKLEESYDLEPFLRRLGMIDAFDEAKADFSGMSTEKNVPLSKVAHKCFVEVNEEGTEAAAATAVVRNSRCSRMEPRFCADHPFLFFIRRHKTNCILFCGRFSSP

SEQ ID NO: 8647 - protein, 365 aa, Homo sapiens
MDDLCEANGTFAISLFKILGEEDNSRNVFFSPMSISSALAMVFMGAKGSTAAQMSQALCLYKDGDIHRGFQSLLSEVNRTGTQYLLRTANRLFGEKTCDFLPDFKEYCQKFYQAELEELSFAEDTEECRKHINDWVAEKTEGKISEVLDAGTVDPLTKLVLVNAIYFKGKWNEQFDRKYTRGMLFKTNEKAKAIKPILQQGNFPEFGPYIFSNQILQPKGLNIYLNFDKEFLVEKALTYEKFKAWTNSEKLTKSKVQVFLPRLKLEESYDLEPFLRRLGMIDAFDEAKADFSGMSTEKNVPLSKVAHKCFVEVNEEGTEAAAATAVVRNSRCSRMEPRFCADHPFLFFIRHHKTNCILFCGRFSS

SEQ ID NO: 8648 - protein, 374 aa, Homo sapiens
MDDLCEANGTFAISLFKILGEEDNSRNVFFSPMSISSALAMVFMGAKGSTAAQMSQALCLYKDGDIHRGFQSLLSEVNRTGTQYLLRTANRLFGEKTCDFLPDFKEYCQKFYQAELEELSFAEDTEECRKHINDWVAEKTEGKISEVLDAGTVDPLTKLVLVNAIYFKGKWNEQFDRKYTRGMLFKTNEEKKTVQMMFKEAKFKMGYADEVHTQVLELPYVEEELSMVILLPDDNTDLAVVEKALTYEKFKAWTNSEKLTKSKVQVFLPRLKLEESYDLEPFLRRLGMIDAFDEAKADFSGMSAEKNVPLSKVAHKCFVEVNEEGTEAAAATAVVRNSRCSRMEPRFCADHPFLFFIRHHKTNCILFCGRFSSP

SEQ ID NO: 8649 - protein, 375 aa, Homo sapiens
MDDDIAALVVDNGSGMCKAGFAGDDAPRAVFPSIVGRPRHQGVMVGMGQKDSYVGDEAQSKRGILTLKYPIEHGIVTNWDDMEKIWHHTFYNELRVAPEEHPVLLTEAPLNPKANREKMTQIMFETFNTPAMYVAIQAVLSLYASGRTTGIVMDSGDGVTHTVPIYEGYALPHAILRLDLAGRDLTDYLMKILTERGYSFTTTAEREIVRDIKEKLCYVALDFEQEMATAASSSSLEKSYELPDGQVITIGNERFRCPEALFQPSFLGMESCGIHETTFNSIMKCDVDIRKDLYANTVLSGGTTMYPGIADRMQKEITALAPSTMKIKIIAPPERKYSVWIGGSILASLSTFQQMWISKQEYDESGPSIVHRKCF

SEQ ID NO: 8650 - protein, 217 aa, Homo sapiens
MAYPGYGGGFGNFSIQVPGMQMGQPVPETGPAILLDGYSGPAYSDTYSSAGDSVYTYFSAVAGQDGEVDAEELQRCLTQSGINGTYSPFSLETCRIMIAMLDRDHTGKMGFNAFKELWAALNAWKENFMTVDQDGSGTVEHHELRQAIGLMGYRLSPQTLTTIVKRYSKNGRIFFDDYVACCVKLRALTDFFRKRDHLQQGSANFIYDDFLQGTMAI

SEQ ID NO: 8651 - protein, 293 aa, Homo sapiens
MASNVTNKMDPHSMNSRVFIGNLNTLVVKKSDVEAIFSKYGKIAGCSVHKGFAFVQYDKEKNARAAVAGEDGRMIASQVVDINLAAEPKVNRGNAGVKRSAAEMYGSSFDLDYGFQRDYYDGMYSFPARVPPPPPIALAVVPSKRQRLSGNTSRRGKSGFNSKSGKRGSSKSGKLKGDDLQAIKQELTQIKQKVDSLLENLEKIEKEQSKQEVEVKNAKSEEEQSSSSMKKDETHVKMESEGGAEDSAEEGDPLDDDVNEDQGDDQLELIKDDEKEAEEGEDDRDSTNGQDDS

SEQ ID NO: 8652 - protein, 348 aa, Homo sapiens
MAHSQNSLELPININATQITTAYGHRALPKLKEELQSEDLQTRQKALMALCDLMHDPECIYKAMNIGCMENLKALLKDSNSMVRIKTTEVLHITASHSVGRYAFLEHDIVLALSFLLNDPSPVCRGNLYKAYMQLVQVPRGAQEIISKGLISSLVWKLQVEVEEEEFQEFILDTLVLCLQEDATEALGSNVVLVLKQKLLSANQNIRSKAARALLNVSISREGKKQVCHFDVIPILVHLLKDPVEHVKSNAAGALMFATVITEGKYAALEAQAIGLLLELLHSPMTIARLNATKALTMLAEAPEGRKALQTHVPTFRAMEVETYEKPQVAEALQRAARIAISVIEFKP

SEQ ID NO: 8653 - protein, 1074 aa, Homo sapiens
MKGTCVIAWLFSSLGLWRLAHPEAQGTTQCQRTEHPVISYKEIGPWLREFRAKNAADFSQLTFDPGQKELVVGARNYLFRLQLEDLSLIQAVEWECDEATKKACYSKGKSKEECQNYIRVLLVGGDRLFTCGTNAFTPVCTNRSLSNLAEIHDQISGMARCPYSPQHNSTALLTAGGELYAATAMDFPGRDPAIYRSLGILPPLRTAQYNSKWLNEPNFVSSYDIGNFTYFFFRENAVEHDCGKTVFSRAARVCKNDIGGRFLLEDTWTTFMKARLNCSRPGEVPFYYNELQSTFFLPELDLIYGIFTTNVNSIAASAVCVFNLSAIAQAFSGPFKYQENSRSAWLPYPNPNPHFQCGTVDQGLYVNLTERNLQDAQKFILVHEVVQPVTTVPSFMEDNSRFSHVAVDVVQGREALVHIIYLATDYGTIKKVRVPLNQTSSSCLLEEIELFPERRREPIRSLQILHSQSVLFVGLREHVVKIPLKRCQFYRTRSTCIGAQDPYCGWDVVMKKCTSLEESLSMTQWEQSISACPTRNLTVDGHFGVWSPWTPCTHTDGSAVGSCLCRTRSCDSPAPQCGGWQCEGPGMEIANCSRNGGWTPWTSWSPCSTTCGIGFQVRQRSCSNPTPRHGGRVCVGQNREERYCNEHLLCPPHMFWTGWGPWERCTAQCGGGIQARRRICENGPDCAGCNVEYQSCNTNPCPELKKTTPWTPWTPVNISDNGDHYEQRFRYTCKARLADPNLLEVGRQRIEMRYCSSDGTSGCSTDGLSGDFLRAGRYSAHTVNGAWSAWTSWSQCSRDCSRGIRNRKRVCNNPEPKYGGMPCLGPSLEYQECNTLPCPVDGVWSCWSPWTKCSATCGGGHYMRTRSCSNPAPAYGGDICLGLHTEEALCNTQPCPESWSEWSDWSECEASGVQVRARQCILLFPMGSQCSGNTTESRPCVFDSNFIPEVSVARSSSVEEKRCGEFNMFHMIAVGLSSSILGCLLTLLVYTYCQRYQQQSHDATVIHPVSPAPLNTSITNHINKLDKYDSVEAIKAFNKNNLILEERNKYFNPHLTGKTYSNAYFTDLNNYDEY

SEQ ID NO: 8654 - protein, 1158 aa, Homo sapiens
VVDTPPTLPRHSSHLRVARSPLHPGGTLWPGRVGRHSLYFNVTVFGKELHLRLRPNRRLVVPGSSVEWQEDFRELFRQPLRQECVYTGGVTGMPGAAVAISNCDGLAGLIRTDSTDFFIEPLERGQQEKEASGRTHVVYRREAVQQEWAEPDGDLHNEAFGLGDLPNLLGLVGDQLGDTERKRRHAKPGSYSIEVLLVVDDSVVRFHGKEHVQNYVLTLMNIVDEIYHDESLGVHINIALVRLIMVGYRQSLSLIERGNPSRSLEQVCRWAHSQQRQDPSHAEHHDHVVFLTRQDFGPSGMQGYAPVTGMCHPLRSCALNHEDGFSSAFVIAHETGHVLGMEHDGQGNGCADETSLGSVMAPLVQAAFHRFHWSRCSKLELSRYLPSYDCLLDDPFDPAWPQPPELPGINYSMDEQCRFDFGSGYQTCLAFRTFEPCKQLWCSHPDNPYFCKTKKGPPLDGTECAPGKWCFKGHCIWKSPEQTYGQDGGWSSWTKFGSCSRSCGGGVRSRSRSCNNPSPAYGGRPCLGPMFEYQVCNSEECPGTYEDFRAQQCAKRNSYYVHQNAKHSWVPYEPDDDAQKCELICQSADTGDVVFMNQVVHDGTRCSYRDPYSVCARGECVPVGCDKEVGSMKADDKCGVCGGDNSHCRTVKGTLGKASKQAGALKLVQIPAGARHIQIEALEKSPHRIVVKNQVTGSFILNPKGKEATSRTFTAMGLEWEDAVEDAKESLKTSGPLPEAIAILALPPTEGGPRSSLAYKYVIHEDLLPLIGSNNVLLEEMDTYEWALKSWAPCSKACGGGIQFTKYGCRRRRDHHMVQRHLCDHKKRPKPIRRRCNQHPCSQPVWVTEEWGACSRSCGKLGVQTRGIQCLLPLSNGTHKVMPAKACAGDRPEARRPCLRVPCPAQWRLGAWSQCSATCGEGIQQRQVVCRTNANSLGHCEGDRPDTVQVCSLPACGGNHQNSTVRADVWELGTPEGQWVPQSEPLHPINKISSTEPCTGDRSVFCQMEVLDRYCSIPGYHRLCCVSCIKKASGPNPGPDPGPTSLPPFSTPGSPLPGPQDPADAAEPPGKPTGSEDHQHGRATQLPGALDTSSPGTQHPFAPETPIPGASWSISPTTPGGLPWGWTQTPTPVPEDKGQPGEDLRHPGTSLPAASPVT

SEQ ID NO: 8655 - protein, 1223 aa, Homo sapiens
MAPLRALLSYLLPLHCALCAAAGSRTPELHLSGKLSDYGVTVPCSTDFRGRFLSHVVSGPAAASAGSMVVDTPPTLPRHSSHLRVARSPLHPGGTLWPGRVGRHSLYFNVTVFGKELHLRLRPNRRLVVPGSSVEWQEDFRELFRQPLRQECVYTGGVTGMPGAAVAISNCDGLAGLIRTDSTDFFIEPLERGQQEKEASGRTHVVYRREAVQQEWAEPDGDLHNEAFGLGDLPNLLGLVGDQLGDTERKRRHAKPGSYSIEVLLVVDDSVVRFHGKEHVQNYVLTLMNIVDEIYHDESLGVHINIALVRLIMVGYRQSLSLIERGNPSRSLEQVCRWAHSQQRQDPSHAEHHDHVVFLTRQDFGPSGYAPVTGMCHPLRSCALNHEDGFSSAFVIAHETGHVLGMEHDGQGNGCADETSLGSVMAPLVQAAFHRFHWSRCSKLELSRYLPSYDCLLDDPFDPAWPQPPELPGINYSMDEQCRFDFGSGYQTCLAFRTFEPCKQLWCSHPDNPYFCKTKKGPPLDGTECAPGKWCFKGHCIWKSPEQTYGQDGGWSSWTKFGSCSRSCGGGVRSRSRSCNNPSPAYGGRPCLGPMFEYQVCNSEECPGTYEDFRAQQCAKRNSYYVHQNAKHSWVPYEPDDDAQKCELICQSADTGDVVFMNQVVHDGTRCSYRDPYSVCARGECVPVGCDKEVGSMKADDKCGVCGGDNSHCRTVKGTLGKASKQAGALKLVQIPAGARHIQIEALEKSPHRIVVKNQVTGSFILNPKGKEATSRTFTAMGLEWEDAVEDAKESLKTSGPLPEAIAILALPPTEGGPRSSLAYKYVIHEDLLPLIGSNNVLLEEMDTYEWALKSWAPCSKACGGGIQFTKYGCRRRRDHHMVQRHLCDHKKRPKPIRRRCNQHPCSQPVWVTEEWGACSRSCGKLGVQTRGIQCLLPLSNGTHKVMPAKACAGDRPEARRPCLRVPCPAQWRLGAWSQCSATCGEGIQQRQVVCRTNANSLGHCEGDRPDTVQVCSLPACGGNHQNSTVRADVWELGTPEGQWVPQSEPLHPINKISSTEPCTGDRSVFCQMEVLDRYCSIPGYHRLCCVSCIKKASGPNPGPDPGPTSLPPFSTPGSPLPGPQDPADAAEPPGKPTGSEDHQHGRATQLPGALDTSSPGTQHPFAPETPIPGASWSISPTTPGGLPWGWTQTPTPVPEDKGQPGEDLRHPGTSLPAASPVT

SEQ ID NO: 8656 - protein, 1155 aa, Homo sapiens
VVDTPPTLPRHSSHLRVARSPLHPGGTLWPGRVGRHSLYFNVTVFGKELHLRLRPNRRLVVPGSSVEWQEDFRELFRQPLRQECVYTGGVTGMPGAAVAISNCDGLAGLIRTDSTDFFIEPLERGQQEKEASGRTHVVYRREAVQQEWAEPDGDLHNEAFGLGDLPNLLGLVGDQLGDTERKRRHAKPGSYSIEVLLVVDDSVVRFHGKEHVQNYVLTLMNIVDEIYHDESLGVHINIALVRLIMVGYRQSLSLIERGNPSRSLEQVCRWAHSQQRQDPSHAEHHDHVVFLTRQDFGPSGYAPVTGMCHPLRSCALNHEDGFSSAFVIAHETGHVLGMEHDGQGNGCADETSLGSVMAPLVQAAFHRFHWSRCSKLELSRYLPSYDCLLDDPFDPAWPQPPELPGINYSMDEQCRFDFGSGYQTCLAFRTFEPCKQLWCSHPDNPYFCKTKKGPPLDGTECAPGKWCFKGHCIWKSPEQTYGQDGGWSSWTKFGSCSRSCGGGVRSRSRSCNNPSPAYGGRPCLGPMFEYQVCNSEECPGTYEDFRAQQCAKRNSYYVHQNAKHSWVPYEPDDDAQKCELICQSADTGDVVFMNQVVHDGTRCSYRDPYSVCARGECVPVGCDKEVGSMKADDKCGVCGGDNSHCRTVKGTLGKASKQAGALKLVQIPAGARHIQIEALEKSPHRIVVKNQVTGSFILNPKGKEATSRTFTAMGLEWEDAVEDAKESLKTSGPLPEAIAILALPPTEGGPRSSLAYKYVIHEDLLPLIGSNNVLLEEMDTYEWALKSWAPCSKACGGGIQFTKYGCRRRRDHHMVQRHLCDHKKRPKPIRRRCNQHPCSQPVWVTEEWGACSRSCGKLGVQTRGIQCLLPLSNGTHKVMPAKACAGDRPEARRPCLRVPCPAQWRLGAWSQCSATCGEGIQQRQVVCRTNANSLGHCEGDRPDTVQVCSLPACGGNHQNSTVRADVWELGTPEGQWVPQSEPLHPINKISSTEPCTGDRSVFCQMEVLDRYCSIPGYHRLCCVSCIKKASGPNPGPDPGPTSLPPFSTPGSPLPGPQDPADAAEPPGKPTGSEDHQHGRATQLPGALDTSSPGTQHPFAPETPIPGASWSISPTTPGGLPWGWTQTPTPVPEDKGQPGEDLRHPGTSLPAASPVT

SEQ ID NO: 8657 - protein, 1226 aa, Homo sapiens
MAPLRALLSYLLPLHCALCAAAGSRTPELHLSGKLSDYGVTVPCSTDFRGRFLSHVVSGPAAASAGSMVVDTPPTLPRHSSHLRVARSPLHPGGTLWPGRVGRHSLYFNVTVFGKELHLRLRPNRRLVVPGSSVEWQEDFRELFRQPLRQECVYTGGVTGMPGAAVAISNCDGLAGLIRTDSTDFFIEPLERGQQEKEASGRTHVVYRREAVQQEWAEPDGDLHNEAFGLGDLPNLLGLVGDQLGDTERKRRHAKPGSYSIEVLLVVDDSVVRFHGKEHVQNYVLTLMNIVDEIYHDESLGVHINIALVRLIMVGYRQSLSLIERGNPSRSLEQVCRWAHSQQRQDPSHAEHHDHVVFLTRQDFGPSGMQGYAPVTGMCHPLRSCALNHEDGFSSAFVIAHETGHVLGMEHDGQGNGCADETSLGSVMAPLVQAAFHRFHWSRCSKLELSRYLPSYDCLLDDPFDPAWPQPPELPGINYSMDEQCRFDFGSGYQTCLAFRTFEPCKQLWCSHPDNPYFCKTKKGPPLDGTECAPGKWCFKGHCIWKSPEQTYGQDGGWSSWTKFGSCSRSCGGGVRSRSRSCNNPSPAYGGRPCLGPMFEYQVCNSEECPGTYEDFRAQQCAKRNSYYVHQNAKHSWVPYEPDDDAQKCELICQSADTGDVVFMNQVVHDGTRCSYRDPYSVCARGECVPVGCDKEVGSMKADDKCGVCGGDNSHCRTVKGTLGKASKQAGALKLVQIPAGARHIQIEALEKSPHRIVVKNQVTGSFILNPKGKEATSRTFTAMGLEWEDAVEDAKESLKTSGPLPEAIAILALPPTEGGPRSSLAYKYVIHEDLLPLIGSNNVLLEEMDTYEWALKSWAPCSKACGGGIQFTKYGCRRRRDHHMVQRHLCDHKKRPKPIRRRCNQHPCSQPVWVTEEWGACSRSCGKLGVQTRGIQCLLPLSNGTHKVMPAKACAGDRPEARRPCLRVPCPAQWRLGAWSQCSATCGEGIQQRQVVCRTNANSLGHCEGDRPDTVQVCSLPACGGNHQNSTVRADVWELGTPEGQWVPQSEPLHPINKISSTEPCTGDRSVFCQMEVLDRYCSIPGYHRLCCVSCIKKASGPNPGPDPGPTSLPPFSTPGSPLPGPQDPADAAEPPGKPTGSEDHQHGRATQLPGALDTSSPGTQHPFAPETPIPGASWSISPTTPGGLPWGWTQTPTPVPEDKGQPGEDLRHPGTSLPAASPVT

SEQ ID NO: 8658 - protein, 184 aa, Homo sapiens
MQFTSISNSLTSTAAIGLSFTTSTTTTATFTTNTTTTITSGFTVNQNQLLSRGFENLVPYTSTVSVVATPVMTYGHLEGLINEWNLELEDQEKYFLLQATQVNAWDHTLIENGEMIRILHGEVNKVKLDQKRLEQELDFILSQQQELEFLLTYLEESTRDQSGLHYLQDADEEHVEISTRSAEF

SEQ ID NO: 8659 - protein, 72 aa, Homo sapiens
MQFTSISNSLTSTAAIGLSFTTSTTTTATFTTNTTTTITSGFTVNQNQLLSRGFENLVPYTSTVRFVFYMEK

SEQ ID NO: 8660 - protein, 501 aa, Homo sapiens
MIISHFPKCVAVFALLALSVGALDTFIAAVYEHAVILPNRTETPVSKEEALLLMNKNIDVLEKAVKLAAKQGAHIIVTPEDGIYGWIFTRESIYPYLEDIPDPGVNWIPCRDPWRFGNTPVQQRLSCLAKDNSIYVVANIGDKKPCNASDSQCPPDGRYQYNTDVVFDSQGKLLARYHKYNLFAPEIQFDFPKDSELVTFDTPFGKFGIFTCFDIFSHDPAAVVVDEVSIDSILYPTAWYNTLPLLSAVPFHSAWAKAMGVNLLAANTHNTSMHMTGSGIYAPEAVKVYHYDMETESGQLLLSELKSRPRREPTYPAAVDWHAYASSVKPFSSEQSDFLGMIYFDEFTFTKLKRNTGNYTACQKDLCCHLTYKMSEKRTDEIYALGAFDGLHTVEGQYYLQICALLKCQTTDLETCGEPVGSAFTKFEDFSLSGTFGTRYVFPQIILSGSQLAPERHYEISRDGRLRSRSGAPLPVLVMALYGRVFEKDPPRLGQGSGKFQ

SEQ ID NO: 8661 - protein, 1163 aa, Homo sapiens
MTFGTVLLLSVLASYHGFNLDVEEPTIFQEDAGGFGQSVVQFGGSRLVVGAPLEVVAANQTGRLYDCAAATGMCQPIPLHIRPEAVNMSLGLTLAASTNGSRLLACGPTLHRVCGENSYSKGSCLLLGSRWEIIQTVPDATPECPHQEMDIVFLIDGSGSIDQNDFNQMKGFVQAVMGQFEGTDTLFALMQYSNLLKIHFTFTQFRTSPSQQSLVDPIVQLKGLTFTATGILTVVTQLFHHKNGARKSAKKILIVITDGQKYKDPLEYSDVIPQAEKAGIIRYAIGVGHAFQGPTARQELNTISSAPPQDHVFKVDNFAALGSIQKQLQEKIYAVEGTQSRASSSFQHEMSQEGFSTALTMDGLFLGAVGSFSWSGGAFLYPPNMSPTFINMSQENDMRDSYLGYSTELALWKGVQNLVLGAPRYQHTGKAVIFTQVSRQWRKKAEVTGTQIGSYFGASLCSVDVDSDGSTDLILIGAPHYYEQTRGGQVSVCPLPRGQRVQWQCDAVLRGEQGHPWGRFGAALTVLGDVNEDKLIDVAIGAPGEQENRGAVYLFHGASESGISPSHSQRIASSQLSPRLQYFGQALSGGQDLTQDGLMDLAVGARGQVLLLRSLPVLKVGVAMRFSPVEVAKAVYRCWEEKPSALEAGDATVCLTIQKSSLDQLGDIQSSVRFDLALDPGRLTSRAIFNETKNPTLTRRKTLGLGIHCETLKLLLPDCVEDVVSPIILHLNFSLVREPIPSPQNLRPVLAVGSQDLFTASLPFEKNCGQDGLCEGDLGVTLSFSGLQTLTVGSSLELNVIVTVWNAGEDSYGTVVSLYYPAGLSHRRVSGAQKQPHQSALRLACETVPTEDEGLRSSRCSVNHPIFHEGSNGTFIVTFDVSYKATLGDRMLMRASASSENNKASSSKATFQLELPVKYAVYTMISRQEESTKYFNFATSDEKKMKEAEHRYRVNNLSQRDLAISINFWVPVLLNGVAVWDVVMEAPSQSLPCVSERKPPQHSDFLTQISRSPMLDCSIADCLQFRCDVPSFSVQEELDFTLKGNLSFGWVRETLQKKVLVVSVAEITFDTSVYSQLPGQEAFMRAQMEMVLEEDEVYNAIPIIMGSSVGALLLLALITATLYKASLGFFKRHYKEMLEDKPEDTATFSGDDFSCVAPNVPLS

SEQ ID NO: 8662 - protein, 797 aa, Homo sapiens
MENQGTRTQQIRQVLLLFVLLGMSQAGSETWSFSVAEEMQSGSFVGNLAKDLGLKVRELSSRGARVVSNDKKQRLQLDINTGDLLLSETLDREELCGSIEPCVLHLQVLMQNPTQFLQIELQVRDINDHSPIFSEKQMLLEIPENSPVGAVFLLESAKDLDVGINAVKSYTISPNSHFHIKMRVIPDNRKYPELVLDKALDYEELPELSFILSALDGGSPPRSGTALVRVVVVDINDNSPEFEQAFYEVKIRENSILGSLILIVSAWDLDSGTNGEICYTFSHASEDIRKTFEINQKSGEITLRAPLDFETIESYSIIIQATDGGGLFGKSTVIIHVIDVNDNAPEITVSSITSPIPENTPETVVMVFSIQDIDSGDNGRIVCSIPEDLPFVLKSSVENYYTLETERPLDRESTAEYNITITVTDLGIPRLKTEHNTTVLVSDVNDNAPTFTQTSYTLFVRENNSPALHIGSVSATDRDSGTNAQVNYSLLPPQDLHLPLASLVSINTDNGHLFALRSLDYEALQAFDFRVGATDRGSPALSSEALVRVLVLDANDNSPFVLYPLQNGSAPCTELVPRAAEPGYLVTKVVAVDGDSGQNAWLSYQLLKATEPGLFGVWAHNGEVRTARLLSERDAAKHRLVVLVKDNGEPPRSATATLQVLLVDGFSQPYLPLPEAAPAQAQADSLTVYLVVALASVSSLFLFSVLLFVAVRLCRRSRAASVGSCSVPKGPFPGHLVDVSGTGTLSQSYQYEVCLTGGSETNEFKFLKPVIPNIQAKGLGKNSEENSTFRNSFGFNF

SEQ ID NO: 8663 - protein, 478 aa, Homo sapiens
MAHVPARTSPGPGPQLLLLLLPLFLLLLRDVAGSHRAPAWSALPAAADGLQGDRDLQRHPGDAAATLGPSAQDMVAVHMHRLYEKYSRQGARPGGGNTVRSFRARLEVVDQKAVYFFNLTSMQDSEMILTATFHFYSEPPRWPRALEVLCKPRAKNASGRPLPLGPPTRQHLLFRSLSQNTATQGLLRGAMALAPPPRGLWQAKDISPIVKAARRDGELLLSAQLDSEERDPGVPRPSPYAPYILVYANDLAISEPNSVAVTLQRYDPFPAGDPEPRAAPNNSADPRVRRAAQATGPLQDNELPGLDERPPRAHAQHFHKHQLWPSPFRALKPRPGRKDRRKKGQEVFMAASQVLDFDEKTMQKARRKQWDEPRVCSRRYLKVDFADIGWNEWIISPKSFDAYYCAGACEFPMPKIVRPSNHATIQSIVRAVGIIPGIPEPCCVPDKMNSLGVLFLDENRNVVLKVYPNMSVDTCACR

SEQ ID NO: 8664 - protein, 1775 aa, Homo sapiens
MALSLWPLLLLLLLLLLLSFAVTLAPTGPHSLDPGLSFLKSLLSTLDQAPQGSLSRSRFFTFLANISSSFEPGRMGEGPVGEPPPLQPPALRLHDFLVTLRGSPDWEPMLGLLGDMLALLGQEQTPRDFLVHQAGVLGGLVEVLLGALVPGGPPTPTRPPCTRDGPSDCVLAADWLPSLLLLLEGTRWQALVQVQPSVDPTNATGLDGREAAPHFLQGLLGLLTPTGELGSKEALWGGLLRTVGAPLYAAFQEGLLRVTHSLQDEVFSILGQPEPDTNGQCQGGNLQQLLLWGVRHNLSWDVQALGFLSGSPPPPPALLHCLSTGVPLPRASQPSAHISPRQRRAITVEALCENHLGPAPPYSISNFSIHLLCQHTKPATPQPHPSTTAICQTAVWYAVSWAPGAQGWLQACHDQFPDEFLDAICSNLSFSALSGSNRRLVKRLCAGLLPPPTSCPEGLPPVPLTPDIFWGCFLENETLWAERLCGEASLQAVPPSNQAWVQHVCQGPTPDVTASPPCHIGPCGERCPDGGSFLVMVCANDTMYEVLVPFWPWLAGQCRISRGGNDTCFLEGLLGPLLPSLPPLGPSPLCLTPGPFLLGMLSQLPRCQSSVPALAHPTRLHYLLRLLTFLLGPGAGGAEAQGMLGRALLLSSLPDNCSFWDAFRPEGRRSVLRTIGEYLEQDEEQPTPSGFEPTVNPSSGISKMELLACFSPVLWDLLQREKSVWALQILVQAYLHMPPENLQQLVLSAEREAAQGFLTLMLQGKLQGKLQVPPSEEQALGRLTALLLQRYPRLTSQLFIDLSPLIPFLAVSDLMRFPPSLLANDSVLAAIRDYSPGMRPEQKEALAKRLLAPELFGEVPAWPQELLWAVLPLLPHLPLENFLQLSPHQIQALEDSWPAAGLGPGHARHVLRSLVNQSVQDGEEQVRRLGPLACFLSPEELQSLVPLSDPTGPVERGLLECAANGTLSPEGRVAYELLGVLRSSGGAVLSPRELRVWAPLFSQLGLRFLQELSEPQLRAMLPVLQGTSVTPAQAVLLLGRLLPRHDLSLEELCSLHLLLPGLSPQTLQAIPRRVLVGACSCLAPELSRLSACQTAALLQTFRVKDGVKNMGTTGAGPAVCIPGQPIPTTWPDCLLPLLPLKLLQLDSLALLANRRRYWELPWSEQQAQFLWKKMQVPTNLTLRNLQALGTLAGGMSCEFLQQINSMVDFLEVVHMIYQLPTRVRGSLRACIWAELQRRMAMPEPEWTTVGPELNGLDSKLLLDLPIQLMDRLSNESIMLVVELVQRAPEQLLALTPLHQAALAERALQNLAPKETPVSGEVLETLGPLVGFLGTESTRQIPLQILLSHLSQLQGFCLGETFATELGWLLLQESVLGKPELWSQDEVEQAGRLVFTLSTEAISLIPREALGPETLERLLEKQQSWEQSRVGQLCREPQLAAKKAALVAGVVRPAAEDLPEPVPNCADVRGTFPAAWSATQIAEMELSDFEDCLTLFAGDPGLGPEELRAAMGKAKQLWGPPRGFRPEQILQLGRLLIGLGDRELQELILVDWGVLSTLGQIDGWSTTQLRIVVSSFLRQSGRHVSHLDFVHLTALGYTLCGLRPEELQHISSWEFSQAALFLGTLHLQCSEEQLEVLAHLLVLPGGFGPISNWGPEIFTEIGTIAAGIPDLALSALLRGQIQGVTPLAISVIPPPKFAVVFSPIQLSSLTSAQAVAVTPEQMAFLSPEQRRAVAWAQHEGKESPEQQGRSTAWGLQDWSRPSWSLVLTISFLGHLL

SEQ ID NO: 8665 - protein, 424 aa, Homo sapiens
MPSESGAERRDRAAAQVGTAAATAVATAAPAGGGPDPEALSAFPGRHLSGLSWPQVKRLDALLSEPIPIHGRGNFPTLSVQPRQIVQVVRSTLEEQGLHVHSVRLHGSAASHVLHPESGLGYKDLDLVFRVDLRSEASFQLTKAVVLACLLDFLPAGVSRAKITPLTLKEAYVQKLVKVCTDSDRWSLISLSNKSGKNVELKFVDSVRRQFEFSIDSFQIILDSLLLFGQCSSTPMSEAFHPTVTGESLYGDFTEALEHLRHRVIATRSPEEIRGGGLLKYCHLLVRGFRPRPSTDVRALQRYMCSRFFIDFPDLVEQRRTLERYLEAHFGGADAARRYACLVTLHRVVNESTVCLMNHERRQTLDLIAALALQALAEQGPAATAALAWRPPGTDGVVPATVNYYVTPVQPLLAHAYPTWLPCN

SEQ ID NO: 8666 - protein, 101 aa, Homo sapiens
MSGSCRFCSSRALSSAGASKASLSSFTTGAATSATGRSSTTAPTRAQLRAARTSSASSTQSLSLRSRGSSAAADSSRKPRVRRASCEPANGSGRSRMRCVG

SEQ ID NO: 8667 - protein, 1624 aa, Homo sapiens
MGAIGLLWLLPLLLSTAAVGSGMGTGQRAGSPAAGPPLQPREPLSYSRLQRKSLAVDFVVPSLFRVYARDLLLPPSSSELKAGRPEARGSLALDCAPLLRLLGPAPGVSWTAGSPAPAEARTLSRVLKGGSVRKLRRAKQLVLELGEEAILEGCVGPPGEAAVGLLQFNLSELFSWWIRQGEGRLRIRLMPEKKASEVGREGRLSAAIRASQPRLLFQIFGTGHSSLESPTNMPSPSPDYFTWNLTWIMKDSFPFLSHRSRYGLECSFDFPCELEYSPPLHDLRNQSWSWRRIPSEEASQMDLLDGPGAERSKEMPRGSFLLLNTSADSKHTILSPWMRSSSEHCTLAVSVHRHLQPSGRYIAQLLPHNEAAREILLMPTPGKHGWTVLQGRIGRPDNPFRVALEYISSGNRSLSAVDFFALKNCSEGTSPGSKMALQSSFTCWNGTVLQLGQACDFHQDCAQGEDESQMCRKLPVGFYCNFEDGFCGWTQGTLSPHTPQWQVRTLKDARFQDHQDHALLLSTTDVPASESATVTSATFPAPIKSSPCEASLLLRMSWLIRGVLRGNVSLVLVENKTGKEQGRMVWHVAAYEGLSLWQWMVLPLLDVSDRFWLQMVAWWGQGSRAIVAFDNISISLDCYLTISGEDKILQNTAPKSRNLFERNPNKELKPGENSPRQTPIFDPTVHWLFTTCGASGPHGPTQAQCNNAYQNSNLSVEVGSEGPLKGIQIWKVPATDTYSISGYGAAGGKGGKNTMMRSHGVSVLGIFNLEKDDMLYILVGQQGEDACPSTNQLIQKVCIGENNVIEEEIRVNRSVHEWAGGGGGGGGATYVFKMKDGVPVPLIIAAGGGGRAYGAKTDTFHPERLENNSSVLGLNGNSGAAGGGGGWNDNTSLLWAGKSLQEGATGGHSCPQAMKKWGWETRGGFGGGGGGCSSGGGGGGYIGGNAASNNDPEMDGEDGVSFISPLGILYTPALKVMEGHGEVNIKHYLNCSHCEVDECHMDPESHKVICFCDHGTVLAEDGVSCIVSPTPEPHLPLSLILSVVTSALVAALVLAFSGIMIVYRRKHQELQAMQMELQSPEYKLSKLRTSTIMTDYNPNYCFAGKTSSISDLKEVPRKNITLIRGLGHGAFGEVYEGQVSGMPNDPSPLQVAVKTLPEVCSEQDELDFLMEALIISKFNHQNIVRCIGVSLQSLPRFILLELMAGGDLKSFLRETRPRPSQPSSLAMLDLLHVARDIACGCQYLEENHFIHRDIAARNCLLTCPGPGRVAKIGDFGMARDIYRASYYRKGGCAMLPVKWMPPEAFMEGIFTSKTDTWSFGVLLWEIFSLGYMPYPSKSNQEVLEFVTSGGRMDPPKNCPGPVYRIMTQCWQHQPEDRPNFAIILERIEYCTQDPDVINTALPIEYGPLVEEEEKVPVRPKDPEGVPPLLVSQQAKREEERSPAAPPPLPTTSSGKAAKKPTAAEISVRVPRGPAVEGGHVNMAFSQSNPPSELHKVHGSRNKPTSLWNPTYGSWFTEKPTKKNNPIAKKEPHDRGNLGLEGSCTVPPNVATGRLPGASLLLEPSSLTANMKEVPLFRLRHFPCGNVNYGYQQQGLPLEAATAPGAGHYEDTILKSKNSMNQPGP

SEQ ID NO: 8668 - protein, 832 aa, Homo sapiens
MSAREVAVLLLWLSCYGSALWRYSTNSPNYRIFSTRSTIKLEYEGTLFTEWSVPETCFVLNKSSPTTELRCSSPGVHAIKPIVTGPDEEERYLFVESSHTCFLWYYRVRHFFNNFTQLITVWAYDPESADPDELLGNAEEPSINSIVLSTQMATLGQKPVIHTVLKRKVYSSNEKMRRGTWRIVVPMTKDDALKEIRGNQVTFQDCFIADFLILLTFPLLTIPEIPGYLPISSPRGSQLMASWDACVVASAVLVTDMETFHTTDSFKSWTRIRVPPDILSDDERRSVAHVILSRDGIVFLINGVLYIKSFRGFIRLGGIVNLPDGGITGISSRKWCWVNYLLKAKGRRSTFAVWTENEIYLGSILLKFARLVTTTELKNILSLSVTATLTIDRVEYTGHPLEIAVFLNYCTVCNVTKKIFLVIYNEDTKQWVSQDFTLDAPIDSVTMPHFTFSALPGLLLWNKHSIYYCYHNFTFTGILQTPAGHGNLSMLSNDSIIHEVFIDYYGDILVKMENNVIFYSKINTRDAVKLHLWTNYTTRAFIFLSTSGQTYFLYALDDGTIQIQDYPLHLEAQSIAFTTKDKCPYMAFHNNVAHVFYFLDKGEALTVWTQIVYPENTGLYVIVESYGPKILQESHEISFEAAFGYCTKTLTLTFYQNVDYERISDYFETQDKHTGLVLVQFRPSEYSKACPIAQKVFQIAVGCDDKKFIAIKGFSKKGCHHHDFSYVIEKSYLRHQPSKNLRVRYIWGEYGCPLRLDFTEKFQPVVQLFDDNGYVKDVEANFIVWEIHGRDDYSFNNTMAQSGCLHEAQTWKSMIELNKHLPLEEVWGPEFL

SEQ ID NO: 8669 - protein, 361 aa, Homo sapiens
MKQKMMARLLRTSFALLFLGLFGVLGAATISCRNEEGKAVDWFTFYKLPKRQNKESGETGLEYLYLDSTTRSWRKSEQLMNDTKSVLGRTLQQLYEAYASKSNNTAYLIYNDGVPKPVNYSRKYGHTKGLLLWNRVQGFWLIHSIPQFPPIPEEGYDYPPTGRRNGQSGICITFKYNQYEAIDSQLLVCNPNVYSCSIPATFHQELIHMPQLCTRASSSEIPGRLLTTLQSAQGQKFLHFAKSDSFLDDIFAAWMAQRLKTHLLTETWQRKRQELPSNCSLPYHVYNIKAIKLSRHSYFSSYQDHAKWCISQKGTKNRWTCIGDLNRSPHQAFRSGGFICTQNWQIYQAFQGLVLYYESCK

SEQ ID NO: 8670 - protein, 154 aa, Homo sapiens
MTHCCSPCCQPTCCRTTCCRTTCWKPTTVTTCSSTPCCQPSCCVSSCCQPCCRPACCQNTCCRTTCCQPTCLSSCCGQTSCGSSCGQSSSCAPVYCRRTCYYPTTVCLPGCLNQSCGSSCCQPCCRPACCETTCCRTTCFQPTCVSSCCQPSCC

SEQ ID NO: 8671 - protein, 111 aa, Homo sapiens
TTCCQPTCLTSCCQPSCCSTTCCQPICCGSSCCGQTSCGSSCGQSSSCAPVYCRRTCYYPTTVCLPGCLNQSCGSSCCQPCCRPACCETTCCRTTCFQPTCVSSCCQPSCC

SEQ ID NO: 8672 - protein, 512 aa, Homo sapiens
MTAPWVALALLWGSLCAGSGRGEAETRECIYYNANWELERTNQSGLERCEGEQDKRLHCYASWANSSGTIELVKKGCWLDDFNCYDRQECVATEENPQVYFCCCEGNFCNERFTHLPEAGGPEVTYEPPPTAPTLLTVLAYSLLPIGGLSLIVLLAFWMYRHRKPPYGHVDIHEDPGPPPPSPLVGLKPLQLLEIKARGRFGCVWKAQLMNDFVAVKIFPLQDKQSWQSEREIFSTPGMKHENLLQFIAAEKRGSNLEVELWLITAFHDKGSLTDYLKGNIITWNELCHVAETMSRGLSYLHEDVPWCRGEGHKPSIAHRDFKSKNVLLKSDLTAVLADFGLAVRFEPGKPPGDTHGQVGTRRYMAPEVLEGAINFQRDAFLRIDMYAMGLVLWELVSRCKAADGPVDEYMLPFEEEIGQHPSLEELQEVVVHKKMRPTIKDHWLKHPGLAQLCVTIEECWDHDAEARLSAGCVEERVSLIRRSVNGTTSDCLVSLVTSVTNVDLPPKESSI

SEQ ID NO: 8673 - protein, 518 aa, Homo sapiens
MCPQESSFQPSQFLLLVGVPVASVLLLAQCLRWHCPRRLLGACWTLNGQEEPVSQPTPQLENEVSRQHLPATLPEMVAFYQELHTPTQGQTMVRQLMHKLLVFSAREVDHRGGCLMLQDTGISLLIPPGAVAVGRQERVSLILVWDLSDAPSLSQAQGLVSPVVACGPHGASFLKPCTLTFKHCAEQPSHARTYSSNTTLLDAKVWRPLGRPGAHASRDECRIHLSHFSLYTCVLEAPVGREARKWLQLAVFCSPLVPGQSHLQLRIYFLNNTPCALQWALTNEQPHGGRLRGPCQLFDFNGARGDQCLKLTYISEGWENVDDSSCQLVPHLHIWHGKCPFRSFCFRRKAADENEDCSALTNEIIVTMHTFQDGLETKYMEILRFQASEEESWAAPPPVSQPPPCNRLPPELFEQLRMLLEPNSITGNDWRGLASHLGLCGMKIRFLSCQRSPAAAILELFEEQNGSLQELHYLMTVMERLDCASAIQNYLSGTHGGSPGPERGGARDNQGLELDEKL

SEQ ID NO: 8674 - protein, 616 aa, Homo sapiens
RAWLLAAGSAGTGREAGGSGTWIQMKRSKELITKNHSQEETSILRCWKCRKCIASSGCFMEYLENQVIKDKDDSVDAQNICHVWHMNVEALPEWISCLIQKAQWTVGKLNCPFCGARLGGFNFVSTPKCSCGQLAAVHLSKSRTDYQPTQAGRLMRPSVKYLSHPRVQSGCDKEALLTGGGSENRNHRLLNMARNNNDPGRLTEALCLEVRPTYFEMKNEKLLSKASEPKYQLFVPQLVTGRCATRAFHRKSHSLDLNISEKLTLLPTLYEIHSKTTAYSRLNETQPIDLSGLPLQSSKNSYSFQNPSSFDPSMLLQRFSVAPHETQTQRGGEFQCGLEAASVYSDHTNTNNLTFLMDLPSAGRSMPEASDQEEHLSPLDFLHSANFSLGSINQRLNKRERSKLKNLRRKQRRRERWLQKQGKYSGVGLLDHMTLNNEMSTDEDNEYAEEKDSYICAVCLDVYFNPYMCYPCHHIFCEPCLRTLAKDNPSSTPCPLCRTIISRVFFQTELNNATKTFFTKEYLKIKQSFQKSNSAKWPLPSCRKAFHLFGGFRRHAAPVTRRQFPHGAHRMDYLHFEDDSRGWWFDMDMVIIYIYSVNWVIGFIVFCFLCYFFFPF

SEQ ID NO: 8675 - protein, 592 aa, Homo sapiens [sequence omitted]

SEQ ID NO: 8676 - protein, 668 aa, Homo sapiens
MWLFFGITGLLTAALSGHPSPAPPDQLNTSSAESELWEPGERLPVRLTNGSSSCSGTVEVRLEASWEPACGALWDSRAAEAVCRALGCGGAEAASQLAPPTPELPPPPAAGNTSVAANATLAGAPALLCSGAEWRLCEVVEHACRSDGRRARVTCAENRALRLVDGGGACAGRVEMLEHGEWGSVCDDTWDLEDAHVVCRQLGCGWAVQALPGLHFTPGRGPIHRDQVNCSGAEAYLWDCPGLPGQHYCGHKEDAGVVCSEHQSWRLTGGADRCEGQVEVHFRGVWNTVCDSEWYPSEAKVLCQSLGCGTAVERPKGLPHSLSGRMYYSCNGEELTLSNCSWRFNNSNLCSQSLAARVLCSASRSLHNLSTPEVPASVQTVTIESSVTVKIENKESRELMLLIPSIVLGILLLGSLIFIAFILLRIKGKYALPVMVNHQHLPTTIPAGSNSYQPVPITIPKEVFMLPIQVQAPPPEDSDSGSDSDYEHYDFSAQPPVALTTFYNSQRHRVTDEEVQQSRFQMPPLEEGLEELHASHIPTANPGHCITDPPSLGPQYHPRSNSESSTSSGEDYCNSPKSKLPPWNPQVFSSERSSFLEQPPNLELAGTQPAFSAGPPADDSSSTSSGEWYQNFQPPPQPPSEEQFGCPGSPSPQPDSTDNDDYDDISAA

SEQ ID NO: 8677 - protein, 601 aa, Homo sapiens [sequence omitted]

SEQ ID NO: 8678 - protein, 636 aa, Homo sapiens
MWLFFGITGLLTAALSGHPSPAPPDQLNTSSAESELWEPGERLPVRLTNGSSSCSGTVEVRLEASWEPACGALWDSRAAEAVCRALGCGGAEAASQLAPPTPELPPPPAAGNTSVAANATLAGAPALLCSGAEWRLCEVVEHACRSDGRRARVTCAENRALRLVDGGGACAGRVEMLEHGEWGSVCDDTWDLEDAHVVCRQLGCGWAVQALPGLHFTPGRGPIHRDQVNCSGAEAYLWDCPGLPGQHYCGHKEDAGVVCSEHQSWRLTGGADRCEGQVEVHFRGVWNTVCDSEWYPSEAKVLCQSLGCGTAVERPKGLPHSLSGRMYYSCNGEELTLSNCSWRFNNSNLCSQSLAARVLCSASRSLHNLSTPEVPASVQTVTIESSVTVKIENKESRELMLLIPSIVLGILLLGSLIFIAFILLRIKGKYVFMLPIQVQAPPPEDSDSGSDSDYEHYDFSAQPPVALTTFYNSQRHRVTDEEVQQSRFQMPPLEEGLEELHASHIPTANPGHCITDPPSLGPQYHPRSNSESSTSSGEDYCNSPKSKLPPWNPQVFSSERSSFLEQPPNLELAGTQPAFSAGPPADDSSSTSSGEWYQNFQPPPQPPSEEQFGCPGSPSPQPDSTDNDDYDDISAA

SEQ ID NO: 8679 - protein, 595 aa, Homo sapiens [sequence omitted]

SEQ ID NO: 8680 - protein, 788 aa, Homo sapiens
MGIELLCLFFLFLGRNDHVQGGCALGGAETCEDCLLIGPQCAWCAQENFTHPSGVGERCDTPANLLAKGCQLNFIENPVSQVEILKNKPLSVGRQKNSSDIVQIAPQSLILKLRPGGAQTLQVHVRQTEDYPVDLYYLMDLSASMDDDLNTIKELGSRLSKEMSKLTSNFRLGFGSFVEKPVSPFVKTTPEEIANPCSSIPYFCLPTFGFKHILPLTNDAERFNEIVKNQKISANIDTPEGGFDAIMQAAVCKEKIGWRNDSLHLLVFVSDADSHFGMDSKLAGIVIPNDGLCHLDSKNEYSMSTVLEYPTIGQLIDKLVQNNVLLIFAVTQEQVHLYENYAKLIPGATVGLLQKDSGNILQLIISAYEELRSEVELEVLGDTEGLNLSFTAICNNGTLFQHQKKCSHMKVGDTASFSVTVNIPHCERRSRHIIIKPVGLGDALELLVSPECNCDCQKEVEVNSSKCHHGNGSFQCGVCACHPGHMGPRCECGEDMLSTDSCKEAPDHPSCSGRGDCYCGQCICHLSPYGNIYGPYCQCDNFSCVRHKGLLCGGNGDCDCGECVCRSGWTGEYCNCTTSTDSCVSEDGVLCSGRGDCVCGKCVCTNPGASGPTCERCPTCGDPCNSKRSCIECHLSAAGQAREECVDKCKLAGATISEEEDFSKDGSVSCSLQGENECLITFLITTDNEGKTIIHSINEKDCPKPPNIPMIMLGVSLAILLIGVVLLCIWKLLVSFHDRKEVAKFEAERSKAKWQTGTNPLYRGSTSTFKNVTYKHREKQKVDLSTDC

SEQ ID NO: 8681 - protein, 429 aa, Homo sapiens
MLPRLLLLICAPLCEPAELFLIASPSHPTEGSPVTLTCKMPFLQSSDAQFQFCFFRDTRALGPGWSSSPKLQIAAMWKEDTGSYWCEAQTMASKVLRSRRSQINVHRVPVADVSLETQPPGGQVMEGDRLVLICSVAMGTGDITFLWYKGAVGLNLQSKTQRSLTAEYEIPSVRESDAEQYYCVAENGYGPSPSGLVSITVRIPVSRPILMLRAPRAQAAVEDVLELHCEALRGSPPILYWFYHEDITLGSRSAPSGGGASFNLSLTEEHSGNYSCEANNGLGAQRSEAVTLNFTVPTGARSNHLTSGVIEGLLSTLGPATVALLFCYGLKRKIGRRSARDPLRSLPSPLPQEFTYLNSPTPGQLQPIYENVNVVSGDEVYSLAYYNQPEQESVAAETLGTHMEDKVSLDIYSRLRKANITDVDYEDAM

SEQ ID NO: 8682 - protein, 366 aa, Homo sapiens
MLPRLLLLICAPLCEPAELFLIASPSHPTEGSPVTLTCKMPFLQSSDAQFQFCFFRDTRALGPGWSSSPKLQIAAMWKEDTGSYWCEAQTMASKVLRSRRSQINVHRVPVADVSLETQPPGGQVMEGDRLVLICSVAMGTGDITFLWYKGAVGLNLQSKTQRSLTAEYEIPSVRESDAEQYYCVAENGYGPSPSGLVSITVRIPVSRPILMLRAPRAQAAVEDVLELHCEALRGSPPILYWFYHEDITLGSRSAPSGGGASFNLSLTEEHSGNYSCEANNGLGAQRSEAVTLNFTGRRSARDPLRSLPSPLPQEFTYLNSPTPGQLQPIYENEPREQSVAVHGRQQHSSEQKAQKPWGHIWRTRFP

SEQ ID NO: 8683 - protein, 188 aa, Homo sapiens
MVPGAAGWCCLVLWLPACVAAHGFRIHDYLYFQVLSPGDIRYIFTATPAKDFGGIFHTRYEQIHLVPAEPPEACGELSNGFFIQDQIALVERGGCSFLSKTRVVQEHGGRAVIISDNAVDNDSFYVEMIQDSTQRTADIPALFLLGRDGYMIRRSLEQHGLPWAIISIPVNVTSIPTFELLQPPWTFW

SEQ ID NO: 8684 - protein, 513 aa, Homo sapiens
MPGLGRRAQWLCWWWGLLCSCCGPPPLRPPLPAAAAAAAGGQLLGDGGSPGRTEQPPPSPQSSSGFLYRRLKTQEKREMQKEILSVLGLPHRPRPLHGLQQPQPPALRQQEEQQQQQQLPRGEPPPGRLKSAPLFMLDLYNALSADNDEDGASEGERQQSWPHEAASSSQRRQPPPGAAHPLNRKSLLAPGSGSGGASPLTSAQDSAFLNDADMVMSFVNLVEYDKEFSPRQRHHKEFKFNLSQIPEGEVVTAAEFRIYKDCVMGSFKNQTFLISIYQVLQEHQHRDSDLFLLDTRVVWASEEGWLEFDITATSNLWVVTPQHNMGLQLSVVTRDGVHVHPRAAGLVGRDGPYDKQPFMVAFFKVSEVHVRTTRSASSRRRQQSRNRSTQSQDVARVSSASDYNSSELKTACRKHELYVSFQDLGWQDWIIAPKGYAANYCDGECSFPLNAHMNATNHAIVQTLVHLMNPEYVPKPCCAPTKLNAISVLYFDDNSNVILKKYRNMVVRACGCH

SEQ ID NO: 8685 - protein, 336 aa, Homo sapiens
MAVATAAAVLAALGGALWLAARRFVGPRVQRLRRGGDPGLMHGKTVLITGANSGLGRATAAELLRLGARVIMGCRDRARAEEAAGQLRRELRQAAECGPEPGVSGVGELIVRELDLASLRSVRAFCQEMLQEEPRLDVLINNAGIFQCPYMKTEDGFEMQFGVNHLGHFLLTNLLLGLLKSSAPSRIVVVSSKLYKYGDINFDDLNSEQSYNKSFCYSRSKLANILFTRELARRLEGTNVTVNVLHPGIVRTNLGRHIHIPLLVKPLFNLVSWAFFKTPVEGAQTSIYLASSPEVEGVSGRYFGDCKEEELLPKAMDESVARKLWDISEVMVGLLK

SEQ ID NO: 8686 - protein, 599 aa, Homo sapiens
MLCLGWIFLWLVAGERIKGFNISGCSTKKLLWTYSTRSEEEFVLFCDLPEPQKSHFCHRNRLSPKQVPEHLPFMGSNDLSDVQWYQQPSNGDPLEDIRKSYPHIIQDKCTLHFLTPGVNNSGSYICRPKMIKSPYDVACCVKMILEVKPQTNASCEYSASHKQDLLLGSTGSISCPSLSCQSDAQSPAVTWYKNGKLLSVERSNRIVVDEVYDYHQGTYVCDYTQSDTVSSWTVRAVVQVRTIVGDTKLKPDILDPVEDTLEVELGKPLTISCKARFGFERVFNPVIKWYIKDSDLEWEVSVPEAKSIKSTLKDEIIERNIILEKVTQRDLRRKFVCFVQNSIGNTTQSVQLKEKRGVVLLYILLGTIGTLVAVLAASALLYRHWIEIVLLYRTYQSKDQTLGDKKDFDAFVSYAKWSSFPSEATSSLSEEHLALSLFPDVLENKYGYSLCLLERDVAPGGVYAEDIVSIIKRSRRGIFILSPNYVNGPSIFELQAAVNLALDDQTLKLILIKFCYFQEPESLPHLVKKALRVLPTVTWRGLKSVPPNSRFWAKMRYHMPVKNSQGFTWNQLRITSRIFQWKGLSRTETTGRSSQPKEW

SEQ ID NO: 8687 - protein, 482 aa, Homo sapiens
MAEAATPGTTATTSGAGAAAATAAAASPTPIPTVTAPSLGAGGGGGGSDGSGGGWTKQVTCRYFMHGVCKEGDNCRYSHDLSDSPYSVVCKYFQRGYCIYGDRCRYEHSKPLKQEEATATELTTKSSLAASSSLSSIVGPLVEMNTGEAESRNSNFATVGAGSEDWVNAIEFVPGQPYCGRTAPSCTEAPLQGSVTKEESEKEQTAVETKKQLCPYAAVGECRYGENCVYLHGDSCDMCGLQLLHPMDAAQRSQHIKSCIEAHEKDMELSFAVQRSKDMVCGICMEVVYEKANPSERRFGILSNCNHTYCLKCIRKWRSAKQFESKIIKSCPECRITSNFVIPSEYWVEEKEEKQKLILKYKEAMSNKACRYFDEGRGSCPFGGNCFYKHAYPDGRREEPQRQKVGTSSRYRAQRRNHFWELIEERENSNPFDNDEEEVVTFELGEMLLMLLAAGGDDELTDSEDEWDLFHDELEDFYDLDL

SEQ ID NO: 8688 - protein, 380 aa, Homo sapiens
MLLYEHSKPLKQEEATATELTTKSSLAASSSLSSIVGPLVEMNTGEAESRNSNFATVGAGSEDWVNAIEFVPGQPYCGRTAPSCTEAPLQGSVTKEESEKEQTAVETKKQLCPYAAVGECRYGENCVYLHGDSCDMCGLQVLHPMDAAQRSQHIKSCIEAHEKDMELSFAVQRSKDMVCGICMEVVYEKANPSERRFGILSNCNHTYCLKCIRKWRSAKQFESKIIKSCPECRITSNFVIPSEYWVEEKEEKQKLILKYKEAMSNKACRYFDEGRGSCPFGGNCFYKHAYPDGRREEPQRQKVGTSSRYRAQRRNHFWELIEERENSNPFDNDEEEVVTFELGEMLLMLLAAGGDDELTDSEDEWDLFHDELEDFYDLDL

SEQ ID NO: 8689 - protein, 298 aa, Homo sapiens
  VARIANT 67: Xaa = Any Amino Acid
MFSHAGITGLLAWTLQPQWIQVRNTATSKDVTKRLKSIKNIQKITKSMQMVAAAKYAQAERELKPAXIYGLGSLALEKKAGIKVPEDNKKHLLIGVSSDRGLCGAIHSSIAKQMKSEVATLTAAGKEVMLVGIGDKIRGVLYRMHSDQFLVALKEVRRNPPAFGNVSVIALELLNSGYEFDEGSIIFNQFKSVISYKTEEKPIFFLNTIASAESMSIYYNIDAEVLQNYQEYSLANSIYYSLKESTTSEQSARMTAMDNTSKNASEMIDKLTLTFNCTRQAVITKELTEIIFGAVALD

SEQ ID NO: 8690 - protein, 1094 aa, Homo sapiens
MARPVRGGLGAPRRSPCLLLLWLLLLRLEPVTAAAGPRAPCAAACTCAGDSLDCGGRGLAALPGDLPSWTRSLNLSYNKLSEIDPAGFEDLPNLQEVYLNNNELTAVPSLGAASSHVVSLFLQHNKIRSVEGSQLKAYLSLEVLDLSLNNITEVRNTCFPHGPPIKELNLAGNRIGTLELGAFDGLSRSLLTLRLSKNRITQLPVRAFKLPRLTQLDLNRNRIRLIEGLTFQGLNSLEVLKLQRNNISKLTDGAFWGLSKMHVLHLEYNSLVEVNSGSLYGLTALHQLHLSNNSIARIHRKGWSFCQKLHELVLSFNNLTRLDEESLAELSSLSVLRLSHNSISHIAEGAFKGLRSLRVLDLDHNEISGTIEDTSGAFSGLDSLSKLTLFGNKIKSVAKRAFSGLEGLEHLNLGGNAIRSVQFDAFVKMKNLKELHISSDSFLCDCQLKWLPPWLIGRMLQAFVTATCAHPESLKGQSIFSVPPESFVCDDFLKPQIITQPETTMAMVGKDIRFTCSAASSSSSPMTFAWKKDNEVLTNADMENFVHVHAQDGEVMEYTTILHLRQVTFGHEGRYQCVITNHFGSTYSHKARLTVNVLPSFTKTPHDITIRTTTMARLECAATGHPNPQIAWQKDGGTDFPAARERRMHVMPDDDVFFITDVKIDDAGVYSCTAQNSAGSISANATLTVLETPSLVVPLEDRVVSVGETVALQCKATGNPPPRITWFKGDRPLSLTERHHLTPDNQLLVVQNVVAEDAGRYTCEMSNTLGTERAHSQLSVLPAAGCRKDGTTVGIFTIAVVSSIVLTSLVWVCIIYQTRKKSEEYSVTNTDETVVPPDVPSYLSSQGTLSDRQETVVRTEGAGPQANGHIESNGVCPRDASHFPEPDTHSVACRQPKLCAGSAYHKEPWKAIEKAEGTPGPHKMEHGGRVVCSDCNTEVDCYSRGQAFHPQPVSRDSAQPSAPNGPEPGGSDQEHSPHHQCSRTAAGSCPECQGSLYPSNHDRMLTAVKKKPMASLDGKGDSSWTLARLYHPDSTELQPASSLTSGSPERAEAQYLLVSNGHLPKACDASPESTPLTGQLPGKQRVPLLLAPKS

SEQ ID NO: 8691 - protein, 1331 aa, Homo sapiens
MQAAPRAGCGAALLLWIVSSCLCRAWTAPSTSQKCDEPLVSGLPHVAFSSSSSISGSYSPGYAKINKRGGAGGWSPSDSDHYQWLQVDFGNRKQISAIATQGRYSSSDWVTQYRMLYSDTGRNWKPYHQDGNIWAFPGNINSDGVVRHELQHPIIARYVRIVPLDWNGEGRIGLRIEVYGCSYWADVINFDGHVVLPYRFRNKKMKTLKDVIALNFKTSESEGVILHGEGQQGDYITLELKKAKLVLSLNLGSNQLGPIYGHTSVMTGSLLDDHHWHSVVIERQGRSINLTLDRSMQHFRTNGEFDYLDLDYEITFGGIPFSGKPSSSSRKNFKGCMESINYNGVNITDLARRKKLEPSNVGNLSFSCVEPYTVPVFFNATSYLEVPGRLNQDLFSVSFQFRTWNPNGLLVFSHFADNLGNVEIDLTESKVGVHINITQTKMSQIDISSGSGLNDGQWHEVRFLAKENFAILTIDGDEASAVRTNSPLQVKTGEKYFFGGFLNQMNNSSHSVLQPSFQGCMQLIQVDDQLVNLYEVAQRKPGSFANVSIDMCAIIDRCVPNHCEHGGKCSQTWDSFKCTCDETGYSGATCHNSIYEPSCEAYKHLGQTSNYYWIDPDGSGPLGPLKVYCNMTEDKVWTIVSHDLQMQTPVVGYNPEKYSVTQLVYSASMDQISAITDSAEYCEQYVSYFCKMSRLLNTPDGSPYTWWVGKANEKHYYWGGSGPGIQKCACGIERNCTDPKYYCNCDADYKQWRKDAGFLSYKDHLPVSQVVVGDTDRQGSEAKLSVGPLRCQGDRNYWNAASFPNPSSYLHFSTFQGETSADISFYFKTLTPWGVFLENMGKEDFIKLELKSATEVSFSFDVGNGPVEIVVRSPTPLNDDQWHRVTAERNVKQASLQVDRLPQQIRKAPTEGHTRLELYSQLFVGGAGGQQGFLGCIRSLRMNGVTLDLEERAKVTSGFISGCSGHCTSYGTNCENGGKCLERYHGYSCDCSNTAYDGTFCNKDVGAFFEEGMWLRYNFQAPATNARDSSSRVDNAPDQQNSHPDLAQEEIRFSFSTTKAPCILLYISSFTTDFLAVLVKPTGSLQIRYNLGGTREPYNIDVDHRNMANGQPHSVNITRHEKTIFLKLDHYPSVSYHLPSSSDTLFNSPKSLFLGKVIETGKIDQEIHKYNTPGFTGCLSRVQFNQIAPLKAALRQTNASAHVHIQGELVESNCGASPLTLSPMSSATDPWHLDHLDSASADFPYNPGQGQAIRNGVNRNSAIIGGVIAVVIFTILCTLVFLIRYMFRHKGTYHTNEAKGAESAESADAAIMNNDPNFTETIDESKKEWLI

SEQ ID NO: 8692 - protein, 179 aa, Homo sapiens
MGWRPRRARGTPLLLLLLLLLLWPVPGAGVLQGHIPGQPVTPHWVLDGQPWRTVSLEEPVSKPDMGLVALEAEGQELLLELEKNQLLAPGYIETHYGPDGQPVVLAPNHTVRCFHGLWDAPPEGRREARRTRKYLELYIVADHTLFLTRHRNLNHTKQRLLEVANYVDQVVNSAGDAHG

SEQ ID NO: 8693 - protein, 1222 aa, Homo sapiens
MEAARTERPAGRPGAPLVRTGLLLLSTWVLAGAEITWDATGGPGRPAAPASRPPALSPLSPRAVASQWPEELASARRAAVLGRRAGPELLPQQGGGRGGEMQVEAGGTSPAGERRGRGIPAPAKLGGARRSRRAQPPITQERGDAWATAPADGSRGSRPLAKGSREEVKAPRAGGSAAEDLRLPSTSFALTGDSAHNQAMVHWSGHNSSVILILTKLYDFNLGSVTESSLWRSTDYGTTYEKLNDKVGLKTVLSYLYVNPTNKRKIMLLSDPEMESSILISSDEGATYQKYRLTFYIQSLLFHPKQEDWVLAYSLDQKLYSSMDFGRRWQLMHERITPNRFYWSVAGLDKEADLVHMEVRTTDGYAHYLTCRIQECAETTRSGPFARSIDISSLVVQDEYIFIQVTTSGRASYYVSYRREAFAQIKLPKYSLPKDMHIISTDENQVFAAVQEWNQNDTYNLYISDTRGIYFTLAMENIKSSRGLMGNIIIELYEVAGIKGIFLANKKVDDQVKTYITYNKGRDWRLLQAPDVDLRGSPVHCLLPFCSLHLHLQLSENPYSSGRISSKETAPGLVVATGNIGPELSYTDIGVFISSDGGNTWRQIFDEEYNVWFLDWGGALVAMKHTPLPVRHLWVSFDEGHSWDKYGFTSVPLFVDGALVEAGMETHIMTVFGHFSLRSEWQLVKVDYKSIFSRHCTKEDYQTWHLLNQGEPCVMGERKIFKKRKPGAQCALGRDHSGSVVSEPCVCANWDFECDYGYERHGESQCVPAFWYNPASPSKDCSLGQSYLNSTGYRRIVSNNCTDGLREKYTAKAQMCPGKAPRGLHVVTTDGRLVAEQGHNATFIILMEEGDLQRTNIQLDFGDGIAVSYANFSPIEDGIKHVYKSAGIFQVTAYAENNLGSDTAVLFLHVVCPVEHVHLRVPFVAIRNKEVNISAVVWPSQLGTLTYFWWFGNSTKPLITLDSSISFTFLAEGTDTITVQVAAGNALIQDTKEIAVHEYFQSQLLSFSPNLDYHNPDIPEWRKDIGNVIKRALVKVTSVPEDQILIAVFPGLPTSAELFILPPKNLTERRKGNEGDLEQIVETLFNALNQNLVQFELKPGVQVIVYVTQLTLAPLVDSSAGHSSSAMLMLLSVVFVGLAVFLIYKFKRKIPWINIYAQVQHDKEQEMIGSVSQSENAPKITLSDFTEPEELLDKELDTRVIGGIATIANSESTKEIPNCTSV

SEQ ID NO: 8694 - protein, 769 aa, Homo sapiens
MCGSALAFFTAAFVCLQNDRRGPASFLWAAWVFSLVLGLGQGEDNRCASSNAASCARCLALGPECGWCVQEDFISGGSRSERCDIVSNLISKGCSVDSIEYPSVHVIIPTENEINTQVTPGEVSIQLRPGAEANFMLKVHPLKKYPVDLYYLVDVSASMHNNIEKLNSVGNDLSRKMAFFSRDFRLGFGSYVDKTVSPYISIHPERIHNQCSDYNLDCMPPHGYIHVLSLTENITEFEKAVHRQKISGNIDTPEGGFDAMLQAAVCESHIGWRKEAKRLLLVMTDQTSHLALDSKLAGIVVPNDGNCHLKNNVYVKSTTMEHPSLGQLSEKLIDNNINVIFAVQGKQFHWYKDLLPLLPGTIAGEIESKAANLNNLVVEAYQKLISEVKVQVENQVQGIYFNITAICPDGSRKPGMEGCRNVTSNDEVLFNVTVTMKKCDVTGGKNYAIIKPIGFNETAKIHIHRNCSCQCEDNRGPKGKCVDETFLDSKCFQCDENKCHFDEDQFSSESCKSHKDQPVCSGRGVCVCGKCSCHKIKLGKVYGKYCEKDDFSCPYHHGNLCAGHGECEAGRCQCFSGWEGDRCQCPSAAAQHCVNSKGQVCSGRGTCVCGRCECTDPRSIGRFCEHCPTCYTACKENWNCMQCLHPHNLSQAILDQCKTSCALMEQQHYVDQTSECFSSPSYLRIFFIIFIVTFLIGLLKVLIIRQVILQWNSNKIKSSSDYRVSASKKDKLILQSVCTRAVTYRREKPEEIKMDISKLNAHETFRCNF

SEQ ID NO: 8695 - protein, 306 aa, Homo sapiens
MSTWKARLTKRLKSPSRSMHPFPCSALLACFGNTRESASFNQSGVADTHSTVRVQPVAKAGRQPRHPSAEGAPEKRQDSSTHAERNGSANRNSSHRTAAQPAETPEDVPGSLDDGADCEAVVFHASIPRPSIIDTPKEEEFREEPKCLELEQKMTSDSPPEDIDHKDSYLITRSIMAEPDYIEDDNPELIRPQKLINPVKTSRNHQDLHRELLMNQKRGLAPQNKPELQKVMEKRKRDQVIKQKEEEAQKKKSDLEIELLKRQQKLEQLELEKQKLQEEQENAPEFVKVKGNLRRTGQEVAQAQES

SEQ ID NO: 8696 - protein, 284 aa, Homo sapiens
ARGRLRRSARRMDPVPGTDSAPLAGLAWSSASAPPPRGFSAISCTVEGAPASFGKSFAQKSGYFLCLSSLGSLENPQENVVADIQIVVDKSPLPLGFSPVCDPMDSKASVSKKKRMCVKLLPLGATDTAVFDVRLSGKTKTVPGYLRIGDMGGFAIWCKKAKAPRPVPKPRGLSRDMQGLSLDAASQPSKGGLLERTASRLGSRASTLRRNDSIYEASSLYGISAMDGVPFTLHPRFEGKSCSPLAFSAFGDLTIKSLADIEEEYNYGFVVEKTAAARLPPSVS

SEQ ID NO: 8697 - protein, 162 aa, Homo sapiens
WLGCVCFALVQADSPSAPVNVTVRHLKANSAVVSWDVLEDEVVIGFAISQQKKDVRMLRFIQEVNTTTRSCALWDLEEDTEYIVHVQAISIQGQSPASEPVLFKTPREAEKMASKNKDEVTMKEMGRNQQLRTGEVLIIVVVLFMWAGVIALFCRQYDIIEA

SEQ ID NO: 8698 - protein, 1912 aa, Homo sapiens
TERMCHAAQETPLLHHFMAPVMARWPPFGLCLLLLLLSPPPLPLTGAHRFSAPNTTLNHLALAPGRGTLYVGAVNRLFQLSPELQLEAVAVTGPVIDSPDCVPFRDPAECPQAQLTDNANQLLLVSSRAQELVACGQVRQGVCETRRLGDVAEVLYQAEDPGDGQFVAANTPGVATVGLVVPLPGRDLLLVARGLAGKLSAGVPPLAIRQLAGSQPFSSEGLGRLVVGDFSDYNNSYVGAFADARSAYFVFRRRGARAQAEYRSYVARVCLGDTNLYSYVEVPLACQGQGLIQAAFLAPGTLLGVFAAGPRGTQAALCAFPMVELGASMEQARRLCYTAGGRGPSGAEEATVEYGVTSRCVTLPLDSPESYPCGDEHTPSPIAGRQPLEVQPLLKLGQPVSAVAALQADGHMIAFLGDTQGQLYKVFLHGSQGQVYHSQQVGPPGSAISPDLLLDSSGSHLYVLTAHQVDRIPVAACPQFPDCASCLQAQDPLCGWCVLQGRCTRKGQCGRAGQLNQWLWSYEEDSHCLHIQSLLPGHHPRQEQGQVTLSVPRLPILDADEYFHCAFGDYDSLAHVEGPHVACVTPPQDQVPLNPPGTDHVTVPLALMFEDVTVAATNFSFYDCSAVQALEAAAPCRACVGSIWRCHWCPQSSHCVYGEHCPEGERTIYSAQEVDIQVRGPGACPQVEGLAGPHLVPVGWESHLALRVRNLQHFRGLPASFHCWLELPGELRGLPATLEETAGDSGLIHCQAHQFYPSMSQRELPVPIYVTQGEAQRLDNTHALYVILYDCAMGHPDCSHCQAANRSLGCLWCADGQPACRYGPLCPPGAVELLCPAPSIDAVEPLTGPPEGGLALTILGSNLGRAFADVQYAVSVASRPCNPEPSLYRTSARIVCVTSPAPNGTTGPVRVAIKSQPPGISSQHFTYQDPVLLSLSPRWGPQAGGTQLTIRGQHLQTGGNTSAFVGGQPCPILEPVCPEAIVCRTRPQAAPGEAAVLVVFGHAQRTLLASPFRYTANPQLVAAEPSASFRGGGRLIRVRGTGLDVVQRPLLSVWLEADAEVQASRAQPQDPQPRRSCGAPAADPQACIQLGGGLLQCSTVCSVNSSSLLLCRSPAVPDRAHPQRVFFTLDNVQVDFASASGGQGFLYQPNPRLAPLSREGPARPYRLKPGHVLDVEGEGLNLGISKEEVRVHIGRGECLVKTLTRTHLYCEPPAHAPQPANGSGLPQFVVQMGNVQLALGPVQYEAEPPLSAFPVEAQAGVGMGAAVLIAAVLLLTLMYRHKSKQALRDYQKVLVQLESLETGVGDQCRKEFTDLMTEMTDLSSDLEGSGIPFLDYRTYAERAFFPGHGGCPLQPKPEGPGEDGHCATVRQGLTQLSNLLNSKLFLLTLIHTLEEQPSFSQRDRCHVASLLSLALHGKLEYLTDIMRTLLGDLAAHYVHRNPKLMLRRTETMVEKLLTNWLSICLYAFLREVAGEPLYMLFRAIQYQVDKGPVDAVTGKAKRTLNDSRLLREDVEFQPLTLMVLVGPGAGGAAGSSEMQRVPARVLDTDTITQVKEKVLDQVYKGTPFSQRPSVHALDLEWRSGLAGHLTLSDEDLTSVTQNHWKRLNTLQHYKVPDGATVGLVPQLHRGSTISQSLAQRCPLGENIPTLEDGEEGGVCLWHLVKATEEPEGAKVRCSSLREREPARAKAIPEIYLTRLLSMKGTLQKFVDDTFQAILSVNRPIPIAVKYLFDLLDELAEKHGIEDPGTLHIWKTNSLLLRFWVNALKNPQLIFDVRVSDNVDAILAVIAQTFIDSCTTSEHKVGRDSPVNKLLYAREIPRYKQMVERYYADIRQSSPASYQEMNSALAELSGNYTSAPHCLEALQELYNHIHRYYDQIISALEEDPVGQKLQLACRLQQVAALVENKVTDL

SEQ ID NO: 8699 - protein, 453 aa, Homo sapiens
MKLLVILLFSGLITGFRSDSSSSLPPKLLLVSFDGFRADYLKNYEFPHLQNFIKEGVLVEHVKNVFITKTFPNHYSIVTGLYEESHGIVANSMYDAVTKKHFSDSNDKDPFWWNEAVPIWVTNQLQENRSSAAAMWPGTDVPIHDTISSYFMNYNSSVSFEERLNNITMWLNNSNPPVTFATLYWEEPDASGHKYGPEDKENMSRVLKKIDDLIGDLVQRLKMLGLWENLNVIITSDHGMTQCSQDRLINLDSCIDHSYYTLIDLSPVAAILPKINRTEVYNKLKNCSPHMNVYLKEDIPNRFYYQHNDRIQPIILVADEGWTIVLNESSQKLGDHGYDNSLPSMHPFLAAHGPAFHKGYKHSTINIVDIYPMMCHILGLKPHPNNGTFGHTKCLLVDQWCINLPEAIAIVIGSLLVLTMLTCLIIIMQNRLSVPRPFSRLQLQEDDDDPLIG

SEQ ID NO: 8700 - protein, 740 aa, Homo sapiens
ESEPQPEPCPGRAGAAARARWCPQPRPLVLLSLGALEFVSLSQQAFQICPVFVVCGLYQDGNSNKSFLLRSWCLHPEGTVCASSPERKDLPEALGNDPGTPGQRGLKLFGKAAGLLGKMAMAPSPSLVQVYTSPAAVAVWEWQDGLGTWHPYSATVCSFIEQQFVQQKGQRFGLGSLAHSIPLGQADPSLAPYIIDLPSWTQFRQDTGTMRAVRRHLFPQHSAPGRGVVWEWLSDDGSWTAYEASVCDYLEQQVARGNQLVDLAPLGYNYTVNYTTHTQTNKTSSFCRSVRRQAGPPYPVTTIIAPPGHTGVACSCHQCLSGSRTGPVSGRYRHSMTNLPAYPVPQHPPHRTASVFGTHQAFAPYNKPSLSGARSAPRLNTTNAWGAAPPSLGSQPLYRSSLSHLGPQHLPPGSSTSGAVSASLPSGPSSSPGSVPATVPMQMPKPSRVQQALAGMTSVLMSAIGLPVCLSRAPQPTSPPASRLASKSHGSVKRLRKMSVKGATPKPEPEPEQVIKNYTEELKVPPDEDCIICMEKLSTASGYSDVTDSKAIGSLAVGHLTKCSHAFHLLCLLAMYCNGNKDGSLQCPSCKTIYGEKTGTQPQGKMEVLRFQMSLPGHEDCGTILIVYSIPHGIQGPEHPNPGKPFTARGFPRQCYLPDNAQGRKVLELLKVAWKRRLIFTVGTSSTTGETDTVVWNEIHHKTEMDRNITGHGYPDPNYLQNVLAELAAQGVTEDCLEQQ

SEQ ID NO: 8701 - protein, 575 aa, Homo sapiens [sequence omitted]

SEQ ID NO: 8702 - protein, 587 aa, Homo sapiens
MMETPLPKAPEKRQVTAIIFLLLLWEAGSATIKYSVLEERDSGSFVANLAKDLGLGVGELAARGARILSKGNKQYLQLERKSGNLLLKEKLDREELCGDIDPCILHFQMLLKNPVQFIQGELQLQDVNDHAPEFLENEILLKISEGSHPGTSFPLKIAQDLDVGSNTVQNYSISTNSYFHLFTRNHSDGKKYPELVLDQALDREEQPQLRLTLTALDGGSPPRTGTSQVLIVIVDINDNVPEFAQRRYEVQVPENTPIGSLVITVSARDLDAGTHGELSYSFFQYSNQIIQAFEINSITGEIRFKKALDFEEIQSYHMEVEASDGGGLSGKCTVAIEVMDINDNAPELTMSLLISDILENSPETVVAVFGISDPDSGNNGKMMCSIQDHLPFLLKPTLENFYTLLTEGALDRESRAEYNITITVTDLGTPRLKTEYNITLRVSDVNDNAPAFTQTSYTLFVRENNSPALHIGSVSATDRDSGTNAQVTYSLLPPQNPHLPLASLVSINTDNGHLFALRSLDYEALQEFEFRVGASDRGSPALSSEALVRVLVCWTPTTTRPSCCTRCRTAPRPAPSWCPGRPSRATW

SEQ ID NO: 8703 - protein, 692 aa, Homo sapiens
MELLPLWLCLGFHFLTVGWRNRSGTATAASQGVCKLVGGAADCRGQSLASVPSSLPPHARMLTLDANPLKTLWNHSLQPYPLLESLSLHSCHLERISRGAFQEQGHLRSLVLGDNCLSENYEETAAALHALPGLRRLDLSGNALTEDMAALMLQNLSSLRSVSLAGNTIMRLDDSVFEGLERLRELDLQRNYIFEIEGGAFDGLAELRHLNLAFNNLPCIVDFGLTRLRVLNVSYNVLEWFLATGGEAAFELETLDLSHNQLLFFPLLPQYSKLRTLLLRDNNMGFYRDLYNTSSPREMVAQFLLVDGNVTNITTVSLWEEFSSSDLADLRFLDMSQNQFQYLPDGFLRKMPSLSHLNLHQNCLMTLHIREHEPPGALTELDLSHNQLSELHLAPGLASCLGSLRLFNLSSNQLLGVPPGLFANARNITTLDMSHNQISLCPLPAASDRVGPPSCVDFRNMASLRSLSLEGCGLGALPDCPFQGTSLTYLDLSSNWGVLNGSLAPLQDVAPMLQVLSLRNMGLHSSFMALDFSGFGNLRDLDLSGNCLTTFPRFGGSLALETLDLRRNSLTALPQKAVSEQLSRGLRTIYLSQNPYDCCGVDGWGALQHGQTVADWAMVTCNLSSKIIRVTELPGGVPRDCKWERLDLGLLYLVLILPSCLTLLVACTVIVLTFKKPLLQVIKSRCHWSSVY

SEQ ID NO: 8704 - protein, 517 aa, Homo sapiens
MLRAAARFGPRLGRRLLSAAATQAVPAPNQQPEVFCNQIFINNEWHDAVSRKTFPTVNPSTGEVICQVAEGDKEDVDKAVKAARAAFQLGSPWRRMDASHRGRLLNRLADLIERDRTYLAALETLDNGKPYVISYLVDLDMVLKCLRYYAGWADKYHGKTIPIDGDFFSYTRHEPVGVCGQIIPWNFPLLMQAWKLGPALATGNVVVMKVAEQTPLTALYVANLIKEAGFPPGVVNIVPGFGPTAGAAIASHEDVDKVAFTGSTEIGRVIQVAAGSSNLKRVTLELGGKSPNIIMSDADMDWAVEQAHFALFFNQGQCCCAGSRTFVQEDIYDEFVERSVARAKSRVVGNPFDSKTEQGPQVDETQFKKILGYINTGKQEGAKLLCGGGIAADRGYFIQPTVFGDVQDGMTIAKEEIFGPVMQILKFKTIEEVVGRANNSTYGLAAAVFTKDLDKANYLSQALQAGTVWVNCYDVFGAQSPFGGYKMSGSGRELGEYGLQAYTEVKTVTVKVPQKNS

SEQ ID NO: 8705 - protein, 158 aa, Homo sapiens
DRGVVGARRSLAVPSTSAAASLTGCLAAASGEEQTLTLSVRKMSAPAQPPAEGTEGTAPGGGPPGPPPNMTSNRRLQQTQAQVEEVVDIIRVNVDKVLERDQKLSELDDRADALQAGASQFESSAAKLKRKYWWKNCKMMIMLGAICAIIVVVIVRRD

SEQ ID NO: 8706 - protein, 248 aa, Homo sapiens
MALCEAAGCGSALLWPRLLLFGDSITQFSFQQGGWGASLADRLVRKCDVLNRGFSGYNTRWAKIILPRLIRKGNSLDIPVAVTIFFGANDSALKDENPKQHIPLEEYAANLKSMVQYLKSVDIPENRVILITPTPLCETAWEEQCIIQGCKLNRLNSVVGEYANACLQVAQDCGTDVLDLWTLMQDSQDFSSYLSDGLHLSPKGNEFLFSHLWPLIEKKVSSLPLLLPYWRDVAEAKPELSLLGDGDH

SEQ ID NO: 8707 - protein, 903 aa, Homo sapiens
MAAVAGSGAAAAPSSLLLVVGSEFGSPGLLTYVLEELERGIRSWDVDPGVCNLDEQLKVFVSRHSATFSSIVKGQRSLHHRGDNLETLVLLNPSDKSLYDELRNLLLDPASHKLLVLAGLCLEETGELLLQTGGFSPHHFLQVLKDREIRDILATTPPPVQPPILTITCPTFGDWAQPAPAVPGLQGALRLQLRLNPPAQLPNSEGLCEFLEYVAESLEPPSPFELLEPPTSGGFLRLGRPCCYIFPGGLGDAAFFAVNGFTVLVNGGSNPKSSFWKLVRHLDRVDAVLVTHPGADSLPGLNSLLRRKLAERSEVAAGGGSWDDRLRRLISPNLGVVFFNACEAASRLARGEDEAELALSLLAQLGITPLPLSRGPVPAKPTVLFEKMGVGRLDMYVLHPPSAGAERTLASVCALLVWHPAGPGEKVVRVLFPGCTPPACLLDGLVRLQHLRFLREPVVTPQDLEGPGRAESKESVGSRDSSKREGLLATHPRPGQERPGVARKEPARAEAPRKTEKEAKTPRELRKDPKPSVSRTQPREVRRAASSVPNLKKTNAQAAPKPRKAPSTSHSGFPPVANGPRSPPSLRCGEASPPSAACGSPASQLVATPSLELGPIPAGEEKALELPLAASSIPRPRTPSPESHRSPAEGSERLSLSPLRGGEAGPDASPTVTTPTVTTPSLPAEVGSPHSTEVDESLSVSFEQVLPPSAPTSEAGLSLPLRGPRARRSASPHDVDLCLVSPCEFEHRKAVPMAPAPASPGSSNDSSARSQERAGGLGAEETPPTSVSESLPTLSDSDPVPLAPGAADSDEDTEGFGVPRHDPLPDPLKVPPPLPDPSSICMVDPEMLPPQDSTANGERQPHPEAPGPPQLTRCRPQSHSSGCCQNQGACWWGPCQPTTQCPE

SEQ ID NO: 8708 - protein, 511 aa, Homo sapiens
MYRALRLLARSRPLVRAPAAALASAPGLGGAAVPSFWPPNAARMASQNSFRIEYDTFGELKVPNDKYYGAQTVRSTMNFKIGGVTERMPTPVIKAFGILKRAAAEVNQDYGLDPKIANAIMKAADEVGAEGKLNDHFPLVVWQTGSGTQTNMNVNEVISNRAIEMLGGELGSKIPVHPNDHVNKSQSSNDTFPTAMHIAAAIEVHEVLLPGLQKLHDALDAKSKEFAQIIKIGRTHTQDAVPLTLGQEFSGYVQQVKYAMTRIKAAMPRIYELAAGGTAVGTGLNTRIGFAEKVAAKVAALTGLPFVTAPNKFEALAAHDALVELSGAMNTTACSLMKIANDIRFLGSGPRSGLGELILPENEPGSSIMPGKVNPTQCEAMTMVAAQVMGNHVAVTVGGSNGHFELNVFKPMMIKNVLHSARLLGDASVSFTENCVVGIQANTERINKLMNESLMLVTALNPHIGYDKAAKIAKTAHKNGSTLKETAIELGYLTAEQFDEWVKPKDMLGPK

SEQ ID NO: 8709 - protein, 113 aa, Homo sapiens
MNFYLLLASSILCALIVFWKYRRFQRNTGEMSSNSTALALVRPSSSGLINSNTDNNLAVYDLSRDILNNFPHSIARQKRILVNLSMVENKLVELEHTLLSKGFRGASPHRKST

SEQ ID NO: 8710 - protein, 283 aa, Homo sapiens
MQTDSLSPSPNPVSPVPLNNPTSAPRYGTVIPNRIFVGGIDFKTNESDLRKFFSQYGSVKEVKIVNDRAGVSKGYGFVTFETQEDAQKILQEAEKLNYKDKKLNIGPAIRKQQVGIPRSSIMPAAGTMYLTTSTGYPYTYHNGVAYFHTPEVTSVPPPWPSRSVCSSPVMVAQPIYQQPAYHYQATTQYLPGQWQWSVPQPSASSAPFLYLQPSEVIYQPVEIAQDGGCVPPPLSLMETSVPEPYSDHGVQATYHQVYAPSAITMPAPVMQPEPIKTVWSIHY

SEQ ID NO: 8711 - protein, 382 aa, Homo sapiens
ALLLLTLKYFVGLARWLPPVIPALWEAKVGGSRGQEIETILAKMQTSNQMQTDSLSPSPNPVSPVPLNNPTSAPRYGTVIPNRIFVGGIDFKTNESDLRKFFSQYGSVKEVKIVNDRAGVSKGYGFVTFETQEDAQKILQEAEKLNYKDKKLNIGPAIRKQQVGIPRSSIMPAAGTMYLTTSTGYPYTYHNGVAYFHTPEVTSVPPPWPSRSVCSSPVMVAQPIYQQPAYHYQGIKQCHTRRWMDSLLPFTKCDEATTQYLPGQWQWSVPQPSASSAPFLYLQPSEVIYQPVEIAQDGGCVPPPLSLMETSVPEPYSDHGVQATYHQVYAPSAITMPAPVMQPEPIKCGAFIIKTIGQLYSSSTDFLSNDPCVAEIQLQRTS

SEQ ID NO: 8712 - protein, 295 aa, Homo sapiens
METESGPQTSNQMQTDSLSPSPNPVSPVPLNNPTSAPRYGTVIPNRIFVGGIDFKTNESDLRKFFSQYGSVKEVKIVNDRAGVSKGYGFVTFETQEDAQKILQEAEKLNYKDKKLNIGPAIRKQQVGIPRSSIMPAAGTMYLTTSTGYPYTYHNGVAYFHTPEVTSVPPPWPSRSVCSSPVMVAQPIYQQPAYHYQATTQYLPGQWQWSVPQPSASSAPFLYLQPSEVIYQPVEIAQDGGCVPPPLSLMETSVPEPYSDHGVQATYHQVYAPSAITMPAPVMQPEPIKTVWSIHY

SEQ ID NO: 8713 - protein, 550 aa, Homo sapiens
MVTAAMLLQCCPVLARGPTSLLGKVVKTHQFLFGIGRCPILATQGPNCSQIHLKATKAGGDSPSWAKGHCPFMLSELQDGKSKIVQKAAPEVQEDVKAFKTGNYVFSYDQFFRDKIMEKKQDHTYRVFKTVNRWADAYPFAQHFSEASVASKDVSVWCSNDYLGMSRHPQVLQATQETLQRHGVGAGGTRNISGTSKFHVELEQELAELHQKDSALLFSSCFVANDSTLFTLAKILPGCEIYSDAGNHASMIQGIRNSGAAKFVFRHNDPDHLKKLLEKSNPKIPKIVAFETVHSMDGAICPLEELCDVSHQYGALTFVDEVHAVGLYGSRGAGIGERDGIMHKIDIISGTLGKAFGCVGGYIASTRDLVDMVRSYAAGFIFTTSLPPMVLSGALESVRLLKGEEGQALRRAHQRNVKHMRQLLMDRGLPVIPCPSHIIPIRVGNAALNSKLCDLLLSKHGIYVQAINYPTVPRGEELLRLAPSPHHSPQMMEDFVEKLLLAWTAVGLPLQDVSVAACNFCRRPVHFELMSEWERSYFGNMGPQYVTTYA

SEQ ID NO: 8714 - protein, 1200 aa, Homo sapiens [sequence omitted]

SEQ ID NO: 8715 - protein, 1200 aa, Homo sapiens
MKVAGGLELGAAALLSASPRALVTLSTGPTCSILPKNPLFPQNLSSQPCIKMEGDKSLTFSSYGLQWCLYELDKEEFQTFKELLKKKSSESTTCSIPQFEIENANVECLALLLHEYYGASLAWATSISIFENMNLRTLSEKARDDMKRHSPEDPEATMTDQGPSKEKVPGISQAVQQDSATAAETKEQEISQAMEQEGATAAETEEQEISQAMEQEGATAAETEEQGHGGDTWDYKSHVMTKFAEEEDVRRSFENTAADWPEMQTLAGAFDSDRWGFRPRTVVLHGKSGIGKSALARRIVLCWAQGGLYQGMFSYVFFLPVREMQRKKESSVTEFISREWPDSQAPVTEIMSRPERLLFIIDGFDDLGSVLNNDTKLCKDWAEKQPPFTLIRSLLRKVLLPESFLIVTVRDVGTEKLKSEVVSPRYLLVRGISGEQRIHLLLERGIGEHQKTQGLRAIINNRELLDQCQVPAVGSLICVALQLQDVVGESVAPFNQTLTGLHAAFAFHQLTPRGVVRRCLNLEERVVLKRFCRMAVEGVWNRKSVFDGDDLMVQGLGESELRALFHMNILLPDSHCEEYYTFFHLSLQDFCAALYYVLEGLEIEPALCPLYVEKTKRSMELKQAGFHIHSLWMKRFLFGLVSEDVRRPLEVLLGCPVPLGVKQKLLHWVSLLGQQPNATTPGDTLDAFHCLFETQDKEFVRLALNSFQEVWLPINQNLDLIASSFCLQHCPYLRKIRVDVKGIFPRDESAEACPVVPLWMRDKTLIEEQWEDFCSMLGTHPHLRQLDLGSSILTERAMKTLCAKLRHPTCKIQTLMFRNAQITPGVQHLWRIVMANRNLRSLNLGGTHLKEEDVRMACEALKHPKCLLESLRLDCCGLTHACYLKISQILTTSPSLKSLSLAGNKVTDQGVTPLSDALRVSQCALQKLILEDCGITATGCQSLASALVSNRSLTHLCLSNNSLGNEGVNLLCRSMRLPHCSLQRLMLNQCHLDTAGCGSLALALMGNSWLTHLSLSMNPVEDNGVKLLCEVMREPSCHLQDLELVKCHLTAACCESLSCVISRSRHLKSLDLTDNALGDGGVAALCEGLKQKNSVLTRLGLKACGLTSDCCEALSLALSCNRHLTSLNLVQNNFSPKGMMKLCSAFACPTSNLQIIGLWKWQYPVQIRKLLEEVQLLKPRVVIDGSWHSFDEDDRYWWKN

SEQ ID NO: 8716 - protein, 729 aa, Homo sapiens
MPTGFVAPILCVLLPSPTREAATVASATGDSASERESAAPAAAPTAEAPPPSVVTRPEPQALPSPAIRAPLPDLYPFGTMRGGGFGDRDRDRDRGGFGARGGGGLPPKKFGNPGERLRKKKWDLSELPKFEKNFYVEHPEVARLTPYEVDELRRKKEITVRGGDVCPKPVFAFHHANFPQYVMDVLMDQHFTEPTPIQCQGFPLALSGRDMVGIAQTGSGKTLAYLLPAIVHINHQPYLERGDGPICLVLAPTRELAQQVQQVADDYGKCSRLKSTCIYGGAPKGPQIRDLERGVEICIATPGRLIDFLESGKTNLRRCTYLVLDEADRMLDMGFEPQIRKIVDQIRPDRQTLMWSATWPKEVRQLAEDFLRDYTQINVGNLELSANHNILQIVDVCMESEKDHKLIQLMEEIMAEKENKTIIFVETKRRCDDLTRRMRRDGWPAMCIHGDKSQPERDWVLNEFRSGKAPILIATDVASRGLDVEDVKFVINYDYPNSSEDYVHRIGRTARSTNKGTAYTFFTPGNLKQARELIKVLEEANQAINPKLMQLVDHRGGGGGGGGRSRYRTTSSANNPNLMYQDECDRRLRGVKDGGRRDSASYRDRSETDRAGYANGSGYGSPNSAFGAQAGQYTYGQGTYGAAAYGTSSYTAQEYGAGTYGASSTTSTGRSSQSSSQQFSGIGRSGQQPQPLMSQQFAQPPGATNMIGYMGQTAYQYPPPPPPPPPSRK

SEQ ID NO: 8717 - protein, 543 aa, Homo sapiens
MGTSLSPNDPWPLNPLSIQQTTLLLLLSVLATVHVGQRLLRQRRRQLRSAPPGPFAWPLIGNAAAVGQAAHLSFARLARRYGDVFQIRLGSCPIVVLNGERAIHQALVQQGSAFADRPAFASFRVVSGGRSMAFGHYSEHWKVQRRAAHSMMRNFFTRQPRSRQVLEGHVLSEARELVALLVRGSADGAFLDPRPLTVVAVANVMSAVCFGCRYSHDDPEFRELLSHNEEFGRTVGAGSLVDVMPWLQYFPNPVRTVFREFEQLNRNFSNFILDKFLRHCESLRPGAAPRDMMDAFILSAEKKAAGDSHGGGARLDLENVPATITDIFGASQDTLSTALQWLLLLFTRYPDVQTRVQAELDQVVGRDRLPCMGDQPNLPYVLAFLYEAMRFSSFVPVTIPHATTANTSVLGYHIPKDTVVFVNQWSVNHDPVKWPNPENFDPARFLDKDGLINKDLTSRVMIFSVGKRRCIGEELSKMQLFLFISILAHQCDFRANPNEPAKMNFSYGLTIKPKSFKVNVTLRESMELLDSAVQNLQAKETCQ

SEQ ID NO: 8718 - protein, 4590 aa, Homo sapiens
MGRHLALLLLLLLLFQHFGDSDGSQRLEQTPLQFTHLEYNVTVQENSAAKTYVGHPVKMGVYITHPAWEVRYKIVSGDSENLFKAEEYILGDFCFLRIRTKGGNTAILNREVKDHYTLIVKALEKNTNVEARTKVRVQVLDTNDLRPLFSPTSYSVSLPENTAIRTSIARVSATDADIGTNGEFYYSFKDRTDMFAIHPTSGVIVLTGRLDYLETKLYEMEILAADRGMKLYGSSGISSMAKLTVHIEQANECAPVITAVTLSPSELDRDPAYAIVTVDDCDQGANGDIASLSIVAGDLLQQFRTVRSFPGSKEYKVKAIGDIDWDSHPFGYNLTLQAKDKGTPPQFSSVKVIHVTSPQFKAGPVKFEKDVYRAEISEFAPPNTPVVMVKAIPAYSHLRYVFKRTPGKAKFSLNYNTGLISILEPVKRQQAAHFELEVTTSDRKASTKVLVKVLGANSNPPEFTQTAYKAAFDENVPIGTTIMSLSAVDPDEGENGYVTYSIANLNHVPFAIDHFTGAVSTSENLDYELMPRVYTLRIRASDWGLPYRREVEVLATITLNNLNDNTPLFEKINCEGTIPRDLGVGEQITTVSAIDADELQLVQYQIEAGNELDLFSLNPNSGVLSLKRSLMDGLGAKVSFHSLRITATDGENFATPLYINITVAASHKLVNLQCEETGVAKMLAEKLLQANKLHNQGEVEDIFFDSHSVNAHIPQFRSTLPTGIQVKENQPVGSSVIFMNSTDLDTGFNGKLVYAVSGGNEDSCFMIDMETGMLKILSPLDRETTDKYTLNITVYDLGIPQKAAWRLLHVVVVDANDNPPEFLQESYFVEVSEDKEVHSEIIQVEATDKDLGPNGHVTYSILTDTDTFSIDSVTGVVNIARPLDRELQHEHSLKIEARDQAREEPQLFSTVVVKVSLEDVNDNPPTFIPPNYRVKVREDLPEGTVIMWLEAHDPDLGQSGQVRYSLLDHGEGNFDVDKLSGAVRIVQQLDFEKKQVYNLTVRAKDKGKPVSLSSTCYVEVEVVDVNENLHPPVFSSFVEKGTVKEDAPVGSLVMTVSAHDEDAGRDGEIRYSIRDGSGVGVFKIGEETGVIETSDRLDRESTSHYWLTVFATDQGVVPLSSFIEIYIEVEDVNDNAPQTSEPVYYPEIMENSPKDVSVVQIEAFDPDSSSNDKLMYKITSGNPQGFFSIHPKTGLITTTSRKLDREQQDEHILEVTVTDNGSPPKSTIARVIVKILDENDNKPQFLQKFYKIRLPEREKPDRERNARREPLYRVIATDKDEGPNAEISYSIEDGNEHGKFFIEPKTGVVSSKRFSAAGEYDILSIKAVDNGRPQKSSTTRLHIEWISKPKQSLEPISFEESFFTFTVMESDPVAHMIGVISVEPPGIPLWFDITGGNYDSHFDVDKGTGTIIVAKPLDAEQKSNYNLTVEATDGTTTILTQVFIKVIDTNDHRPQFSTSKYEVVIPEDTAPETEILQISAVDQDEKNKLIYTLQSSRDPLSLKKFRLDPATGSLYTSEKLDHEAVSPAHLTVMVRDQDVPVKRNFARIVVNVSDTNDHAPWFTASSYKGRVYESAAVGSVVLQVTALDKDKGKNAEVLYSIESGNIGNIGNSFMIDPVLGSIKTAKELDRSNQAEYDLMVKATDKGSPPMSEITSVRIFVTIADNASPKFTSKEYSVELSETVSIGSFVGMVTAHSQSSVVYEIKDGNTGDAFDINPHSGTIITQKALDFETLPIYTLIIQGTNMAGLSTNTTVLVHLQDENDNAPVFMQAEYTGLISESASINSVVLTDRNVPLVIRAADADKDSNALLVYHIVEPSVHTYFAIDSSTGAIHTVLSLDYEETSIFHFTVQVHDMGTPRLFAEYAANVTVHVIDINDCPPVFAKPLYEASLLLPTYKGVKVITVNATDADSSAFSQLIYSITEGNIGEKFSMDYKTGALTVQNTTQLRSRYELTVRASDGRFAGLTSVKINVKESKESHLKFTQDVYSAVVKENSTEAETLAVITAIGSPINEPLFYHILNPDRRFKISRTSGVLSTTGTPFDREQQEAFDVVVEVIEEHKPSAVAHVVVKVIVEDQNDNAPVFVNLPYYAVVKVDTEVGHVIRYVTAVDRDSGRNGEVHYYLKEHHEHFQIGPLGEISLKKQFELDTLNKEYLVTVVAKDGGNPAFSAEVIVPITVMNKAMPVFEKPFYSAEIAESIQVHSPVVHVQANSPEGLKVFYSITDGDPFSQFTINFNTGVINVIAPLDFEAHPAYKLSIRATDSLTGAHAEVFVDIIVDDINDNPPVFAQQSYAVTLSEASVIGTSVVQVRATDSDSEPNRGISYQMFGNHSKSHDHFHVDSSTGLISLLRTLDYEQSRQHTIFVRAVDGGMPTLSSDVIVTVDVTDLNGNPPLFEQQIYEARISEHAPHGHFVTCVKAYDADSSDIDKLQYSILSGNDHKHFVIDSATGIITLSNLHRHALKPFYSLNLSVSDGVFRSSTQVHVTVIGGNLHSPAFLQNEYEVELAENAPLHTLVMEVKTTDGDSGIYGHVTYHIVNDFAKDRFYINERGQIFTLEKLDRETPAEKVISVRLMAKDAGGKVAFCTVNVILTDDNDNAPQFRATKYEVNIGSSAAKGTSVVKSASDADEGSNADITYAIEADSESVKENLEINKLSGVITTKESLIGLENEFFTFFVRAVDNGSPSKESVVLVYVKILPPEMQLPKFSEPFYTFTVSEDVPVGTEIDLIRAEHSGTVLYSLVKGNTPESNRDESFVIDRQSGRLKLEKSLDHETTKWYQFSILARCTQDDHEMVASVDVSIQVKDANDNSPVFESSPYEAFIVENLPGGSRVIQIRASDADSGTNGQVMYSLDQSQSVEVIESFAINMETGWITTLKELDHEKRDNYQIKVVASDHGEKIQLSSTAIVDVTVTDVNDSPPRFTAEIYKGTVSEDDPQGGVIAILSTTDADSEEINRQVTYFITGGDPLGQFAVETIQNEWKVYVKKPLDREKRDNYLLTITATDGTFSSKAIVEVKVLDANDNSPVCEKTLYSDTIPEDVLPGKLIMQISATDADIRSNAEITYTLLGSGAEKFKLNPDTGELKTSTPLDREEQAVYHLLVRATDGGGRFCQASIVVTLEDVNDNAPEFSADPYAITVFENTEPGTLLTRVQATDADAGLNRKILYSLIDSADGQFSINELSGIIQLEKPLDRELQAVYTLSLKAVDQGLPRRLTATGTVIVSVLDINDNPPVFEYREYGATVSEDILVGTEVLQVYAASRDIEANAEITYSIISGNEHGKFSIDSKTGAVFIIENLDYESSHEYYLTVEATDGGTPSLSDVATVNVNVTDINDNTPVFSQDTYTTVISEDAVLEQSVITVMADDADGPSNSHIHYSIIDGNQGSSFTIDPVRGEVKVTKLLDRETISGYTLTVQASDNGSPPRVNTTTVNIDVSDVNDNAPVFSRGNYSVIIQENKPVGFSVLQLVVTDEDSSHNGPPFFFTIVTGNDEKAFEVNPQGVLLTSSAIKRKEKDHYLLQVKVADNGKPQLSSLTYIDIRVIEESIYPPAILPLEIFITSSGEEYSGGVIGKIHATDQDVYDTLTYSLDPQMDNLFSVSSTGGKLIAHKKLDIGQYLLNVSVTDGKFTTVADITVHIRQVTQEMLNHTIAIRFANLTPEEFVGDYWRNFQRALRNILGVRRNDIQIVSLQSSEPHPHLDVLLFVEKPGSAQISTKQLLHKINSSVTDIEEIIGVRILNVFQKLCAGLDCPWKFCDEKVSVDESVMSTHSTARLSFVTPRHHRAAVCLCKEGRCPPVHHGCEDDPCPEGSECVSDPWEEKHTCVCPSGRFGQCPGSSSMTLTGNSYVKYRLTENENKLEMKLTMRLRTYSTHAVVMYARGTDYSILEIHHGRLQYKFDCGSGPGIVSVQSIQVNDGQWHAVALEVNGNYARLVLDQVHTASGTAPGTLKTLNLDNYVFFGGHIRQQGTRHGRSPQVGNGFRGCMDSIYLNGQELPLNSKPRSYAHIEESVDVSPGCFLTATEDCASNPCQNGGVCNPSPAGGYYCKCSALYIGTHCEISVNPCSSNPCLYGGTCVVDNGGFVCQCRGLYTGQRCQLSPYCKDEPCKNGGTCFDSLDGAVCQCDSGFRGERCQSDIDECSGNPCLHGALCENTHGSYHCNCSHEYRGRHCEDAAPNQYVSTPWNIGLAEGIGIVVFVAGIFLLVVVFVLCRKMISRKKKHQAEPKDKHLGPATAFLQRPYFDSKLNKNIYSDIPPQVPVRPISYTPSIPSDSRNNLDRNSFEGSAIPEHPEFSTFNPESVHGHRKAVAVCSVAPNLPPPPPSNSPSDSDSIQKPSWDFDYDTKVVDLDPCLSKKPLEEKPSQPYSARESLSEVQSLSSFQSESCDDNGYHWDTSDWMPSVPLPDIQEFPNYEVIDEQTPLYSADPNAIDTDYYPGGYDIESDFPPPPEDFPAADELPPLPPEFSNQFESIHPPRDMPAAGSLGSSSRNRQRFNLNQYLPNFYPLDMSEPQTKGTGENSTCREPHAPYPPGYQRHFEAPAVESMPMSVYASTASCSDVSACCEVESEVMMSDYESGDDGHFEEVTIPPLDSQQHTEV

SEQ ID NO: 8719 - protein, 1116 aa, Homo sapiens
MERAISPGLLVRALLLLLLLLGLAARTVAAGRARGLPAPTAEAAFGLGAAAAPTSATRVPAAGAVAAAEVTVEDAEALPAAAGEQEPRGPEPDDETELRPRGRSLVIISTLDGRIAALDPENHGKKQWDLDVGSGSLVSSSLSKPEVFGNKMIIPSLDGALFQWDQDRESMETVPFTVESLLESSYKFGDDVVLVGGKSLTTYGLSAYSGKVRYICSALGCRQWDSDEMEQEEDILLLQRTQKTVRAVGPRSGNEKWNFSVGHFELRYIPDMETRAGFIESTFKPNENTEESKIISDVEEQEAAIMDIVIKVSVADWKVMAFSKKGGHLEWEYQFCTPIASAWLLKDGKVIPISLFDDTSYTSNDDVLEDEEDIVEAARGATENSVYLGMYRGQLYLQSSVRISEKFPSSPKALESVTNENAIIPLPTIKWKPLIHSPSRTPVLVGSDEFDKCLSNDKFSHEEYSNGALSILQYPYDNGYYLPYYKRERNKRSTQITVRFLDNPHYNKNIRKKDPVLLLHWWKEIVATILFCIIATTFIVRRLFHPHPHRQRKESETQCQTENKYDSVSGEANDSSWNDIKNSGYISRYLTDFEPIQCLGRGGFGVVFEAKNKVDDCNYAIKRIRLPNRELAREKVMREVKALAKLEHPGIVRYFNAWLEAPPEKWQEKMDEIWLKDESTDWPLSSPSPMDAPSVKIRRMDPFATKEHIEIIAPSPQRSRSFSVGISCDQTSSSESQFSPLEFSGMDHEDISESVDAAYNLQDSCLTDCDVEDGTMDGNDEGHSFELCPSEASPYVRSRERTSSSIVFEDSGCDNASSKEEPKTNRLHIGNHCANKLTAFKPTSSKSSSEATLSISPPRPTTLSLDLTKNTTEKLQPSSPKVYLYIQMQLCRKENLKDWMNGRCTIEERERSVCLHIFLQIAEAVEFLHSKGLMHRDLKPSNIFFTMDDVVKVGDFGLVTAMDQDEEEQTVLTPMPAYARHTGQVGTKLYMSPEQIHGNSYSHKVDIFSLGLILFELLYPFSTQMERVRTLTDVRNLKFPPLFTQKYPCEYVMVQDMLSPSPMERPEAINIIENAVFEDLDFPGKTVLRQRSRSLSSSGTKHSRQSNNSHSPLPSN

SEQ ID NO: 8720 - protein, 828 aa, Homo sapiens
MARLCRRVPCTLLLGLAVVLLKARLVPAAARAELSRSDLSLIQQQQQQQQQQQQQQQQKQLEEAEEERTEVPGATSTLTVPVSVFMLKVQVNDIISRQYLSQAVVEVFVNYTKTNSTVTKSNGAVLIKVPYKLGLSLTIIAYKDGYVLTPLPWKTRRMPIYSSVTLSLFPQSQANIWLFEDTVLITGKLADAKSQPSVQFSKALIKLPDNHHISNVTGYLTVLQQFLKVDNFLHTTGITLNKPGFENIELTPLAAICVKIYSGGKELKVNGSIQVSLPLLRLNDISAGDRIPAWTFDMNTGAWINHGRGMVKEHNNHLIWTYDAPHLGYWIAAPLPGTRGSGINEDSKDITAYHTVFLTAILGGTIVIVIGFFAVLLCYCRDKCGTPQKRERNITKLEVLKRDQTTSTTHINHISTVKVALKAEDKSQLFNAKNSSYSPQKKEPSKAETEERVSMVKTRDDFKIYNEDVSFLSVNQNNYSRNPTQSLEPNVGSKQPKHINNNLSSSLGDAQDEKRYLTGNEEAYGRSHIPEQLMHIYSQPIAILQTSDLFSTPEQLHTAKSATLPRKGQLVYGQLMEPVNRENFTQTLPKMPIHSHAQPPDAREEDIILEGQQSLPSQASDWSRYSSSLLESVSVPGTLNEAVVMTPFSSELQGISEQTLLELSKGKPSPHPRAWFVSLDGKPVAQVRHSFIDLKKGKRTQSNDTSLDSGVDMNELHSSRKLEREKTFIKSMHQPKILYLEDLDLSSSESGTTVCSPEDPALRHILDGGSGVIMEHPGEESPGRKSTVEDFEANTSPTKRRGRPPLAKRDSKTNIWKKREERPLIPIN

SEQ ID NO: 8721 - protein, 296 aa, Homo sapiens
MLTPPLLLLLPLLSALVAAAIDAPKTCSPKQFACRDQITCISKGWRCDGERDCPDGSDEAPEICPQSKAQRCQPNEHNCLGTELCVPMSRLCNGVQDCMDGSDEGPHCRELQGNCSRLGCQHHCVPTLDGPTCYCNSSFQLQADGKTCKDFDECSVYGTCSQLCTNTDGSFICGCVEGYLLQPDNRSCKAKNEPVDRPPVLLIANSQNILATYLSGAQVSTITPTSTRQTTAMDFSYANETVCWVHVGDSAAQTQLKCARMPGLKGFVDEHTINISLSLHRRSRKRAQENEVTQHG

SEQ ID NO: 8722 - protein, 402 aa, Homo sapiens
MTVFLSFAFLAAILTHIGCSNQRRSPENSGRRYNRIQHGQCAYTFILPEHDGNCRESTTDQYNTNALQRDAPHVEPDFSSQKLQHLEHVMENYTQWLQKLENYIVENMKSEMAQIQQNAVQNHTATMLEIGTSLLSQTAEQTRKLTDVETQVLNQTSRLEIQLLENSLSTYKLEKQLLQQTNEILKIHEKNSLLEHKILEMEGKHKEELDTLKEEKENLQGLVTRQTYIIQELEKQLNRATTNNSVLQKQQLELMDTVHNLVNLCTKEGVLLKGGKREEEKPFRDCADVYQAGFNKSGIYTIYINNMPEPKKVFCNMDVNGGGWTVIQHREDGSLDFQRGWKEYKMGFGNPSGEYWLGNEFIFAITSQRQYMLRIELMDWEGNRAYSQYDRFHIGNEKQNYR

SEQ ID NO: 8723 - protein, 498 aa, Homo sapiens
MTVFLSFAFLAAILTHIGCSNQRRSPENSGRRYNRIQHGQCAYTFILPEHDGNCRESTTDQYNTNALQRDAPHVEPDFSSQKLQHLEHVMENYTQWLQKLENYIVENMKSEMAQIQQNAVQNHTATMLEIGTSLLSQTAEQTRKLTDVETQVLNQTSRLEIQLLENSLSTYKLEKQLLQQTNEILKIHEKNSLLEHKILEMEGKHKEELDTLKEEKENLQGLVTRQTYIIQELEKQLNRATTNNSVLQKQQLELMDTVHNLVNLCTKEGVLLKGGKREEEKPFRDCADVYQAGFNKSGIYTIYINNMPEPKKVFCNMDVNGGGWTVIQHREDGSLDFQRGWKEYKMGFGNPSGEYWLGNEFIFAITSQRQYMLRIELMDWEGNRAYSQYDRFHIGNEKQNYRLYLKGHTGTAGKQSSLILHGADFSTKDADNDNCMCKCALMLTGGWWFDACGPSNLNGMFYTAGQNHGKLNGIKWHYFKGPSYSLRSTTMMIRPLDF

SEQ ID NO: 8724 - protein, 437 aa, Homo sapiens
MGRRMRGAAATAGLWLLALGSLLALWGGLLPPRTELPASRPPEDRLPRRPARSGGPAPAPRFPLPPPLAWDARGGSLKTFRALLTLAAGADGPPRQSRSEPRWHVSARQPRPEESAAVHGGVFWSRGLEEQVPPGFSEAQAAAWLEAARGARMVALERGGCGRSSNRLARFADGTRACVRYGINPEQIQGEALSYYLARLLGLQRHVPPLALARVEARGAQWAQVQEELRAAHWTEGSVVSLTRWLPNLTDVVVPAPWRSEDGRLRPLRDAGGELANLSQAELVDLVQWTDLILFDYLTANFDRLVSNLFSLQWDPRVMQRATSNLHRGPGGALVFLDNEAGLVHGYRVAGMWDKYNEPLLQSVCVFRERTARRVLELHRGQDAAARLLRLYRRHEPRFPELAALADPHAQLLQRRLDFLAKHILHCKAKYGRRSGT

SEQ ID NO: 8725 - protein, 453 aa, Homo sapiens [sequence omitted]

SEQ ID NO: 8726 - protein, 161 aa, Homo sapiens
MVPKLFTSQICLLLLLGLLAVEGSLHVKPPQFTWAQWFETQHINMTSQQCTNAMQVINNYQRRCKNQNTFLLTTFANVVNVCGNPNMTCPSNKTRKNCHHSGSQVPLIHCNLTTPSPQNISNCRYAQTPANMFYIVACDNRDQRRDPPQYPVVPVHLDRII

SEQ ID NO: 8727 - protein, 435 aa, Homo sapiens
MLLPWATSAPGLAWGPLVLGLFGLLAASQPQAVPPYASENQTCRDQEKEYYEPQHRICCSRCPPGTYVSAKCSRIRDTVCATCAENSYNEHWNYLTICQLCRPCDPVMGLEEIAPCTSKRKTQCRCQPGMFCAAWALECTHCELLSDCPPGTEAELKDEVGKGNNHCVPCKAGHFQNTSSPSARCQPHTRCENQGLVEAAPGTAQSDTTCKNPLEPLPPEMSGTMLMLAVLLPLAFFLLLATVFSCIWKSHPSLCRKLGSLLKRRPQGEGPNPVAGSWEPPKAHPYFPDLVQPLLPISGDVSPVSTGLPAAPVLEAGVPQQQSPLDLTREPQLEPGEQSQVAHGTNGIHVTGGSMTITGNIYIYNGPVLGGPPGPGDLPATPEPPYPIPEEGDPGPPGLSTPHQEDGKAWHLAETEHCGATPSNRGPRNQFITHD

SEQ ID NO: 8728 - protein, 127 aa, Homo sapiens
MAYFGGTLYWLIFSTPFLLLGLVPEQIKPSVSQPQPANSNNGTSTATSTNNNAKRATANNQQPQQQQQQQQPQQQQPQQQPQPQPQQQQPQQQPQALPRYPREVPPRFRHQEHKQLLKRGQHFPVEF

SEQ ID NO: 8729 - protein, 1723 aa, Homo sapiens
QPCMAAAPSALLLLPPFPVLSTYRLQSRSRPSAPETDDSRVGGIMRGEKNYYFRGAAGDHGSCPTTTSPLASALLMPSEAVSSSWSESGGGLSGGDEEDTRLLQLLRTARDPSEAFQALQAALPRRGGRLGFPRRKEALYRALGRVLVEGGSDEKRLCLQLLSDVLRGQGEAGQLEEAFSLALLPQLVVSLREENPALRKDALQILHICLKRSPGEVLRTLIQQGLESTDARLRASTALLLPILLTTEDLLLGLDLTEVIISLARKLGDQETEEESETAFSALQQIGERLGQDRFQSYISRLPSALRRHYNRRLESQFGSQVPYYLELEASGFPEDPLPCAVTLSNSNLKFGIIPQELHSRLLDQEDYKNRTQAVEELKQVLGKFNPSSTPHSSLVGFISLLYNLLDDSNFKVVHGTLEVLHLLVIRLGEQVQQFLGPVIAASVKVLADNKLVIKQEYMKIFLKLMKEVGPQQVLCLLLKHLKHKHSRVREEVVNICICSLLTYPSEDFDLPKLSFDLAPALVDSKRRVRQAALEAFAVLASSMGSGKTSILFKAVDTVELQDNGDGVMNAVQARLARKTLPRLTEQGFVEYAVLMPSSAGGRSNHLAHGADTDWLLAGNRTQSAHCHCGDHVRDSMHIYGSYSPTICTRRVLSAGKGKNKLPWENEQPGIMGENQTSTSKDIEQFSTYDFIPSAKLKLSQGMPVNDDLCFSRKRVSRNLFQNSRDFNPDCLPLCAAGTTGTHQTNLSGKCAQLGFSQICGKTGSVGSDLQFLGTTSSHQEKVYASLNFGSKTQQTFGSQTECTSSNGQNPSPGAYILPSYPVSSPRTSPKHTSPLIISPKKSQDNSVNFSNSWPLKSFEGLSKPSPQKKLVSQKSSDPTGRNHGENSQEKPPVQLTPALVRSPSSRRGLNGTKPVPPIPRGISLLPDKADLSTVGHKKKEPDDIWKCEKDSLPIDLSELNFKDKDLDQEEMHSSLRSLRNSAAKKRAKLSGSTLDLESPDSAMKLDLTMDSPSLSSSPNINSYSESGVYSQESLTSSLSTTPQGKRIMSDIFPTFGSKPCPTRLSSAKKKISHIAEQSPSAGSSSNPQQISSFDFTTTKALSEDSVVVVGKGVFGSLSSAPATCSQSVISSVENGDTFSIKQSIEPPSGIYGRSVQQNISSYLDVENEKDAKVSISKSTYNKMRQKRKEEKELFHNKDCEKKEKNSWERMRHTGTEKMASESETPTGAISQYKERMPSVTHSPEIMDLSELRPFSKPEIALTEALRLLADEDWEKKIEGLNFIRCLAAFHSEILNTKLHETNFAVVQEVKNLRSGVSRAAVVCLSDLFTYLKKSMDQELDTTVKVLLHKAGESNTFIREDVDKALRAMVNNVTPARAVVSLINGGQRYYGRKMLFFMMCHPNFEKMLEKYVPSKDLPYIKDSVRNLQQKGLGEIPLDTPSAKGRRSHTGSVGNTRSSSVSRDAFNSAERAVTEVREVTRKSVPRNSLESAEYLKLITGLLNAKDFRDRINGIKQLLSDTENNQDLVVGNIVKIFDAFKSRLHDSNSKVNLVALETMHKMIPLLRDHLSPIINMLIPAIVDNNLNSKNPGIYAAATNVVQALSQHVDNYLLLQPFCTKAQFLNGKAKQDMTEKLADIVTELYQRKPHATEQKVLVVLWHLLGNMTNSGSLPGAGGNIRTATAKLSKALFAQMGQNLLNQAASQPPHIKKSLEELLDMTILNEL

SEQ ID NO: 8730 - protein, 587 aa, Homo sapiens
MASEDIAKLAETLAKTQVAGGQLSFKGKSLKLNTAEDAKDVIKEIEDFDSLEALRLEGNTVGVEAARVIAKALEKKSELKRCHWSDMFTGRLRTEIPPALISLGEGLITAGAQLVELDLSDNAFGPDGVQGFEALLKSSACFTLQELKLNNCGMGIGGGKILAAALTECHRKSSAQGKPLALKVFVAGRNRLENDGATALAEAFRVIGTLEEVHMPQNGINHPGITALAQAFAVNPLLRVINLNDNTFTEKGAVAMAETLKTLRQVEVINFGDCLVRSKGAVAIADAIRGGLPKLKELNLSFCEIKRDAALAVAEAMADKAELEKLDLNGNTLGEEGCEQLQEVLEGFNMAKVLASLSDDEDEEEEEEGEEEEEEAEEEEEEDEEEEEEEEEEEEEEPQQRGQGEKSATPSRKILDPNTGEPAPVLSSPPPADVSTFLAFPSPEKLLRLGPKSSVLIAQQTDTSDPEKVVSAFLKVSSVFKDEATVRMAVQDAVDALMQKAFNSSSFNSNTFLTRLLVHMGLLKSEDKVKAIANLYGPLMALNHMVQQDYFPKALAPLLLAFVTKPNSALESCSFARHSLLQTLYKV

SEQ ID NO: 8731 - protein, 623 aa, Homo sapiens
CPTLPPTRGPRRLLFLTATLASSVCRSPGEPTSLVNMASEDIAKLAETLAKTQVAGGQLSFKGKSLKLNTAEDAKDVIKEIEDFDSLEALRLEGNTVGVEAARVIAKALEKKSELKRCHWSDMFTGRLRTEIPPALISLGEGLITAGAQLVELDLSDNAFGPDGVQGFEALLKSSACFTLQELKLNNCGMGIGGGKILAAALTECHRKSSAQGKPLALKVFVAGRNRLENDGATALAEAFRVIGTLEEVHMPQNGINHPGITALAQAFAVNPLLRVINLNDNTFTEKGAVAMAETLKTLRQVEVINFGDCLVRSKGAVAIADAIRGGLPKLKELNLSFCEIKRDAALAVAEAMADKAELEKLDLNGNTLGEEGCEQLQEVLEGFNMAKVLASLSDDEDEEEEEEGEEEEEEAEEEEEEDEEEEEEEEEEEEEEPQQRGQGEKSATPSRKILDPNTGEPAPVLSSPPPADVSTFLAFPSPEKLLRLGPKSSVLIAQQTDTSDPEKVVSAFLKVSSVFKDEATVRMAVQDAVDALMQKAFNSSSFNSNTFLTRLLVHMGLLKSEDKVKAIANLYGPLMALNHMVQQDYFPKALAPLLLAFVTKPNSALESCSFARHSLLQTLYKV

SEQ ID NO: 8732 - protein, 402 aa, Homo sapiens
MAARPGPLWLLGLTLCALGGGGPGLRPPPGCPQRRLGARERRDVQREILAVLGLPGRPRPRAPPAASRLPASAPLFMLDLYHAMAGDDDEDGAPAEQRLGRADLVMSFVNMVERDRALGHQEPHWKEFRFDLTQIPAGEAVTAAEFRIYKVPSIHLLNRTLHVSMFQVVQEQSNRESDLFFLDLQTLRAGDEGWLVLDVTAASDCWLLKRHKDLGLRLYVETEDGHSVDPGLAGLLGQRAPRSQQPFVVTFFRASPSPIRTPRAVRPLRRRQPKKSNELPQANRLPGIFDDVHGSHGRQVCRRHELYVSFQDLGWLDWVIAPQGYSAYYCEGECSFPLDSCMNATNHAILQSLVHLMKPNAVPKACCAPTKLSATSVLYYDSSNNVILRKHRNMVVKACGCH

SEQ ID NO: 8733 - protein, 402 aa, Homo sapiens [sequence omitted]

SEQ ID NO: 8734 - protein, 412 aa, Homo sapiens
MPLQLLLLLILLGPGNSLQLWDTWADEAEKALGPLLARDRRQATEYEYLDYDFLPETEPPEMLRNSTDTTPLTGPGTPESTTVEPAARRSTGLDAGGAVTELTTELANMGNLSTDSAAMEIQTTQPAATEAQTTQPVPTEAQTTPLAATEAQTTRLTATEAQTTPLAATEAQTTPPAATEAQTTQPTGLEAQTTAPAAMEAQTTAPAAMEAQTTPPAAMEAQTTQTTAMEAQTTAPEATEAQTTQPTATEAQTTPLAAMEALSTEPSATEALSMEPTTKRGLFIPFSVSSVTHKGIPMAASNLSVNYPVGAPDHISVKQCLLAILILALVATIFFVCTVVLAVRLSRKGHMYPVRNYSPTEMVCISSLLPDGGEGPSATANGGLSKAKSPGLTPEPREDREGDDLTLHSFLP

SEQ ID NO: 8735 - protein, 4599 aa, Homo sapiens
  VARIANT 4343: Xaa = Any Amino Acid
MSEFLLALLTLSGLLPIARVLTVGADRDQQLCDPGEFLCHDHVTCVSQSWLCDGDPDCPDDSDESLDTCPEEVEIKCPLNHIACLGTNKCVHLSQLCNGVLDCPDGYDEGVHCQELLSNCQQLNCQYKCTMVRNSTRCYCEDGFEITEDGRSCKDQDECAVYGTCSQTCRNTHGSYTCSCVEGYLMQPDNRSCKAKIEPTDRPPILLIANFETIEVFYLNGSKMATLSSVNGNEIHTLDFIYNEDMICWIESRESSNQLKCIQITKAGGLTDEWTINILQSFHNVQQMAIDWLTRNLYFVDHVGDRIFVCNSNGSVCVTLIDLELHNPKAIAVDPIAGKLFFTDYGNVAKVERCDMDGMNRTRIIDSKTEQPAALALDLVNKLVYWVDLYLDYVGVVDYQGKNRHTVIQGRQVRHLYGITVFEDYLYATNSDNYNIVRINRFNGTDIHSLIKIENAWGIRIYQKRTQPTVRSHACEVDPYGMPGGCSHICLLSSSYKTRTCRCRTGFNLGSDGRSCKRPKNELFLFYGKGRPGIVRGMDLNTKIADEYMIPIENLVNPRALDFHAETNYIYFADTTSFLIGRQKIDGTERETILKDDLDNVEGIAVDWIGNNLYWTNDGHRKTINVARLEKASQSRKTLLEGEMSHPRGIVVDPVNGWMYWTDWEEDEIDDSVGRIEKAWMDGFNRQIFVTSKMLWPNGLTLDFHTNTLYWCDAYYDHIEKVFLNGTHRKIVYSGRELNHPFGLSHHGNYVFWTDYMNGSIFQLDLITSEVTLLRHERPPLFGLQIYDPRKQQGDNMCRVNNGGCSTLCLAIPGGRVCACADNQLLDENGTTCTFNPGEALPHICKAGEFRCKNRHCIQARWKCDGDDDCLDGSDEDSVNCFNHSCPDDQFKCQNNRCIPKRWLCDGANDCGSNEDESNQTCTARTCQVDQFSCGNGRCIPRAWLCDREDDCGDQTDEMASCEFPTCEPLTQFVCKSGRCISSKWHCDSDDDCGDGSDEVGCVHSCFDNQFRCSSGRCIPGHWACDGDNDCGDFSDEAQINCTKEEIHSPAGCNGNEFQCHPDGNCVPDLWRCDGEKDCEDGSDEKGCNGTIRLCDHKTKFSCWSTGRCINKAWVCDGDIDCEDQSDEDDCDSFLCGPPKHPCANDTSVCLQPEKLCNGKKDCPDGSDEGYLCDECSLNNGGCSNHCSVVPGRGIVCSCPEGLQLNKDNKTCEIVDYCSNHLKCSQVCEQHKHTVKCSCYEGWKLDVDGESCTSVDPFEAFIIFSIRHEIRRIDLHKRDYSLLVPGLRNTIALDFHFNQSLLYWTDVVEDRIYRGKLSESGGVSAIEVVVEHGLATPEGLTVDWIAGNIYWIDSNLDQIEVAKLDGSLRTTLIAGAMEHPRAIALDPRYGILFWTDWDANFPRIESASMSGAGRKTIYKDMKTGAWPNGLTVDHFEKRIVWTDARSDAIYSALYDGTNMIEIIRGHEYLSHPFAVSLYGSEVYWTDWRTNTLSKANKWTGQNVSVIQKTSAQPFDLQIYHPSRQPQAPNPCAANDGKGPCSHMCLINHNRSAACACPHLMKLSSDKKTCYEMKKFLLYARRSEIRGVDIDNPYFNFITAFTVPDIDDVTVIDFDASEERLYWTDIKTQTIKRAFINGTGLETVISRDIQSIRGLAVDWVSRNLYWISSEFDETQINVARLDGSLKTSIIHGIDKPQCLAAHPVRGKLYWTDGNTINMANMDGSNSKILFQNQKEPVGLSIDYVENKLYWISSGNGTINRCNLDGGNLEVIESMKEELTKATALTIMDKKLWWADQNLAQLGTCSKRDGRNPTILRNKTSGVVHMKVYDKEAQQGSNSCQLNNGGCSQLCLPTSETTRTCMCTVGYYLQKNRMSCQGIESFLMYSVHEGIRGIPLEPSDKMDALMPISGTSFAVGIDFHAENDTIYWTDMGFNKISRAKRDQTWKEDIITNGLGRVEGIAVDWIAGNIYWTDHGFNLIEVARLNGSFRYVIISQGLDQPRSIAVHPEKGLLFWTEWGQMPCIGKARLDGSEKVVLVSMGIAWPNGISIDYEENKLYWCDARTDKIERIDLETGGNREMVLSGSNVDMFSVAVFGAYIYWSDRAHANGSVRRGHKNDATETITMRTGLGVNLKEVKIFNRVREKGTNVCARDNGGCKQLCLYRGNSRRTCACAHGYLAEDGVTCLRHEGYLLYSGRTILKSIHLSDETNLNSPIRPYENPRYFKNVIALAFDYNQRRKGTNRIFYSDAHFGNIQLIKDNWEDRQVIVENVGSVEGLAYHRAWDTLYWTSSTTSSITRHTVDQTRPGAFDREAVITMSEDDHPHVLALDECQNLMFWTNWNEQHPSIMRSTLTGKNAQVVVSTDILTPNGLTIDYRAEKLYFSDGSLGKIERCEYDGSQRHVIVKSGPGTFLSLAVYDNYIFWSDWGRRAILRSNKYTGGDTKILRSDIPHQPMGIIAVANDTNSCELSPCALLNGGCHDLCLLTPNGRVNCSCRGDRILLEDNRCVTKNSSCNAYSEFECGNGECIDYQLTCDGIPHCKDKSDEKLLYCENRSCRRGFKPCYNRRCIPHGKLCDGENDCGDNSDELDCKVSTCATVEFRCADGTCIPRSARCNQNIDCADASDEKNCNNTDCTHFYKLGVKTTGFIRCNSTSLCVLPTWICDGSNDCGDYSDELKCPVQNKHKCEENYFSCPSGRCILNTWICDGQKDCEDGRDEFHCDSSCSWNQFACSAQKCISKHWICDGEDDCGDGLDESDSICGAITCAADMFSCQGSRACVPRHWLCDGERDCPDGSDELSTAGCAPNNTCDENAFMCHNKVCIPKQFVCDHDDDCGDGSDESPQCGYRQCGTEEFSCADGRCLLNTQWQCDGDFDCPDHSDEAPLNPKCKSAEQSCNSSFFMCKNGRCIPSGGLCDNKDDCGDGSDERNCHINECLSKKVSGCSQDCQDLPVSYKCKCWPGFQLKDDGKTCVDIDECSSGFPCSQQCINTYGTYKCLCTDGYEIQPDNPNGCKSLSDEEPFLILADHHEIRKISTDGSNYTLLKQGLNNVIAIDFDYREEFIYWIDSSRPNGSRINRMCLNGSDIKVVHNTAVPNALAVDWIGKNLYWSDTEKRIIEVSKLNGLYPTILVSKRLKFPRDLSLDPQAGYLYWIDCCEYPHIGRVGMDGTNQSVVIETKISRPMALTIDYVNRRLYWADENHIEFSNMDGSHRHKVPNQDIPGVIALTLFEDYIYWTDGKTKSLSRAHKTSGADRLSLIYSWHAITDIQVYHSYRQPDVSKHLCMINNGGCSHLCLLAPGKTHTCACPTNFYLAADNRTCLSNCTASQFRCKTDKCIPFWWKCDTVDDCGDGSDEPDDCPEFRCQPGRFQCGTGLCALPAFICDGENDCGDNSDELNCDTHVCLSGQFKCTKNQKCIPVNLRCNGQDDCGDEEDERDCPENSCSPDYFQCKTTKHCISKLWVCDEDPDCADASDEANCDKKTCGPHEFQCKNNNCIPDHWRCDSQNDCSDNSDEENCKPQTCTLKDFLCANGDCVSSRFWCDGDFDCADGSDERNCETSCSKDQFRCSNGQCIPAKWKCDGHEDCKYGEDEKSCEPASPTCSSREYICASDGCISASLKCNGEYDCADGSDEMDCVTECKEDQFRCKNKAHCIPIRWLCDGIHDCVDGSDEENCERGGNICRADEFLCNNSLCKLHFWVCDGEDDCGDNSDEAPDMCVKFLCPSTRPHRCRNNRICLQSEQMCNGIDECGDNSDEDHCGGKLTYKARPCKKDEFACSNKKCIPMDLQCDRLDDCGDGSDEQGCRIAPTEYTCEDNVNPCGDDAYCNQIKTSVFCRCKPGFQRNMKNRQCEDLNECLVFGTCSHQCINVEGSYKCVCDQNFQERNNTCIAEGSEDQVLYIANDTDILGFIYPFNYSGDHQQISHIEHNSRITGMDVYYQRDMIIWSTQFNPGGIFYKRIHGREKRQANSGLICPEFKRPRDIAVDWVAGNIYWTDHSRMHWFSYYTTHWTSLRYSINVGQLNGPNCTRLLTNMAGEPYAIAVNPKRGMMYWTVVGDHSHIEEAAMDGTLRRILVQKNLQRPTGLAVDYFSERIYWADFELSIIGSVLYDGSNSVVSVSSKQGLLHPHRIDIFEDYIYGAGPKNGVFRVQKFGHGSVEYLALNIDKTKGVLISHRYKQLDLPNPCLDLACEFLCLLNPSGATCVCPEGKYLINGTCNDDSLLDDSCKLTCENGGRCILNEKGDLRCHCWPSYSGERCEVNHCSNYCQNGGTCVPSVLGRPTCSCALGFTGPNCGKTVCEDFCQNGGTCIVTAGNQPYCHCQPEYTGDRCQYYVCHHYCVNSESCTIGDDGSXECVCPTRYEGPKCEVDKCVRCHGGHCIINKDSEDIFCNCTNGKIASSCQLCDGYCYNGGTCQLDPETNVPVCLCSTNWSGTQCERPAPKSSKSDHISTRSIAIIVPLVLLVTLITTLVIGLVLCKRKRRTKTIRRQPIINGGINVEIGNPSYNMYEVDHDHNDGGLLDPGFMIDPTKARYIGGGPSAFKLPHTAPPIYLNSDLKGPLTAGPTNYSNPVYAKLYMDGQNCRNSLGSVDERKELLPKKIEIGIRETVA

SEQ ID NO: 8736 - protein, 582 aa, Homo sapiens [sequence omitted]

SEQ ID NO: 8737 - protein, 740 aa, Homo sapiens
PAGRGLGQAARRRRRRPFSPLFPAAAVADPARQALLTVASSGPRSPALASAPAPGPQPSSQPRPPAAAMSKEERPGREEILECQVMWEPDSKKNTQMDRFRAAVGAACGLALESYDDLYHWSVESYSDFWAEFWKFSGIVFSRVYDEVVDTSKGIADVPEWFKGSRLNYAENLLRHKENDRVALYVAREGKEEIVKVTFEELRQEVALFAAAMRKMGVKKGDRVVGYLPNSEHAVEAMLAAASIGAIWSSTSPDFGVNGVLDRFSQIQPKLIFSVEAVVYNGKEHNHMEKLQQVVKGLPDLKKVVVIPYVSSRENIDLSKIPNSVFLDDFLATGTSEQAPQLEFEQLPFSHPLFIMFSSGTTGAPKCMVHSAGGTLIQHLKEHLLHGNMTSSDILLCYTTVGWMMWNWMVSLLATGAAMVLYDGSPLVPTPNVLWDLVDRIGITVLVTGAKWLSVLEEKAMKPVETHSLQMLHTILSTGSPLKAQSYEYVYRCIKSSILLGSISGGTDIISCFMGHNFSLPVYKGEIQARNLGMAVEAWNEEGKAVWGESGELVCTKPIPCQPTHFWNDENGNKYRKAYFSKFPGIWAHGDYCRINPKTGGIVMLGRSDGTLNPNGVRFGSSEIYNIVESFEEVEDSLCVPQYNKYREERVILFLKMASGHAFQPDLVKRIRDAIRMGLSARHVPSLILETKGIPYTLNGKKVEVAVKQIIAGKAVEQGGAFSNPETLDLYRDIPELQGF

SEQ ID NO: 8738 - protein, 1134 aa, Homo sapiens
MKYSCCALVLAVLGTELLGSLCSTVRSPRFRGRIQQERKNIRPNIILVLTDDQDVELGSLQVMNKTRKIMEHGGATFINAFVTTPMCCPSRSSMLTGKYVHNHNVYTNNENCSSPSWQAMHEPRTFAVYLNNTGYRTAFFGKYLNEYNGSYIPPGWREWLGLIKNSRFYNYTVCRNGIKEKHGFDYAKDYFTDLITNESINYFKMSKRMYPHRPVMMVISHAAPHGPEDSAPQFSKLYPNASQHITPSYNYAPNMDKHWIMQYTGPMLPIHMEFTNILQRKRLQTLMSVDDSVERLYNMLVETGELENTYIIYTADHGYHIGQFGLVKGKSMPYDFDIRVPFFIRGPSVEPGSIVPQIVLNIDLAPTILDIAGLDTPPDVDGKSVLKLLDPEKPGNRFRTNKKAKIWRDTFLVERGKFLRKKEESSKNIQQSNHLPKYERVKELCQQARYQTACEQPGQKWQCIEDTSGKLRIHKCKGPSDLLTVRQSTRNLYARGFHDKDKECSCRESGYRASRSQRKSQRQFLRNQGTPKYKPRFVHTRQTRSLSVEFEGEIYDINLEEEEELQVLQPRNIAKRHDEGHKGPRDLQASSGGNRGRMLADSSNAVGPPTTVRVTHKCFILPNDSIHCERELYQSARAWKDHKAYIDKEIEALQDKIKNLREVRGHLKRRKPEECSCSKQSYYNKEKGVKKQEKLKSHLHPFKEAAQEVDSKLQLFKENNRRRKKERKEKRRQRKGEECSLPGLTCFTHDNNHWQTAPFWNLGSFCACTSSNNNTYWCLRTVNETHNFLFCEFATGFLEYFDMNTDPYQLTNTVHTVERGILNQLHVQLMELRSCQGYKQCNPRPKNLDVEEIKMEEAMTYTEDSYGMDGKVNQPRLTADINWQGLEELHSVNENIYEYRQNYRLSLVDWTNYLKDLDRVFALLKSHYEQNKTNKTQTAQSDGFLVVSAEHAVSMEMASADSDEDPRHKVGKTPHLTLPADLQTLHLNRPTLSPESKLEWNNDIPEVNHLNSEHWRKTEKWTGHEETNHLETDFSGDGMTELELGPSPRLQPIRRHPKELPQYGGPGKDIFEDQLYLPVHSDGISVHQMFTMATAEHRSNSSIAGKMLTKVEKNHEKEKSQHLEGSASSSLSSD

SEQ ID NO: 8739 - protein, 281 aa, Homo sapiens
MLLISLLLAAGLMHSDAGTSCPVLCTCRNQVVDCSSQRLFSVPPDLPMDTRNLSLAHNRITAVPPGYLTCYMELQVLDLHNNSLMELPRGLFLHAKRLAHLDLSYNNFSHVPADMFQEAHGLVHIDLSHNPWLRRVHPQAFQGLMQLRDLDLSYGGLAFLSLEALEGLPGLVTLQIGGNPWVCGCTMEPLLKWLRNRIQRCTADSQLAECRGPPEVEGAPLFSLTEESFKACHLTLTLDDYLFIAFVGFVVSIASVATNFLLGITANCCHRWSKASEEEEI

SEQ ID NO: 8740 - protein, 244 aa, Homo sapiens
MGPPSAAPRGGHRPWQGLLITASLLTFWDPPTTVQFTIEALPSSAAEGKDVLLLACNISETIQAYYWHKGKTAEGSPLIAGYITDIQANIPGAAYSGREQVYPNGSLLFQNITLEDAGSYTLRTINASYDSDQATGQLHVHQNNVPGLPVGAVAGIVTGVLVGVALVAALVCFLLLSRTGRASIQRDLREQPPPASTPGHGPSHRSTFSAPLPSPRTATPIYVEFLYSDANIYCQIDHKADVVS

SEQ ID NO: 8741 - protein, 393 aa, Homo sapiens
MWWRVLSLLAWFPLQEASLTNHTETITVEEGQTLTLKCVTSLRKNSSLQWLTPSGFTIFLNEYPALKNSKYQLLHHSANQLSITVPNVTLQDEGVYKCLHYSDSVSTKEVKVIVLATPFKPILEASVIRKQNGEEHVVLMCSTMRSKPPPQITWLLGNSMEVSGGTLHEFETDGKKCNTTSTLIIHTYGKNSTVDCIIRHRGLQGRKLVAPFRFEDLVTDEETASDALERNSLSSQDPQQPTSTVSVTEDSSTSEIDKEEKEQTTQDPDLTTEANPQYLGLARKKSGILLLTLVSFLIFILFIIVQLFIMKLRKAHVIWKRENEVSEHTLESYRSRSNNEETSSEEKNGQSSHPMRCMNYITKLYSEAKTKRKENVQHSKLEEKHIQVPESIV

SEQ ID NO: 8742 - protein, 930 aa, Homo sapiens
MLLGWASLLLCAFRLPLAAVGPAATPAQDKAGQPPTAAAAAQPRRRQGEEVQERAEPPGHPHPLAQRRRSKGLVQNIDQLYSGGGKVGYLVYAGGRRFLLDLERDGSVGIAGFVPAGGGTSAPWRHRSHCFYRGTVDASPRSLAVFDLCGGLDGFFAVKHARYTLKPLLRGPWAEEEKGRVYGDGSARILHVYTREGFSFEALPPRASCETPASTPEAHEHAPAHSNPSGRAALASQLLDQSALSPAGGSGPQTWWRRRRRSISRARQVELLLVADASMARLYGRGLQHYLLTLASIANRLYSHASIENHIRLAVVKVVVLGDKDKSLEVSKNAATTLKNFCKWQHQHNQLGDDHEEHYDAAILFTREDLCGHHSCDTLGMADVGTICSPERSCAVIEDDGLHAAFTVAHEIGHLLGLSHDDSKFCEETFGSTEDKRLMSSILTSIDASKPWSKCTSATITEFLDDGHGNCLLDLPRKQILGPEELPGQTYDATQQCNLTFGPEYSVCPGMDVCARLWCAVVRQGQMVCLTKKLPAVEGTPCGKGRICLQGKCVDKTKKKYYSTSSHGNWGSWGSWGQCSRSCGGGVQFAYRHCNNPAPRNNGRYCTGKRAIYRSCSLMPCPPNGKSFRHEQCEAKNGYQSDAKGVKTFVEWVPKYAGVLPADVCKLTCRAKGTGYYVVFSPKVTDGTECRPYSNSVCVRGKCVRTGCDGIIGSKLQYDKCGVCGGDNSSCTKIVGTFNKKSKGYTDVVRIPEGATHIKVRQFKAKDQTRFTAYLALKKKNGEYLINGKYMISTSETIIDINGTVMNYSGWSHRDDFLHGMGYSATKEILIVQILATDPTKPLDVRYSFFVPKKSTPKVNSVTSHGSNKVGSHTSQPQWVTGPWLACSRTCDTGWHTRTVQCQDGNRKLAKGCPLSQRPSAFKQCLLKKC

SEQ ID NO: 8743 - protein, 121 aa, Homo sapiens [sequence omitted]

SEQ ID NO: 8744 - protein, 1164 aa, Homo sapiens
MAGAGGQHHPPGAAGGAAAGAGAAVTSAAASAGPGEDSSDSEAEQEGPQKLIRKVSTSGQIRTKTSIKEGQLLKQTSSFQRWKKRYFKLRGRTLYYAKDSKSLIFDEVDLSDASVAEASTKNANNSFTIITPFRRLMLCAENRKEMEDWISSLKSVQTREPYEVAQFNVEHFSGMHNWYACSHARPTFCNVCRESLSGVTSHGLSCEVCKFKAHKRCAVRATNNCKWTTLASIGKDIIEDEDGVAMPHQWLEGNLPVSAKCAVCDKTCGSVLRLQDWKCLWCKTMVHTACKDLYHPICPLGQCKVSIIPPIALNSTDSDGFCRATFSFCVSPLLVFVNSKSGDNQGVKFLRRFKQLLNPAQVFDLMNGGPHLGLRLFQKFDNFRILVCGGDGSVGWVLSEIDKLNLNKQCQLGVLPLGTGNDLARVLGWGGSYDDDTQLPQILEKLERASTKMLDRWSIMTYELKLPPKASLLPGPPEASEEFYMTIYEDSVATHLTKILNSDEHAVVISSAKTLCETVKDFVAKVEKTYDKTLENAVVADAVASKCSVLNEKLEQLLQALHTDSQAAPVLPGLSPLIVEEDAVESSSEESLGESKEQLGDDVTKPSSQKAVKPREIMLRANSLKKAVRQVIEEAGKVMDDPTVHPCEPANQSSDYDSTETDESKEEAKDDGAKESITVKTAPRSPDARASYGHSQTDSVPGPAVAASKENLPVLNTRIICPGLRAGLAASIAGSSIINKMLLANIDPFGATPFIDPDLDSVDGYSEKCVMNNYFGIGLDAKISLEFNNKREEHPEKCRSRTKNLMWYGVLGTRELLQRSYKNLEQRVQLECDGQYIPLPSLQGIAVLNIPSYAGGTNFWGGTKEDDIFAAPSFDDKILEVVAIFDSMQMAVSRVIKLQHHRIAQCRTVKITIFGDEGVPVQVDGEAWVQPPGIIKIVHKNRAQMLTRDRAFESTLKSWEDKQKCDSGKPVLRTHLYIHHAIDLATEEVSQMQLCSQAAEELITRICDAATIHCLLEQELAHAVNACSHALNKANPRCPESLTRDTATEIAINVKALYNETESLLVGRVPLQLESPHEERVSNALHSVEVELQKLTEIPWLYYILHPNEDEEPPMDCTKRNNRSTVFRIVPKFKKEKVQKQKTSSQPGSGDTESGSCEANSPGN

SEQ ID NO: 8745 - protein, 1120 aa, Homo sapiens
TSIKEGQLLKQTSSFQRWKKRYFKLRGRTLYYAKDSKSLIFDEVDLSDASVAEASTKNANNSFTIITPFRRLMLCAENRKEMEDWISSLKSVQTREPYEVAQFNVEHFSGMHNWYACSHARPTFCNVCRESLSGVTSHGLSCEVCKFKAHKRCAVRATNNCKWTTLASIGKDIIEDEDGVAMPHQWLEGNLPVSAKCAVCDKTCGSVLRLQDWKCLWCKTMVHTACKDLYHPICPLGQCKVSIIPPIALNSTDSDGFCRATFSFCVSPLLVFVNSKSGDNQGVKFLRRFKQLLNPAQVFDLMNGGPHLGLRLFQKFDNFRILVCGGDGSVGWVLSEIDKLNLNKQCQLGVLPLGTGNDLARVLGWGGSYDDDTQLPQILEKLERASTKMLDRWSIMTYELKLPPKASLLPGPPEASEEFYMTIYEDSVATHLTKILNSDEHAVVISSAKTLCETVKDFVAKVEKTYDKTLENAVVADAVASKCSVLNEKLEQLLQALHTDSQAAPVLPGLSPLIVEEDAVESSSEESLGESKEQLGDDVTKPSSQKAVKPREIMLRANSLKKAVRQVIEEAGKVMDDPTVHPCEPANQSSDYDSTETDESKEEAKDDVKTAPRSPDARASYGHSQTDSVPGPAVAASKENLPVLNTRIICPGLRAGLAASIAGSSIINKMLLANIDPFGATPFIDPDLDSVDGYSEKCVMNNYFGIGLDAKISLEFNNKREEHPEKCRSRTKNLMWYGVLGTRELLQRSYKNLEQRVQLECDGQYIPLPSLQGIAVLNIPSYAGGTNFWGGTKEDDIFAAPSFDDKILEVVAIFDSMQMAVSRVIKLQHHRIAQCRTVKITIFGDEGVPVQVDGEAWVQPPGIIKIVHKNRAQMLTRDRAFESTLKSWEDKQKCDSGKPVLRTHLYIHHAIDLATEEVSQMQLCSQAAEELITRICDAATIHCLLEQELAHAVNACSHALNKANPRCPESLTRDTATEIAINVKALYNETESLLVGRVPLQLESPHEERVSNALHSVEVELQKLTEIPWLYYILHPNEDEEPPMDCTKRNNRSTVFRIVPKFKKEKVQKQKTSSQPVQKWGTEEVAAWLDLLNLGEYKDIFIRHDIRGAELLHLERRDLK

SEQ ID NO: 8746 - protein, 1221 aa, Homo sapiens
MAGAGGQHHPPGAAGGAAAGAGAAVTSAAASAGPGEDSSDSEAEQEGPQKLIRKVSTSGQIRTKTSIKEGQLLKQTSSFQRWKKRYFKLRGRTLYYAKDSKSLIFDEVDLSDASVAEASTKNANNSFTIITPFRRLMLCAENRKEMEDWISSLKSVQTREPYEVAQFNVEHFSGMHNWYACSHARPTFCNVCRESLSGVTSHGLSCEVCKFKAHKRCAVRATNNCKWTTLASIGKDIIEDEDGVAMPHQWLEGNLPVSAKCAVCDKTCGSVLRLQDWKCLWCKTMVHTACKDLYHPICPLGQCKVSIIPPIALNSTDSDGFCRATFSFCVSPLLVFVNSKSGDNQGVKFLRRFKQLLNPAQVFDLMNGGPHLGLRLFQKFDNFRILVCGGDGSVGWVLSEIDKLNLNKQAMQLGVLPLGTGNDLARVLGWGGSYDDDTQLPQILEKLERASTKMLDRWSIMTYELKLPPKASLLPGPPEASEEFYMTIYEDSVATHLTKILNSDEHAVVISSAKTLCETVKDFVAKVEKTYDKTLENAVVADAVASKCSVLNEKLEQLLQALHTDSQAAPVLPGLSPLIVEEDAVESSSEESLGESKEQLGDDVTKPSSQKAVKPREIMLRANSLKKAVRQVIEEAGKVMDDPTVHPCEPANQSSDYDSTETDESKEEAKDDGAKESITVKTAPRSPDARASYGHSQTDSVPGPAVAASKENLPVLNTRIICPGLRAGLAASIAGSSIINKMLLANIDPFGATPFIDPDLDSVDGYSEKCVMNNYFGIGLDAKISLEFNNKREEHPEKCRSRTKNLMWYGVLGTRELLQRSYKNLEQRVQLECDGQYIPLPSLQGIAVLNIPSYAGGTNFWGGTKEDDIFAAPSFDDKILEVVAIFDSMQMAVSRVIKLQHHRIAQCRTVKITIFGDEGVPVQVDGEAWVQPPGIIKIVHKNRAQMLTRDRAFESTLKSWEDKQKCDSGKPVLRTHLYIHHAIDLATEEVSQMQLCSQAAEELITRICDAATIHCLLEQELAHAVNACSHALNKANPRCPESLTRDTATEIAINVKALYNETESLLVGRVPLQLESPHEERVSNALHSVEVELQKLTEIPWLYYILHPNEDEEPPMDCTKRNNRSTVFRIVPKFKKEKVQKQKTSSQPVQKWGTEEVAAWLDLLNLGEYKDIFIRHDIRGAELLHLERRDLKDLGIPKVGHVKRILQGIKELGRSTPQSEV

SEQ ID NO: 8747 - protein, 4641 aa, Homo sapiens
MPVPDGSVAAAGLGLGLPAADSPGHYQLLLSGRALADRYRRIYTAALNDRDQGGGSAGHPASRNKKILNKKKLKRKQKSKSKVKTRSKSENLENTVIIPDIKLHSNPSAFNIYCNVRHCVLEWQKKEISLAAASKNSVQSGESDSDEEEESKEPPIKLPKIIEVGLCEVFELIKETRFSHPSLCLRSLQALLNVLQGQQPEVLQSEPPEVLESLFQLLLEITVRSTGMNDSTGQSLTALSCACLFSLVASWGETGRTLQAISAILTNNGSHACQTIQVPTILNSLQRSVQAVLVGKIQIQDWFSNGIKKAALMHKWPLKEISVDEDDQCLLQNDGFFLYLLCKDGLYKIGSGYSGTVRGHIYNSTSRIRNRKEKKSWLGYAQGYLLYRDVNNHSMTAIRISPETLEQDGTVMLPDCHTEGQNILFTDGEYINQIAASRDDGFVVRIFATSTEPVLQQELQLKLARKCLHACRISLFDLEKDLHIISTGFDEESAILGAGREFALMKTANGKIYYTGKYQSLGIKQGGPSAGKWVELPITKSPKIVHFSVGHDGSHALLVAEDGSIFFTGSASKGEDGESIKSRRQSKPYKPKKIIKMEGKIVVYTACNNGSSSVISKDGELYMFGKDAIYSDSSSLVTDLKGHFVTQVAMGKAHTCVLMKNGEVWTFGVNNKGQCGRDTGAMNQGGKGFGVENMATAMDEDLEEELDEKDEKSMMCPPGMHKWKLEQCMVCTVCGDCTGYGASCVSSGRPDRVPGGICGCGSGESGCAVCGCCKACARELDGQEARQRGILDAVKEMIPLDLLLAVPVPGVNIEEHLQLRQEEKRQRVIRRHRLEEGRGPLVFAGPIFMNHREQALARLRSHPAHVKHKRDKHKDGSGERGEKDASKITTYPPGSVRFDCELRAVQVSCGFHHSVVLMENGDVYTFGYGQHGQLGHGDVNSRGCPTLVQALPGPSTQVTAGSNHTAVLLMDGQVFTFGSFSKGQLGRPILDVPYWNAKPAPMPNIGSKYGRKATWIGASGDQTFLRIDEALINSHVLATSEIFASKHIIGLVPASISEPPPFKCLLINKVDGSCKTFNDSEQEDLQGFGVCLDPVYDVIWRFRPNTRELWCYNAVVADARLPSAADMQSRCSILSPELALPTGSRALTTRSHAALHILGCLDTLAAMQDLKMGVASTEEETQAVMKVYSKEDYSVVNRFESHGGGWGYSAHSVEAIRFSADTDILLGGLGLFGGRGEYTAKIKLFELGPDGGDHETDGDLLAETDVLAYDCAAREKYAMMFDEPVLLQAGWWYVAWARVSGPSSDCGSHGQASITTDDGVVFQFKSSKKSNNGTDVNAGQIPQLLYRLPTSDGSASKGKQQTSEPVHILKRSFARTVSVECFESLLSILHWSWTTLVLGVEELRGLKGFQFTATLLDLERLRFVGTCCLRLLRVYTCEIYPVSATGKAVVEETSKLAECIGKTRTLLRKILSEPLDHCMVKLDNDPQGYLSQPLSLLEAVLQECHNTFTACFHSFYPTPALQWACLCDLLNCLDQDIQEANFKTSSSRLLAAVMSALCHTSVKLTSIFPIAYDGEVLLRSIVKQVSTENDSTLVHRFPLLVAHMEKLSQSEENISGMTSFREVLEKMLVIVVLPVRNSLRRENELFSSHLVSNTCGLLASIVSELTASALGSEVDGLNSLHSVKASANRFTKTSQGRSWNTGNGSPDAICFSVDKPGIVVVGFSVYGGGGIHEYELEVLVDDSEHAGDSTHSHRWTSLELVKGTYTTDDSPSDIAEIRLDKVVPLKENVKYAVRLRNYGSRTANGDGGMTTVQCPDGVTFTFSTCSLSSNGTNQTRGQIPQILYYRSEFDGDLQSQLLSKANEEDKNCSRALSVVSTVVRASKDLLHRALAVDADDIPELLSSSSLFSMLLPLIIAYIGPVAAAIPKVAVEVFGLVQQLLPSVAILNQKYAPPAFNPNQSTDSTTGNQPEQGLSACTTSSHYAVIESEHPYKPACVMHYKVTFPECVRWMTIEFDPQCGTAQSEDVLRLLIPVRTVQNSGYGPKLTSVHENLNSWIELKKFSGSSGWPTMVLVLPGNEALFSLETASDYVKDDKASFYGFMCFAIGYEFSPGPDEGVIQLEKELANLGGVCAAALMKKDLALPIGNELEEDLEILEEAALQVCKTHSGILGKGLALSHSPTILEALEGNLPLQIQSNEQSFLDDFIACVPGSSGGRLARWLQPDSYADPQKTSLILNKDDIRCGWPTTITVQTKDQYGDVVHVPNMKVEVKAVPVSQKKMSLQQDQAKKPQRIPGSPAVTAASSNTDMTYGGLASPKLDVSYEPMIVKEARYIAITMMKVYENYSFEELRFASPTPKRPSENMLIRVNNDGTYCANWTPGAIGLYTLHVTIDGIEIDAGLEVKVKDPPKGMIPPGTQLVKPKSEPQPNKVRKFVAKDSAGLRIRSHPSLQSEQIGIVKVNGTITFIDEIHNDDGVWLRLNDETIKKYVPNMNGYTEAWCLSFNQHLGKSLLVPVDESKTNTDDFFKDINSCCPQEATMQEQDMPFLRGGPGMYKVVKTGPSGHNIRSCPNLRGIPIGMLVLGNKVKAVGEVTNSEGTWVQLDQNSMVEFCESDEGEAWSLARDRGGNQYLRHEDEQALLDQNSQTPPPSPFSVQAFNKGASCSAQGFDYGLGNSKGDRGNISTSSKPASTSGKSELSSKHSRSLKPDGRMSRTTADQKKPRGTESLSASESLILKSDAAKLRSDSHSRSLSPNHNTLQTLKSDGRMPSSSRAESPGPGSRLSSPKPKTLPANRSSPSGASSPRSSSPHDKNLPQKSTAPVKTKLDPPRERSKSDSYTLDPDTLRKKKMPLTEPLRGRSTSPKPKSVPKDSTDSPGSENRAPSPHVVQENLHSEVVEVCTSSTLKTNSLTDSTCDDSSEFKSVDEGSNKVHFSIGKAPLKDEQEMRASPKISRKCANRHTRPKKEKSSFLFKGDGSKPLEPAKQAMSPSVAECARAVFASFLWHEGIVHDAMACSSFLKFHPELSKEHAPIRSSLNSQQPTEEKETKLKNRHSLEISSALNMFNIAPHGPDISKMGSINKNKVLSMLKEPPLHEKCEDGKTETTFEMSMHNTMKSKSPLPLTLQHLVAFWEDISLATIKAASQNMIFPSPGSCAVLKKKECEKGRNKKSKKEKKKKEKAEVRPRGNLFGEMAQLAVGGPEKDTICELCGESHPYPVTYHMRQAHPGCGRYAGGQGYNSIGHFCGGWAGNCGDGGIGGSTWYLVCDRCREKYLREKQAAAREKVKQSRRKPMQVKTPRALPTMEAHQVIKANALFLLSLSSAAEPSILCYHPAKPFQSQLPSVKEGISEDLPVKMPCLYLQTLARHHHENFVGYQDDNLFQDEMRYLRSTSVPAPYISVTPDASPNVFEEPESNMKSMPPSLETSPITDTDLAKRTVFQRSYSVVASEYDKQHSILPARVKAIPRRRVNSGDTEVGSSLLRHPSPELSRLISAHSSLSKGERNFQWPVLAFVIQHHDLEGLEIAMKQALRKSACRVFAMEAFNWLLCNVIQTTSLHDILWHFVASLTPAPVEPEEEEDEENKTSKENSEQEKDTRVCEHPLSDIVIAGERAHPLPHTFHRLLQTISDLMMSLPSGSSLQQMALRCWSLKFKQSDHQFLHQSNVFHHINNILSKSDDGDSEESFSISIQSGFEAMSQELCIVMCLKDLTSIVDIKTSSRPAMIGSLTDGSTETFWESGDEDKNKTKNITINCVKGINARYVSVHVDNSRDLGNKVTSMTFLTGKAVEDLCRIKQVDLDSRHIGWVTSELPGGDNHIIKIELKGPENTLRVRQVKVLGWKDGESTKIAGQISASVAQQRNCEAETLRVFRLITSQVFGKLISGDAEPTPEQEEKALLSSPEGEEKVYNATSDADLKEHMVGIIFSRSKLTNLQKQVCAHIVQAIRMEATRVREEWEHAISSKENANSQPNDEDASSDAYCFELLSMVLALSGSNVGRQYLAQQLTLLQDLFSLLHTASPRVQRQVTSLLRRVLPEVTPSRLASIIGVKSLPPADISDIIHSTEKGDWNKLGILDMFLGCIAKALTVQLKAKGTTITGTAGTTVGKGVTTVTLPMIFNSSYLRRGESHWWMKGSTPTQISEIIIKLIKDMAAGHLSEAWSRVTKNAIAETIIALTKMEEEFRSPVRCIATTRLWLALASLCVLDQDHVDRLSSGRWMGKDGQQKQMPMCDNHDDGETAAIILCNVCGNLCTDCDRFLHLHRRTKTHQRQVFKEEEEAIKVDLHEGCGRTKLFWLMALADSKTMKAMVEFREHTGKPTTSSSEACRFCGSRSGTELSAVGSVCSDADCQEYAKIACSKTHPCGHPCGGVKNEEHCLPCLHGCDKSATSLKQDADDMCMICFTEALSAAPAIQLDCSHIFHLQCCRRVLENRWLGPRITFGFISCPICKNKINHIVLKDLLDPIKELYEDVRRKALMRLEYEGLHKSEAITTPGVRFYNDPAGYAMNRYAYYVCYKCRKAYFGGEARCDAEAGRGDDYDPRELICGACSDVSRAQMCPKHGTDFLEYKCRYCCSVAVFFCFGTTHFCNACHDDFQRMTSIPKEELPHCPAGPKGKQLEGTECPLHVVHPPTGEEFALGCGVCRNAHTF

SEQ ID NO: 8748 - protein, 154 aa, Homo sapiens [sequence omitted]

SEQ ID NO: 8749 - protein, 521 aa, Homo sapiens [sequence omitted]

SEQ ID NO: 8750 - protein, 538 aa, Homo sapiens
MAGARAAAAAASAGSSASSGNQPPQELGLGELLEEFSRTQYRAKDGSGTGGSKVERIEKRCLELFGRDYCFSVIPNTNGDICGHYPRHIVFLEYESSEKEKDTFESTVQVSKLQDLIHRSKMARCRGRFVCPVILFKGKHICRSATLAGWGELYGRSGYNYFFSGGADDAWADVEDVTEEDCALRSGDTHLFDKVRGYDIKLLRYLSVKYICDLMVENKKVKFGMNVTSSEKVDKAQRYADFTLLSIPYPGCEFFKEYKDRDYMAEGLIFNWKQDYVDAPLSIPDFLTHSLNIDWSQYQCWDLVQQTQNYLKLLLSLVNSDDDSGLLVHCISGWDRTPLFISLLRLSLWADGLIHTSLKPTEILYLTVAYDWFLFGHMLVDRLSKGEEIFFFCFNFLKHITSEEFSALKTQRRKSLPARDGGFTLEDICMLRRKDRGSTTSLGSDFSLVMESSPGATGSFTYEAVELVPAGAPTQAAWLAALSDRETRLQEVRSAFLAAYSSTVGLRAVAPSPSGAIGGLLEQFARGVGLRSISSNAL

SEQ ID NO: 8751 - protein, 650 aa, Homo sapiens [sequence omitted]

SEQ ID NO: 8752 - protein, 598 aa, Homo sapiens
MAGARAAAAAASAGSSASSGNQPPQELGLGELLEEFSRTQYRAKDGSGTGGSKVERIEKRCLELFGRDYCFSVIPNTNGDICGHYPRHIVFLEYESSEKEKDTFESTVQVSKLQDLIHRSKMARCRGRFVCPVILFKGKHICRSATLAGWGELYGRSGYNYFFSGGADDAWADVEDVTEEDCALRSGDTHLFDKVRGYDIKLLRYLSVKYICDLMVENKKVKFGMNVTSSEKVDKAQRYADFTLLSIPYPGCEFFKEYKDRDYMAEGLIFNWKQDYVDAPLSIPDFLTHSLNIDWSQYQCWDLVQQTQNYLKLLLSLVNSDDDSGLLVHCISGWDRTPLFISLLRLSLWADGLIHTSLKPTEILYLTVAYDWFLFGHMLVDRLSKGEEIFFFCFNFLKHITSEEFSALKTQRRKSLPARDGGFTLEDICMLRRKDRGSTTSLGSDFSLVMESSPGATGSFTYEAVELVPAGAPTQAAWRKSHSSSPQSVLWNRPQPSEDRLPSQQGLAEARSSSSSSSNHSDNFFRMGSSPLEVPKPRLAALSDRETRLQEVRSAFLAAYSSTVGLRAVAPSPSGAIGGLLEQFARGVGLRSISSNAL

SEQ ID NO: 8753 - protein, 650 aa, Homo sapiens
MAGARAAAAAASAGSSASSGNQPPQELGLGELLEEFSRTQYRAKDGSGTGGSKVERIEKRCLELFGRDYCFSVIPNTNGDICGHYPRHIVFLEYESSEKEKDTFESTVQVSKLQDLIHRSKMARCRGRFVCPVILFKGKHICRSATLAGWGELYGRSGYNYFFSGGADDAWADVEDVTEEDCALRSGDTHLFDKVRGYDIKLLRYLSVKYICDLMVENKKVKFGMNVTSSEKVDKAQRYADFTLLSIPYPGCEFFKEYKDRDYMAEGLIFNWKQDYVDAPLSIPDFLTHSLNIDWSQYQCWDLVQQTQNYLKLLLSLVNSDDDSGLLVHCISGWDRTPLFISLLRLSLWADGLIHTSLKPTEILYLTVAYDWFLFGHMLVDRLSKGEEIFFFCFNFLKHITSEEFSALKTQRRKSLPARDGGFTLEDICMLRRKDRGSTTSLGSDFSLVMESSPGATGSFTYEAVELVPAGAPTQAAWRKSHSSSPQSVLWNRPQPSEDRLPSQQGLAEARSSSSSSSNHSDNFFRMGSSPLEVPKPRSVDHPLPGSSLSTDYGSWQMVTGCGSIQERAVLHTDSSLPFSFPDELPNSCLLAALSDRETRLQEVRSAFLAAYSSTVGLRAVAPSPSGAIGGLLEQFARGVGLRSISSNAL

SEQ ID NO: 8754 - protein, 397 aa, Homo sapiens
SSSCFVFSVAACTNTSCSGHGECVETINNYTCKCDPGFSGLKCEQTSCQPWSCSGHGECVEIINNYTCNCDVGYYGPQCQFDCRMPMGLSTGIISDSQIKASEFLGYWEPRLARLNNGGSYNAWSVEKLAAEFASKPWIQVDMQKEVIITGIQTQGAKHYLKSCYTTEFYVAYSSNQINWQIFKGNSTRNVMYFNGNSDASTIKENQFDPPIVARYIRISPTRAYNRPTLRLELQGCEVNGCSTPLGMENGKIENKQITASSFKKSWWGDYWEPFRARLNAQGRVNAWQAKANNNKQWLEIDLLKIKKITAIITQGCKSLSSEMYVKSYTIHYSEQGVEWKPYRLKSSMVDKIFEGNTNTKGHVKNFFNPPIISRFIRVIPKTWNQSIALRLELFGC

SEQ ID NO: 8755 - protein, 867 aa, Homo sapiens
MDNPQALPLFLLLASLVGILTLRASSGLQQTNFSSAFSSDSKSSSQGLGVEVPSIKPPSWKVPDQFLDSKASAGISDSSWFPEALSSNMSGSFWSNVSAEGQDLSPVSPFSETPGSEVFPDISDPQVPAKDPKPSFTVKTPASNISTQVSHTKLSVEAPDSKFSPDDMDLKLSAQSPESKFSAETHSAASFPQQVGGPLAVLVGTTIRLPLVPIPNPGPPTSLVVWRRGSKVLAAGGLGPGAPLISLDPAHRDHLRFDQARGVLELASAQLDDAGVYTAEVIRAGVSQQTHEFTVGVYEPLPQLSVQPKAPETEEGAAELRLRCLGWGPGRGELSWSRDGRALEAAESEGAETPRMRSEGDQLLIVRPVRSDHARYTCRVRSPFGHREAAADVSVFYGPDPPTITVSSDRDAAPARFVTAGSNVTLRCAAASRPPADITWSLADPAEAAVPAGSRLLLPAVGPGHAGTYACLAANPRTGRRRRSLLNLTVADLPPGAPQCSVEGGPGDRSLRFRCSWPGGAPAASLQFQGLPEGIRAGPVSSVLLAAVPAHPRLSGVPITCLARHLVATRTCTVTPEAPREVLLHPLVAETRLGEAEVALEASGCPPPSRASWAREGRPLAPGGGSRLRLSQDGRKLHIGNFSLDWDLGNYSVLCSGALGAGGDQITLIGPSISSWRLQRARDAAVLTWDVERGALISSFEIQAWPDGPALGRTSTYRDWVSLLILGPQERSAVVPLPPRNPGTWTFRILPILGGQPGTPSQSRVYRAGPTLSHGAIAGIVLGSLLGLALLAVLLLLCICCLCRFRGKTPEKKKHPSTLVPVVTPSEKKMHSVTPVEISWPLDLKVPLEDHSSTRAYQAQTPVQLSL

SEQ ID NO: 8756 - protein, 320 aa, Homo sapiens
AEMDKGRERMAAAAAAAAAAAAAAQCRSPRCAAERRGFRRELDSWRHRLMHCVGFESILEGLYGPRLRRDLSLFEDCEPEELTDWSMDEKCSFCNLQREAVSDCIPSLDSSQSTPTEELSSQGQSNTDKIECQAENYLNALFRKKDLPQNCDPNIPLVAQELMKKMIRQFAIEYISKSGKTQENRNGSIGPSIVCKSIQMNQAENSLQEEQEGPLDLTVNRMQEQNTQQGDGVLDLSTKKTSIKSEESSICDPSSENSVAGMLQVKTDEKLNVSDENTASCPLSPIKMCLNRPIEWNLNLTTASLTSCTVHNQNLKSEEK

SEQ ID NO: 8757 - protein, 1678 aa, Homo sapiens
MEKRKSALNKVLESLCIHHQQQVLAMLKFLVQEQNAASLCCCNTSCVVSSESQKPLIEDDLCGLFCSCEYRLAERGCLQNEKQSPGLEPLPVCIKDLHCLSCQTVTVEHVKPVVNRGIADSYNSHRCCSGLLPNIHSTKSAFRSPLLSKEVCDLSVTLKDACRSRSPSPPPLSPIETEGFEKLKDVISEISALENNKLEANINQPPSLTPAEISSNKSDHQDKILKTKKSSNSYSLLSNDSNNSTTNHEKGETAVIFQDLMDRINEKLKSIETTDMTSLVKLSSSDYNTYNDLKLGDFITSLLHNAKASDYSFMELLSQHDKKVENKIIQTRFRKRQETLFAMRNSSDSPMFRRQSLQIKRELASLDENFTRKKYTEKSSRKLTQNNEISSSDKGEFYHDQGPSLQNSKRLQGKNHAETSFSPNYALQSLQLPLHSSETNLSFNEFSESFKTTSPEKMSIRKPQEKSADGKQFLQNDRKNPKLGNTQTLLRNDVSGLLSRTKRNIVPPGWYSVYVTNNYVFKKSPKAKKVSESTTKNDPVKNIHIESSHNIDLNKIAMNSNLQVVVKRLEDTISIAKKSWNNQPLSEGYKASKKLIEIDGKDQHADRNMTLTLNRMTCKEQSLSKSVVASGNIINSHCMPTVDLNNKRLENLKKSSILDMGRLISSVENVPAKYEGTESSSVSNYSSPIKLMFLSEVKSSEGVKYTLTSVGTSHSNVVLPSEKPTTHHVTEEKTETNEDISNANSENYHSSHYDTDTFQRELNKFSHAKETAGSSTMFIGDINSDKPQEEPKDNSSSATDPSFKRKPGRPKKIGPQVVKQIKRPIGRPPKPKIDQTNITVCQNEPFSAGRKSPECLISEVKEGIYKKSITVTVIYGRSRRTKRHVSEGRVNISNLMSLNNNAGDFPTEYNSPRNISEDKIDLGERISAVASLTTESEILGSGFEYVRPIKNKSVIPQPSKNIIRPNQKPLAISRKPGRPAKVKISGISVTINRTSPQEREVSISSCLPPLEQDNTSGKNLPEEKYDQQCTQMDKIRHTEADIFKNGSKRMIATVPLRHSIRDRKPSLHFLHSLASSSSLIYRNALLHKSYKLHLQKNKSQKEKHRHSKMKIAYKDTPRNRLSRNAKKCLEDNKLVPISEVSLDPIISSNPLLRWWATSASNDSLLEELNNRFEQITNAWVQVSGDEAENCIHKKREHIENDHFKVASPLETCLLELEVSPVKMLFQKKYDLNELCTWFMQTTETQSLSLVRKANARNPLEVINTRGIKLGTKYSDFNASPFRKHFKKFALSSPSKSAEKLHILHKVANSPLLNVKSNLAIARLKRTEFKRLHHERWKREGKLHNHGTVDWNSKRRNLRFFCQNQFLNKTEGETNADIPLQGKSIVDNQCVLPPEIRGDLQQRVVMPDFKIHASFENKFKSEAKENGTNCSQKDFQKGPRLENVCPNSWRSKTLKDCRIFLRKLNCLEHRNTFKLNTIIYSPESTDSGNTHQTHMEESKRFTLRSHSARQNSFKKQSKEIENANTNNPSADEFADHLGNSKLSKCVNFDKNPDSFEVLSNLNKRKRPPWKITEMSTKRHKRQSCNSGQMANYFSKSLASSESLVDKHKEKRKGCIPVPGSMLQVKTDEKLNVSDENTASCPLSPIKMCLNRPIEWNLNLTTASLTSCTVHNQNLKSEEK

SEQ ID NO: 8758 - protein, 1030 aa, Homo sapiens
MAAAAAVEAAAPMGALWGLVHDFVVGQQEGPADQVAADVKSGNYTVLQVVEALGSSLENPEPRTRARGIQLLSQVLLHCHTLLLEKEVVHLILFYENRLKDHHLVIPSVLQGLKALSLCVALPPGLAVSVLKAIFQEVHVQSLPQVDRHTVYNIITNFMRTREEELKSLGADFTFGFIHVMDGEKDPRNLLVAFRIVHDLISRDYSLGPFVEELFEVTSCYFPIDFTPPPNDPHGIQREDLILSLRAVLASTPRFAEFLLPLLIEKVDSEVLSAKLDSLQTLNACCAVYGQKELKDFLPSLWASIRREVFQTASERVEAEGLAALHSLTACLSRSVLRADAEDLLDSFLSNILQDCRHHLCEPDMKLVWPSAKLLQAAAGASARACDSDTSNVPPLLLEQFHKHSQSSQRRTILEMLLGFLKLQQKWSYEDKDQRPLNGFKDQLCSLVFMALTDPSTQLQLVGIRTLTVLGAQPDLLSYEDLELAVGHLYRLSFLKEDSQSCRVAALEASGTLAALYPVAFSSHLVPKLAEELRVGESNLTNGDEPTQCSRHLCCLQALSAVSTHPSIVKETLPLLLQHLWQVNRGNMVAQSSDVIAVCQSLRQMAEKCQQDPESCWYFHQTAIPCLLALAVQASMPEKEPSVLRKVLLEDEVLAAMVSVIGTATTHLSPELAAQSVTHIVPLFLDGNVSFLPENSFPSRFQPFQDGSSGQRRLIALLMAFVCSLPRNVEIPQLNQLMREFLELSCCHSCPFSSTAAAKCFAGLLNKHPAGQQLDEFLQLAVDKVEAGLGSGPCRSQAFTLLLWVTKALVLRYHPLSSCLTARLMGLLSDPELGPAAADGFSLLMSDCTDVLTRAGHAEVRIMFRQRFFTDNVPALVQGFHAAPQDVKPNYLKGLSHVLNRLPKPVLLPELPTLLSLLLEALSCPDCVVQLSTLSCLQPLLLEAPQVMSLHVDTLVTKFLNLSSSPSMAVRIAALQCMHALTRLPTPVLLPYKPQVIRALAKPLDDKKRLVRKEAVSARGEWFLLGSPGS

SEQ ID NO: 8759 - protein, 932 aa, Homo sapiens
MAAAAAVEAAAPMGALWGLVHDFVVGQQEGPADQVAADVKSGNYTVLQVVEALGSSLENPEPRTRARAIQLLSQVLLHCHTLLLEKEVVHLILFYENRLKDHHLVIPSVLQGLKALSLCVALPPGLAVSVLKAIFQEVHVQSLPQVDRHTVYNIITNFMRTREEELKSLGADFTFGFIQVMDGEKDPRNLLVAFRIVHDLISRDYSLGPFVEELFEVTSCYFPIDFTPPPNDPHGIQREDLILSLRAVLASTPRFAEFLLPLLIEKVDSEVLSAKLDSLQTLNACCAVYGQKELKDFLPSLWASIRRESSQRRTILEMLLGFLKLQQKWSYEDKDQRPLNGFKDQLCSLVFMALTDPSTQLQLVGIRTLTVLGAQPDLLSYEDLELAVGHLYRLSFLKEDSQSCRVAALEASGTLAALYPVAFSSHLVPKLAEELRVGESNLTNGDEPTQCSRHLCCLQALSAVSTHPSIVKETLPLLLQHLWQVNRGNMVAQSSDVIAVCQSLRQMAEKCQQDPESCWYFHQTAIPCLLALAVQASMPEKEPSVLRKVLLEDEVLAAMVSVIGTATTHLSPELAAQSVTHIVPLFLDGNVSFLPENSFPSRFQPFQDGSSGQRRLIALLMAFVCSLPRNVEIPQLNQLMRELLELSCCHSCPFSSTAAAKCFAGLLNKHPAGQQLDEFLQLAVDKVEAGLGSGPCRSQAFTLLLWVTKALVLRYHPLSSCLTARLMGLLSDPELGPAAADGFSLLMSDCTDVLTRAGHAEVRIMFRQRFFTDNVPALVQGFHAAPQDVKPNYLKGLSHVLNRLPKPVLLPELPTLLSLLLEALSCPDCVVQLSTLSCLQPLLLEAPQVMSLHVDTLVTKFLNLSSSPSMAVRIAALQCMHALTRLPTPVLLPYKPQVIRALAKPLDDKKRLVRKEAVSARGEWFLLGSPGS

SEQ ID NO: 8760 - protein, 1030 aa, Homo sapiens
MAAAAAVEAAAPMGALWGLVHDFVVGQQEGPADQVAADVKSGNYTVLQVVEALGSSLENPEPRTRARGIQLLSQVLLHCHTLLLEKEVVHLILFYENRLKDHHLVIPSVLQGLKALSLCVALPPGLAVSVLKAIFQEVHVQSLPQVDRHTVYNIITNFMRTREEELKSLGADFTFGFIQVMDGEKDPRNLLVAFRIVHDLISRDYSLGPFVEELFEVTSCYFPIDFTPPPNDPHGIQREDLILSLRAVLASTPRFAEFLLPLLIEKVDSEVLSAKLDSLQTLNACCAVYGQKELKDFLPSLWASIRREVFQTASERVEAEGLAALHSLTACLSRSVLRADAEDLLDSFLSNILQDCRHHLCEPDMKLVWPSASCCRQLQVHLPGPVTLSPAMYCLYCWNSSTSTVRAASGGTILEMLLGFLKLQQKWSYEDKDQRPLNGFKDQLCSLVFMALTDPSTQLQLVGIRTLTVLGAQPDLLSYEDLELAVGHLYRLSFLKEDSQSCRVAALEASGTLAALYPVAFSSHLVPKLAEELRVGESNLTNGDEPTQCSRHLCCLQALSAVSTHPSIVKETLPLLLQHLWQVNRGNMVAQSSDVIAVCQSLRQMAEKCQQDPESCWYFHQTAIPCLLALAVQASMPEKEPSVLRKVLLEDEVLAAMVSVIGTATTHLSPELAAQSVTHIVPLFLDGNVSFLPENSFPSRFQPFQDGSSGQRRLIALLMAFVCSLPRNVEIPQLNQLMRELLELSCCHSCPFSSTAAAKCFAGLLNKHPAGQQLDEFLQLAVDKVEAGLGSGPCRSQAFTLLLWVTKALVLRYHPLSSCLTARLMGLLSDPELGPAAADGFSLLMSDCTDVLTRAGHAEVRIMFRQRFFTDNVPALVQGFHAAPQDVKPNYLKGLSHVLNRLPKPVLLPELPTLLSLLLEALSCPDCVVQLSTLSCLQPLLLEAPQVMSLHVDTLVTKFLNLSSSPSMAVRIAALQCMHALTRLPTPVLLPYKPQVIRALAKPLDDKKRLVRKEAVSARGEWFLLGSPGS

SEQ ID NO: 8761 - protein, 480 aa, Homo sapiens [sequence omitted]

SEQ ID NO: 8762 - protein, 242 aa, Homo sapiens [sequence omitted]

SEQ ID NO: 8763 - protein, 425 aa, Homo sapiens
MALTGYSWLLLSATFLNVGAEISITLEPAQPSEGDNVTLVVHGLSGELLAYSWYAGPTLSVSYLVASYIVSTGDETPGPAHTGREAVRPDGSLDIQGILPRHSGTYILQTFNRQLQTEVGYGHVQVHEILAQPTVLANSTALVERRDTLRLMCSSPSPTAEVRWFFNGGALPVALRLGLSPDGRVLARHGIRREEAGAYQCEVWNPVSVSRSEPINLTVYFGPERVAILQDSTTRTGCTIKVDFNTSLTLWCVSRSCPEPEYVWTFNGQALKNGQDHLNISSMTAAQEGTYTCIAKNTKTLLSGSASVVVKLSAAAVATMIVPVPTKPTEGQDVTLTVQGYPKDLLVYAWYRGPASEPNRLLSQLPSGTWIAGPAHTGREVGFPNCSLLVQKLNLTDTGRYTLKTVTVQGKTETLEVELQVAPLG

SEQ ID NO: 8764 - protein, 582 aa, Homo sapiens
MIFLTALPLFWIMISASRGGHWGAWMPSSISAFEGTCVSIPCRFDFPDELRPAVVHGVWYFNSPYPKNYPPVVFKSRTQVVHESFQGRSRLLGDLGLRNCTLLLSNVSPELGGKYYFRGDLGGYNQYTFSEHSVLDIVNTPNIVVPPEVVAGTEVEVSCMVPDNCPELRPELSWLGHEGLGEPAVLGRLREDEGTWVQVSLLHFVPTREANGHRLGCQASFPNTTLQFEGYASMDVKYPPVIVEMNSSVEAIEGSHVSLLCGADSNPPPLLTWMRDGTVLREAVAESLLLELEEVTPAEDGVYACLAENAYGQDNRTVGLSVMYAPWKPTVNGTMVAVEGETVSILCSTQSNPDPILTIFKEKQILSTVIYESELQLELPAVSPEDDGEYWCVAENQYGQRATAFNLSVEFAPVLLLESHCAAARDTVQCLCVVKSNPEPSVAFELPSRNVTVNESEREFVYSERSGLVLTSILTLRGQAQAPPRVICTARNLYGAKSLELPFQGAHRLMWAKIGPVGAVVAFAILIAIVCYITQTRRKKNVTESPSFSAGDNPPVLFSSDFRISGAPEKYESKEVSTLESH

SEQ ID NO: 8765 - protein, 626 aa, Homo sapiens
MIFLTALPLFWIMISASRGGHWGAWMPSSISAFEGTCVSIPCRFDFPDELRPAVVHGVWYFNSPYPKNYPPVVFKSRTQVVHESFQGRSRLLGDLGLRNCTLLLSNVSPELGGKYYFRGDLGGYNQYTFSEHSVLDIVNTPNIVVPPEVVAGTEVEVSCMVPDNCPELRPELSWLGHEGLGEPAVLGRLREDEGTWVQVSLLHFVPTREANGHRLGCQASFPNTTLQFEGYASMDVKYPPVIVEMNSSVEAIEGSHVSLLCGADSNPPPLLTWMRDGTVLREAVAESLLLELEEVTPAEDGVYACLAENAYGQDNRTVGLSVMYAPWKPTVNGTMVAVEGETVSILCSTQSNPDPILTIFKEKQILSTVIYESELQLELPAVSPEDDGEYWCVAENQYGQRATAFNLSVEFAPVLLLESHCAAARDTVQCLCVVKSNPEPSVAFELPSRNVTVNESEREFVYSERSGLVLTSILTLRGQAQAPPRVICTARNLYGAKSLELPFQGAHRLMWAKIGPVGAVVAFAILIAIVCYITQTRRKKNVTESPSFSAGDNPPVLFSSDFRISGAPEKYESERRLGSERRLLGLRGEPPELDLSYSHSDLGKRPTKDSYTLTEELAEYAEIRVK

SEQ ID NO: 8766 - protein, 187 aa, Homo sapiens
MAAPGALLVMGVSGSGKSTVGALLASELGWKFYDADDYHPEENRRKMGKGIPLNDQDRIPWLCNLHDILLRDVASGQRVVLACSALKKTYRDILTQGKDGVALKCEESGKEAKQAEMQLLVVHLSGSFEVISGRLLKREGHFMPPELLQSQFETLEPPAAPENFIQISVDKNVSEIIATIMETLKMK

SEQ ID NO: 8767 - protein, 497 aa, Homo sapiens [sequence omitted]

SEQ ID NO: 8768 - protein, 497 aa, Homo sapiens
MAAEPGHMDMGAEALPGPDEAAAAAAFAEVTTVTVANVGAAADNVFTTSVANAASISGHVLSGRTALQIGDSLNTEKATLIVVHTDGSIVETTGLKGPAAPLTPGPQSPPTPLAPGQEKGGTKYNWDPSVYDSELPVRCRNISGTLYKNRLGSGGRGRCIKQGENWYSPTEFEAMAGRASSKDWKRSIRYAGRPLQCLIQDGILNPHAASCTCAACCDDMTLSGPVRLFVPYKRRKKENELPTTPVKKDSPKNITLLPATAATTFTVTPSGQITTSGALTFDRASTVEATAVISESPAQGDVFAGATVQEASVQPPCRASHPEPHYPGYQDSCQIAPFPEAALPTSHPKIVLTSLPALAVPPPTPTKAAPPALVNGLELSEPRSWLYLEEMVNSLLNTAQQLKTLFEQAKHASTYREAATNQAKIHADAERKEQSCVNCGREAMSECTGCHKVNYCSTFCQRKDWKDHQHICGQSAAVTVQADEVHVAESVMEKVTV

SEQ ID NO: 8769 - protein, 551 aa, Homo sapiens
MEDSDSAAKQLGLADAAAAGGEAEEPVLSRDEDSEEDADSEAERETPRVTAVAVMAAEPGHMDMGAEALPGPDEAAAAAAFAEVTTVTVANVGAAADNVFTTSVANAASISGHVLSGRTALQIGDSLNTEKATLIVVHTDGSIVETTGLKGPAAPLTPGPQSPPTPLAPGQEKGGTKYNWDPSVYDSELPVRCRNISGTLYKNRLGSGGRGRCIKQGENWYSPTEFEAMAGRASSKDWKRSIRYAGRPLQCLIQDGILNPHAASCTCAACCDDMTLSGPVRLFVPYKRRKKENELPTTPVKKDSPKNITLLPATAATTFTVTPSGQITTSGALTFDRASTVEATAVISESPAQGDVFAGATVQEASVQPPCRASHPEPHYPGYQDSCQIAPFPEAALPTSHPKIVLTSLPALAVPPPTPTKAAPPALVNGLELSEPRSWLYLEEMVNSLLNTAQQLKTLFEQAKHASTYREAATNQAKIHADAERKEQSCVNCGREAMSECTGCHKVNYCSTFCQRKDWKDHQHICGQSAAVTVQADEVHVAESVMEKVTV

SEQ ID NO: 8770 - protein, 576 aa, Homo sapiens
MEDSDSAAKQLGLAEAAAVAAAAAVAAAAAAAAGGEAEEPVLSRDEDSEEDADSEAERETPRVTAVAVMAAEPGHMDMGAEALPGPDEAAAAAAFAGKCARRPLASSEVTTVTVANVGAAADNVFTTSVANAASISGHVLSGRTALQIGDSLNTEKATLIVVHTDGSIVETTGLKGPAAPLTPGPQSPPTPLAPGQEKGGTKYNWDPSVYDSELPVRCRNISGTLYKNRLGSGGRGRCIKQGENWYSPTEFEAMAGRASSKDWKRSIRYAGRPLQCLIQDGILNPHAASCTCAACCDDMTLSGPVRLFVPYKRRKKENELPTTPVKKDSPKNITLLPATAATTFTVTPSGQITTSGALTFDRASTVEATAVISESPAQGDVFAGATVQEASVQPPCRASHPEPHYPGYQDSCQIAPFPEAALPTSHPKIVLTSLPALAVPPPTPTKTAPPALVNGLELSEPRSWLYLEEMVNSLLNTAQQLKTLFEQAKHASTYREAATNQAKIHADAERKEQSCVNCGREAMSECTGCHKVNYCSTFCQRKDWKDHQHICGQSAAVTVQADEVHVAESVMEKVTV

SEQ ID NO: 8771 - protein, 158 aa, Homo sapiens
MLLFALLLAMELPLVAASATMRAQWTYSLRCHDCAVINDFNCPNIRVCPYHIRRCMTISIRINSRELLVYKNCTNNCTFVYAAEQPPEAPGKIFKTNSFYWVCCCNSMVCNAGGPTNLERDMLPDEVTEEELPEGTVRLGVSKLLLSFASIIVSNILP

SEQ ID NO: 8772 - protein, 341 aa, Homo sapiens
MGRRCCRRRVLAAACLGAALLLLCAAPRSLRPAFGNRALGSSWLGGEKRSPLQKLYDLDQDPRSTLAKVHRQRRDLLNSACSRHSRRQRLLQPEDLRHVLVDDAHGLLYCYVPKVACTNWKRVLLALSGQARGDPRAISAQEAHAPGRLPSLADFSPAEINRRLRAYLAFLFVREPFERLASAYRNKLARPYSAAFQRRYGARIVQRLRPRALPDARARGHDVRFAEFLAYLLDPRTRREEPFNEHWERAHALCHPCRLRYDVVGKFETLAEDAAFVLGLAGASDLSFPGPPRPRGAAASRDLAARLFRDISPFYQRRLFDLYKMDFLLFNYSAPSYLRLL

SEQ ID NO: 8773 - protein, 427 aa, Homo sapiens
MPRSSQFKRILNRELTHLSETSRSGNQVSEYISRTFLDQQTEVELPKVTAEEAPQPMSRISGLHGLCHSASLSSATVPRFGVQTDQEEQLAKELEDTNKWGLDVFKVAELSGNRPLTAIIFSIFQAVFTDLEILAALFASAIHDVDHPGVSNQFLINTNSELALMYNDASVLENHHLAVGFKLLQAENCDIFQNLSAKQRLSLRRMVIDMVLATDMSKHMNLLADLKTMVETKKVTSLGVLLLDNYSDRIQVLQNLVHCADLSNPTKPLPLYRQWTDRIMAEFFQQGDRERESGLDISPMCDKHTASVEKSQVGFIDYIAHPLWETWADLVHPDAQDLLDTLEDNREWYQSKIPRSPSDLTNPERDGPDRFQFELTLEEAEEEDEEEEEEGEETALAKEALELPDTELLSPEAGPDPGDLPLDNQRT

SEQ ID NO: 8774 - protein, 680 aa, Homo sapiens
MQGPPAPAPVPGPGSPRGSPRGSPGLFRKLLVNQSIRLQRRFTVAHPLCFDLENGLSCGRRALDPQSSPGLGRIMQAPVPHSQRRESFLYRSDSDYELSPKAMSRNSSVASDLHGEDMIVTPFAQVLASLRTVRSNVAALARQQCLGAAKQGPVGNPSSSNQLPPAEDTGQKLALETLDELDWCLDQLETLQTRHSVGEMASNKFKRILNRELTHLSETSRSGNQVSEYISRTFLDQQTEVELPKVTAEEAPQPMSRISGLHGLCHSASLSSATVPRFGVQTDQEEQLAKELEDTNKWGLDVFKVAELSGNRPLTAIIFSIFQERDLLKTFQIPADTLATYLLMLEGHYHANVAYHNSLHAADVAQSTHVLLATPALEAVFTDLEILAALFASAIHDVDHPGVSNQFLINTNSELALMYNDASVLENHHLAVGFKLLQAENCDIFQNLSAKQRLSLRRMVIDMVLATDMSKHMNLLADLKTMVETKKVTSLGVLLLDNYSDRIQVLQNLVHCADLSNPTKPLPLYRQWTDRIMAEFFQQGDRERESGLDISPMCDKHTASVEKSQVGFIDYIAHPLWETWADLVHPDAQDLLDTLEDNREWYQSKIPRSPSDLTNPERDGPDRFQFELTLEEAEEEDEEEEEEGEETALAKEALELPDTELLSPEAGPDPGDLPLDNQRT

SEQ ID NO: 8775 - protein, 712 aa, Homo sapiens
MENLGVGEGAEACSRLSRSRGRHSMTRAPKHLWRQPRRPIRIQQRFYSDPDKSAGCRERDLSPRPELRKSRLSWPVSSCRRFDLENGLSCGRRALDPQSSPGLGRIMQAPVPHSQRRESFLYRSDSDYELSPKAMSRNSSVASDLHGEDMIVTPFAQVLASLRTVRSNVAALARQQCLGAAKQGPVGNPSSSNQLPPAEDTGQKLALETLDELDWCLDQLETLQTRHSVGEMASNKFKRILNRELTHLSETSRSGNQVSEYISRTFLDQQTEVELPKVTAEEAPQPMSRISGLHGLCHSASLSSATVPRFGVQTDQEEQLAKELEDTNKWGLDVFKVAELSGNRPLTAIIFSIFQERDLLKTFQIPADTLATYLLMLEGHYHANVAYHNSLHAADVAQSTHVLLATPALEAVFTDLEILAALFASAIHDVDHPGVSNQFLINTNSELALMYNDASVLENHHLAVGFKLLQAENCDIFQNLSAKQRLSLRRMVIDMVLATDMSKHMNLLADLKTMVETKKVTSLGVLLLDNYSDRIQVLQNLVHCADLSNPTKPLPLYRQWTDRIMAEFFQQGDRERESGLDISPMCDKHTASVEKSQVGFIDYIAHPLWETWADLVHPDAQDLLDTLEDNREWYQSKIPRSPSDLTNPERDGPDRFQFELTLEEAEEEDEEEEEEGEETALAKEALELPDTELLSPEAGPDPGDLPLDNQRT

SEQ ID NO: 8776 - protein, 795 aa, Homo sapiens
GLRDREKTAWSQIAPSGHRQLLGVGPTLSPSSTFYRFSTSGADSSSLSPPLPALGRTREQTLLGARSRGRVLLPAIPDPFLWRMENLGVGEGAEACSRLSRSRGRHSMTRAPKHLWRQPRRPIRIQQRFYSDPDKSAGCRERDLSPRPELRKSRLSWPVSSCRRFDLENGLSCGRRALDPQSSPGLGRIMQAPVPHSQRRESFLYRSDSDYELSPKAMSRNSSVASDLHGEDMIVTPFAQVLASLRTVRSNVAALARQQCLGAAKQGPVGNPSSSNQLPPAEDTGQKLALETLDELDWCLDQLETLQTRHSVGEMASNKFKRILNRELTHLSETSRSGNQVSEYISRTFLDQQTEVELPKVTAEEAPQPMSRISGLHGLCHSASLSSATVPRFGVQTDQEEQLAKELEDTNKWGLDVFKVAELSGNRPLTAIIFSIFQERDLLKTFQIPADTLATYLLMLEGHYHANVAYHNSLHAADVAQSTHVLLATPALEAVFTDLEILAALFASAIHDVDHPGVSNQFLINTNSELALMYNDASVLENHHLAVGFKLLQAENCDIFQNLSAKQRLSLRRMVIDMVLATDMSKHMNLLADLKTMVETKKVTSLGVLLLDNYSDRIQVLQNLVHCADLSNPTKPLPLYRQWTDRIMAEFFQQGDRERESGLDISPMCDKHTASVEKSQVGFIDYIAHPLWETWADLVHPDAQDLLDTLEDNREWYQSKIPRSPSDLTNPERDGPDRFQFELTLEEAEEEDEEEEEEGEETALAKEALELPDTELLSPEAGPDPGDLPLDNQRT

SEQ ID NO: 8777 - protein, 518 aa, Homo sapiens
PLRIRPLLPTAYHLLPTGPGQSADRSEQRGGPCPPAMPRSSQFKRILNRELTHLSETSRSGNQVSEYISRTFLDQQTEVELPKVTAEEAPQPMSRISGLHGLCHSASLSSATVPRFGVQTDQEEQLAKELEDTNKWGLDVFKVAELSGNRPLTAIIFSIFQERDLLKTFQIPADTLATYLLMLEGHYHANVAYHNSLHAADVAQSTHVLLATPALEAVFTDLEILAALFASAIHDVDHPGVSNQFLINTNSELALMYNDASVLENHHLAVGFKLLQAENCDIFQNLSAKQRLSLRRMVIDMVLATDMSKHMNLLADLKTMVETKKVTSLGVLLLDNYSDRIQVLQNLVHCADLSNPTKPLPLYRQWTDRIMAEFFQQGDRERESGLDISPMCDKHTASVEKSQVGFIDYIAHPLWETWADLVHPDAQDLLDTLEDNREWYQSKIPRSPSDLTNPERDGPDRFQFELTLEEAEEEDEEEEEEGEETALAKEALELPDTELLSPEAGPDPGDLPLDNQRT

SEQ ID NO: 8778 - protein, 202 aa, Homo sapiens
PVPQRPASQLLAPFAAEALPGAPRAAMAQHFSLAACDVVGFDLDHTLCRYNLPESAPLIYNSFAQFLVKEKGYDKELLNVTPEDWDFCCKGLALDLEDGNFLKLANNGTVLRASHGTKMMTPEVLAEAYGKKEWKHFLSDTGMACRSGKYYFYDNYFDLPGALLCARVVDYLTKLNNGQKTFDFWKDIVAAIQHNYKMSAFK

SEQ ID NO: 8779 - protein, 455 aa, Homo sapiens
MAQHFSLAACDVVGFDLDHTLCRYNLPESAPLIYNSFAQFLVKEKGYDKELLNVTPEDWDFCCKGLALDLEDGNFLKLANNGTVLRASHGTKMMTPEVLAEAYGKKEWKHFLSDTGMACRSGKYYFYDNYFDLPGALLCARVVDYLTKLNNGQKTFDFWKDIVAAIQHNYKMSAFKENCGIYFPEIKRDPGRYLHSCPESVKKWLRQLKNAGKILLLITSSHSDYCRLLCEYILGNDFTDLFDIVITNALKPGFFSHLPSQRPFRTLENDEEQEALPSLDKPGWYSQGNAVHLYELLKKMTGKPEPKVVYFGDSMHSDIFPARHYSNWETVLILEELRGDEGTRSQRPEESEPLEKKGKYEGPKAKPLNTSSKKWGSFFIDSVLGLENTEDSLVYTWSCKRISTYSTIAIPSIEAIAELPLDYKFTRFSSSNSKTAGYYPNPPLVLSSDETLISK

SEQ ID NO: 8780 - protein, 431 aa, Homo sapiens
MQRPLRVAQGPRPARGCSSADSSRSSSASPLAACAGWAPSALCPTTSPSRRYGPWSIVPIPSSNEEIRLVDDAFGKICHMVSDGSWVVHVQAAKLLGSMEQVSSHFLEQTLDKKLMSDLRRKRTAHERAKELYSSGEFSSGRKWEDDAPKEEVDTGAVNLIESGACGAFVHGLEDEMYEVRIAAVEALCMLAQSSPSFAEKCLDFLVDMFNDEIEEVRLQSIHTMRKISNNITLREDQLDTVLAVLEDSARDIREALHELLCCTNVSTKEGIHLALVELLKNLTKYPTDRDSIWKCLKFLGSRHPTLVLPLVPELLSTHPFFDTAEPDMDDPAYIAVLVLIFNAAKTCPTMRALFSDHTVRHYAYLRDSLSHLVPALRLPGRKLVSSAVSPSIIPQEDPSQQFLQQSLERVYSLQHLDPQGAQELLEFTIR

SEQ ID NO: 8781 - protein, 342 aa, Homo sapiens
MVSDGSWVVHVQAAKLLGSMEQVSSHFLEQTLDKKLMSDLRRKRTAHERAKELYSSGEFSSGRKWEDDAPKEEVDTGAVNLIESGACGAFVHGLEDEMYEVRIAAVEALCMLAQSSPSFAEKCLDFLVDMFNDEIEEVRLQSIHTMRKISNNITLREDQLDTVLAVLEDSARDIREALHELLCCTNVSTKEGIHLALVELLKNLTKCLKFLGSRHPTLVLPLVPELLSTHPFFDTAEPDMDDPAYIAVLVLIFNAAKTCPTMRALFSDHTVRHYAYLRDSLSHLVPALRLPGRKLVSSAVSPSIIPQEDPSQQFLQQSLERVYSLQHLDPQGAQELLEFTIR

SEQ ID NO: 8782 - protein, 790 aa, Homo sapiens
LGNLGSLEKSVTKDAEGLAARDVQKIIGDYFSDQDPRVRTAAIKAMLQLHERGLKLHQTIYNQACKLLSDDYEQVRSAAVQLIWVVSQLYPESIVPIPSSNEEIRLVDDAFGKICHMVSDGSWVVRVQAAKLLGSMEQVSSHFLEQTLDKKLMSDLRRKRTAHERAKELYSSGEFSSGRKWGDDAPKEEVDTGAVNLIESGACGAFVHGLEDEMYEVRIAAVEALCMLAQSSPSFAEKCLDFLVDMFNDEIEEVRLQSIHTMRKISNNITLREDQLDTVLAVLEDSSRDIREALHELLCCTNVSTKEGIHLALVELLKNLTKYPTDRDSIWKCLKFLGSRHPTLVLPLVPELLSTHPFFDTAEPDMDDPAYIAVLVLIFNAAKTCPTMPALFSDHTFRHYAYLRDSLSHLVPALRLPGRKLVSSAVSPSIIPQEDPSQQFLQQSLERVYSLQHLDPQGAQELLEFTIRDLQRLGELQSELAGVADFSATYLRCQLLLIKALQEKLWNVAAPLYLKQSDLASAAAKQIMEETYKMEFMYSGVENKQVVIIHHMRLQAKALQLIVTARTTRGLDPLFGMCEKFLQEVDFFQRYFIADLPHLQDSFVDKLLDLMPRLMTSKPAEVVKILQTMLRQSAFLHLPLPEQIHKASATIIEPAGESDNPLRFTSGLVVALDVDATLEHVQDPQNTVKVQVLYPDGQAQMIHPKPADFRNPGPGRHRLITQVYLSHTAWTEACQVEVRLLLAYNSSARIPKCPWMEGGEMSPQVETSIEGTIPFSKPVKVYIMPKPARR

SEQ ID NO: 8783 - protein, 505 aa, Homo sapiens
MAAHLKKRVYEEFTKVVQPQEEIATKKLRLTKPSKSAALHIDLCKATSPADALQYLLQFARKPVEAESVEGVVRILLEHYYKENDPSVRLKIASLLGLLSKTAGFSPDCIMDDAINILQNEKSHQVLAQLLDTLLAIGTKLPENQAIQMRLVDVACKHLTDTSHGVRNKCLQLLGNLGSLEKSVTKDAEGLAARDVQKIIGDYFSDQDPRVRTAAIKAMLQLHERGLKLHQTIYNQACKLLSDDYEQVRSAAVQLIWVVSQLYPESIVPIPSSNEEIRLVDDAFGKICHMVSDGSWVVRVQAAKLLGSMEQVSSHFLEQTLDKKLMSDLRRKRTAHERAKELYSSGEFSSGRKWGDDAPKEEVDTGAVNLIESGACGAFVHGLEDEMYEVRIAAVEALCMLAQSSPSFAEKCLDFLVDMFNDEIEEVRLQSIHTMRKISNNITLREDQLDTVLAVLEDSSRDIREALHELLCCTNVSTKEGIHLALVELLKNLTKYPTDRDSIWK

SEQ ID NO: 8784 - protein, 439 aa, Homo sapiens
MQRPLRVAQGPRPARGCSSADSSRSSSASPLAACAGWAPSALCPTTLPSRRYGPWNIVPIPSSNEEIRLVDDAFGKICHMVGDGSWVVHVQAAKLLGSMEQVSSHFLEQTLDKKLMSDLRRKRTAHERAKELYSSGEFSSGRKWEDDAPKEEVDTGAVNLIESGACGAFVHGLEDEMYEVRIAAVEALCMLAQSSPSFAEKCLDFLVDMFNDEIEEVRLQSIHTMRKISNNITLREDQLDTVLAVLEDSSRGIREALHELLCCTNVSTKEGIHLALVELLKNLTKYPTDRDSIWKCLKFLGSRHPTLVLPLVPELLSTHPFFDTAEPDMDDPAYIAVLVLIFNAAKTCPTMRALFSDHTVRHYAYLRDSLSHLVPALRLPGRKLVSSAVSPSIIPQEDPSQQLLQQSLEGVCSLQHLDPQGAQELLEFTIRPCRKSRGM

SEQ ID NO: 8785 - protein, 558 aa, Homo sapiens
MYRYLAKALLPSRAGPAALGSAANHSAALLGRGRGQPAAASQPGLALAARRHYSELVADREDDPNFFKMVEGFFDRGASIVEDKLVKDLRTQESEEQKRNRVRGILRIIKPCNHVLSLSFPIRRDDGSWEVIEGYRAQHSQHRTPCKGGIRYSTDVSVDEVKALASLMTYKCAVVDVPFGGAKAGVKINPKNYTENELEKITRRFTMELAKKGFIGPGVDVPAPDMNTGEREMSWIADTYASTIGHYDINAHACVTGKPISQGGIHGRISATGRGVFHGIENFINEASYMSILGMTPGFRDKTFVVQGFGNVGLHSMRYLHRFGAKCIAVGESDGSIWNPDGIDPKELEDFKLQHGSILGFPKAKPYEGSILEVDCDILIPAATEKQLTKSNAPRVKAKIIAEGANGPTTPEADKIFLERNILVIPDLYLNAGGVTVSYFEWLKNLNHVSYGRLTFKYERDSNYHLLLSVQESLERKFGKHGGTIPIVPTAEFQDSISGASEKDIVHSALAYTMERSARQIMHTAMKYNLGLDLRTAAYVNAIEKVFKVYSEAGVTFT

SEQ ID NO: 8786 - protein, 1618 aa, Homo sapiens
GRGRRRRRNGRGAEPPPPKAPSLRPRTGAVAWRSKVPPSPQGRRAQARGLFGGSAPGLHLEAAPDGDGQRLLPSGSRAGRCEGTMALTPGWGSSAGPVRPELWLLLWAAAWRLGASACPALCTCTGTTVDCHGTGLQAIPKNIPRNTERLELNGNNITRIHKNDFAGLKQLRVLQLMENQIGVVERGAFDDMKELERLRLNRNQLHMLPELLFQNNQALSRLDLSENAIQAIPRKAFRGATDLKNLQLDKNQISCIEEGAFRALRGLEVLTLNNNNITTIPVSSFNHMPKLRTFRLHSNHLFCDCHLAWLSQWLRQRPTIGLFTQCSGPASLRGLNVAEVQKSEFSCSGQGEAGRVPTCTLSSGSCPAMCTCSNGIVDCRGKGLTAIPANLPETMTEIRLELNGIKSIPPGAFSPYRKLRRIDLSNNQIAEIAPDAFQGLRSLNSLVLYGNKITDLPRGVFGGLYTLQLLLLNANKINCIRPDAFQDLQNLSLLSLYDNKIQSLAKGTFTSLRAIQTLHLAQNPFICDCNLKWLADFLRTNPIETSGARCASPRRLANKRIGQIKSKKFRCSAKEQYFIPGTEDYQLNSECNSDVVCPHKCRCEANVVECSSLKLTKIPERIPQSTAELRLNNNEISILEATGMFKKLTHLKKINLSNNKVSEIEDGAFEGAASVSELHLTANQLESIRSGMFRGLDGLRTLMLRNNRISCIHNDSFTGLRNVRLLSLYDNQITTVSPGAFDTLQSLSTLNLLANPFNCNCQLAWLGGWLRKRKIVTGNPRCQNPDFLRQIPLQDVAFPDFRCEEGQEEGGCLPRPQCPQECACLDTVVRCSNKHLRALPKGIPKNVTELYLDGNQFTLVPGQLSTFKYLQLVDLSNNKISSLSNSSFTNMSQLTTLILSYNALQCIPPLAFQGLRSLRLLSLHGNDISTLQEGIFADVTSLSHLAIGANPLYCDCHLRWLSSWVKTGYKEPGIARCAGPQDMEGKLLLTTPAKKFECQGPPTLAVQAKCDLCLSSPCQNQGTCHNDPLEVYRCACPSGYKGRDCEVSLDSCSSGPCENGGTCHAQEGEDAPFTCSCPTGFEGPTCGVNTDDCVDHACANGGVCVDGVGNYTCQCPLQYEGKACEQLVDLCSPDLNPCQHEAQCVGTPDGPRCECMPGYAGDNCSENQDDCRDHRCQNGAQCMDEVNSYSCLCAEGYSGQLCEIPPHLPAPKSPCEGTECQNGANCVDQGNRPVCQCLPGFGGPECEKLLSVNFVDRDTYLQFTDLQNWPRANITLQVSTAEDNGILLYNGDNDHIAVELYQGHVRVSYDPGSYPSSAIYSAETINDGQFHTVELVAFDQMVNLSIDGGSPMTMDNFGKHYTLNSEAPLYVGGMPVDVNSAAFRLWQILNGTGFHGCIRNLYINNELQDFTKTQMKPGVVPGCEPCRKLYCLHGICQPNATPGPMCHCEAGWVGLHCDQPADGPCHGHKCVHGQCVPLDALSYSCQCQDGYSGALCNQAGALAEPCRGLQCLHGHCQASGTKGAHCVCDPGFSGELCEQESECRGDPVRDFHQVQRGYAICQTTRPLSWVECRGSCPGQGCCQGLRLKRRKFTFECSDGTSFAEEVEKPTKCGCALCA

SEQ ID NO: 8787 - protein, 798 aa, Homo sapiens
LWLLLWAAAWRLGASACPALCTCTGTTVDCHGTGLQAIPKNIPRNTERLELNGNNITRIHKNDFAGLKQLRVLQLMENQIGAVERGAFDDMKELERLRLNRNQLHMLPELLFQNNQALSRLDLSENAIQAIPRKAFRGATDLKNLQLDKNQISCIEEGAFRALRGLEVLTLNNNNITTIPVSSFNHMPKLRTFRLHSNHLFCDCHLAWLSQWLRQRPTIGLFTQCSGPASLRGLNVAEVQKSEFSCSGQGEAGRVPTCTLSSGSCPAMCTCSNGIVDCRGKGLTAIPANLPETMTEIRLELNGIKSIPPGAFSPYRKLRRIRPLSFCSPCRDLSNNQIAEIAPDAFQGLRSLNSLVLYGNKITDLPRGVFGGLYTLQLLLLNANKINCIRPDAFQDLQNLSLLSLYDNKIQSLAKGTFTSLRAIQTLHLAQNPFICDCNLKWLADFLRTNPIETSGARCASPRRLANKRIGQIKSKKFRCSAKEQYFIPGTEDYQLNSECNSDVVCPHKCRCEANVVECSSLKLTKIPERIPQSTAELRLNNNEISILEATGMFKKLTHLKKINLSNNKVSEIEDGAFEGAASVSELHLTANQLESIRSGMFRGLDGLRTLMLRNNRISCIHNDSFTGLRNVRLLSLYDNQITTVSPGAFDTLQSLSTLNLLANPFNCNCQLAWLGGWLRKRKIVTGNPRCQNPDFLRQIPLQDVAFPDFRCEEGQEEGGCLPRPQCPQECACLDTVVRCSNKHLRALPKGIPKNVTELYLDGNQFTLVPGQLSTFKYLQLVILSYNALQCIPPLAFP

SEQ ID NO: 8788 - protein, 1516 aa, Homo sapiens
MAPAKATNVVRLLLGSTALWLSQLGSGTVAASKSVTAHLAAKWPETPLLLEASEFMAEESNEKFWQFLETVQELAIYKQTESDYSYYNLILKKAGQFLDNLHINLLKFAFSIRAYSPAIQMFQQIAADEPPPDGCNAFVVIHKKHTCKINEIKKLLKKAASRTRPYLFKGDHKFPTNKENLPVVILYAEMGTRTFSAFHKVLSEKAQNEEILYVLRHYIQKPSSRKMYLSGYGVELAIKSTEYKALDDTQVKTVTNTTVEDETETNEVQGFLFGKLKEIYSDLRDNLTAFQKYLIESNKQMMPLKVWELQDLSFQAASQIMSTPVYDAIKLMKDISQNFPIKARSLTRIAVNQHMREEIKENQKDLQVRFKIQPGDARLFINGLRVDMDVYDAFSILDMLKLEGKMMNGLRNLGINGEDMSKFLKLNSHIWEYTYVLDIRHSSIMWINDLENDDLYITWPTSCQKLLKPVFPGSVPSIRRNFHNLVLFIDPAQEYTLDFIKLADVFYSHEVPLRIGFVFILNTDDEVDGANDAGVALWRAFNYIAEEFDISEAFISIVHMYQKVKKDQNILTVDNVKSVLQNTFPHANIWDILGIHSKYDEERKAGASFYKMTGLGPLPQALYNGEPFKHEEMNIKELKMAVLQRMMDASVYLQREVFLGTLNDRTNAIDFLMDRNNVVPRINTLILRTNQQYLNLISTSVTADVEDFSTFFFLDSQDKSAVIAKNMYYLTQDDESIISAVTLWIIADFDKPSGRKLLFNALKHMKTSVHSRLGIIYNPTSKINEENTAISRGILAAFLTQKNMFLRSFLGQLAKEEIATTIYSGDKIKTFLIEGMDKNAFEKKYNTVGVNIFRTHQLFCQDVLKLRPGEMGIVSNGRFLGPLDEDFYAEDFYLLEKITFSNLGEKIKGIVENMGINANNMSDFIMKVDALMSSVPKRASRYDVTFLRENHSVIKTNPQENDMFFNVIAIVDPLTREAQKMAQLLVVLGKIINLKIKLFMNCRGRLSEAPLESFYRFVLEPELMSGANDVSSLGPVAKFLDIPESPLLILNMITPEGWLVETVHSNCDLDNIHLKDTEKTVTAEYELEYLLLEGQCFDKVTEQPPRGLQFTLGTKNKPAVVDTIVMAHHGYFQLKANPGAWILRLHQGKSEDIYQIVGHEGTDSQADLEDIIVVLNSFKSKILKVKVKKETDKIKEDILTDEDEKTKGLWDSIKSFTVSLHKENKKEKDVLNIFSVASGHLYERFLRIMMLSVLRNTKTPVKFWLLKNYLSPTFKEVIPHMAKEYGFRYELVQYRWPRWLRQQTERQRIIWGYKILFLDVLFPLAVDKIIFVDADQIVRHDLKELRDFDLDGAPYGYTPFCDSRREMDGYRFWKTGYWASHLLRRKYHISALYVVDLKKFRRIGAGDRLRSQYQALSQDPNSLSNLDQDLPNNMIYQVAIKSLPQDWLWCETWCDDESKQRAKTIDLCNNPKTKESKLKAAARIVPEWVEYDAEIRQLLDHLENKKQDTILTHDEL

SEQ ID NO: 8789 - protein, 266 aa, Homo sapiens
HASAAPPGRVGRGARCLAAVLTLMRSRKLTGAVRSSARLKARSCSAARLASAQEVAGSTSAKTACLTSSSHKATDRRTSKKFKCDKGHLVKSELQKLVPKNDSASLPKVTPETPCENEFAEGSALLPGSEAGVSVQQGAASLPLGGCRVVSDSRLAKTRDGLSVPKHSAGSGAEESNSSSTVQKQNEPGLQTEDVQKPPLQMDNSVFLDDDSNQPMPVSRFFGNVELMQDLPPASSSCPSMSRREFRKMHFRAKDDDDDDDDDAEM

SEQ ID NO: 8790 - protein, 345 aa, Homo sapiens
MGVCGYLFLPWKCLVVVSLRLLFLVPTGVPVRSGDATFPKAMDNVTVRQGESATLRCTIDDRVTRVAWLNRSTILYAGNDKWSIDPRVIILVNTPTQYSIMIQNVDVYDEGPYTCSVQTDNHPKTSRVHLIVQVPPQIMNISSDITVNEGSSVTLLCLAIGRPEPTVTWRHLSVKEGQGFVSEDEYLEISDIKRDQSGEYECSALNDVAAPDVRKVKITVNYPPYISKAKNTGVSVGQKGILSCEASAVPMAEFQWFKEETRLATGLDGMRIENKGRMSTLTFFNVSEKDYGNYTCVATNKLGNTNASITLYGPGAVIDGVNSASRALACLWLSGTLLAHFFIKF

SEQ ID NO: 8791 - protein, 446 aa, Homo sapiens
GGRRPGRDPGRALRSRPVACALPPAASPARGPSAAGPRLAGCGSGLKMDEDGGGEGGGVPEDLSLEEREELLDIRRRKKELIDDIERLKYEIAEVMTEIDNLTSVEESKTTQRNKQIAMGRKKFNMDPKKGIQFLIENDLLQSSPEDVAQFLYKGEGLNKTVIGDYLGERDEFNIKVLQAFVELHEFADLNLVQALRQFLWSFRLPGEAQKIDRMMEAFASRYCLCNPGVFQSTDTCYVLSFAIIMLNTSLHNHNVRDKPTAERFIAMNRGINEGGDLPEELLRNLYESIKNEPFKIPEDDGNDLTHTFFNPDREGWLLKLGGRVKTWKRRWFILTDNCLYYFEYTTDKEPRGIIPLENLSIREVEDPRKPNCFELYNPSHKGQVIKACKTEADGRVVEGNHVVYRISAPSPEEKEEWMKSIKASISRDPFYDMLATRKRRIANKK

SEQ ID NO: 8792 - protein, 400 aa, Homo sapiens
MDEDGGGEGGGVPEDLSLEEREELLDIRRRKKELIDDIERLKYEIAEVMTEIDNLTSVEESKTTQRNKQIAMGRKKFNMDPKKGIQFLIENDLLQSSPEDVAQFLYKGEGLNKTVIGDYLGERDEFNIKVLQAFVELHEFADLNLVQALRQFLWSFRLPGEAQKIDRMMEAFASRYCLCNPGVFQSTDTCYVLSFAIIMLNTSLHNHNVRDKPTAERFIAMNRGINEGGDLPEELLRNLYESIKNEPFKIPEDDGNDLTHTFFNPDREGWLLKLGGGRVKTWKRRWFILTDNCLYYFEYTTDKEPRGIIPLENLSIREVEDPRKPNCFELYNPSHKGQVIKACKTEADGRVVEGNHVVYRISAPSPEEKEEWMKSIKASISRDPFYDMLATRKRRIANKK

SEQ ID NO: 8793 - protein, 4834 aa, Homo sapiens [sequence omitted]

SEQ ID NO: 8794 - protein, 842 aa, Homo sapiens
AVTQLLGSVLAARPAVRQRRRRGSSLSRFWSLGPTVTAAYLRLLEPPESPSARTGRFAVCVSPTPPRLPPRSSLRADMSGDHLHNDSQIEADFRLNDSHKHKDKHKDREHRHKEHKKEKDREKSKHSNSEHKDSEKKHKEKEKTKHKDGSSEKHKDKHKDRDKEKRKEEKVRASGDAKIKKEKENGFSSPPQIKDEPEDDGYFVPPKEDIKPLKRPRDEDDADYKPKKIKTEDTKKEKKRKLEEEEDGKLKKPKNKDKDKKVPEPDNKKKKPKKEEEQKWKWWEEERYPEGIKWKFLEHKGPVFAPPYEPLPENVKFYYDGKVMKLSPKAEEVATFFAKMLDHEYTTKEIFRKNFFKDWRKEMTNEEKNIITNLSKCDFTQMSQYFKAQTEARKQMSKEEKLKIKEENEKLLKEYGFCIMDNHKERIANFKIEPPGLFRGRGNHPKMGMLKRRIMPEDIIINCSKDAKVPSPPPGHKWKEVRHDNKVTWLVSWTENIQGSIKYIMLNPSSRIKGEKDWQKYETARRLKKCVDKIRNQYREDWKSKEMKVRQRAVALYFIDKLALRAGNEKEEGETADTVGCCSLRVEHINLHPELDGQEYVVEFDFLGKDSIRYYNKVPVEKRVFKNLQLFMENKQPEDDLFDRLNTGILNKHLQDLMEGLTAKVFRTYNASITLQQQLKELTAPDENIPAKILSYNRANRAVAILCNHQRAPPKTFEKSMMNLQTKIDAKKEQLADARRDLKSAKADAKVMKDAKTKKVVESKKKAVQRLEEQLMKLEVQATDREENKQIALGTSKLNYLDPRITVAWCKKWGVPIEKIYNKTQREKFAWAIDMADEDYEF

SEQ ID NO: 8795 - protein, 308 aa, Homo sapiens
RSSARPRARPAAPAAAPGPLAAATMDAIKKKMQMLKLDKENALDRAEQAEADKKAAEDRSKQLEEDIAAKEKLLRVSEDERDRVLEELHKAEDSLLAAEEAAAKAEADVASLNRRIQLVEEELDRAQERLATALQKLEEAEKAADESERGMKVIESRAQKDEEKMEIQEIQLKEAKHIAEDADRKYEEVARKLVIIESDLERAEERAELSEGKCAELEEELKTVTNNLKSLEAQAEKYSQKEDRYEEEIKVLSDKLKEAETRAEFAERSVTKLEKSIDDLEEKVAHAKEENLSMHQMLDQTLLELNNM

SEQ ID NO: 8796 - protein, 227 aa, Homo sapiens
CRLRIFLRTASSEHLHERKLRETAEADVASLNRRIQLVEEELDRAQERLATALQKLEEAEKAADESERGMKVIESRAQKDEEKMEIQEIQLKEAKHIAEDADRKYEEVARKLVIIESDLERAEERAELSEGQVRQLEEQLRIMDSDLESINAAEDKYSQKEDRYEEEIKVLSDKLKEAETRAEFAERSVTKLEKSIDDLEEKVAHAKEENLSMHQMLDQTLLELNNM

SEQ ID NO: 8797 - protein, 284 aa, Homo sapiens
MDAIKKKMQMLKLDKENALDRAEQAEADKKAAEDRSKQLEDELVSLQKKLKGTEDELDKYSEALKDAQEKLELAEKKATDAEADVASLNRRIQLVEEELDRAQERLATALQKLEEAEKAADESERGMKVIESRAQKDEEKMEIQEIQLKEAKHIAEDADRKYEEVARKLVIIESDLERAEERAELSEGQVRQLEEQLRIMDQTLKALMAAEDKYSQKEDRYEEEIKVLSDKLKEAETRAEFAERSVTKLEKSIDDLEEKVAHAKEENLSMHQMLDQTLLELNNM

SEQ ID NO: 8798 - protein, 295 aa, Homo sapiens
LMKRLAARCFAGLLILSPLTVISDSRPADSGKAIEDGNLEEMEEEVRLKKRKRRRNVDKDPAKEDVEKAKKRRGRPPAEKLSPNPPKLTKQMNAIIDTVINYKDRCNVEKVPSNSQLEIEGNSSGRQLSEVFIQLPSRKELPEYYELIRKPVDFKKIKERIRNHKYRSLGDLEKDVMLLCHNAQTFNLEGSQIYEDSIVLQSVFKSARQKIAKEEESEDESNEEEEEEDEEESESEAKSVKVKIKLNKKDDKGRDKGKGKKRPNRGKAKPVVSDFDSDEEQDEREQSEGSGTDDE

SEQ ID NO: 8799 - protein, 376 aa, Homo sapiens
RFPLTILRDFGMGKRSIEERIQEEASYLLEEFRKTKVGCIYPTFFLSRTTSNVISSIVFGDRFDYEDKFLSLLCMMLESFQFTAPSTGQLYEMFSSVMKHLPGPQQQAFKLLQGLEDFIAKKVEHNQRTLDPNSPQDFIDSFLIHMQEVHPSSHPLSLQEEKNPNTEFYLKNLMMSTLNLFIAGTETVSTTLRYGFLLLMKHPEVEAKVHEEIDRVIGKNRQPKFEDRTKMPYMEAVIHEIQRFGDVIPMSLARRVKKDTKFRDFFLPKGTEVFPMLGSVLRDPSFFSNPQDFNPQHFLDDKGQFKKSDAFVPFSIGKRNCFGEGLARMELFLFFTTVMQNFRLKSSQSPKDIDVSPKHVGFATIPRNYTMSFLPR

SEQ ID NO: 8800 - protein, 494 aa, Homo sapiens
MLASGMLLVALLVCLTVMVLMSVWQQRKSKGKLPPGPTPLPFIGNYLQLNTEQMYNSLMKISERYGPVFTIHLGPRRVVVLCGHDAVREALVDQAEEFSGRGEQATFDWVFKGYGVVFSNGERAKQLRRFSIATLRDFGVGKRGIEERIQEEAGFLIDAHRGTGGANIDPTFFLSRTVSNVISSIVFGDRFDYKDKEFLSLLRMMLGIFQFTSTSTGQLYEMFSSVMKHLPGPQQQAFQLLQGLEDFIAKKVEHNQRTLDPNSPRDFIDSFLIRMQEEEKNPNTEFYLKNLVMTTLNLFIGGTETVSTTLRYGFLLLMKHPEVEAKVHEEIDRVIGKNRQPKFEDRAKMPYMEAVIHEIQRFGDVIPMSLARRVKKDTKFRDFFLPKGTEVYPMLGSVLRDPSFFSNPQDFNPQHFLNEKGQFKKSDAFVPFSIGKRNCFGEGLARMELFLFFTTVMQNFRLKSSQSPKDIDVSPKHVGFATIPRNYTMSFLPR

SEQ ID NO: 8801 - protein, 494 aa, Homo sapiens
MLASGLLLVTLLACLTVMVLMSVWRQRKSRGKLPPGPTPLPFIGNYLQLNTEQMYNSLMKISERYGPVFTIHLGPRRVVVLCGHDAVKEALVDQAEEFSGRGEQATFDWLFKGYGVAFSNGERAKQLRRFSIATLRGFGVGKRGIEERIQEEAGFLIDALRGTHGANIDPTFFLSRTVSNVISSIVFGDRFDYEDKEFLSLLRMMLGRFQFTGTSTGQLYEMFSSVMKHLPGPQQQAFKELQGLEDFIAKKVEHNQRTLDPNSPRDFIDSFLIRMQEEEKNPNTEFYLKNLVMTTLNLFFAGTETVSTTLRYGFLLLMKHPEVEAKVHEEIDRVIGKNRQPKFEDRAKMPYTEAVIHEIQRFGDMLPMGLAHRVNKDTKFRDFFLPKGTEVFPMLGSELRDPRFFSNPQDCSPQHFLDEKGQFKKSDAFVPFSIGKRYCFGEGLARMELFLFFTTIMQNFRFKSPQSPKDIDVSPKHVGFATIPRNYTMSFLPR

SEQ ID NO: 8802 - protein, 437 aa, Homo sapiens
MRFVVALVLLNVAAAGAVPLLATESVKQEEAGVRPSAGNVSTHPSLSQRPGGSTKSHPEPQTPKDSPSKSSAEAQTPEDTPNKSGGEAKTLKDSSNKSGAEAQTPKGSTSKSGSEAQTTKDSTSKSHPELQTPKDSTGKSGAEAQTPEDSPNRSGAEPKTQKDSPSKSGSEAQTTKDVPNKSGADGQTPKDGSSKSGAEDQTPKDVPNKSGAEKQTPKDGSNKSGAEEQGPIDGPSKSGAEEQTSKDSPNKVVPEQPSRKDHSKPISNPSDNKELPKADTNQLADKGKLSPHAFKTESGEETDLISPPQEEVKSSEPTEDVGPKEAEDDDTGPEEGSPPKEEKEKMSGSASSENREGTLSDSTGSEKDDLYPNGSGNGSAESSHFFAYLVTAAILVAVLYIAHHNKRKIIAFVLEGKRSKVTRRPKASDYQRLDQKS

SEQ ID NO: 8803 - protein, 453 aa, Homo sapiens
MRFVVALVLLNVAAAGAVPLLATESVKQEEAGVRPSAGNVSTHPSLSQRPGGSTKSHPEPQTPKDSPSKSSAEAQTPEDTPNKSGGEAKTLKDSSNKSGAEAQTPKGSTSKSGSEAQTTKDSTSKSHPELQTPKDSTGKSGAEAQTPEDSPNRSGAEPKTQKDSPSKSGSEAQTTKDVPNKSGADGQTPKDGSSKSGAEDQTPKDVPNKSGAEKQTPKDGSNKSGAEEQGPIDGPSKSGAEEQTSKDSPNKVVPEQPSRKDHSKPISNPSDNKELPKADTNQLADKGKLSPHAFKTESGEETDLISPPQEEVKSSEPTEDVGPKEAEDDDTGPEEGSPPKEEKEKMSGSASSENREGTLSDSTGSEKDDLYPNGSGNGSAESSHFFAYLVTAAILVAVLYIAHHNKRKIIAFVLEGKRSKVTRRPKASDYQRLDQKIFSPPSPNRMVYSSGKR

SEQ ID NO: 8804 - protein, 480 aa, Homo sapiens
MRFVVALVLLNVAAAGAVPLLATESVKQEEAGVRPSAGNVSTHPSLSQRPGGSTKSHPEPQTPKDSPSKSSAEAQTPEDTPNKSGGEAKTLKDSSNKSGAEAQTPKGSTSKSGSEAQTTKDSTSKSHPELQTPKDSTGKSGAEAQTPEDSPNRSGAEPKTQKDSPSKSGSEAQTTKDVPNKSGADGQTPKDGSSKSGAEDQTPKDVPNKSGAEKQTPKDGSNKSGAEEQGPIDGPSKSGAEEQTSKDSPNKVVPEQPSRKDHSKPISNPSDNKELPKADTNQLADKGKLSPHAFKTESGEETDLISPPQEEVKSSEPTEDVGPKEAEDDDTGPEEGSPPKEEKEKMSGSASSENREGTLSDSTGSEKDDLYPNGSGNGSAESSHFFAYLVTAAILVAVLYIAHHNKRKIIAFVLEGKRSKVTRRPKASDYQRLDQKYVLILNVFPAPPKRSFLPQVLTEWYIPLEKDERHQWIVLLSFQL

SEQ ID NO: 8805 - protein, 633 aa, Homo sapiens
  VARIANT 187: Xaa = Any Amino Acid
MALAVAAAAEAQAAAAADNITVLHVKLTESAIQALQTYQSHKNLISFRPSIQFQRLQELVKIPKNDPLNEVHNFNFYLSNVGKDNPQGSFDCVQQTFSSSGASQLNCLGFIQDKITVCATNDSDQMTRERTTQAEEESRNRSTEVIKPGGPYVGKRVQIRKAPQAVSDTVPERKRSTPMNPANPIRXTHSSSSVSQKPYRDRVVHLLALKAYKKPELLARLQKDGVNQKDRNSLGAILQQVANLNPKDLSYTSKDYVFKELQRDWPGYSEIDTWSLESMLSRKLNPSQNAAGTSRSESPVCSSRNAVSSPQTRLLDSEFIDHLMDKKARISHLTSRVPPTLNGHLNPTSEKSAAGLPLPPAAAAIPTPPPLPSTHLPVSHPPQIVNSNSNSPSTPEGRGAQDLPVDSFSQNNSIYENQQDKYTSRTSLETLPPGSVLLKCPKPMEENHSVSHKKSKKKSKKHKEKDQIKKHDIETIEEKEKDLKREEEIAKLNNSSPNSSGGAKEDCTASMEPSAIELPDYLIKYIAIISYEQRRNYKDDVSAEYDEYRALHARMETVARRFIKLDAQRKRLSPGSKEYQNVHEEVLQEYRKIKQSSPNYHEEKYRCEYLHNKLAHIKRLLGEFDQQQAESWP

SEQ ID NO: 8806 - protein, 368 aa, Homo sapiens
MAIKSIASRLRGSRRFLSGFVAGAVVGAAGAGLAALQFFRSQGAEGALTGKQPDGSAEKAVLEQFGFPLTGTEARCYTNHALSYDQAKRVPRWVLEHISKSKIMGDADRKHCKFKPDPNIPPTFSAFNEDYVGSGWSRGHMAPAGNNKFSSKAMAETFYLSNIVPQDFDNNSGYWNRIEMYCRELTERFEDVWVVSGPLTLPQTRGDGKKIVSYQVIGEDNVAVPSHLYKVILARRSSVSTEPLALGAFVVPNEAIGFQPQLTEFQVSLQDLEKLSVLVFFPHLDRTSDIRNICSVDTCKLLDFQEFTLYLSTRKIEGARSVLRLEKIMENLKNAEIEPDDYFMSRYEKKLEELKAKEQSGTQIRKPS

SEQ ID NO: 8807 - protein, 149 aa, Homo sapiens
MAPAGNNKFSSKAMAETFYLSNIVPQDFDNNSGYWNRIEMYCRELTERFEDVWVVSGPLTLPQTRGDGKKIVSYQVIGEDNVAVPSHLYKDHAGCCVESPLGTRTSEEATARIQERDDGGSDQRSGLVELGIYFEGRANRISGRIGCRV

SEQ ID NO: 8808 - protein, 565 aa, Homo sapiens
TSSRAVCSAAAAAAAAALSVWPAGPVGVCSRTDEQRVAVLRQLEMSEPKAIDPKLSTTDRVVKAVPFPPSHRLTAKEVFDNDGKPRVDILKAHLMKEGRLEESVALRIITEGASILRQEKNLLDIDAPVTVCGDIHGQFFDLMKLFEVGGSPANTRYLFLGDYVDRGYFSIECVLYLWALKILYPKTLFLLRGNHECRHLTEYFTFKQECKIKYSERVYDACMDAFDCLPLAALMNQQFLCVHGGLSPEINTLDDIRKLDRFKEPPAYGPMCDILWSDPLEDFGNEKTQEHFTHNTVRGCSYFYSYPAVCEFLQHNNLLSILRAHEAQDAGYRMYRKSQTTGFPSLITIFSAPNYLDVYNNKAAVLKYENNVMNIRQFNCSPHPYWLPNFMDVFTWSLPFVGEKVTEMLVNVLNICSDDELGSEEDGFDGATAAARKEVIRNKIRAIGKMARVFSVLREESESVLTLKGLTPTGMLPSGVLSGGKQTLQSATVEAIEADEAIKGFSPQHKITSFEEAKGLDRINERMPPRRDAMPSDANLNSINKALTSETNGTDSNGSNSSNIQ

SEQ ID NO: 8809 - protein, 406 aa, Homo sapiens [sequence omitted]

SEQ ID NO: 8810 - protein, 430 aa, Homo sapiens
MSLVELLLWWNCFSRTGVAASLEVSESPGSIQVARGQTAVLPCTFTTSAALINLNVIWMVTPLSNANQPEQVILYQGGQMFDGAPRFHGRVGFTGTMPATNVSIFINNTQLSDTGTYQCLVNNLPDIGGRNIGVTGLTVLVPPSAPHCQIQGSQDIGSDVILLCSSEEGIPRPTYLWEKLDNTLKLPPTATQDQVQGTVTIRNISALSSGLYQCVASNAIGTSTCLLDLQVISPQPRNIGLIAGAIGTGAVIIIFCIALILGAFFYWRSKNKEEEEEEIPNEIREDDLPPKCSSAKAFHTEISSSDNNTLTSSNAYNSRYWSNNPKVHRNTESVSHFSDLGQSFSFHSGNANIPSIYANGTHLVPGQHKTLVVTANRGSSPQVMSRSNGSVSRKPRPPHTHSYTISHATLERIGAVPVMVPAQSRAGSLV

SEQ ID NO: 8811 - protein, 379 aa, Homo sapiens
MGYARKVGWVTAGLVIGAGACYCIYRLTRGRKQNKEKMAEGGSGDVDDAGDCSGARYNDWSDDDDDSNESKSIVWYPPWARIGTEAGTRARARARARATRARRAVQKRASPNSDDTVLSPQELQKVLCLVEMSEKPYILEAALIALGNNAAYAFNRDIIRDLGGLPIVAKILNTRDPIVKEKALIVLNNLSVNAENQRRLKVYMNQVCDDTITSRLNSSVQLAGLRLLTNMTVTNEYQHMLANSISDFFRLFSAGNEETKLQVLKLLLNLAENPAMTRELLRAQVPSSLGSLFNKKENKEVILKLLVIFENINDNFKWEENEPTQNQFGEGSLFFFLKEFQVCADKVLGIESHHDFLVKVKVGKFMAKLAEHMFPKSQE

SEQ ID NO: 8812 - protein, 1452 aa, Homo sapiens [sequence omitted]

SEQ ID NO: 8813 - protein, 179 aa, Homo sapiens
HFGLWSVLMVLILNSTLFFFQNLSSYCHSQINSTLKGRWRVSPSHRALALLLCLLTPPFTHSIRELLPLNRGAALDQAHRDVADQWAGGCVPGKPGRQPGRQQARPLPTQQSCGGLHAHPPLLGVCFIFLYFQNEHPPDSLPGMIDAGGGSFSQSLASDPASRGRRGFCAPAGGRSGMC

SEQ ID NO: 8814 - protein, 349 aa, Homo sapiens
MNRKALRCLGHLFLSLGMVCLRIGGFSSVVALGATIICNKIPGLAPRQRAICQSRPDAIIVIGEGSQMGLDECQFQFRNGRWNCSALGERTVFGKELKVGSRDGAFTYAIIAAGVAHAITAACTHGNLSDCGCDKEKQGQYHRDEGWKWGGCSADIRYGIGFAKVFVDAREIKQNARTLMNLHNNEAGRKILEENMKLECKCHGVSGSCTTKTCWTTLPQFRELGYVLKDKYNEAVHVEPVRASRNKRPTFLKIKKPLSYRKPMDTDLVYIEKSPNYCEEDPVTGSVGTQGRACNKTAPQASGCDLMCCGRGYNTHQYARVWQCNCKFHWCCYVKCNTCSERTEMYTCK

SEQ ID NO: 8815 - protein, 525 aa, Homo sapiens
MGWLFLKVLLAGVSFSGFLYPLVDFCISGKTRGQKPNFVIILADDMGWGDLGANWAETKDTANLDKMASEGMRFVDFHAAASTCSPSRASLLTGRLGLRNGVTRNFAVTSVGGLPLNETTLAEVLQQAGYVTGIIGKWHLGHHGSYHPNFRGFDYYFGIPYSHDMGCTDTPGYNHPPCPACPQGDGPSRNLQRDCYTDVALPLYENLNIVEQPVNLSSLAQKYAEKATQFIQRASTSGRPFLLYVALAHMHVPLPVTQLPAAPRGRSLYGAGLWEMDSLVGQIKDKVDHTVKENTFLWFTGDNGPWAQKCELAGSVGPFTGFWQTRQGGSPAKQTTWEGGHRVPALAYWPGRVPVNVTSTALLSVLDIFPTVVALAQASLPQGRRFDGVDVSEVLFGRSQPGHRVLFHPNSGAAGEFGALQTVRLERYKAFYITGGARACDGSTGPELQHKFPLIFNLEDDTAEAVPLERGGAEYQAVLPEVRKVLADVLQDIANDNISSPDYTQDPSVTPCCNPYQIACRCQAA

SEQ ID NO: 8816 - protein, 255 aa, Homo sapiens
MGNSCYNIVATLLLVLNFERTRSLQDPCSNCPAGTFCDNNRNQICSPCPPNSFSSAGGQRTCDICRQCKGVFRTRKECSSTSNAECDCTPGFHCLGAGCSMCEQDCKQGQELTKKGCKDCCFGTFNDQKRGICRPWTNCSLDGKSVLVNGTKERDVVCGPSPADLSPGASSVTPPAPAREPGHSPQIISFFLALTSTALLFLLFFLTLRFSVVKRGRKKLLYIFKQPFMRPVQTTQEEDGCSCRFPEEEEGGCEL

SEQ ID NO: 8817 - protein, 616 aa, Homo sapiens
MAPRARRRRPLFALLLLCALLARLQVALQIAPPCTSEKHYEHLGRCCNKCEPGKYMSSKCTTTSDSVCLPCGPDEYLDSWNEEDKCLLHKVCDTGKALVAVVAGNSTTPRRCACTAGYHWSQDCECCRRNTECAPGLGAQHPLQLNKDTVCKPCLAGYFSDAFSSTDKCRPWTNCTFLGKRVEHHGTEKSDAVCSSSLPARKPPNEPHVYLPGLIILLLFASVALVAAIIFGVCYRKKGKALTANLWHWINEACGRLSGDKESSGDSCVSTHTANFGQQGACEGVLLLTLEEKTFPEDMCYPDQGGVCQGTCVGGGPYAQGEDARMLSLVSKTEIEEDSFRQMPTEDEYMDRPSQPTDQLLFLTEPGSKSTPPFSEPLEVGENDSLSQCFTGTQSTVGSESCNCTEPLCRTDWTPMSSENYLQKEVDSGHCPHWAASPSPNWADVCTGCRNPPGEDCEPLVGSPKRGPLPQCAYGMGLPPEEEASRTEARDQPEDGADGRLPSSARAGAGSGSSPGGQSPASGNVTGNSNSTFISSGQVMNFKGDIIVVYVSQTSQEGAAAAAEPMGRPVQEETLARRDSFAGNGPRFPDPCGGPEGLREPEKASRPVQEQGGAKA

SEQ ID NO: 8818 - protein, 374 aa, Homo sapiens
MAASAAAAELQASGGPRHPVCLLVLGMAGSGKTTFVQRLTGHLHAQGTPPYVINLDPAVHEVPFPANIDIRDTVKYKEVMKQYGLGPNGGIVTSLNLFATRFDQVMKFIEKAQNMSKYVLIDTPGQIEVFTWSASGTIITEALASSFPTVVIYVMDTSRSTNPVTFMSNMLYACSILYKTKLPFIVVMNKTDIIDHSFAVEWMQDFEAFQDALNQETTYVSNLTRSMSLVLDEFYSSLRVVGVSAVLGTGLDELFVQVTSAAEEYEREYRPEYERLKKSLANAESQQQREQLERLRKDMGSVALDAGTAKDSLSPVLHPSDLILTRGTLDEEDEEADSDTDDIDHRVTEESHEEPAFQNFMQESMAQYWKRNNK

SEQ ID NO: 8819 - protein, 832 aa, Homo sapiens
MKPPGSSSRQPPLAGCSLAGASCGPQRGPAGSVPASAPARTPPCRLLLVLLLLPPLAASSRPRAWGAAAPSAPHWNETAEKNLGVLADEDNTLQQNSSSNISYSNAMQKEITLPSRLIYYINQDSESPYHVLDTKARHQQKHNKAVHLAQASFQIEAFGSKFILDLILNNGLLSSDYVEIHYENGKPQYSKGGEHCYYHGSIRGVKDSKVALSTCNGLHGMFEDDTFVYMIEPLELVHDEKSTGRPHIIQKTLAGQYSKQMKNLTMERGDQWPFLSELQWLKRRKRAVNPSRGIFEEMKYLELMIVNDHKTYKKHRSSHAHTNNFAKSVVNLVDSIYKEQLNTRVVLVAVETWTEKDQIDITTNPVQMLHEFSKYRQRIKQHADAVHLISRVTFHYKRSSLSYFGGVCSRTRGVGVNEYGLPMAVAQVLSQSLAQNLGIQWEPSSRKPKCDCTESWGGCIMEETGVSHSRKFSKCSILEYRDFLQRGGGACLFNRPTKLFEPTECGNGYVEAGEECDCGFHVECYGLCCKKCSLSNGAHCSDGPCCNNTSCLFQPRGYECRDAVNECDITEYCTGDSGQCPPNLHKQDGYACNQNQGRCYNGECKTRDNQCQYIWGTKAAGSDKFCYEKLNTEGTEKGNCGKDGDRWIQCSKHDVFCGFLLCTNLTRAPRIGQLQGEIIPTSFYHQGRVIDCSGAHVVLDDDTDVGYVEDGTPCGPSMMCLDRKCLQIQALNMSSCPLDSKGKVCSGHGVCSNEATCICDFTWAGTDCSIRDPVRNLHPPKDEGPKGPSATNLIIGSIAGAILVAAIVLGGTGWGFKNVKKRRFDPTQQGPI

SEQ ID NO: 8820 - protein, 361 aa, Homo sapiens
VIKCKAAVLWELKKPFSIEEVEVAPPKAHEVRIKMVAVGICHTDDHVVSGNLVTPLPVILGHEAAGIVESVGEGVTTVKPGDKVIPLFTPQCGKCRVCKNPESNYCLKNDLGNPRGTLQDGTRRFTCRGKPIHHFLGTSTFSQYTVVDENAVAKIDAASPLEKVCLIGCGFSTGYGSAVNVAKVTPGSTCAVFGLGGVGLSAIMGCKAAGAARIIAVDINKDKFAKAKELGATECINPQDYKKPIQEVLKEMTDGGVDFSFEVIGRLDTMMASLLCCHEACGTSVIVGVPPDSQNLSMNPMLLLTGRTWKGAILGGFKSKECVPKLVADFMAKKFSLDALITHVLPFEKINEGFDLLHSGK

SEQ ID NO: 8821 - protein, 375 aa, Homo sapiens
MSTAGKVIKCKAAVLWELKKPFSIEEVEVAPPKAHEVRIKMVAVGICGTDDHVVSGTMVTPLPVILGHEAAGIVESVGEGVTTVKPGDKVIPLAIPQCGKCRICKNPESNYCLKNDVSNPQGTLQDGTSRFTCRRKPIHHFLGISTFSQYTVVDENAVAKIDAASPLEKVCLIGCGFSTGYGSAVNVAKVTPGSTCAVFGLGGVGLSAIMGCKAAGAARIIAVDINKDKFAKAKELGATECINPQDYKKPIQEVLKEMTDGGVDFSFEVIGRLDTMMASLLCCHEACGTSVIVGVPPDSQNLSMNPMLLLTGRTWKGAILGGFKSKECVPKLVADFMAKKFSLDALITHVLPFEKINEGFDLLHSGKSIRTILMF

SEQ ID NO: 8822 - protein, 314 aa, Homo sapiens
VSGNLVTPLPVILGHEAAGIVESVGEGVTTVKPGDKVIPLFTPQCGKCRVCKNPESNYCLKNDLGNPRGTLQDGTRRFTCRGKPIHHFLGTSTFSQYTVVDENAVAKIDAASPLEKVCLIGCGFSTGYGSAVNVAKVTPGSTCAVFGLGGVGLSAVMGCKAAGAARIIAVDINKDKFAKAKELGATECINPQDYKKPIQEVLKEMTDGGVDFSFEVIGRLDTMMASLLCCHEACGTSVIVGVPPDSQNLSMNPMLLLTGRTWKGAILGGFKSKECVPKLVADFMAKKFSLDALITHVLPFEKINEGFDLLHSGK

SEQ ID NO: 8823 - protein, 627 aa, Homo sapiens
MEGLAGYVYKAASEGKVLTLAALLLNRSESDIRYLLGYVSQQGGQRSTPLIIAARNGHAKVVRLLLEHYRVQTQQTGTVRFDGYVIDGATALWCAAGAGHFEVVKLLVSHGANVNHTTVTNSTPLRAACFDGRLDIVKYLVENNANISIANKYDNTCLMIAAYKGHTDVVRYLLEQRADPNAKAHCGATALHFAAEAGHIDIVKELIKWRAAIVVNGHGMTPLKVAAESCKADVVELLLSHADCDRRSRIEALELLGASFANDRENYDIIKTYHYLYLAMLERFQDGDNILEKEVLPPIHAYGNRTECRNPQELESIRQDRDALHMEGLIVRERILGADNIDVSHPIIYRGAVYADNMEFEQCIKLWLHALHLRQKGNRNTHKDLLRFAQVFSQMIHLNETVKAPDIECVLRCSVLEIEQSMNRVKNISDADVHNAMDNYECNLYTFLYLVCISTKTQCSEEDQCKINKQIYNLIHLDPRTREGFTLLHLAVNSNTPVDDFHTNDVCSFPNALVTKLLLDCGAEVNAVDNEGNSALHIIVQYNRPISDFLTLHSIIISLVEAGAHTDMTNKQNKTPLDKSTTGVSEILLKTQMKMSLKCLAARAVRANDINYQDQIPRTLEEFVGFH

SEQ ID NO: 8824 - protein, 476 aa, Homo sapiens
METPGASASSLLLPAASRPPRKREAGEAGAATSKQRVLDEEEYIEGLQTVIQRDFFPDVEKLQAQKEYLEAEENGDLERMRQIAIKFGSALGKMSREPPPPYVTPATFETPEVHAGTGVVGNKPRPRGRGLEDGEAGEEEEKEPLPSLDVFLSRYTSEDNASFQEIMEVAKERSRARHAWLYQAEEEFEKRQKDNLELPSAEHQAIESSQASVETWKYKAKNSLMYYPEGVPDEEQLFKKPRQVVHKNTRFLRDPFSQALSRCQLQQAAALNAQHKQGKVGPDGKELIPQESPRVGGFGFVATPSPAPGVNESPMMTWGEVENTPLRVEGSETPYVDRTPGPAFKILEPGRRERLGLKMANEAAAKNRAKKQEALRRVTENLASLTPKGLSPAMSPALQRLVSRTASKYTDRALRASYTPSPARSTHLKTPASGLQTPTSTPAPGSATRTPLTQDPASITDNLLQLPARRKASDFF

SEQ ID NO: 8825 - protein, 1218 aa, Homo sapiens
MSTLLVFIFAIINLFNEYSKKDKNTDTLSKKELKELLEKEFRQILKNPDDPDMVDVFMDHLDIDHNKKIDFTEFLLMVFKLAQAYYESTRKENLPISGHKHRKHSHHDKHEDNKQEENKENRKRPSSLERRNNRKGNKGRSKSPRETGGKRHESSSEKKERKGYSPTHREEEYGKNHHNSSKKEKNKTENTRLGDNRKRLSERLEEKEDNEEGVYDYENTGRMTQKWIQSGHIATYYTIQDEAYDTTDSLLEENKIYERSRSSDGKSSSQVNRSRHENTSQVPLQESRTRKRRGSRVSQDRDSEGHSEDSERHSGSASRNHHGSAWEQSRDGSRHPRSHDEDRASHGHSADSSRQSGTRHAETSSRGQTASSHEQARSSAGERHGSHHQQSADSSRHSGIGHGQASTAVSDSGHRGYRGSQASDNEGHSEDSDSQSVAGQRQARSRHQSHQESTRGRSRGGSGRSGSFLYQVSTHEQSESSHGWARTSTGRRQGSRHDQAQDSSRHSTSQQGQDTIHAHPGSRRGGRHGYHHEQSADSTGHSGSQHSHTTTQGRSDASRGSSGSRSTSRETRDQEQSGDGSRHSGSHHQEASTRAESSRHSQVGQGESSGSRTSRNQGSSFSQDRDSQAQSEDSERRSASGSRNHRGSAQEQSRDGSRHPGSHQEDRAGHRQSAESSSQSGTHHAENSSGGQAASSQEQARSSAGERHGSGHQQSADSSRHSGIGHGQASSAVRDSGHRGYSGSQASDQEGHSENSDSQSVSGQRQARSHQQSHQESTRGQSRGRSGRSGSFLYQVSTHEQSESAHGRSAPSTRRRQGSHHDQARDSSRHSASQEGQDTIRGHPGSSRGGRQGSHYEQSVDRSGHSGSHHSHTTSQGRSDASHGTSGSRSASRQTRDEEQSGDGTRHSGSHHQEASTQADSSRHSQVGQGQSAGSRTSRNQGSSVSQDRDSEGQSEDSERHSGSASRNHRGSAQEQSRDGSRHPGSHDEDRAGHRQSADSSSQSGTRHTQTSSRRQAASSQEQARSRAGDRHGSGHQQSADSSRHSAIGRGQASSAVRDRGHRGSRGSQASDQEGHSEDSDSQSVSAQRQAGSHQQSHQESTRGRSQGRSGRSGSFIYQVSTHEQSESAHGRTRTSTGRRQGSHHEQARDSSRHSASQEGQDTIRAHPGSRRGGRQGSHHEQSVDRSGHSGSHHSHTTSQGRSDASHGQSGSVDLQVD

SEQ ID NO: 8826 - protein, 655 aa, Homo sapiens
MSILSILSLKLLIKIFVVVVVVGRNGFPTTNPSGPPLGEGHRAEYMTTRPPNVPPKPQKHRKSRPRSQYNTKLFNGDLETFVKDSGQVIPLIVESCIRFINLYGLQHQGIFRVSGSQVEVNDIKNSFERGENPLADDQSNHDINSVAGVLKLYFRGLENPLFPKERFNDLISCIRIDNLYERALHIRKLLLTLPRSVLIVMRYLFAFLNHLSQYSDENMMDPYNLAICFGPTLMPVPEIQDQVSCQAHVNEIIKTIIIHHETIFPDAKELDGPVYEKCMAGDDYCDSPYSEHGTLEEVDQDAGTEPHTSEDECEPIEAIAKFDYVGRSARELSFKKGASLLLYHRASEDWWEGRHNGIDGLVPHQYIVVQDMDDTFSDTLSQKADSEASSGPVTEDKSSSKDMNSPTDRHPDGYLARQRKRGEPPPPVRRPGRTSDGHCPLHPPHALSNSSVDLGSPSLASHPRGLLQNRGLNNDSPERRRRPGHGSLTNISRHDSLKKIDSPPIRRSTSSGQYTGFNDHKPLDPETIAQDIEETMNTALNELRELERQSTAKHAPDVVLDTLEQVKNSPTPATSTESLSPLHNVALRSSEPQIRRSTSSSSDTMSTFKPMVAPRMGVQLKPPALRPKPAVLPKTNPTIGPAPPPQGPTDKSCTM

SEQ ID NO: 8827 - protein, 1085 aa, Homo sapiens
MSTPSRFKKDKEIIAEYESQVKEIRAQLVEQQKCLEQQTEMRVQLLQDLQDFFRKKAEIETEYSRNLEKLAERFMAKTRSTKDHQQYKKDQNLLSPVNCWYLLLNQVRRESKDHATLSDIYLNNVIMRFMQISEDSTRMFKKSKEIAFQLHEDLMKVLNELYTVMKTYHMYHAESISAESKLKEAEKQEEKQIGRSGDPVFHIRLEERHQRRSSVKKIEKMKEKRQAKYSENKLKSIKARNEYLLTLEATNASVFKYYIHDLSDLIDCCDLGYHASLNRALRTYLSAEYNLETSRHEGLDIIENAVDNLEPRSDKQRFMEMYPAAFCPPMKFEFQSHMGDEVCQVSAQQPVQAELMLRYQQLQSRLATLKIENEEVKKTTEATLQTIQDMVTIEDYDVSECFQHSRSTESVKSTVSETYLSKPSIAKRRANQQETEQFYFMKLREYLEGSNLITKLQAKHDLLQRTLGEGHRAEYMTTRPPNVPPKPQKHRKSRPRSQYNTKLFNGDLETFVKDSGQVIPLIVESCIRFINLYGLQHQGIFRVSGSQVEVNDIKNSFERGENPLADDQSNHDINSVAGVLKLYFRGLENPLFPKERFNDLISCIRIDNLYERALHIRKLLLTLPRSVLIVMRYLFAFLNHLSQYSDENMMDPYNLAICFGPTLMPVPEIQDQVSCQAHVNEIIKTIIIHHETIFPDAKELDGPVYEKCMAGDDYCDSPYSEHGTLEEVDQDAGTEPHTSEDECEPIEAIAKFDYVGRSARELSFKKGASLLLYHRASEDWWEGRHNGIDGLVPHQYIVVQDMDDTFSDTLSQKADSEASSGPVTEDKSSSKDMNSPTDRHPDGYLARQRKRGEPPPPVRRPGRTSDGHCPLHPPHALSNSSVDLGSPSLASHPRGLLQNRGLNNDSPERRRRPGHGSLTNISRHDSLKKIDSPPIRRSTSSGQYTGFNDHKPLDPETIAQDIEETMNTALNELRELERQSTAKHAPDVVLDTLEQVKNSPTPATSTESLSPLHNVALRSSEPQIRRSTSSSSDTMSTFKPMVAPRMGVQLKPPALRPKPAVLPKTNPTIGPAPPPQGPTDKSCTM

SEQ ID NO: 8828 - protein, 1324 aa, Homo sapiens
QAEPSGAGTELYLFAVLFDLLVSESSLDHLMAMGDDKSFDDEESVDGNRPSSAASAFKVPAPKTSGNPANSARKPGSAGGPKVGGASKEGGAGAVDEDDFIKAFTDVPSIQIYSSRELEETLNKIREILSDDKHDWDQRANALKKIRSLLVAGAAQYDCFFQHLRLLDGALKLSAKDLRSQVVREACITVAHLSTVLGNKFDHGAEAIVPTLFNLVPNSAKVMATSGCAAIRFIIRHTHVPRLIPLITSNCTSKSVPVRRRSFEFLDLLLQEWQTHSLERHAAVLVETIKKGIHDADAEARVEARKTYMGLRNHFPGEAETLYNSLEPSYQKSLQTYLKSSGSVASLPQSDRSSSSSQESLNRPFSSKWSTANPSTVAGRVSAGSSKASSLPGSLQRSRSDIDVNAAAGAKAHHAAGQSVRRGRLGAGALNAGSYASLEDTSDKLDGTASEDGRVRAKLSAPLAGMGNAKADSRGRSRTKMVSQSQPGSRSGSPGRVLTTTALSTVSSGVQRVLVNSASAQKRSKIPRSQGCSREASPSRLSVARSSRIPRPSVSQGCSREASRESSRDTSPVRSFQPLASRHHSRSTGALYAPEVYGASGPGYGISQSSRLSSSVSAMRVLNTGSDVEEAVADALKKPARRRYESYGMHSDDDANSDASSACSERSYSSRNGSIPTYMRQTEDVAEVLNRCASSNWSERKEGLLGLQNLLKNQRTLSRVELKRLCEIFTRMFADPHGKRVFSMFLETLVDFIQVHKDDLQDWLFVLLTQLLKKMGADLLGSVQAKVQKALDVTRESFPNDLQFNILMRFTVDQTQTPSLKVKVAILKYIETLAKQMDPGDFINSSETRLAVSRVITWTTEPKSSDVRKAAQSVLISLFELNTPEFTMLLGALPKTFQDGATKLLHNHLRNTGNGTQSSMGSPLTRPTPRSPANWSSPLTSPTNTSQNTLSPSAFDYDTENMNSEDIYSSLRGVTEAIQNFSFRSQEDMNEPLKRDSKKDDGDSMCGGPGMSDPRAGGDATDSSQTALDNKASLLHSMPTHSSPRSRDYNPYNYSDSISPFNKSALKEAMFDDDADQFPDDLSLDHSDLVAELLKELSNHNERVEERKIALYELMKLTQEESFSVWDEHFKTILLLLLETLGDKEPTIRALALKVLREILRHQPARFKNYAELTVMKTLEAHKDPHKEVVRSAEEAASVLATSISPEQCIKVLCPIIQTADYPINLAAIKMQTKVIERVSKETLNLLLPEIMPGLIQGYDNSESSVRKACVFCLVAVHAVIGDELKPHLSQLTGSKMKLLNLYIKRAQTGSGGADPTTDVSGQS

SEQ ID NO: 8829 - protein, 770 aa, Homo sapiens
MVESAGRAGQKRPGFLEGGLLLLLLLVTAALVALGVLYADRRGKQLPRLASRLCFLQEERTFVKRKPRGIPEAQEVSEVCTTPGCVIAAARILQNMDPTTEPCDDFYQFACGGWLRRHVIPETNSRYSIFDVLRDELEVILKAVLENSTAKDRPAVEKARTLYRSCMNQSVIEKRGSQPLLDILEVVGGWPVAMDRWNETVGLEWELERQLALMNSQFNRRVLIDLFIWNDDQNSSRHIIYIDQPTLGMPSREYYFNGGSNRKVREAYLQFMVSVATLLREDANLPRDSCLVQEDMVQVLELETQLAKATVPQEERHDVIALYHRMGLEELQSQFGLKGFNWTLFIQTVLSSVKIKLLPDEEVVVYGIPYLQNLENIIDTYSARTIQNYLVWRLVLDRIGSLSQRFKDTRVNYRKALFGTMVEEVRWRECVGYVNSNMENAVGSLYVREAFPGDSKSMVRELIDKVRTVFVETLDELGWMDEESKKKAQEKAMSIREQIGHPDYILEEMNRRLDEEYSNLNFSEDLYFENSLQNLKVGAQRSLRKLREKVDPNLWIIGAAVVNAFYSPNRNQIVFPAGILQPPFFSKEQPQALNFGGIGMVIGHEITHGFDDNGRNFDKNGNMMDWWSNFSTQHFREQSECMIYQYGNYSWDLADEQNVNGFNTLGENIADNGGVRQAYKAYLKWMAEGGKDQQLPGLDLTHEQLFFINYAQVWCGSYRPEFAIQSIKTDVHSPLKYRVLGSLQNLAAFADTFHCARGTPMHPKERCRVW

SEQ ID NO: 8830 - protein, 432 aa, Homo sapiens
MAGLGLGSAVPVWLAEDDLGCIICQGLLDWPATLPCGHSFCRHCLEALWGARDARRWACPTCRQGAAQQPHLRKNTLLQDLADKYRRAAREIQAGSDPAHCPCPGSSSLSSAAARPRRRPELQRVAVEKSITEVAQELTELVEHLVDIVRSLQNQRPLSESGPDNELSILGKAFSSGVDLSMASPKLVTSDTAAGKIRDILHDLEEIQEKLQESVTWKEAPEAQMQGELLEAPSSSSCPLPDQSHPALRRASRFAQWAIHPTFNLKSLSCSLEGSKDSRTVTVSHRPQPYRWNCERFSTSQVLCSQALSSGKHYWEVDTRNCSHWAVGVASWEMSRDQVLGRTMDSCCVEWKGTSQLSAWHMVKETVLGSDRPGVVGIWLNLEEGKLAFYSVDNQEKLLYECTISASSPLYPAFWLYGLHPGNYLIIKQVKV

SEQ ID NO: 8831 - protein, 509 aa, Homo sapiens
MAAIGVHLGCTSACVAVYKDGRAGVVANDAGDRVTPAVVAYSENEEIVGLAAKQSRIRNISNTVMKVKQILGRSSSDPQAQKYIAESKCLVIEKNGKLRYEIDTGEETKFVNPEDVARLIFSKMKETAHSVLGSDANDVVITVPFDFGEKQKNALGEAARAAGFNVLRLIHEPSAALLAYGIGQDSPTGKSNILVFKLGGTSLSLSVMEVNSGIYRVLSTNTDDNIGGAHFTETLAQYLASEFQRSFKHDVRGNARAMMKLTNSAEVAKHSLSTLGSANCFPDSLYEGQDFDCNVSRARFELLCSPLFNKCLEAIRGLLDQNGFTADDINKVVLCGGSSRIPKLQQLIKDLFPAVELLNSIPPDEVIPIGAAIEAGILIGKENLLVEDSLMIECSARDILVKGVDESGASRFTVLFPSGTPLPARRQHTLQAPGSISSVCLELYESDGKNSAKEETKFAQVVLQDLDKKENGLRDILAVLTMKRDGSLHVTCTDQETGKCEAISIEIAS

SEQ ID NO: 8832 - protein, 509 aa, Homo sapiens [sequence omitted]

SEQ ID NO: 8833 - protein, 447 aa, Homo sapiens
MSRRPCSCALRPPRCSCSASPSAVTAAGRPRPSDSCKEESSTLSVKMKCDFNCNHVHSGLKLVKPDDIGRLVSYTPAYLEGSCKDCIKDYERLSCIGSPIVSPRIVQLETESKRLHNKENQHVQQTLNSTNEIEALETSRLYEDSGYSSFSLQSGLSEHEEGSLLEENFGDSLQSCLLQIQSPDQYPNKNLLPVLHFEKVVCSTLKKNAKRNPKVDREMLKEIIARGNFRLQNIIGRKMGLECVDILSELFRRGLRHVLATILAQLSDMDLINVSKVSTTWKKILEDDKGAFQLYSKAIQRVTENNNKFSPHASTREYVMFRTPLASVQKSAAQTSLKKDAQTKLSNQGDQKGSTYSRHNEFSEVAKTLKKNESLKACIRCNSPAKYDCYLQRATCKREGCGFDYCTKCLCNYHTTKDCSDGKLLKASCKIGPLPGTKKSKKNLRRL

SEQ ID NO: 8834 - protein, 525 aa, Homo sapiens
MASNDYTQQATQSYGAYPTQPGQGYSQQSSQPYGQQSYSGYSQSTDTSGYGQSSYSSYGQSQNSYGTQSTPQGYGSTGGYGSSQSSQSSYGQQSSYPGYGQQPAPSSTSGSYGSSSQSSSYGQPQSGSYSQQPSYGGQQQSYGQQQSYNPPQGYGQQNQYNSSSGGGGGGGGGGNYGQDQSSMSSGGGSGGGYGNQDQSGGGGSGGYGQQDRGGRGRGGSGGGGGGGGGGYNRSSGGYEPRGRGGGRGGRGGMGGSDRGGFNKFGGPRDQGSRHDSEQDNSDNNTIFVQGLGENVTIESVADYFKQIGIIKTNKKTGQPMINLYTDRETGKLKGEATVSFDDPPSAKAAIDWFDGKEFSGNPIKVSFATRRADFNRGGGNGRGGRGRGGPMGRGGYGGGGSGGGGRGGFPSGGGGGGGQQRAGDWKCPNPTCENMNFSWRNECNQCKAPKPDGPGGGPGGSHMGGNYGDDRRGGRGGYDRGGYRGRGGDRGGFRGGRGGGDRGGFGPGKMDSRGEHRQDRRERPY

SEQ ID NO: 8835 - protein, 553 aa, Homo sapiens
GLLSPPGVGTQRCWNFVACLPVRACADMASNDYTQQATQSYGAYPTQPGQGYSQQSSQPYGQQSYSGYSQSTDTSGYGQSSYSSYGQSQNTGYGTQSTPQGYGSTGGYGSSQSSQSSYGQQSSYPGYGQQPAPSSTSGSYGSSSQSSSYGQPQSGSYSQQPSYGGQQQSYGQQQSYNPPQGYGQQNQYNSSSGGGGGGGGGGNYGQDQSSMSSGGGSGGGYGNQDQSGGGGSGGYGQQDRGGRGRGGSGGGGGGGGGGYNRSSGGYEPRGRGGGRGGRGGMGGSDRGGFNKFGGPRDQGSRHDSEQDNSDNNTIFVQGLGENVTIESVADYFKQIGIIKTNKKTGQPMINLYTDRETGKLKGEATVSFDDPPSAKAAIDWFDGKEFSGNPIKVSFATRRADFNRGGGNGRGGRGRGGPMGRGGYGGGGSGGGGRGGFPSGGGGGGGQQRAGDWKCPNPTCENMNFSWRNECNQCKAPKPDGPGGGPGGSHMGGNYGDDRRGGRGGYDRGGYRGRGGDRGGFRGGRGGGDRGGFGPGKMDSRGEHRQDRRERPY

SEQ ID NO: 8836 - protein, 638 aa, Homo sapiens
MLDFFTIFSKGGLVLWCFQGVSDSCTGPVNALIRSVLLQERGGNNSFTHEALTLKYKLDNQFELVFVVGFQKILTLTYVDKLIDDVHRLFRDKYRTEIQQQSALSLLNGTFDFQNDFLRLLREAEESSKIRAPTTMKKFEDSEKAKKPVRSMIETRGEKPKEKAKNSKKKGAKKEGSDGPLATSKPVPAEKSGLPVGPENGVELSKEELIRRKREEFIQKHGRGMEKSNKSTKSDAPKEKGKKAPRVWELGGCANKEVLDYSTPTTNGTPEAALSEDINLIRGTGSGGQLQDLDCSSSDDEGAAQNSTKPSATKGTLGGMFGMLKGLVGSKSLSREDMESVLDKMRDHLIAKNVAADIAVQLCESVANKLEGKVMGTFSTVTSTVKQALQESLVQILQPQRRVDMLRDIMDAQRRQRPYVVTFCGVNGVGKSTNLAKISFWLLENGFSVLIAACDTFRAGAVEQLRTHTRRLSALHPPEKHGGRTMVQLFEKGYGKDAAGIAMEAIAFARNQGFDVVLVDTAGRMQDNAPLMTALAKLITVNTPDLVLFVGEALVGNEAVDQLVKFNRALADHSMAQTPRLIDGIVLTKFDTIDDKVGAAISMTYITSKPIVFVGTGQTYCDLRSLNAKAVVAALMKA

SEQ ID NO: 8837 - protein, 471 aa, Homo sapiens
LSASPGCGLRVRARPRWSRWRCCGCWGCRGPGARQRRSACTWAAAAGASCASSARPRGETSYRLFYIYTSGTTGLPKAAIVVHSRYYRMAAFGHHAYRMQAADVLYDCLPLYHSAGNIIGVGQCLIYGLTVVLRKKFSASRFWDDCIKYNCTVVQYIGEICRYLLKQPVREAERRHRVRLAVGNGLRPAIWEEFTERFGVRQIGEFYGATECNCSIANMDGKVGSCGFNSRILPHVYPIRLVKVNEDTMELLRDAQGLCIPCQAGEPGLLVGQINQQDPLRRFDGYVSESATSKKIAHSVFSKGDSAYLSGDVLVMDELGYMYFRDRSGDTFRWRGENVSTTEVEGVLSRLLGQTDVAVYGVAVPGKLGLQGVVLRHGVEGKAGMAAVADPHSLLDPNAIYQELQKVLAPYARPIFLRLLPQVDTTGTFKIQKTRLQREGFDPRQTSDRLFFLDLKQGHYLPLNEAVYTRI

SEQ ID NO: 8838 - protein, 682 aa, Homo sapiens
MRAPGAGAASVVSLALLWLLGLPWTWSAAAALGVYVGSGGWRFLRIVCKTARRDLFGLSVLIRVRLELRRHQRAGHTIPRIFQAVVQRQPERLALVDAGTGECWTFAQLDAYSNAVANLFRQLGFAPGDVVAIFLEGRPEFVGLWLGLAKAGMEAALLNVNLRREPLAFCLGTSGAKALIFGGEMVAAVAEVSGHLGKSLIKFCSGDLGPEGILPDTHLLDPLLKEASTAPLAQIPSKGMDGPAPNFQAPPPNAQAPPLTPVSPADRLFYIYTSGTTGLPKAAIVVHSRYYRMAAFGHHAYRMQAADVLYDCLPLYHSAGNIIGVGQCLIYGLTVVLRKKFSASRFWDDCIKYNCTVVQYIGEICRYLLKQPVREAERRHRVRLAVGNGLRPAIWEEFTERFGVRQIGEFYGATECNCSIANMDGKVGSCGFNSRILPHVYPIRLVKVNEDTMELLRDAQGLCIPCQAGEPGLLVGQINQQDPLRRFDGYVSESATSKKIAHSVFSKGDSAYLSGDVLVMDELGYMYFRDRSGDTFRWRGENVSTTEVEGVLSRLLGQTDVAVYGVAVPGKLGLQGVVLRHGVEGKAGMAAVADPHSLLDPNAIYQELQKVLAPYARPIFLRLLPQVDTTGTFKIQKTRLQREGFDPRQTSDRLFFLDLKQGHYLPLNEAVYTRICSGAFAL

SEQ ID NO: 8839 - protein, 412 aa, Homo sapiens
MAAALLARASGPARRALCPRAWRQLHTIYQSVELPETHQMLLQTCRDFAEKELFPIAAQVDKEHLFPAAQVKKMGGLGLLAMDVPEELGGAGLDYLAYAIAMEEISRGCASTGVIMSVNNSLYLGPILKFGSKEQKQAWVTPFTSGDKIGCFALSEPGNGSDAGAASTTARAEGDSWVLNGTKAWITNAWEASAAVVFASTDRALQNKGISAFLVPMPTPGLTLGKKEDKLGIRGSSTANLIFEDCRIPKDSILGEPGMGFKIAMQTLDMGRIGIASQALGIAQTALDCAVNYAENRMAFGAPLTKLQVIQFKLADMALALESARLLTWRAAMLKDNKKPFIKEAAMAKLAASEAATAISHQAIQILGGMGYVTEMPAERHYRDARITEIYEGTSEIQRLVIAGHLLRSYRS

SEQ ID NO: 8840 - protein, 728 aa, Homo sapiens
LEFKSGGCGAGLVAAGAVRVLYPASRAGERTRVPGSPAPSSLPLHSPGACGTEVDMDPQRSPLLEVKGNIELKRPLIKAPSQLPLSGSRLKRRPDQMEDGLEPEKKRTRGLGATTKITTSHPRVPSLTTVPQTQGQTTAQKVSKKTGPRCSTAIATGLKNQKPVPAVPVQKSGTSGVPPMAGGKKPSKRPAWDLKGQLCDLNAELKRCRERTQTLDQENQQLQDQLRDAQQQVKALGTERTTLEGHLAKVQAQAEQGQQELKNLRACVLELEERLSTQEGLVQELQKKQVELQEERRGLMSQLEEKERRLQTSEAALSSSQAEVASLRQETVAQAALLTEREERLHGLEMERRRLHNQLQELKGNIRVFCRVRPVLPGEPTPPPGLLLFPSGPGGPSDPPTRLSLSRSDERRGTLSGAPAPPTRHDFSFDRVFPPGSGQDEVFEEIAMLVQSALDGYPVCIFAYGQTGSGKTFTMEGGPGGDPQLEGLIPRALRHLFSVAQELSGQGWTYSFVASYVEIYNETVRDLLATGTRKGQGGECEIRRAGPGSEELTVTNARYVPVSCEKEVDALLHLARQNRAVARTAQNERSSRSHSVFQLQISGEHSSRGLQCGAPLSLVDLAGSERLDPGLALGPGERERLRETQAINSSLSTLGLVIMALSNKESHVPYRNSKLTYLLQNSLGGSAKMLMFVNISPLEENVSESLNSLRFASKVNQCVIGTAQANRK

SEQ ID NO: 8841 - protein, 457 aa, Homo sapiens
MILLTFSTGRRLDFVHHSGVFFLQTLLWILCATVCGTEQYFNVEVWLQKYGYLPPTDPRMSVLRSAETMQSALAAMQQFYGINMTGKVDRNTIDWMKKPRCGVPDQTRGSSKFHIRRKRYALTGQKWQHKHITYSIKNVTPKVGDPETRKAIRRAFDVWQNVTPLTFEEVPYSELENGKRDVDITIIFASGFHGDSSPFDGEGGFLAHAYFPGPGIGGDTHFDSDEPWTLGNPNHDGNDLFLVAVHELGHALGLEHSNDPTAIMAPFYQYMETDNFKLPNDDLQGIQKIYGPPDKIPPPTRPLPTVPPHRSIPPADPRKNDRPKPPRPPTGRPSYPGAKPNICDGNFNTLAILRREMFVFKDQWFWRVRNNRVMDGYPMQITYFWRGLPPSIDAVYENSDGNFVFFKVKGDTLSVIQDGWLYKYHWKWILEQRQSVPVLSRQTEKHKTYEELSSITY

SEQ ID NO: 8842 - protein, 607 aa, Homo sapiens
MILLTFSTGRRLDFVHHSGVFFLQTLLWILCATVCGTEQYFNVEVWLQKYGYLPPTDPRMSVLRSAETMQSALAAMQQFYGINMTGKVDRNTIDWMKKPRCGVPDQTRGSSKFHIRRKRYALTGQKWQHKHITYSIKNVTPKVGDPETRKAIRRAFDVWQNVTPLTFEEVPYSELENGKRDVDITIIFASGFHGDSSPFDGEGGFLAHAYFPGPGIGGDTHFDSDEPWTLGNPNHDGNDLFLVAVHELGHALGLEHSNDPTAIMAPFYQYMETDNFKLPNDDLQGIQKIYGPPDKIPPPTRPLPTVPPHRSIPPADPRKNDRPKPPRPPTGRPSYPGAKPNICDGNFNTLAILRREMFVFKDQWFWRVRNNRVMDGYPMQITYFWRGLPPSIDAVYENSDGNFVFFKGNKYWVFKDTTLQPGYPHDLITLGSGIPPHGIDSAIWWEDVGKTYFFKGDRYWRYSEEMKTMDPGYPKPITVWKGIPESPQGAFVHKENGFTYFYKGKEYWKFNNQILKVEPGYPRSILKDFMGCDGPTDRVKEGHSPPDDVDIVIKLDNTASTVKAIAIVIPCILALCLLVLVYTVFQFKRKGTPRHILYCKRSMQEWV

SEQ ID NO: 8843 - protein, 587 aa, Homo sapiens
MAAAVAVAAASRRQSCYLCDLPRMPWAMIWDFTEPVCRGCVNYEGADRVEFVIETARQLKRAHGCFPEGRSPPGAAASAAAKPPPLSAKDILLQQQQQLGHGGPEAAPRAPQALERYPLAAAAERPPRLGSDFGSSRPAASLAQPPTPQPPPVNGILVPNGFSKLEEPPELNRQSPKPRRGHTVPPTLVPLMNGSATPLPTALGLGGRAAASLAAVSGTAAASLGSAQPTDLGAHKRPASVSSSATVEHEQREAAAKEKQPPPPAHRGPADSLSTAAGAAELSAEGAGKSRGSGEQDWVNRPKTVRDTLLALHQHGHSGPFESKFKKEPALTAGRLLGFEANGANGSKAVARTARKRKPSPEPEGEVGPPKINGEAQPWLSTSTEGLKIPMTPTSSFVSPPPPTASPHSNRTTPPEAAQNGQSPMAALILVADNAGGSHASKDANQVHSTTRRNSNSPPSPSSMNQRRLGPREVGGQGAGNTGGLEPVHPASLPDSSLATSAPLCCTLCHERLEDTHFVQCPSVPSHKFCFPCSRQSIKQQGASGEVYCPSGEKCPLVGSNVPWAFMQGEIATILAGDVKVKKERDS

SEQ ID NO: 8844 - protein, 189 aa, Homo sapiens [sequence omitted]

SEQ ID NO: 8845 - protein, 193 aa, Homo sapiens
MEPLASNIQVLLQAAEFLERREREAEHGYASLCPHRSPGPIHRRKKRPPQAPGAQDSGRSVHNELEKRRRAQLKRCLERLKQQMPLGADCARYTTLSLLRRARMHIQKLEDQEQRARQLKERLRSKQQSLQRQLEQLRGLAGAAERERLRADSLDSSGLSSERSDSDQVLPNENGGTPNHRPTGRGNNISSHH

SEQ ID NO: 8846 - protein, 459 aa, Homo sapiens
MDEKSNKLLLALVMLFLFAVIVLQYVCPGTECQLLRLQAFSSPVPDPYRSEDESSARFVPRYNFTRGDLLRKVDFDIKGDDLIVFLHIQKTGGTTFGRHLVRNIQLEQPCECRVGQKKCTCHRPGKRETWLFSRFSTGWSCGLHADWTELTSCVPSVVDGKRDARLRPSRNFHYITILRDPVSRYLSEWRHVQRGATWKASLHVCDGRPPTSEELPSCYTGDDWSGCPLKEFMDCPYNLANNRQVRMLSDLTLVGCYNLSVMPEKQRNKVLLESAKSNLKHMAFFGLTEFQRKTQYLFEKTFNMNFISPFTQYNTTRASSVEINEEIQKRIEGLNFLDMELYSYAKDLFLQRYQFMRQKEHQEARRKRQEQRKFLKGRLLQTHFQSQGQGQSQNPNQNQSQNPNPNANQNLTQNLMQNLTQSLSQKENRESPKQNSGKEQNDNTSNGTNDYIGSVEKWR

SEQ ID NO: 8847 - protein, 1507 aa, Homo sapiens
AAASRCPGIMVALRGLGSGLQPWCPLDLRLEWVDTVWELDFTETEPLDPSIEAEIIETGLAAFTKLYESLLPFATGEHGSMESIWTFFIENNVSHSTLVALFYHFVQIVHKKNVSVQYREYGLHAAGLYFLLLEVPGSVANQVFHPVMFDKCIQTLKKSWPQESNLNRKRKKEQPKSSQANPGRHRKRGKPPRREDIEMDEIIEEQEDENICFSARDLSQIRNAIFHLLKNFLRLLPKFSLKEKPQCVQNCIEVFVSLTNFEPVLHECHVTQARALNQAKYIPELAYYGLYLLCSPIHGEGDKVISCVFHQMLSVILMLEVGEGSHRAPLAVTSQVINCRNQAVQFISALVDELKESIFPVVRILLQHICAKVVDKSEYRTFAAQSLVQLLSKLPCGEYAMFIAWLYKYSRSSKIPHRVFTLDVVLALLELPEREVDNTLSLEHQKFLKHKFLVQEIMFDRCLDKAPTVRSKALSSFAHCLELTVTSASESILELLINSPTFSVIESHPGTLLRNSSAFSYQRQTSNRSEPSGEINIDSSGETVGSGERCVMAMLRRRIRDEKTNVRKSALQVLVSILKHCDVSGMKEDLWILQDQCRDPAVSVRKQALQSLTELLMAQPRCVQIQKAWLRGVVPVVMDCESTVQEKALEFLDQLLLQNIRHHSHFHSGDDSQVLAWALLTLLTTESQELSRYLNKAFHIWSKKEKFSPTFINNVISHTGTEHSAPAWMLLSKIAGSSPRLDYSRIIQSWEKISSQQNPNSNTLGHILCVIGHIAKHLPKSTRDKVTDAVKCKLNGFQWSLEVISSAVDALQRLCRASAETPAEEQELLTQVCGDVLSTCEHRLSNIVLKENGTGNMDEDLLVKYIFTLGDIAQLCPARVEKRIFLLIQSVLASSADADHSPSSQGSSEAPASQPPPQVRGSVMPSVIRAHAIITLGKLCLQHEDLAKKSIPALVRELEVCEDVAVRNNVIIVMCDLCIRYTIMVDKYIPNISMCLKDSDPFIRKQTLILLTNLLQEEFVKWKGSLFFRFVSTLIDSHPDIASFGEFCLAHLLLKRNPVMFFQHFIECIFHFNNYEKHEKYNKFPQSEREKRLFSLKGKSNKERRMKIYKFLLEHFTDEQRFNITSKICLSILACFADGILPLDLDASELLSDTFEVLSSKEIKLLAMRSKPDKDLLMEEDDMALANVVMQEAQKKLISQVQKRNFIENIIPIIISLKTVLEKNKIPALRELMHYLREVMQDYRDELKDFFAVDKQLASELEYDMKKYQEQLVQEQELAKHADVAGTAGGAEVAPVAQVALCLETVPVPAGQENPAMSPAVSQPCTPRASAGHVAVSSPTPETGPLQRLLPKARPMSLSTIAILNSVKKAVESKSRHRSRSLGVLPFTLNSGSPEKTCSQVSSYSLEQESNGEIEHVTKRAISTPEKSISDVTFGAGVSYIGTPRTPSSAKEKIEGRSQGNDILCLSLPDKPPPQPQQWNVRSPARNKDTPACSRRSLRKTPLKTAN

SEQ ID NO: 8848 - protein, 309 aa, Homo sapiens
MFSRAGVAGLSAWTLQPQWIQVRNMATLKDITRRLKSIKNIQKITKSMKMVAAAKYARAERELKPARIYGLGSLALYEKADIKGPEDKKKHLLIGVSSDRGLCGAIHSSIAKQMKSEVATLTAAGKEVMLVGIGDKIRGILYRTHSDQFLVAFKEVGRKPPTFGDASVIALELLNSGYEFDEGSIIFNKFRQDRFRNQSFFMSVISYKTEEKPIFSLNTVASADSMSIYDDIDADVLQNYQEYNLANIIYYSLKESTTSEQSARMTAMDNASKNASEMIDKLTLTFNRTRQAVITKELIEIISGAAALD

SEQ ID NO: 8849 - protein, 308 aa, Homo sapiens
MFSRAGVAGLSAWTLQPQWIQVRNMATLKDITRRLKSIKNIQKITKSMKMVAAAKYARAERELKPARIYGLGSLALYEKADIKGPEDKKKHLLIGVSSDRGLCGAIHSSIAKQMKSEVATLTAAGKEVMLVGIGDKIRGILYRTHSDQFLVAFKEVGRKPPTFGDASVIALELLNSGYEFDEGSIIFNKFRQDRFRNQSFFMSVISYKTEEKPIFSLNTVASADSMSIYDDIDADVLQNYQEYNLANIIYYSLKESTTSEQSARMTAMDNASKNASEMIDKLTLTFNRTRQAVITKELIEIISGAAAL

SEQ ID NO: 8850 - protein, 349 aa, Homo sapiens
MHRNFRKWIFYVFLCFGVLYVKLGALSSVVALGANIICNKIPGLAPRQRAICQSRPDAIIVIGEGAQMGINECQYQFRFGRWNCSALGEKTVFGQELRVGSREAAFTYAITAAGVAHAVTAACSQGNLSNCGCDREKQGYYNQAEGWKWGGCSADVRYGIDFSRRFVDAREIKKNARRLMNLHNNEAGRKVLEDRMQLECKCHGVSGSCTTKTCWTTLPKFREVGHLLKEKYNAAVQVEVVRASRLRQPTFLRIKQLRSYQKPMETDLVYIEKSPNYCEEDAATGSVGTQGRLCNRTSPGADGCDTMCCGRGYNTHQYTKVWQCNCKFHWCCFVKCNTCSERTEVFTCK

SEQ ID NO: 8851 - protein, 455 aa, Homo sapiens
MWLEILLTSVLGFAIYWFISRDKEETLPLEDGWWGPGTRSAAREDDSIRPFKVETSDEEIHDLHQRIDKFRFTPPLEDSCFHYGFNSNYLKKVISYWRNEFDWKKQVEILNRYPHFKTKIEGLDIHFIHVKPPQLPAGHTPKPLLMVHGWPGSFYEFYKIIPLLTDPKNHGLSDEHVFEVICPSIPGYGFSEASSKKGFNSVATARIFYKLMLRLGFQEFYIQGGDWGSLICTNMAQLVPSHVKGLHLNMALVLSNFSTLTLLLGQRFGRFLGLTERDVELLYPVKEKVFYSLMRESGYMHIQCTKPDTVGSALNDSPVGLAAYILEKFSTWTNTEFRYLEDGGLERKFSLDDLLTNVMLYWTTGTIISSQRFYKENLGQGWMTQKHERMKVYVPTGFSAFPFELLHTPEKWVRFKYPKLISYSYMVRGGHFAAFEEPELLAQDIRKFLSVLERQ

SEQ ID NO: 8852 - protein, 603 aa, Homo sapiens
MAVARKIRTLLTVNILVFVGIVLFSVYCRLQGRSQELVRIVSGDRRVRSRHAKVGTLGDREAILQRLDHLEEVVYNQLNGLAKPIGLVEGPGGLGQGGLAATLRDDGQEAEGKYEEYGYNAQLSDRISLDRSIPDYRPRKCRQMSYAQDLPQVSVVFIFVNEALSVILRSVHSVVNHTPSQLLKEVILVDDNSDNVELKFNLDQYVNKRYPGLVKIVRNSRREGLIRARLQGWKAATAPVVGFFDAHVEFNTGWAEPALSRIREDRRRIVLPAIDNIKYSTFEVQQYANAAHGYNWGLRCMYIIPPQDWLDRGDESAPIRTPAMIGCSFVVDREYFGDIGLLDPGMEVYGGENVELGMRVWQCGGSMEVLPCSRVAHIERTRKPYNNDIDYYAKRNALRAAEVWMDDFKSHVYMAWNIPMSNPGVDFGDVSERLALRQRLKCRSFKWYLENVYPEMRVYNNTLTYGEVRNSKASAYCLDQGAEDGDRAILYPCHGMSSQLVRYSADGLLQLGPLGSTAFLPDSKCLVDDGTGRMPTLKRCEDVARPTQRLWDFTQSGPIVSRATGRCLEVEMSKDANFGLRLVVQRCSGQKWMIRNWIKHARH

SEQ ID NO: 8853 - protein, 752 aa, Homo sapiens
MSSAFGAFYAMSLSLWKIPNLKPIAMFWQLQACILKISFGAIQSVFPATSWSWTISKLKCLLKYLIISTVPQSLSRDRKQSLISQLQEKSWEYRSWKTLLIATSQIPRVPMYSVLLKREWLKKKKNEKRHEEPAITNGPRITNAFSIIETENSNNMFSPLDLRASFKKVSDSMRTASLCLERTDVCHEAEPVRTLAEHSYAVSSVAEAYRSQPVREHDGSSPGNTGKENCEALAAKPKTCRKPKTFSIPQDSDSATENIPPPPVSNLEVNQERSPQPAAVLTRSKSPNNEGDVHFSREDENQSSDVPGPPAAEVPPLVYNCSCCSKAFDSSTLLSAHMQLHKPTQEPLVCKYCNKQFTTLNRLDRHEQICMRSSHMPIPGGNQRFLENYPTIGQNGGSFTGPEPLLSENRIGEFSSTGSTLPDTDHMVKFVNGQMLYSCVVCKRSYVTLSSLRRHANVHSWRRTYPCHYCNKVFALAEYRTRHEIWHTGERRYQCIFCLETFMTYYILKNHQKSFHAIDHRLSISKKTANGGLKPSVYPYKLYRLLPMKCKRAPYKSYRNSSYENARENSQMNESAPGTYVVQNPHSSELPTLNFQDTVNTLTNSPAIPLETSACQDIPTSANVQNAEGTKWGEEALKMDLDNNFYSTEVSVSSTENAVSSDLRAGDVPVLSLSNSSENAASVISYSGSAPSVIVHSSQFSSVIMHSNAIAAMTSSNHRAFSDPAVSQSLKDDSKPEPDKVGRFASRPKSIK

SEQ ID NO: 8854 - protein, 176 aa, Homo sapiens
MSGISGCPFFLWGLLALLGLALVISLIFNISHYVEKQRQDKMYSYSSDHTRVDEYYIEDTPIYGNLDDMISEPMDENCYEQMKARPEKSVNKMQEATPSAQATNETQMCYASLDHSVKGKRRKPRKQNTHFSDKDGDEQLHAIDASVSKTTLVDSFSPESQAVEETFMMIPSDCLD

SEQ ID NO: 8855 - protein, 712 aa, Homo sapiens
TGNKMAAAGPSTRASSAAAAAALSRRGRRGRCDETAAAKTGAPGPASGPSLLVLSPPLLQPPLPPRPEESGCAGCLEPPGEAAALPCGHSLCRGCAQRAADAAGPGCPRCRARGPGWARRRARDDGQADSEVLGECARRSQPERCRPRRDGGAAAAGPRPEQEPRAAPAEPDFIFRAPIKLSKPGELREEYESLRKLREEKLQEEKPSEDQIHKLLPEDTETGKRKMDEQKKRDEPLVLKTNLERCPARLSDSENEEPSRGQMTQTHRSAFVSKNNSYSLAFLAGKLNSKVERSQSCSDTAQERAKSRVRAVPGNKAKVTTMTPASNPIIGVLLSTQNNRCVSAPDLTIEKRLPFSSLSSLASLHKPERSVSPESNDSISEELNHFKPIVCSPCTPPKRLPDGRVLSPLIIKSTPRNLNRSLQKQTSYEASPRILKKWEQIFQERQIKKTLSKATLTSLAPEMGEELLGSEGIHSSKEKPLVAVNTRLSGGQVLSEYTGPTSADLDHFPSVSQTKAEQDSDNKSSTEIPLETCCSSELKGGGSGTSLEREQFEGLGSTPDAKLDKTCISRAMKITTVNSVLPQNSVLGGVLKTKQQLKTLNHFDLTNGVLVESLSEEPLPSLRRGRKRHCKTKHLEQNGSLKKLRQTSGEVGLAPTDPVLREMEQKLQQEEEDRQLALQLQRMFDNERRTVSRRKGSVDQYLLRSSNMAGAK

SEQ ID NO: 8856 - protein, 3054 aa, Homo sapiens
MWALSPTVFALLSKNLMIVHSDLAVHFPAIQYAVLYTLYSHCTRHDHFISSSLSSSSPSLFDGAVISTVTTATKKHFSIILNLLGILLKKDNLNQDTRKLLMTWALEAAVLMKKSETYAPLFSLPSFHKFCKGLLANTLVEDVNICLQACSSLHALSSSLPDDLLQRCVDVCRVQLVHSGTRIRQAFGKLLKSIPLDVVLSNNNHTEIQEISLALRSHMSKAPSNTFHPQDFSDVISFILYGNSHRTGKDNWLERLFYSCQRLDKRDQSTIPRNLLKTDAVLWQWAIWEAAQFTVLSKLRTPLGRAQDTFQTIEGIIRSLAAHTLNPDQDVSQWTTADNDEGHGNNQLRLVLLLQYLENLEKLMYNAYEGCANALTSPPKVIRTFFYTNRQTCQDWLTRIRLSIMRVGLLAGQPAVTVRHGFDLLTEMKTTSLSQGNELEVTIMMVVEALCELHCPEAIQGIAVWSSSIVGKNLLWINSVAQQAEGRFEKASVEYQEHLCAMTGVDCCISSFDKSVLTLANAGRNSASPKHSLNGESRKTVLSKPTDSSPEVINYLGNKACECYISIADWAAVQEWQNAIHDLKKSTSSTSLNLKADFNYIKSLSSFESGKFVECTEQLELLPGENINLLAGGSKEKIDMKKLLPNMLSPDPRELQKSIEVQLLRSSVCLATALNPIEQDQKWQSITENVVKYLKQTSRIAIGPLRLSTLTVSQSLPVLSTLQLYCSSALENTVSNRLSTEDCLIPLFSEALRSCKQHDVRPWMQALRYTMYQNQLLEKIKEQTVPIRSHLMELGLTAAKFARKRGNVSLATRLLAQCSEVQLGKTTTAQDLVQHFKKLSTQGQVDEKWGPELDIEKTKLLYTAGQSTHAMEMLSSCAISFCKSVKAEYAVAKSILTLAKWIQAEWKEISGQLKQVYRAQHQQNFTGLSTLSKNILTLIELPSVNTMEEEYPRIESESTVHIGVGEPDFILGQLYHLSSVQAPEVAKSWAALASWAYRWGRKVVDNASQGEGVRLLPREKSEVQNLLPDTITEEEKERIYGILGQAVCRPAGIQARKTCILCTIFLQDEDITLQITESEDNEEDDMVDVIWRQLISSCPWLSELDESATEGVIKVWRKVVDRIFSLYKLSCSAYFTFLKLNAGQIPLDEDDPRLHLSHRVEQSTDDMIVMATLRLLRLLVKHAGELRQYLEHGLETTPTAPWRGIIPQLFSRLNHPEVYVRQSICNLLCRVAQDSPHLILYPAIVGTISLSSESQASGNKFSTAIPTLLGNIQGEELLVSECEGGSPPASQDSNKDEPKSGLNEDQAMMQDCYSKIVDKLSSANPTMVLQVQMLVAELRRVTVLWDELWLGVLLQQHMYVLRRIQQLEDEVKRVQNNNTLRKEEKIAIMREKHTALMKPIVFALEHVRSITAAPAETPHEKWFQDNYGDAIENALEKLKTPLNPAKPGSSWIPFKEIMLSLQQRAQKRASYILRLEEISPWLAAMTNTEIALPGEVSARDTVTIHSVGGTITILPTKTKPKKLLFLGSDGKSYPYLFKGLEDLHLDERIMQFLSIVNTMFATINRQETPRFHARHYSVTPLGTRSGLIQWVDGATPLFGLYKRWQQREAALQAQKAQDSYQTPQNPGIVPRPSELYYSKIGPALKTVGLSLDVSRRDWPLHVMKAVLEELMEATPPNLLAKELWSSCTTPDEWWRVTQSYARSTAVMSMVGYIIGLGDRHLDNVLIDMTTGEVVHIDYNVCFEKGKSLRVPEKVPFRMTQNIETALGVTGVEGVFRLSCEQVLHIMRRGRETLLTLLEAFVYDPLVDWTAGGEAGFAGAVYGGGGQQAESKQSKREMEREITRSLFSSRVAEIKVNWFKNRDEMLVVLPKLDGSLDEYLSLQEQLTDVEKLQGKLLEEIEFLEGAEGVDHPSHTLQHRYSEHTQLQTQQRAVQEAIQVKLNEFEQWITHYQAAFNNLEATQLASLLQEISTQMDLGPPSYVPATAFLQNAGQAHLISQCEQLEGEVGALLQQRRSVLRGCLEQLHHYATVALQYPKAIFQKHRIEQWKTWMEELICNTTVERCQELYRKYEMQYAPQPPPTVCQFITATEMTLQRYAADINSRLIRQVERLKQEAVTVPVCEDQLKEIERCIKVFLHENGEEGSLSLASVIISALCTLTRRNLMMEGAASSAGEQLVDLTSRDGAWFLEELCSMSGNVTCLVQLLKQCHLVPQDLDIPNPMEASETVHLANGVYTSLQELNSNFRQIIFPEALRCLMKGEYTLESMLHELDGLIEQTTDGVPLQTLVESLQAYLRNAAMGLEEETHAHYIDVARQVNAGCAVSLLLHAQYGELIQPRNGSVDETPKMSAGQMLLVAFDGMFAQVETAFSLLVEKLNKMEIPIAWRKIDIIREARSTQVNFFDDDNHRQVLEEIFFLKRLQTIKEFFRLCGTFSKTLSGSSSLEDQNTVNGPVQIVNVKTLFRNSCFSEDQMAKPIKAFTADFVRQLLIGLPNQALGLTLCSFISALGVDIIAQVEAKDFGAESKVSVDDLCKKAVEHNIQIGKFSQLVMNRATVLASSYDTAWKKHDLVRRLETSISSCKTSLQRVQLHIAMFQWQHEDLLINRPQAMSVTPPPRSAILTSMKKKLHTLSQIETSIATVQEKLAALESSIEQRLKWAGGANPALAPVLQDFEATIAERRNLVLKESQRASQVTFLCSNIIHFESLRTRTAEALNLDAALFELIKRCQQMCSFASQFNSSVSELELRLLQRVDTGLEHPIGSSEWLLSAHKQLTQDMSTQRAIQTEKEQQIETVCETIQNLVDNIKTVLTGHNRQLGDVKHLLKAMAKDEEAALADGEDVPYENSVRQFLGEYKSWQDNIQTVLFTLVQAMGQVRSQEHVEMLQEITPTLKELKTQSQSIYNNLVSFASPLVTDATNECSSPTSSATYQPSFAAAVRSNTGQKTQPDVMSQNARKLIQKNLATSADTPPSTVPGTGKSVACSPKKAVRDPKTGKAVQERNSYAVSVWKRVKAKLEGRDVDPNRRMSVAEQVDYVIKEATNLDNLAQLYEGWTAWV

SEQ ID NO: 8857 - protein, 3657 aa, Homo sapiens [sequence omitted]

SEQ ID NO: 8858 - protein, 545 aa, Homo sapiens
MTWALEVAVLMKKSETYAPLFCLPSFHKFCKGLLANTLVEDVNICLQACSSLHALSSSLPDDLLQRCVDVCRVQLVHRGTRIRQAFGKLLKSIPLDVVLSNNNHTEIQEISLALRSHMSKAPSNTFHPQDFSDVISFILYGNSHRTGKDNWLERLFYSCQRLDKCDQSTIPRNLLKTDAIFWQWAIWEAAQFTVLSKLRTPLGRAQDTFQTIEGIIRSLAAHTLNPDQDVSQWTTADNDEGHGNNQLRLVLLLQYLENLEKLMYNVYEGCANALTSPPKVIRAFFYTSCQTCQDWLTRIRLSIMRVGLLAGQPAVTVRHGFDLLTEMKTTSLSQGNELEITIMMVVEALCELHCPEAIQGIAVWSSSIVGKNLLWINSVAQQAEGRFEKASVEYQEHLCAMTGVDCCISSFDKLVLTLANAGCNSASPKHCLNGESRKTVLSKPTDSSPEVINYLGNKCECYISIADCAAVQEWQNAIHDLKKSTSSTSLNLKAEFNYIKSLSSFESGKFVECTEQLELLPGENINLLAGGSKEKIDMKNLLRNM

SEQ ID NO: 8859 - protein, 3680 aa, Homo sapiens
MSRRAPGSRLSSGGTKYPRSWNDWQPRTDSASADPDNLKYSSSRDRGGSSSYGLQPSNSAVVSRQRHDDTRVHADIQNDEKGGYSVNGGSGENTYGRKSLGQELRVNNVTSPEFTSVQHGSRALATKDMRKSQERSMSYSDESRLSNLLRRITREDDRDRRLATVKQLKEFIQQPENKLVLVKQLDNILAAVHDVLNESSKLLQELRQEGACCLGLLCASLSYEAEKIFKWIFSKFSSSAKDEVKLLYLCATYKALETVGEKKAFSSVMQLVMTSLQSILENVDTPELLCKCVKCILLVARCYPHIFSTNFRDTVDILVGWHIDHTQKPSLTQQVSGWLQSLEPFWVADLAFSTTLLGQFLEDMEAYAEDLSHVASGESVDEDVPPPSVSLPKLAALLRVFSTVVRSIGERFSPIRGPPITEAYVTDVLYRVMRCVTAANQVFFSEAVLTAANECVGVLLGSLDPSMTIHCDMVITYGLDQLENCQTCGTDYIISVLNLLTLIVEQINTKLPSSFVEKLFIPSSKLLFLRYHKEKEVVAVAHAVYQAVLSLKNIPVLETAYKLILGEMTCALNNLLHSLQLPEACSEIKHEAFKNHVFNVDNAKFVVIFDLSALTTIGNAKNSLIGMWALSPTVFALLSKNLMIVHSDLAVHFPAIQYAVLYTLYSHCTRHDHFISSSLSSSSPSLFDGAVISTVTTATKKHFSIILNLLGILLKKDNLNQDTRKLLMTWALEAAVLMKKSETYAPLFSLPSFHKFCKGLLANTLVEDVNICLQACSSLHALSSSLPDDLLQRCVDVCRVQLVHSGTRIRQAFGKLLKSIPLDVVLSNNNHTEIQEISLALRSHMSKAPSNTFHPQDFSDVISFILYGNSHRTGKDNWLERLFYSCQRLDKRDQSTIPRNLLKTDAVLWQWAIWEAAQFTVLSKLRTPLGRAQDTFQTIEGIIRSLAAHTLNPDQDVSQWTTADNDEGHGNNQLRLVLLLQYLENLEKLMYNAYEGCANALTSPPKVIRTFFYTNRQTCQDWLTRIRLSIMRVGLLAGQPAVTVRHGFDLLTEMKTTSLSQGNELEVTIMMVVEALCELHCPEAIQGIAVWSSSIVGKNLLWINSVAQQAEGRFEKASVEYQEHLCAMTGVDCCISSFDKSVLTLANAGRNSASPKHSLNGESRKTVLSKPTDSSPEVINYLGNKACECYISIADWAAVQEWQNAIHDLKKSTSSTSLNLKADFNYIKSLSSFESGKFVECTEQLELLPGENINLLAGGSKEKIDMKKLLPNMLSPDPRELQKSIEVQLLRSSVCLATALNPIEQDQKWQSITENVVKYLKQTSRIAIGPLRLSTLTVSQSLPVLSTLQLYCSSALENTVSNRLSTEDCLIPLFSEALRSCKQHDVRPWMQALRYTMYQNQLLEKIKEQTVPIRSHLMELGLTAAKFARKRGNVSLATRLLAQCSEVQLGKTTTAQDLVQHFKKLSTQGQVDEKWGPELDIEKTKLLYTAGQSTHAMEMLSSCAISFCKSVKAEYAVAKSILTLAKWIQAEWKEISGQLKQVYRAQHQQNFTGLSTLSKNILTLIELPSVNTMEEEYPRIESESTVHIGVGEPDFILGQLYHLSSVQAPEVAKSWAALASWAYRWGRKVVDNASQGEGVRLLPREKSEVQNLLPDTITEEEKERIYGILGQAVCRPAGIQARKTCILCTIFLQDEDITLQITESEDNEEDDMVDVIWRQLISSCPWLSELDESATEGVIKVWRKVVDRIFSLYKLSCSAYFTFLKLNAGQIPLDEDDPRLHLSHRVEQSTDDMIVMATLRLLRLLVKHAGELRQYLEHGLETTPTAPWRGIIPQLFSRLNHPEVYVRQSICNLLCRVAQDSPHLILYPAIVGTISLSSESQASGNKFSTAIPTLLGNIQGEELLVSECEGGSPPASQDSNKDEPKSGLNEDQAMMQDCYSKIVDKLSSANPTMVLQVQMLVAELRRVTVLWDELWLGVLLQQHMYVLRRIQQLEDEVKRVQNNNTLRKEEKIAIMREKHTALMKPIVFALEHVRSITAAPAETPHEKWFQDNYGDAIENALEKLKTPLNPAKPGSSWIPFKEIMLSLQQRAQKRASYILRLEEISPWLAAMTNTEIALPGEVSARDTVTIHSVGGTITILPTKTKPKKLLFLGSDGKSYPYLFKGLEDLHLDERIMQFLSIVNTMFATINRQETPRFHARHYSVTPLGTRSGLIQWVDGATPLFGLYKRWQQREAALQAQKAQDSYQTPQNPGIVPRPSELYYSKIGPALKTVGLSLDVSRRDWPLHVMKAVLEELMEATPPNLLAKELWSSCTTPDEWWRVTQSYARSTAVMSMVGYIIGLGDRHLDNVLIDMTTGEVVHIDYNVCFEKGKSLRVPEKVPFRMTQNIETALGVTGVEGVFRLSCEQVLHIMRRGRETLLTLLEAFVYDPLVDWTAGGEAGFAGAVYGGGGQQAESKQSKREMEREITRSLFSSRVAEIKVNWFKNRDEMLVVLPKLDGSLDEYLSLQEQLTDVEKLQGKLLEEIEFLEGAEGVDHPSHTLQHRYSEHTQLQTQQRAVQEAIQVKLNEFEQWITHYQAAFNNLEATQLASLLQEISTQMDLGPPSYVPATAFLQNAGQAHLISQCEQLEGEVGALLQQRRSVLRGCLEQLHHYATVALQYPKAIFQKHRIEQWKTWMEELICNTTVERCQELYRKYEMQYAPQPPPTVCQFITATEMTLQRYAADINSRLIRQVERLKQEAVTVPVCEDQLKEIERCIKVFLHENGEEGSLSLASVIISALCTLTRRNLMMEGAASSAGEQLVDLTSRDGAWFLEELCSMSGNVTCLVQLLKQCHLVPQDLDIPNPMEASETVHLANGVYTSLQELNSNFRQIIFPEALRCLMKGEYTLESMLHELDGLIEQTTDGVPLQTLVESLQAYLRNAAMGLEEETHAHYIDVARQVNAGCAVSLLLHAQYGELIQPRNGSVDETPKMSAGQMLLVAFDGMFAQVETAFSLLVEKLNKMEIPIAWRKIDIIREARSTQVNFFDDDNHRQVLEEIFFLKRLQTIKEFFRLCGTFSKTLSGSSSLEDQNTVNGPVQIVNVKTLFRNSCFSEDQMAKPIKAFTADFVRQLLIGLPNQALGLTLCSFISALGVDIIAQVEAKDFGAESKVSVDDLCKKAVEHNIQIGKFSQLVMNRATVLASSYDTAWKKHDLVRRLETSISSCKTSLQRVQLHIAMFQWQHEDLLINRPQAMSVTPPPRSAILTSMKKKLHTLSQIETSIATVQEKLAALESSIEQRLKWAGGANPALAPVLQDFEATIAERRNLVLKESQRASQVTFLCSNIIHFESLRTRTAEALNLDAALFELIKRCQQMCSFASQFNSSVSELELRLLQRVDTGLEHPIGSSEWLLSAHKQLTQDMSTQRAIQTEKEQQIETVCETIQNLVDNIKTVLTGHNRQLGDVKHLLKAMAKDEEAALADGEDVPYENSVRQFLGEYKSWQDNIQTVLFTLVQAMGQVRSQEHVEMLQEITPTLKELKTQSQSIYNNLVSFASPLVTDATNECSSPTSSATYQPSFAAAVRSNTGQKTQPDVMSQNARKLIQKNLATSADTPPSTVPGTGKSVACSPKKAVRDPKTGKAVQERNSYAVSVWKRVKAKLEGRDVDPNRRMSVAEQVDYVIKEATNLDNLAQLYEGWTAWV

SEQ ID NO: 8860 - protein, 587 aa, Homo sapiens
VRPLLLCSSKKARAALPQVLTFSQRRRARALSGRRLRRRPTLQSPLVAPRPSRCPESGGHEAQPRPPALARPAAAAMSRGPEEVNRLTESTYRNVMEQFNPGLRNLINLGKNYEKAVNAMILAGKAYYDGVAKIGEIATGSPVSTELGHVLIEISSTHKKLNESLDENFKKFHKEIIHELEKKIELDVKYMNATLKRYQTEHKNKLESLEKSQAELKKIRRKSQGSRNALKYEHKEIEYVETVTSRQSEIQKFIADGCKEALLEEKRRFCFLVDKHCGFANHIHYYHLQSAELLNSKLPRWQETCVDAIKVPEKIMNMIEEIKTPASTPVSGTPQASPMIERSNVVRKDYDTLSKCSPKMPPAPSGRAYTSPLIDMFNNPATAAPNSQRVNNSTGTSEDPSLQRSVSVATGLNMMKKQKVKTIFPHTAGSNKTLLSFAQGDVITLLIPEEKDGWLYGEHDVSKARGWFPSSYTKLLEENETEAVTVPTPSPTPVRSISTVNLSENSSVVIPPPDYLECLSMGAAADRRADSARTTSTFKAPASKPETAAPNDANGTAKPPFLSGENPFATVKLRPTVTNDRSAPIIR

SEQ ID NO: 8861 - protein, 1268 aa, Homo sapiens
MSAPAGSSHPAASARIPPKFGGSAVSGAAAPAGPGAGPAPHQQNGPAQNQMQVPSGYGLHHQNYIAPSGHYSQGPGKMTSLPLDTQCGDYYSALYTVPTQNVTPNTVNQQPGAQQLYSRGPPAPHIVGSTLGSFQGAASSASHLHTSASQPYSSFVNHYNSPAMYSASSSVASQGFPSTCGHYAMSTVSNAAYPSVSYPSLPAGDTYGQMFTSQNAPTVRPVKDNSFSGQNTAISHPSPLPPLPSQQHHQQQSLSGYSTLTWSSPGLPSTQDNLIRNHTGSLAVANNNPTITVADSLSCPVMQNVQPPKSSPVVSTVLSGSSGSSSTRTPPTANHPVEPVTSVTQPSELLQQKGVQYGEYVNNQASSAPTPLSSTSDDEEEEEEDEEAGVDSSSTTSSASPMPNSYDALEGGSYPDMLSSSASSPAPDPAPEPDPASAPAPASAPAPVVPQPSKMAKPLAMAIQHFSLVIRMLQHHLFLEYSPSNPVYSGFQQYPQQYPGVNQLSSSIGGLSLQSSPQPESLRPVNLTQERNILPMTPVWAPVPNLNADLKKLNCSPDSFRCTLTNIPQTQALLNKAKLPLGLLLHPFRDLTQLPVITSNTIVRCRSCRTYINPFVSFIDQRRWKCNLCYRVNDVPEEFMYNPLTRSYGEPHKRPEVQNSTVEFIASSDYMLRPPQPAVYLFVLDVSHNAVEAGYLTILCQSLLENLDKLPGDSRTRIGFMTFDSTIHFYNLQEGLSQPQMLIVSDIDDVFLPTPDSLLVNLYESKELIKDLLNALPNMFTNTRETHSALGPALQAAFKLMSPTGGRVSVFQTQLPSLGAGLLQSREDPNQRSSTKVVQHLGPATDFYKKLALDCSGQQTAVDLFLLSSQYSDLASLACMSKYSAGCIYYYPSFHYTHNPSQAEKLQKDLKRYLTRKIGFEAVMRIRCTKGLSMHTFHGNFFVRSTDLLSLANINPDAGFAVQLSIEESLTDTSLVCFQTALLYTSSKGERRIRVHTLCLPVVSSLADVYAGVDVQAAICLLANMAVDRSVSSSLSDARDALVNAVVDSLSAYGSTVSNLQHSALMAPSSLKLFPLYVLALLKQKAFRTGTSTRLDDRVYAMCQIKSQPLVHLMKMIHPNLYRIDRLTDEGAVHVNDRIVPQPPLQKLSAEKLTREGAFLMDCGSVFYIWVGKGCDNNFIEDVLGYTNFASIPQKMTHLPELDTLSSERARSFITWLRDSRPLSPILHIVKDESPAKAEFFQHLIEDRTEAAFSYYEFLLHVQQQICK

SEQ ID NO: 8862 - protein, 552 aa, Homo sapiens
MTIKGKPPCVPSSSYGLVEALLTVSVGTSSSALTLLILLQVAESRLPPRPRHRGPGQRLEAARPCAALSPEPAEPAAPGLGATMLESIRVTEKLHWPEQELAKKSILNAEDSLIIDNKRSISHLSSGVLKDIFTTGTSSYNVLLQSKEEKKYHSQKQSSSTYSKRCRKPSKSPNTSRSKDPRRMKALVPVTSSGTWYCLERRPAVFVTSSVSSPVKFTHDISVTGNGIVLPPKPKSKVKWCHFSTLPKPKPQLSRSFEKGDDFSGKKFCILTAIKPTNLEKEKLRFFKSDYTYNPQFEYANPALPSVLAKHSHASDRFLKQIVVHLTEDLLSRASMTVVNGCPTLTINVSTAREHWLEGMLRHEIGTHYFRGINNLQQPWNSWTGRKKHELKPNNPTEEGLASIHSVLFRKDPFLWRAALLYYTVYQASQMSFCELFKDIGRFVKDPNTRWDYCVRAKRGWTDTSQPGCFSKDQVYLDGILQILRYRDTIDFHLLTALGKVSYEDVDRLKGLAVTENMRVPHFLQDHGRYMEHLEKIMEVNELTDRELKDLI

SEQ ID NO: 8863 - protein, 530 aa, Homo sapiens
VPGRAGRGGGAGRTGVPPPGAQVMVATGWARRSGLHPAPRPLRGAQEALAKNLWREERNRPLILSSLIIKKLHWPEQELAKKSILNAEDSLIIDNKRSISHLSSGVLKDIFTTGTSSYNVLLQSKEEKKYHSQKQSSSTYSKRCRKPSKSPNTSRSKDPRRMKALVPVTSSGTWYCLERRPAVFVTSSVSSPVKFTHDISVTGNGIVLPPKPKSKVKWCHFSTLPKPKPQLSRSFEKGDDFSGKKFCILTAIKPTNLEKEKLRFFKSDYTYNPQFEYANPALPSVLAKHSHASDRFLKQIVVHLTEDLLSRASMTVVNGCPTLTINVSTAREHWLEGMLRHEIGTHYFRGINNLQQPWNSWTGRKKHELKPNNPTEEGLASIHSVLFRKDPFLWRAALLYYTVYQASQMSFCELFKDIGRFVKDPNTRWDYCVRAKRGWTDTSQPGCFSKDQVYLDGILQILRYRDTIDFHLLTALGKVSYEDVDRLKGLAVTENMRVPHFLQDHGRYMEHLEKIMEVNELTDRELKDLI

SEQ ID NO: 8864 - protein, 525 aa, Homo sapiens
SGERWVMAGCTRKLTHLRKRIHRPRRRTTRRWKRWFKFRKRKGEKRPRPNHKAVARRAKLKFSTSEKLHWPEQELAKKSILNAEDSLIIDNKRSISHLSSGVLKDIFTTGTSSYNVLLQSKEEKKYHSQKQSSSTYSKRCRKPSKSPNTSRSKDPRRMKALVPVTSSGTWYCLERRPAVFVTSSVSSPVKFTHDISVTGNGIVLPPKPKSKVKWCHFSTLPKPKPQLSRSFEKGDDFSGKKFCILTAIKPTNLEKEKLRFFKSDYTYNPQFEYANPALPSVLAKHSPSDRFLKQIVVHLTEDLLSRASMTVVNGCPTLTINVSTAREHWLEGMLRHEIGTHYFRGINNLQQPWNSWTGRKKHELKPNNPTEEGLASIHSVLFRKDPFLWRAALLYYTVYQASQMSFCELFKDIGRFVKDPNTRWDYCVRAKRGWTDTSQPGCFSKDQVYLDGILQILRYRDTIDFHLLTALGKVSYEDVDRLKGLAVTENMRVPHFLQDHGRYMEHLEKIMEVNELTDRELKDLI

SEQ ID NO: 8865 - protein, 673 aa, Homo sapiens
MSRTLASAVLLSSPDYYERLGQLQHGLRDSEKKRLDLEKKLYEYNQSDTCRVKLKYVKLKNYLKEICESEKKAHTRNQEYLKRFERVQAHVVHFTTNTEKLQKLKLEYETQIKKMLCSKDSLGLKEELTDEDREKVAVHEGINSGTAMSRGLYQPATIFMGRQMSAILSMRDFSTEHKSPQPTKNFSIPDPHSHRQTAQSSNVTDSCVVQTSNDTQCLNKSDNIDGKASLQIGEKMPVTASVLSEEEQTHCLEIGSNTRHGKSNLSEGKKSAELNSPLRERLSPENRTTDLKCDSSSGSEGEILTREHIEVEEKRASPPVSPIPVSEYCESENKWSQEKHSPWEGVSDHLAHREPKSQKPFRKMQEEEEESWSTSRDLTISISEDDLILESPEPQPNPGGKMEGEDGIEALKLIHAEQERVALSTEKNCILQTLSSPDSEKESSTNAPTREPGQTPDSDVPRAQVGQHVATLKEHDNSVKEEATALLRKALTEECGRRSAIHSSESSCSLPSILNDNSGIKEAKPAVWLNSVPTREQEVSSGCGDKSKKENVAADIPITETEAYQLLKKATLQDNTNQTENRFQKTDASVSHLSGLNIGSGAFETKTANKIASEASFSSSEGSPLSRHENKKKPVINSKSNALWDESDDSNSEIEAALRPRNHNTDDSDDFYD

SEQ ID NO: 8866 - protein, 331 aa, Homo sapiens
MRFRFGVVVPPAVAGARPELLVVGSRPELGRWEPRGAVRLRPAGTAAGDGALALQEPGLWLGEVELAAEEAAQDGAEPGRVDTFWYKFLKREPGGELSWEGNGPHHDRCCTYNENNLVDGVYCLPIGHWIEATGHTNEMKHTTDFYFNIAGHQAMHYSRILPNIWLGSCPRQVEHVTIKLKHELGITAVMNFQTEWDIVQNSSGCNRYPEPMTPDTMIKLYREEGLAYIWMPTPDMSTEGRVQMLPQAVCLLHALLEKGHIVYVHCNAGVGRSTAAVCGWLQYVMGWNLRKVQYFLMAKRPAVYIDEEALARAQEDFFQKFGKVRSSVCSL

SEQ ID NO: 8867 - protein, 257 aa, Homo sapiens
LVKIGSAPETRSKIFPRFTIRRRLSRGNGPHHDRCCTYNENNLVDGVYCLPIGHWIEATGHTNEMKHTTDFYFNIAGHQAMHYSRILPNIWLGSCPRQVEHVTIKLKHELGITAVMNFQTEWDIVQNSSGCNRYPEPMTPDTMIKLYREEGLAYIWMPTPDMSTEGRVQMLPQPVCLLHALLEKGHIVYVHCNAGVGRSTAAVCGWLQYVMGWNLRKVQYFLMAKRPAVYIDEEALARAQEDFFQKFGKVRSSVCSL

SEQ ID NO: 8868 - protein, 1237 aa, Homo sapiens
MGDMKTPDFDDLLAAFDIPDIDANEAIHSGPEENEGPGGPGKPEPGVGSESEDTAAASAGDGPGVPAQASDHGLPPPDISVVSVIVKNTVCPEQSEALAGGSAGDGAQAAGVTKEGPVGPHRMQNGFGSPEPSLPGTPHSPAPPSGGTWKEKGMEGKTPLDLFAHFGPEPGDHSDPLPPSAPSPTREGALTPPPFPSSFELAQENGPGMQPPVSSPPLGALKQESCSPHHPQVLAQQGSGSSPKATDIPASASPPPVAGVPFFKQSPGHQSPLASPKVPVCQPLKEEDDDEGPVDKSSPGSPQSPSSGAEAADEDSNDSPASSSSRPLKVRIKTIKTSCGNITRTVTQVPSDPDPPAPLAEGAFLAEASLLKLSPATPTSEGPKVVSVQLGDGTRLKGTVLPVATIQNASTAMLMAASVARKAVVLPGGTATSPKMIAKNVLGLVPQALPKADGRAGLGTGGQKVNGASVVMVQPSKTATGPSTGGGTVISRTQSSLVEAFNKILNSKNLLPAYRPNLSPPAEAGLALPPTGYRCLECGDAFSLEKSLARHYDRRSMRIEVTCNHCARRLVFFNKCSLLLHAREHKDKGLVMQCSHLVMRPVALDQMVGQPDITPLLPVAVPPVSGPLALPALGKGEGAITSSAITTVAAEAPVLPLSTEPPAAPATSAYTCFRCLECKEQCRDKAGMAAHFQQLGPPAPGATSNVCPTCPMMLPNRCSFSAHQRMHKNRPPHVCPECGGNFLQANFQTHLREACLHVSRRVGYRCPSCSVVFGGVNSIKSHIQTSHCEVFHKCPICPMAFKSGPSAHAHLYSQHPSFQTQQAKLIYKCAMCDTVFTHKPLLSSHFDQHLLPQRVSVFKCPSCPLLFAQKRTMLEHLKNTHQSGRLEETAGKGAGGALLTPKTEPEELAVSQGGAAPATEESSSSSEEEEVPSSPEPPRPAKRPRRELGSKGLKGGGGGPGGWTCGLCHSWFPERDEYVAHMKKEHGKSVKKFPCRLCERSFCSAPSLRRHVRVNHEGIKRVYPCRYCTEGKRTFSSRLILEKHVQVRHGLQLGAQSPGRGTTLARGSSARAQGPGRKRRQSSDSCSEEPDSTTPPAKSPRGGPGSGGHGPLRYRSSSSTEQSLMMGLRVEDGAQQCLDCGLCFASPGSLSRHRFISHKKRRGVGKASALGLGDGEEEAPPSRSDPDGGDSPLPASGGPLTCKVCGKSCDSPLNLKTHFRTHGMAFIRARQGAVGDN

SEQ ID NO: 8869 - protein, 1258 aa, Homo sapiens
ELSFPLLSLDFGAHQGLGSADMGDMKTPDFDDLLAAFDIPDIDANEAIHSGPEENEGPGGPGKPEPGVGSESEDTAAASAGDGPGVPAQASDHGLPPPDISVVSVIVKNTVCPEQSEALAGGSAGDGAQAAGVTKEGPVGPHRMQNGFGSPEPSLPGTPHSPAPPSGGTWKEKGMEGKTPLDLFAHFGPEPGDHSDPLPPSAPSPTREGALTPPPFPSSFELAQENGPGMQPPVSSPPLGALKQESCSPHHPQVLAQQGSGSSPKATDIPASASPPPVAGVPFFKQSPGHQSPLASPKVPVCQPLKEEDDDEGPVDKSSPGSPQSPSSGAEAADEDSNDSPASSSSRPLKVRIKTIKTSCGNITRTVTQVPSDPDPPAPLAEGAFLAEASLLKLSPATPTSEGPKVVSVQLGDGTRLKGTVLPVATIQNASTAMLMAASVARKAVVLPGGTATSPKMIAKNVLGLVPQALPKADGRAGLGTGGQKVNGASVVMVQPSKTATGPSTGGGTVISRTQSSLVEAFNKILNSKNLLPAYRPNLSPPAEAGLALPPTGYRCLECGDAFSLEKSLARHYDRRSMRIEVTCNHCARRLVFFNKCSLLLHAREHKDKGLVMQCSHLVMRPVALDQMVGQPDITPLLPVAVPPVSGPLALPALGKGEGAITSSAITTVAAEAPVLPLSTEPPAAPATSAYTCFRCLECKEQCRDKAGMAAHFQQLGPPAPGATSNVCPTCPMMLPNRCSFSAHQRMHKNRPPHVCPECGGNFLQANFQTHLREACLHVSRRVGYRCPSCSVVFGGVNSIKSHIQTSHCEVFHKCPICPMAFKSGPSAHAHLYSQHPSFQTQQAKLIYKCAMCDTVFTHKPLLSSHFDQHLLPQRVSVFKCPSCPLLFAQKRTMLEHLKNTHQSGRLEETAGKGAGGALLTPKTEPEELAVSQGGAAPATEESSSSSEEEEVPSSPEPPRPAKRPRRELGSKGLKGGGGGPGGWTCGLCHSWFPERDEYVAHMKKEHGKSVKKFPCRLCERSFCSAPSLRRHVRVNHEGIKRVYPCRYCTEGKRTFSSRLILEKHVQVRHGLQLGAQSPGRGTTLARGSSARAQGPGRKRRQSSDSCSEEPDSTTPPAKSPRGGPGSGGHGPLRYRSSSSTEQSLMMGLRVEDGAQQCLDCGLCFASPGSLSRHRFISHKKRRGVGKASALGLGDGEEEAPPSRSDPDGGDSPLPASGGPLTCKVCGKSCDSPLNLKTHFRTHGMAFIRARQGAVGDN

SEQ ID NO: 8870 - protein, 2090 aa, Homo sapiens
MPAPGASLALRVSFVDVHPDVIPVQLWGLVGERRGEYLRLSREIQEAAATRGQWALGSASASPGELCLVQVGLLWHRCRVVSRQAQESRVFLLDEGRTITAGAGSLAPGRREFFNLPSEVLGCVLAGLVPAGCGAGSGEPPQHWPADAVDFLSNLQGKEVHGCVLDVLLLHRLVLLEVPDVFQQMRELGLARRVPDSLFRSLLERYLTAATASVGSGVPVLSRVPLKQKQPGLDYFYPQLQLGVTEAVVITQVCHPHRIHCQLRSVSQEIHRLSESMAQVYRGSTGTGDENSTSATWEEREESPDKPGSPCASCGLDGHWYRALLLETFRPQRCAQVLHVDYGRKELVSCSSLRYLLPEYFRMPVVTYPCALYGLWDGGRGWSRSQVGDLKTLILGKAVNAKIEFYCSFEHVYYVSLYGEDGINLNRVFGVQSCCLADRVLQSQATEEEEPETSQSQSPAEEVDEEISLPALRSIRLKMNAFYDAQVEFVKNPSEFWIRLRKHNVTFSKLMRRMCGFYSSASKLDGVVLKPEPDDLCCVKWKENGYYRAIVTKLDDKSVDVFLVDRGNSENVDWYDVRMLLPQFRQLPILAVKCTLADIWPLGKTWSQEAVSFFKKTVLHKELVIHILDKQDHQYVIEILDESRTGEENISKVIAQAGYAKYQEFETKENILVNAHSPGHVSNHFTTESNKIPFAKTGEGEQKAKRENKTTSVSKALSDTTVVTNGSTELVVQEKVKRASVYFPLMQNCLEIKPGSSSKGELEVGSTVEVRVSYVENPGYFWCQLTRNIQGLKTLMSDIQYYCKNTAAPHQRNTLACLAKRTVNRQWSRALISGIQSVEHVNVTFVDYGDREMVSVKNIYSISEEFLKVKAQAFRCSLYNLIQPVGQNPFVWDVKAIQAFNEFIDNAWQKNLELKCTIFALASINEELFNIVDLLTPFQSACHFLVEKRLARPVKLQKPLESSVQLHSYFYSTHDMKIGSEELVYITHIDDPWTFYCQLARNANILEQLSCSITQLSKVLLNLKTSPLNPGTLCLAKYTDGNWYRGIVIEKEPKKVFFVDFGNIYVVTSDDLLPIPSDAYDVLLLPMQAVRCSLSDIPDHIPEEVVVWFQETILDKSLKALVVAKDPDGTLIIELYGDNIQISASINKKLGLLSYKDRIRKKESEVLCSTTETLEEKNENMKLPCTEYLSKSVGYKLPNKEILEESYKPQINSSYKELKLLQSLTKTNLVTQYQDSVGNKNSQVFPLTTEKKEEISAETPLKTARVEATLSERKIGDSCDKDLPLKFCEFPQKTIMPGFKTTVYVSHINDLSDFYVQLIEDEAEISHLSERLNSVKTRPEYYVGPPLQRGDMICAVFPEDNLWYRAVIKEQQPNDLLSVQFIDYGNVSVVHTNKIGRLDLVNAILPGLCIHCSLQGFEVPDNKNSKKMMHYFSQRTSEAAIRCEFVKFQDRWEVILADEHGIIADDMISRYALSEKSQVELSTQVIKSASSKSVNKSDIDTSVFLNWYNPEKKMIRAYATVIDGPEYFWCQFADTEKLQCLEVEVQTAGEQVADRRNCIPCPYIGDPCIVRYREDGHYYRALITNICEDYLVSVRLVDFGNIEDCVDPKALWAIPSELLSVPMQAFPCCLSGFNISEGLCSQEGNDYFYEIITEDVLEITILEIRRDVCDIPLAIVDLKSKGKSINEKMEKYSKTGIKSALPYENIDSEIKQTLGSYNLDVGLKKLSNKAVQNKIYMEQQTDELAEITEKDVNIIGTKPSNFRDPKTDNICEGFENPCKDKIDTEELEGELECHLVDKAEFDDKYLITGFNTLLPHANETKEILELNSLEVPLSPDDESKEFLELESIELQNSLVVDEEKGELSPVPPNVPLSQECVTKGAMELFTLQLPLSCEAEKQPELELPTAQLPLDDKMDPLSLGVSQKAQESMCTEDMRKSSCVESFDDQRRMSLHLHGADCDPKTQNEMNICEEEFVEYKNRDAISALMPLFSEEESSDGSKHNNGLPDHISAQLQNTYTLKAFTVGSKCVVWSSLRNTWSKCEILETAEEGTRVLNLSNGMEEIVNPENVWNGIPKLDKSPPEKRGLEVMEI

SEQ ID NO: 8871 - protein, 310 aa, Homo sapiens
MAFPKMRLMYICLLVLGALCLYFSMYSLNPFKEQSFVYKKDGNFLKLPDTDCRQTPPFLVLLVTSSHKQLAERMAIRQTWGKERMVKGKQLKTFFLLGTTSSAAETKEVDQESQRHGDIIQKDFLDVYYNLTLKTMMGIEWVHRFCPQAAFVMKTDSDMFINVDYLTELLLKKNRTTRFFTGFLKLNEFPIRQPFSKWFVSKSEYPWDRYPPFCSGTGYVFSGDVASQVYNVSKSVPYIKLEDVFVGLCLERLNIRLEELHSQPTFFPGGLRFSVCLFRRIVACHFIKPRTLLDYWQALENSRGEDCPPV

SEQ ID NO: 8872 - protein, 531 aa, Homo sapiens
MCSLASGATGGRGAVENEEDLPELSDSGDEAAWEDEDDADLPHGKQQTPCLFCNRLFTSAEETFSHCKSEHQFNIDSMVHKHGLEFYGYIKLINFIRLKNPTVEYMNSIYNPVPWEKEEYLKPVLEDDLLLQFDVEDLYEPVSVPFSYPNGLSENTSVVEKLKHMEARALSAEAALARAREDLQKMKQFAQDFVMHTDVRTCSSSTSVIADLQEDEDGVYFSSYGHYGIHEEMLKDKIRTESYRDFIYQNPHIFKDKVVLDVGCGTGILSMFAAKAGAKKVLGVDQSEILYQAMDIIRLNKLEDTITLIKGKIEEVHLPVEKVDVIISEWMGYFLLFESMLDSVLYAKNKYLAKGGSVYPDICTISLVAVSDVNKHADRIAFWDDVYGFKMSCMKKAVIPEAVVEVLDPKTLISEPCGIKHIDCHTTSISDLEFSSDFTLKITRTSMCTAIAGYFDIYFEKNCHNRVVFSTGPQSTKTHWKQTVFLLEKPFSVKAGEALKGKVTVHKSKKDPRSLTVTLTLNNSTQTYGLQ

SEQ ID NO: 8873 - protein, 548 aa, Homo sapiens
SDCEPARALRRSRRSAKFPEPRSRRGFALVLALVPGVGGRCARSLPNPVPAPRHAGLSGHHSHVLVSVRRYRLFTSAEETFSHCKSEHQFNIDSMVHKHGLEFYGYIKLINFIRLKNPTVEYMNSIYNPVPWEKEEYLKPVLEDDLLLQFDVEDLYEPVSVPFSYPNGLSENTSVVEKLKHMEARALSAEAALARAREDLQKMKQFAQDFVMHTDVRTCSSSTSVIADLQEDEDGVYFSSYGHYGIHEEMLKDKIRTESYRDFIYQNPHIFKDKVVLDVGCGTGILSMFAAKAGAKKVLGVDQSEILYQAMDIIRLNKLEDTITLIKGKIEEVHLPVEKVDVIISEWMGYFLLFESMLDSVLYAKNKYLAKGGSVYPDICTISLVAVSDVNKHADRIAFWDDVYGFKMSCMKKAVIPEAVVEVLDPKTLISEPCGIKHIDCHTTSISDLEFSSDFTLKITRTSMCTAIAGYFDIYFEKNCHNRVVFSTGPQSTKTHWKQTVFLLEKPFSVKAGEALKGKVTVHKNKKDPRSLTVTLTLNNSTQTYGLQ

SEQ ID NO: 8874 - protein, 62 aa, Homo sapiens
MDPNCSCAAAGVSCTCASSCKCKECKCTSCKKSCCSCCPVGCAKCAQGCICKGASEKCSCCA

SEQ ID NO: 8875 - protein, 1030 aa, Homo sapiens
MEPLRHSPGPGGQRLLLPSMLLALLLLLAPSPGHATRVVYKVPEEQPPNTLIGSLAADYGFPDVGHLYKLEVGAPYLRVDGKTGDIFTTETSIDREGLRECQNQLPGDPCILEFEVSITDLVQNASPRLLEGQIEVQDINDNTPNFASPVITLAIPENTNIGSLFPIPLASDRDAGPNGVASYELQVAEDQEEKQPQLIVMGNLDRERWDSYDLTIKVQDGGSPPRATSALLRVTVLDTNDNAPKFERPSYEAELSENSPIGHSVIQVKANDSDQGANAEIEYTFHQAPEVVRRLLRLDRNTGLITVQGPVDREDLSTLRFSVLAKDRGTNPKSARAQVVVTVKDMNDNAPTIEIRGIGLVTHQDGMANISEDVAEETAVALVQVSDRDEGENAAVTCVVAGDVPFQLRQASETGSDSKKKYFLQTTTPLDYEKVKDYTIEIVAVDSGNPPLSSTNSLKVQVVDVNDNAPVFTQSVTEVAFPENNKPGEVIAEITASDADSGSNAELVYSLEPEPAAKGLFTISPETGEIQVKTSLDREQRESYELKVVAADRGSPSLQGTATVLVNVLDCNDNDPKFMLSGYNFSVMENMPALSPVGMVTVIDGDKGENAQVQLSVEQDNGDFVIQNGTGTILSSLSFDREQQSTYTFQLKAVDGGVPPRSAYVGVTINVLDENDNAPYITAPSNTSHKLLTPQTRLGETVSQVAAEDFDSGVNAELIYSIAGGNPYGLFQIGSHSGAITLEKEIERRHHGLHRLVVKVSDRGKPPRYGTALVHLYVNETLANRTLLETLLGHSLDTPLDIDIAGDPEYERSKQRGNILFGVVAGVVAVALLIALAVLVRYCRQREAKSGYQAGKKETKDLYAPKPSGKASKGNKSKGKKSKSPKPVKPVEDEDEAGLQKSLKFNLMSDAPGDSPRIHLPLNYPPGSPDLGRHYRSNSPLPSIQLQPQSPSASKKHQVVQDLPPANTFVGTGDTTSTGSEQYSDYSYRTNPPKYPSKQLPHRRVTFSATSQAQELQDPSQHSYYDSGLE

SEQ ID NO: 8876 - protein, 1060 aa, Homo sapiens
MDSGAGGRRCPEAALLILGPPRMEHLRHSPGPGGQRLLLPSMLLALLLLLAPSPGHATRVVYKVPEEQPPNTLIGSLAADYGFPDVGHLYKLEVGAPYLRVDGKTGDIFTTETSIDREGLRECQNQLPGDPCILEFEVSITDLVQNGSPRLLEGQIEVQDINDNTPNFASPVITLAIPENTNIGSLFPIPLASDRDAGPNGVASYELQAGPEAQELFGLQVAEDQEEKQPQLIVMGNLDRERWDSYDLTIKVQDGGSPPRASSALLRVTVLDTNDNAPKFERPSYEAELSENSPIGHSVIQVKANDSDQGANAEIEYTFHQAPEVVRRLLRLDRNTGLITVQGPVDREDLSTLRFSVLAKDRGTNPKSARAQVVVTVKDMNDNAPTIEIRGIGLVTHQDGMANISEDVAEETAVALVQVSDRDEGENAAVTCVVAGDVPFQLRQASETGSDSKKKYFLQTTTPLDYEKVKDYTIEIVAVDSGNPPLSSTNSLKVQVVDVNDNAPVFTQSVTEVAFPENNKPGEVIAEITASDADSGSNAELVYSLEPEPAAKGLFTISPETGEIQVKTSLDREQRESYELKVVAADRGSPSLQGTATVLVNVLDCNDNDPKFMLSGYNFSVMENMPALSPVGMVTVIDGDKGENAQVQLSVEQDNGDFVIQNGTGTILSSLSFDREQQSTYTFQLKAVDGGVPPRSAYVGVTINVLDENDNAPYITAPSNTSHKLLTPQTRLGETVSQVAAEDFDSGVNAELIYSIAGGNPYGLFQIGSHSGAITLEKEIERRHHGLHRLVVKVSDRGKPPRYGTALVHLYVNETLANRTLLETLLGHSLDTPLDIDIAGDPEYERSKQRGNILFGVVAGVVAVALLIALAVLVRYCRQREAKSGYQAGKKETKDLYAPKPSGKASKGNKSKGKKSKSPKPVKPVEDEDEAGLQKSLKFNLMSDAPGDSPRIHLPLNYPPGSPDLGRHYRSNSPLPSIQLQPQSPSASKKHQVVQDLPPANTFVGTGDTTSTGSEQYSDYSYRTNPPKYPSKQVGQPFQLSTPQPLPHPYHGAIWTEVWE

SEQ ID NO: 8877 - protein, 1237 aa, Homo sapiens
MDSGAGGRRCPEAALLILGPPRMEHLRHSPGPGGQRLLLPSMLLALLLLLAPSPGHATRVVYKVPEEQPPNTLIGSLAADYGFPDVGHLYKLEVGAPYLRVDGKTGDIFTTETSIDREGLRECQNQLPGDPCILEFEVSITDLVQNGSPRLLEGQIEVQDINDNTPNFASPVITLAIPENTNIGSLFPIPLASDRDAGPNGVASYELQAGPEAQELFGLQVAEDQEEKQPQLIVMGNLDRERWDSYDLTIKVQDGGSPPRASSALLRVTVLDTNDNAPKFERPSYEAELSENSPIGHSVIQVKANDSDQGANAEIEYTFHQAPEVVRRLLRLDRNTGLITVQGPVDREDLSTLRFSVLAKDRGTNPKSARAQVVVTVKDMNDNAPTIEIRGIGLVTHQDGMANISEDVAEETAVALVQVSDRDEGENAAVTCVVAGDVPFQLRQASETGSDSKKKYFLQTTTPLDYEKVKDYTIEIVAVDSGNPPLSSTNSLKVQVVDVNDNAPVFTQSVTEVAFPENNKPGEVIAEITASDADSGSNAELVYSLEPEPAAKGLFTISPETGEIQVKTSLDREQRESYELKVVAADRGSPSLQGTATVLVNVLDCNDNDPKFMLSGYNFSVMENMPALSPVGMVTVIDGDKGENAQVQLSVEQDNGDFVIQNGTGTILSSLSFDREQQSTYTFQLKAVDGGVPPRSAYVGVTINVLDENDNAPYITAPSNTSHKLLTPQTRLGETVSQVAAEDFDSGVNAELIYSIAGGNPYGLFQIGSHSGAITLEKEIERRHHGLHRLVVKVSDRGKPPRYGTALVHLYVNETLANRTLLETLLGHSLDTPLDIDIAGDPEYERSKQRGNILFGVVAGVVAVALLIALAVLVRYCRQREAKSGYQAGKKETKDLYAPKPSGKASKGNKSKGKKSKSPKPVKPVEDEDEAGLQKSLKFNLMSDAPGDSPRIHLPLNYPPGSPDLGRHYRSNSPLPSIQLQPQSPSASKKHQVVQDLPPANTFVGTGDTTSTGSEQYSDYSYRTNPPKYPSKQLPHRRVTFSATSQAQELQDPSQHSYYDSGLEESETPSSKSSSGPRLGPLALPEDHYERTTPDGSIGEMEHPENDLRPLPDVAMTGTCTRECSEFGHSDTCWMPGQSSPSRRTKSSALKLSTFVPYQDRGGQEPAGAGSPSPPEDRNTKTAPVRLLPSYSAFSHSSHDSCKDSATLEEIPLTQTSDFPPAATPASAQTAKREIYL

SEQ ID NO: 8878 - protein, 1026 aa, Homo sapiens [sequence omitted]

SEQ ID NO: 8879 - protein, 209 aa, Homo sapiens
MAAHLLPICALFLTLLDMAQGFRGPLLPNRPFTTVWNANTQWCLERHGVDVDVSVFDVVANPGQTFRGPDMTIFYSSQLGTYPYYTPTGEPVFGGLPQNASLIAHLARTFQDILAAIPAPDFSGLAVIDWEAWRPRWAFNWDTKDIYRQRSRALVQAQHPDWPAPQVEAVAQDQFQGAARAWMAGTLQLGRALRPRGLWGFYGFPDCSG

SEQ ID NO: 8880 - protein, 435 aa, Homo sapiens
MAAHLLPICALFLTLLDMAQGFRGPLLPNRPFTTVWNANTQWCLERHGVDVDVSVFDVVANPGQTFRGPDMTIFYSSQLGTYPYYTPTGEPVFGGLPQNASLIAHLARTFQDILAAIPAPDFSGLAVIDWEAWRPRWAFNWDTKDIYRQRSRALVQAQHPDWPAPQVEAVAQDQFQGAARAWMAGTLQLGRALRPRGLWGFYGFPDCYNYDFLSPNYTGQCPSGIRAQNDQLGWLWGQSRALYPSIYMPAVLEGTGKSQMYVQHRVAEAFRVAVAAGDPNLPVLPYVQIFYDTTNHFLPLDELEHSLGESAAQGAAGVVLWVSWENTRTKESCQAIKEYMDTTLGPFILNVTSGALLCSQALCSGHGRCVRRTSHPKALLLLNPASFSIQLTPGGGPLSLRGALSLEDQAQMAVEFKCRCYPGWQAPWCERKSMW

SEQ ID NO: 8881 - protein, 405 aa, Homo sapiens
MAAHLLPICALFLTLLDMAQGFRGPLLPNRPFTTVWNANTQWCLERHGVDVDVSVFDVVANPGQTFRGPDMTIFYSSQLGTYPYYTPTGEPVFGGLPQNASLIAHLARTFQDILAAIPAPDFSGLAVIDWEAWRPRWAFNWDTKDIYRQRSRALVQAQHPDWPAPQVEAVAQDQFQGAARAWMAGTLQLGRALRPRGLWGFYGFPDCYNYDFLSPNYTGQCPSGIRAQNDQLGWLWGQSRALYPSIYMPAVLEGTGKSQMYVQHRVAEAFRVAVAAGDPNLPVLPYVQIFYDTTNHFLPLESCQAIKEYMDTTLGPFILNVTSGALLCSQALCSGHGRCVRRTSHPKALLLLNPASFSIQLTPGGGPLSLRGALSLEDQAQMAVEFKCRCYPGWQAPWCERKSMW

SEQ ID NO: 8882 - protein, 130 aa, Homo sapiens
MTCSPLLLTLLIHCTGSWAQSVLTQPPSVSAAPGQKVTISCSGSSSNIGNDYVSWYQQVPGTAPKLLIYDNNKRPSGIPDRFSGSKSGTSATLGITGLQTGDEADYYCGTWNNSLSGWVFGGGTKLTVLG

SEQ ID NO: 8883 - protein, 485 aa, Homo sapiens
MRSRVAVRACHKVCRCLLSGFGGRVDAGQPELLTERSSPKGGHVKSHAELEGNGEHPEAPGSGEGSEALLEICQRRHFLSGSKQQLSRDSLLSGCHPGFGPLGVELRKNLAAEWWTSVVVFREQVFPVDALHHKPGPLLPGDSAFRLVSAETLREILQDKELSKEQLVAFLENVLKTSGKLRENLLHGALEHYVNCLDLVNKRLPYGLAQIGVCFHPVFDTKQIRNGVKSIGEKTEASLVWFTPPRTSNQWLDFWLRHRLQWWRKFAMSPSNFSSSDCQDEEGRKGNKLYYNFPWGKELIETLWNLGDHELLHMYPGNVSKLHGRDGRKNVVPCVLSVNGDLDRGMLAYLYDSFQLTENSFTRKKNLHRKVLKLHPCLAPIKVALDVGRGPTLELRQVCQGLFNELLENGISVWPGYLETMQSSLEQLYSKYDEMSILFTVLVTETTLENGLIHLRSRDTTMKEMMHISKLKDFLIKYISSAKNV

SEQ ID NO: 8884 - protein, 409 aa, Homo sapiens
MDRLKSHLTVCFLPSVPFLILVSTLATAKSVTNSTLNGTNVVLGSVPVIIARTDHIIVKEGNSALINCSVYGIPDPQFKWYNSIGKLLKEEEDEKERGGGKWQMHDSGLLNITKVSFSDRGKYTCVASNIYGTVNNTVTLRVIFTSGDMGVYYMVVCLVAFTIVMVLNITRLCMMSSHLKKTEKAINEFFRTEGAEKLQKAFEIAKRIPIITSAKTLELAKVTQFKTMEFARYIEELARSVPLPPLIMNCRTIMEEIMEVVGLEEQGQNFVRHTPEGQEAADRDEVYTIPNSLKRSDSPAADSDASSLHEQPQQIAIKVSVHPQSKKEHADDQEGGQFEVKDVEETELSAEHSPETAEPSTDVTSTELTSEEPTPVEVPDKVLPPAYLEATEPAVTHDKNTCIIYESHV

SEQ ID NO: 8885 - protein, 708 aa, Homo sapiens
MKDMPLRIHVLLGLAITTLVQAVDKKVDCPRLCTCEIRPWFTPRSIYMEASTVDCNDLGLLTFPARLPANTQILLLQTNNIAKIEYSTDFPVNLTGLDLSQNNLSSVTNINVKKMPQLLSVYLEENKLTELPEKCLSELSNLQELYINHNLLSTISPGAFIGLHNLLRLHLNSNRLQMINSKWFDALPNLEILMIGENPIIRIKDMNFKPLINLRSLVIAGINLTEIPDNALVGLENLESISFYDNRLIKVPHVALQKVVNLKFLDLNKNPINRIRRGDFSNMLHLKELGINNMPELISIDSLAVDNLPDLRKIEATNNPRLSYIHPNAFFRLPKLESLMLNSNALSALYHGTIESLPNLKEISIHSNPIRCDCVIRWMNMNKTNIRFMEPDSLFCVDPPEFQGQNVRQVHFRDMMEICLPLIAPESFPSNLNVEAGSYVSFHCRATAEPQPEIYWITPSGQKLLPNTLTDKFYVHSEGTLDINGVTPKEGGLYTCIATNLVGADLKSVMIKVDGSFPQDNNGSLNIKIRDIQANSVLVSWKASSKILKSSVKWTAFVKTENSHAAQSARIPSDVKVYNLTHLNPSTEYKICIDIPTIYQKNRKKCVNVTTKGLHPDQKEYEKNNTTTLMACLGGLLGIIGVICLISCLSPEMNCDGGHSYVRNYLQKPTFALGELYPPLINLWEAGKEKSTSLKVKATVIGLPTNMS

SEQ ID NO: 8886 - protein, 135 aa, Homo sapiens
MVLGTIDLCSCFSAGLPKTEANWVNVISDLKKIEDLIQSMHIDATLYTESDVHPSCKVTAMKCFLLELQVISLESGDASIHDTVENLIILANNSLSSNGNVTESGCKECEELEEKNIKEFLQSFVHIVQMFINTS

SEQ ID NO: 8887 - protein, 136 aa, Homo sapiens [sequence omitted]

SEQ ID NO: 8888 - protein, 162 aa, Homo sapiens
MRISKPHLRSISIQCYLCLLLNSHFLTEAGIHVFILGCFSAGLPKTEANWVNVISDLKKIEDLIQSMHIDATLYTESDVHPSCKVTAMKCFLLELQVISLESGDASIHDTVENLIILANNSLSSNGNVTESGCKECEELEEKNIKEFLQSFVHIVQMFINTS

SEQ ID NO: 8889 - protein, 1181 aa, Homo sapiens
MGPERTGAAPLPLLLVLALSQGILNCCLAYNVGLPEAKIFSGPSSEQFGYAVQQFINPKGNWLLVGSPWSGFPENRMGDVYKCPVDLSTATCEKLNLQTSTSIPNVTEMKTNMSLGLILTRNMGTGGFLTCGPLWAQQCGNQYYTTGVCSDISPDFQLSASFSPATQPCPSLIDVVVVCDESNSIYPWDAVKNFLEKFVQGLDIGPTKTQVGLIQYANNPRVVFNLNTYKTKEEMIVATSQTSQYGGDLTNTFGAIQYARKYAYSAASGGRRSATKVMVVVTDGESHDGSMLKAVIDQCNHDNILRFGIAVLGYLNRNALDTKNLIKEIKAIASIPTERYFFNVSDEAALLEKAGTLGEQIFSIEGTVQGGDNFQMEMSQVGFSADYSSQNDILMLGAVGAFGWSGTIVQKTSHGHLIFPKQAFDQILQDRNHSSYLGYSVAAISTGESTHFVAGAPRANYTGQIVLYSVNENGNITVIQAHRGDQIGSYFGSVLCSVDVDKDTITDVLLVGAPMYMSDLKKEEGRVYLFTIKKGILGQHQFLEGPEGIENTRFGSAIAALSDINMDGFNDVIVGSPLENQNSGAVYIYNGHQGTIRTKYSQKILGSDGAFRSHLQYFGRSLDGYGDLNGDSITDVSIGAFGQVVQLWSQSIADVAIEASFTPEKITLVNKNAQIILKLCFSAKFRPTKQNNQVAIVYNITLDADGFSSRVTSRGLFKENNERCLQKNMVVNQAQSCPEHIIYIQEPSDVVNSLDLRVDISLENPGTSPALEAYSETAKVFSIPFHKDCGEDGLCISDLVLDVRQIPAAQEQPFIVSNQNKRLTFSVTLKNKRESAYNTGIVVDFSENLFFASFSLPVDGTEVTCQVAASQKSVACDVGYPALKREQQVTFTINFDFNLQNLQNQASLSFQALSESQEENKADNLVNLKIPLLYDAEIHLTRSTNINFYEISSDGNVPSIVHSFEDVGPKFIFSLKVTTGSVPVSMATVIIHIPQYTKEKNPLMYLTGVQTDKAGDISCNADINPLKIGQTSSSVSFKSENFRHTKELNCRTASCSNVTCWLKDVHMKGEYFVNVTTRIWNGTFASSTFQTVQLTAAAEINTYNPEIYVIEDNTVTIPLMIMKPDEKAEVPTGVIIGSIIAGILLLLALVAILWKLGFFKRKYEKMTKNPDEIDETTELSS

SEQ ID NO: 8890 - protein, 1038 aa, Homo sapiens
LPLRLPTPRELAAPGGQRPDVRGRCAPGPRGVTLSRLQTQREHTARMGAAGRQDFLFKAMLTISWLTLTCFPGATSTVAAGCPDQSPELQPWNPGHDQDHHVHIGQGKTLLLTSSATVYSIHISEGGKLVIKDHDEPIVLRTRHILIDNGGELHAGSALCPFQGNFTIILYGRADEGIQPDPYYGLKYIGVGKGGALELHGQKKLSWTFLNKTLHPGGMAEGGYFFERSWGHRGVIVHVIDPKSGTVIHSDRFDTYRSKKESERLVQYLNAVPDGRILSVAVNDEGSRNLDDMARKAMTKLGSKHFLHLGFRHPWSFLTVKGNPSSSVEDHIEYHGHRGSAAARVFKLFQTEHGEYFNVSLSSEWVQDVEWTEWFDHDKVSQTKGGEKISDLWKAHPGKICNRPIDIQATTMDGVNLSTEVVYKKGQDYRFACYDRGRACRSYRVRFLCGKPVRPKLTVTIDTNVNSTILNLEDNVQSWKPGDTLVIASTDYSMYQAEEFQVLPCRSCAPNQVKVAGKPMYLHIGEEIDGVDMRAEVGLLSRNIIVMGEMEDKCYPYRNHICNFFDFDTFGGHIKFALGFKAAHLEGTELKHMGQQLVGQYPIHFHLAGDVDERGGYDPPTYIRDLSIHHTFSRCVTVHGSNGLLIKDVVGYNSLGHCFFTEDGPEERNTFDHCLGLLVKSGTLLPSDRDSKMCKMITEDSYPGYIPKPRQDCNAVSTFWMANPNNNLINCAAAGSEETGFWFIFHHVPTGPSVGMYSPGYSEHIPLGKFYNNRAHSNYRAGMIIDNGVKTTEASAKDKRPFLSIISARYSPHQDADPLKPREPAIIRHFIAYKNQDHGAWLRGGDVWLDSCRFADNGIGLTLASGGTFPYDDGSKQEIKNSLFVGESGNVGTEMMDNRIWGPGGLDHSGRTLPIGQNFPIRGIQLYDGPINIQNCTFRKFVALEGRHTSALAFRLNNAWQSCPHNNVTGIAFEDVPITSRVFFGEPGPWFNQLDMDGDKTSVFHDVDGSVSEYPGSYLTKNDKWHSLASKAASGPSG

SEQ ID NO: 8891 - protein, 1361 aa, Homo sapiens
MGAAGRQDFLFKAMLTISWLTLTCFPGATSTVAAGCPDQSPELQPWNPGHDQDHHVHIGQGKTLLLTSSATVYSIHISEGGKLVIKDHDEPIVLRTRHILIDNGGELHAGSALCPFQGNFTIILYGRADEGIQPDPYYGLKYIGVGKGGALELHGQKKLSWTFLNKTLHPGGMAEGGYFFERSWGHRGVIVHVIDPKSGTVIHSDRFDTYRSKKESERLVQYLNAVPDGRILSVAVNDEGSRNLDDMARKAMTKLGSKHFLHLGFRHPWSFLTVKGNPSSSVEDHIEYHGHRGSAAARVFKLFQTEHGEYFNVSLSSEWVQDVEWTEWFDHDKVSQTKGGEKISDLWKAHPGKICNRPIDIQATTMDGVNLSTEVVYKKGQDYRFACYDRGRACRSYRVRFLCGKPVRPKLTVTIDTNVNSTILNLEDNVQSWKPGDTLVIASTDYSMYQAEEFQVLPCRSCAPNQVKVAGKPMYLHIGEEIDGVDMRAEVGLLSRNIIVMGEMEDKCYPYRNHICNFFDFDTFGGHIKFALGFKAAHLEGTELKHMGQQLVGQYPIHFHLAGDVDERGGYDPPTYIRDLSIHHTFSRCVTVHGSNGLLIKDVVGYNSLGHCFFTEDGPEERNTFDHCLGLLVKSGTLLPSDRDSKMCKMITEDSYPGYIPKPRQDCNAVSTFWMANPNNNLINCAAAGSEETGFWFIFHHVPTGPSVGMYSPGYSEHIPLGKFYNNRAHSNYRAGMIIDNGVKTTEASAKDKRPFLSIISARYSPHQDADPLKPREPAIIRHFIAYKNQDHGAWLRGGDVWLDSCRFADNGIGLTLASGGTFPYDDGSKQEIKNSLFVGESGNVGTEMMDNRIWGPGGLDHSGRTLPIGQNFPIRGIQLYDGPINIQNCTFRKFVALEGRHTSALAFRLNNAWQSCPHNNVTGIAFEDVPITSRVFFGEPGPWFNQLDMDGDKTSVFHDVDGSVSEYPGSYLTKNDNWLVRHPDCINVPDWRGAICSGCYAQMYIQAYKTSNLRMKIIKNDFPSHPLYLEGALTRSTHYQQYQPVVTLQKGYTIHWDQTAPAELAIWLINFNKGDWIRVGLCYPRGTTFSILSDVHNRLLKQTSKTGVFVRTLQMDKVEQSYPGRSHYYWDEDSGLLFLKLKAQNEREKFAFCSMKGCERIKIKALIPKNAGVSDCTATAYPKFTERAVVDVPMPKKLFGSQLKTKDHFLEVKMESSKQHFFHLWNDFAYIEVDGKKYPSSEDGIQVVVIDGNQGRVVSHTSFRNSILQGIPWQLFNYVATIPDNSIVLMASKGRYVSRGPWTRVLEKLGADRGLKLKEQMAFVGFKGSFRPIWVTLDTEDHKAKIFQVVPIPVVKKKKL

SEQ ID NO: 8892 - protein, 197 aa, Homo sapiens
MSRLSRSLLWAATCLGVLCVLSADKNTTQHPNVTTLAPISNVTSAPVTSLPLVTTPAPETCEGRNSCVSCFNVSVVNTTCFWIECKDESYCSHNSTVSDCQVGNTTDFCSVSTATPVPTANSTAKPTVQPSPSTTSKTVTTSGTTNNTVTPTSQPVRKSTFDAASFIGGIVLVLGVQAVIFFLYKFCKSKERNYHTL

SEQ ID NO: 8893 - protein, 189 aa, Homo sapiens
MSRLSRSLLWAATCLGVLCVLSADKNTTQHPNVTTLAPISNVTSAPVTSLPLVTTPAPETCEGRNSCVSCFNVSVVNTTCFWIECKDESYCSHNSTVSDCQVGNTTDFCSVSTATPVPTANSTAKPTVQPSPSTTSKTVTTSGTTNNTVTPTSQPVRKSTFDAASFIGGIVLVLEIRCHTRNYIPDLKK

SEQ ID NO: 8894 - protein, 698 aa, Homo sapiens
MEENVFWECKANGRPKPTYKWLKNGEPLLTRDRIQIEQGTLNITIVNLSDAGMYQCLAENKHGVIFSNAELSVIAVGPDFSRTLLKRVTLVKVGGEVVIECKPKASPKPVYTWKKGRDILKENERITISEDGNLRIINVTKSDAGSYTCIATNHFGTASSTGNLVVKDPTRVMVPPSSMDVTVGESIVLPCQVTHDHSLDIVFTWSFNGHLIDFDRDGDHFERVGGQDSAGDLMIRNIQLKHAGKYVCMVQTSVDRLSAAADLIVRGPPGPPEAVTIDEITDTTAQLSWRPGPDNHSPITMYVIQARTPFSVGWQAVSTVPELIDGKTFTATVVGLNPWVEYEFRTVAANVIGIGEPSRPSEKRRTEEALPEVTPANVSGGGGSKSELVITWETVPEELQNGRGFGYVVAFRPYGKMIWMLTVLASADASRYVFRNESVHPFSPFEVKVGVFNNKGEGPFSPTTVVYSAEEEPTKPPASIFARSLSATDIEVFWASPLEKNRGRIQGYEVKYWRHEDKEENARKIRTVGNQTSTKITNLKGSVLYHLAVKAYNSAGTGPSSATVNVTTRKPPPSQPPGNIIWNSSDSKIILNWDQVKALDNESEVKGYKVLYRWNRQSSTSVIETNKTSVELSLPFDEDYIIEIKPFSDGGDGSSSEQIRIPKISNAYARGSGASTSNACTLSAISTIMISLTARSSL

SEQ ID NO: 8895 - protein, 1026 aa, Homo sapiens
MRLPWELLVLQSFILCLADDSTLHGPIFIQEPSPVMFPLDSEEKKVKLNCEVKGNPKPHIRWKLNGTDVDTGMDFRYSVVEGSLLINNPNKTQDAGTYQCTATNSFGTIVSREAKLQFAYLDNFKTRTRSTVSVRRGQGMVLLCGPPPHSGELSYAWIFNEYPSYQDNRRFVSQETGNLYIAKVEKSDVGNYTCVVTNTVTNHKVLGPPTPLILRNDGVMGEYEPKIEVQFPETVPTAKGATVKLECFALGNPVPTIIWRRADGKPIARKARRHKSNGILEIPNFQQEDAGLYECVAENSRGKNVARGQLTFYAQPNWIQKINDIHVAMEENVFWECKANGRPKPTYKWLKNGEPLLTRDRIQIEQGTLNITIVNLSDAGMYQCLAENKHGVIFSNAELSVIAVGPDFSRTLLKRVTLVKVGGEVVIECKPKASPKPVYTWKKGRDILKENERITISEDGNLRIINVTKSDAGSYTCIATNHFGTASSTGNLVVKDPTRVMVPPSSMDVTVGESIVLPCQVTHDHSLDIVFTWSFNGHLIDFDRDGDHFERVGGQDSAGDLMIRNIQLKHAGKYVCMVQTSVDRLSAAADLIVRGPPGPPEAVTIDEITDTTAQLSWRPGPDNHSPITMYVIQARTPFSVGWQAVSTVPELIDGKTFTATVVGLNPWVEYEFRTVAANVIGIGEPSRPSEKRRTEEALPEVTPANVSGGGGSKSELVITWETVPEELQNGRGFGYVVAFRPYGKMIWMLTVLASADASRYVFRNESVHPFSPFEVKVGVFNNKGEGPFSPTTVVYSAEEEPTKPPASIFARSLSATDIEVFWASPLEKNRGRIQGYEVKYWRHEDKEENARKIRTVGNQTSTKITNLKGSVLYHLAVKAYNSAGTGPSSATVNVTTRKPPPSQPPGNIIWNSSDSKIILNWDQVKALDNESEVKGYKVLYRWNRQSSTSVIETNKTSVELSLPFDEDYIIEIKPFSDGGDGSSSEQIRIPKISNAYARGSGASTSNACTLSAISTIMISLTARSSL

SEQ ID NO: 8896 - protein, 204 aa, Homo sapiens
MSLMVVSMVCVGFFLLQGAWPHEGLYEKPSLSAQPGPTVLAGESVTLSCSSRSSYDMYHLSREGEAHERRFSAGPKVNGTFQADFPLGPATHGGTYRCFGSFRDSPYEWSNSSDPLLVSVTGNPSNSWPSPTEPSSETGNPRHLHVLIGTSVVIILFILLLFFLLHRWCCNKKNAVVMDQEPAGNRTVNREDSDEQDPQEVTYA

SEQ ID NO: 8897 - protein, 436 aa, Homo sapiens
MSLMVVSMACVGLFLVQRAGPHMGGQDKPFLSAWPSAVVPRGGHVTLRCHYRHRFNNFMLYKEDRIHIPIFHGRIFQESFNMSPVTTAHAGNYTCRGSHPHSPTGWSAPSNPVVIMVTGNHRKPSLLAHPGPLVKSGERVILQCWSDIMFEHFFLHKEGISKDPSRLVGQIHDGVSKANFSIGPMMQDLAGTYRCYGSVTHSPYQLSAPSDPLDIVITGLYEKPSLSAQPGPTVLAGESVTLSCSSRSSYDMYHLSREGEAHERRFSAGPKVNGTFQADFPLGPATHGGTYRCFGSFRDSPYEWSNSSDPLLVSVTGNPSNSWPSPTEPSSETGNPRHLHVLIGTSVVIILFILLLFFLLHRWCCNKKNAVVMDQEPAGNRTVNREDSDEQDPQEVTYAQLNHCVFTQRKITRPSQRPKTPPTDIIVYTELPNAEP

SEQ ID NO: 8898 - protein, 243 aa, Homo sapiens
MSLMVVSMVCVGFFLLQGAWPHEGVHRKPSLLAHPGPLVKSEETVILQCWSDVRFQHFLLHREGKFKDTLHLIGEHHDGVSKANFSIGPMMQDLAGTYRCYGSVTHSPYQLSAPSDPLLVSVTGNPSNSWPSPTEPSSETGNPRHLHVLIGTSVVIILFILLLFFLLHRWCCNKKNAVVMDQEPAGNRTVNREDSDEQDPQEVTYAQLNHCVFTQRKITRPSQRPKTPPTDIIVYTELPNAEP

SEQ ID NO: 8899 - protein, 341 aa, Homo sapiens
MSLMVVSMVCVGFFLLQGAWPHEGVHRKPSLLAHPGPLVKSEETVILQCWSDVRFQHFLLHREGKFKDTLHLIGEHHDGVSKANFSIGPMMQDLAGTYRCYGSVTHSPYQLSAPSDPLDIVITGLYEKPSLSAQPGPTVLAGESVTLSCSSRSSYDMYHLSREGEAHERRFSAGPKVNGTFQADFPLGPATHGGTYRCFGSFRDSPYEWSNSSDPLLVSVTGNPSNSWPSPTEPSSETGNPRHLHVLIGTSVVIILFILLLFFLLHRWCCNKKNAVVMDQEPAGNRTVNREDSDEQDPQEVTYAQLNHCVFTQRKITRPSQRPKTPPTDIIVYTELPNAEP

SEQ ID NO: 8900 - protein, 510 aa, Homo sapiens
MPLSLGAEMWGPEAWLLLLLLLASFTGRCPAGELGTSDVVTVVLGQDAKLPCFYRGDSGEQVGQVAWARVDAGEGAQELALLHSKYGLHVSPAYEGRVEQPPPPRNPLDGSVLLRNAVQADEGEYECRVSTFPAGSFQARLRLRVLVPPLPSLNPGPALEEGQGLTLAASCTAEGSPAPSVTWDTEVKGTTSSRSFKHSRSAAVTSEFHLVPSRSMNGQPLTCVVSHPGLLQDQRITHILHVSFLAEASVRGLEDQNLWHIGREGAMLKCLSEGQPPPSYNWTRLDGPLPSGVRVDGDTLGFPPLTTEHSGIYVCHVSNEFSSRDSQVTVDVLDPQEDSGKQVDLVSASVVVVGVIAALLFCLLVVVVVLMSRYHRRKAQQMTQKYEEELTLTRENSIRRLHSHHTDPRSQPEESVGLRAEGHPDSLKDNSSCSVMSEEPEGRSYSTLTTVREIETQTELLSPGSGRAEEEEDQDEGIKQAMNHFVQENGTLRAKPTGNGIYINGRGHLV

SEQ ID NO: 8901 - protein, 2322 aa, Homo sapiens
MQSGRGPPLPAPGLALALTLTMLARLASAASFFGENHLEVPVATALTDIDLQLQFSTSQPEALLLLAAGPADHLLLQLYSGRLQVRLVLGQEELRLQTPAETLLSDSIPHTVVLTVVEGWATLSVDGFLNASSAVPGAPLEVPYGLFVGGTGTLGLPYLRGTSRPLRGCLHAATLNGRSLLRPLTPDVHEGCAEEFSASDDVALGFSGPHSLAAFPAWGTQDEGTLEFTLTTQSRQAPLAFQAGGRRGDFIYVDIFEGHLRAVVEKGQGTVLLHNSVPVADGQPHEVSVHINAHRLEISVDQYPTHTSNRGVLSYLEPRGSLLLGGLDAEASRHLQEHRLGLTPEATNASLLGCMEDLSVNGQRRGLREALLTRNMAAGCRLEEEEYEDDAYGHYEAFSTLAPEAWPAMELPEPCVPEPGLPPVFANFTQLLTISPLVVAEGGTAWLEWRHVQPTLDLMEAELRKSQVLFSVTRGAHYGELELDILGAQARKMFTLLDVVNRKARFIHDGSEDTSDQLVLEVSVTARVPMPSCLRRGQTYLLPIQVNPVNDPPHIIFPHGSLMVILEHTQKPLGPEVFQAYDPDSACEGLTFQVLGTSSGLPVERRDQPGEPATEFSCRELEAGSLVYVHCGGPAQDLTFRVSDGLQASPPATLKVVAIRPAIQIHRSTGLRLAQGSAMPILPANLSVETNAVGQDVSVLFRVTGALQFGELQKHSTGGVEGAEWWATQAFHQRDVEQGRVRYLSTDPQHHAYDTVENLALEVQVGQEILSNLSFPVTIQRATVWMLRLEPLHTQNTQQETLTTAHLEATLEEAGPSPPTFHYEVVQAPRKGNLQLQGTRLSDGQGFTQDDIQAGRVTYGATARASEAVEDTFRFRVTAPPYFSPLYTFPIHIGGDPDAPVLTNVLLVVPEGGEGVLSADHLFVKSLNSASYLYEVMERPRLGRLAWRGTQDKTTMVTSFTNEDLLRGRLVYQHDDSETTEDDIPFVATRQGESSGDMAWEEVRGVFRVAIQPVNDHAPVQTISRIFHVARGGRRLLTTDDVAFSDADSGFADAQLVLTRKDLLFGSIVAVDEPTRPIYRFTQEDLRKRRVLFVHSGADRGWIQLQVSDGQHQATALLEVQASEPYLRVANGSSLVVPQGGQGTIDTAVLHLDTNLDIRSGDEVHYHVTAGPRWGQLVRAGQPATAFSQQDLLDGAVLYSHNGSLSPEDTMAFSVEAGPVHTDATLQVTIALEGPLAPLKLVRHKKIYVFQGEAAEIRRDQLEAAQEAVPPADIVFSVKSPPSAGYLVMVSRGALADEPPSLDPVQSFSQEAVDTGRVLYLHSRPEAWSDAFSLDVASGLGAPLEGVLVELEVLPAAIPLEAQNFSVPEGGSLTLAPPLLRVSGPYFPTLLGLSLQVLEPPQHGPLQKEDGPQARTLSAFSWRMVEEQLIRYVHDGSETLTDSFVLMANASEMDRQSHPVAFTVTVLPVNDQPPILTTNTGLQMWEGATAPIPAEALRSTDGDSGSEDLVYTIEQPSNGRVVLRGAPGTEVRSFTQAQLDGGLVLFSHRGTLDGGFPFRLSDGEHTSPGHFFRVTAQKQVLLSLKGSQTLTVCPGSVQPLSSQTLRASSSAGTDPQLLLYRVVRGPQLGRLFHAQQDSTGEALVNFTQAEVYAGNILYEHEMPPEPFWEAHDTLELQLSSPPARDVAATLAVAVSFEAACPQRPSHLWKNKGLWVPEGQRARITVAALDASNLLASVPSPQRSEHDVLFQVTQFPSRGQLLVSEEPLHAGQPHFLQSQLAAGQLVYAHGGGGTQQDGFHFRAHLQGPAGASVAGPQTSEAFAITVRDVNERPPQPQASVPLRLTRGSRAPISRAQLSVVDPDSAPGEIEYEVQRAPHNGFLSLVGGGLGPVTRFTQADVDSGRLAFVANGSSVAGIFQLSMSDGASPPLPMSLAVDILPSAIEVQLRAPLEVPQALGRSSLSQQQLRVVSDREEPEAAYRLIQGPQYGHLLVGGRPTSAFSQFQIDQGEVVFAFTNFSSSHDHFRVLALARGVNASAVVNVTVRALLHVWAGGPWPQGATLRLDPTVLDAGELANRTGSVPRFRLLEGPRHGRVVRVPRARTEPGGSQLVEQFTQQDLEDGRLGLEVGRPEGRAPGPAGDSLTLELWAQGVPPAVASLDFATEPYNAARPYSVALLSVPEAARTEAGKPESSTPTGEPGPMASSPEPAVAKGGFLSFLEANMFSVIIPMCLVLLLLALILPLLFYLRKRNKTGKHDVQVLTAKPRNGLAGDTETFRKVEPGQAIPLTAVPGQGPPPGGQPDPELLQFCRTPNPALKNGQYWV

SEQ ID NO: 8902 - protein, 374 aa, Homo sapiens
MWFLTTLLLWVPVDGQVDTTKAVITLQPPWVSVFQEETVTLHCEVLHLPGSSSTQWFLNGTATQTSTPSYRITSASVNDSGEYRCQRGLSGRSDPIQLEIHRGWLLLQVSSRVFTEGEPLALRCHAWKDKLVYNVLYYRNGKAFKFFHWNSNLTILKTNISHNGTYHCSGMGKHRYTSAGISVTVKELFPAPVLNASVTSPLLEGNLVTLSCETKLLLQRPGLQLYFSFYMGSKTLRGRNTSSEYQILTARREDSGLYWCEAATEDGNVLKRSPELELQVLGLQLPTPVWFHVLFYLAVGIMFLVNTVLWVTIRKELKRKKKWDLEISLDSGHEKKVISSLQEDRHLEEELKCQEQKEEQLQEGVHRKEPQGAT

SEQ ID NO: 8903 - protein, 374 aa, Homo sapiens [sequence omitted]

SEQ ID NO: 8904 - protein, 565 aa, Homo sapiens
MLHPETSPGRGHLLAVLLALLGTAWAEVWPPQLQEQAPMAGALNRKESFLLLSLHNRLRSWVQPPAADMRRLDWSDSLAQLAQARAALCGTPTPSLASGLWRTLQVGWNMQLLPAGLVSFVEVVSLWFAEGQRYSHAAGECARNATCTHYTQLVWATSSQLGCGRHLCSAGQAAIEAFVCAYSPRGNWEVNGKTIVPYKKGAWCSLCTASVSGCFKAWDHAGGLCEVPRNPCRMSCQNHGRLNISTCHCHCPPGYTGRYCQVRCSLQCVHGRFREEECSCVCDIGYGGAQCATKVHFPFHTCDLRIDGDCFMVSSEADTYYRARMKCQRKGGVLAQIKSQKVQDILAFYLGRLETTNEVIDSDFETRNFWIGLTYKTAKDSFRWATGEHQAFTSFAFGQPDNHGFGNCVELQASAAFNWNDQRCKTRNRYICQFASLAFVIHSTRLSFCLRMPNDPEKNTDHDIKRPWQRNRDYCDTRFCTSKGIPVVSFGKRTKPDLQYACYLWRFIWGTYFSLIGCCHGHDCCYTGAEEAGCSPKTERYSWQCVNQSVLCGPSGNHTDIETKQ

SEQ ID NO: 8905 - protein, 530 aa, Homo sapiens
MGRHVATSCHVAWLLVLISGCWGQVNRLPFFTNHFFDTYLLISEDTPVGSSVTQLLAQDMDNDPLVFGVSGEEASRFFAVEPDTGVVWLRQPLDRETKSEFTVEFSVSDHQGVITRKVNIQVGDVNDNAPTFHNQPYSVRIPENTPVGTPIFIVNATDPDLGAGGSVLYSFQPPSQFFAIDSARGIVTVIRELDYETTQAYQLTVNATDQDKTRPLSTLANLAIIITDVQDMDPIFINLPYSTNIYEHSPPGTTVRIITAIDQDKGRPRGIGYTIVSGNTNSIFALDYISGVLTLNGLLDRENPLYSHGFILTVKGTELNDDRTPSDATVTTTFNILVIDINDNAPEFNSSEYSVAITELAQVGFALPLFIQVVDKDENLGLNSMFEVYLVGNNSHHFIISPTSVQGKADIRIRVAIPLDYETVDRYDFDLFANESVPDHVGYAKVKITLINENDNRPIFSQPLYNISLYENVTVGTSVLTVLVSPRFTAGPLSSPGPTVVRHPEGFCPRDLSNQGRRHPQIPELCLLVY

SEQ ID NO: 8906 - protein, 832 aa, Homo sapiens
MASAVRGSRPWPRLGLQLQFAALLLGTLSPQVHTLRPENLLLVSTLDGSLHALSKQTGDLKWTLRDDPVIEGPMYVTEMAFLSDPADGSLYILGTQKQQGLMKLPFTIPELVHASPCRSSDGVFYTGRKQDAWFVVDPESGETQMTLTTEGPSTPRLYIGRTQYTVTMHDPRAPALRWNTTYRRYSAPPMDGSPGKYMSHLASCGMGLLLTVDPGSGTVLWTQDLGVPVMGVYTWHQDGLRQLPHLTLARDTLHFLALRWGHIRLPASGPRDTATLFSTLDTQLLMTLYVGKDETGFYVSKALVHTGVALVPRGLTLAPADGPTTDEVTLQVSGEREGSPSTAVRYPSGSVALPSQWLLIGHHELPPVLHTTMLRVHPTLGSGTAETRPPENTQAPAFFLELLSLSREKLWDSELHPEEKTPDSYLGLGPQDLLAASLTAVLLGGWILFVMRQQPQVVEKQQETPLAPADFAHISQDAQSLHSGASRRSQKRLQSPSKQAQPLDDPEAEQLTVVGKISFNPKDVLGRGAGGTFVFRGQFEGRAVAVKRLLRECFGLVRREVQLLQESDRHPNVLRYFCTERGPQFHYIALELCRASLQEYVENPDLDRGGLEPEVVLQQLMSGLAHLHSLHIVHRDLKPGNILITGPDSQGLGRVVLSDFGLCKKLPAGRCSFSLHSGIPGTEGWMAPELLQLLPPDSPTSAVDIFSAGCVFYYVLSGGSHPFGDSLYRQANILTGAPCLAHLEEEVHDKVVARDLVGAMLSPLPQPRPSAPQVLAHPFFWSRAKQLQFFQDVSDWLEKESEQEPLVRALEAGGCAVVRDNWHEHISMPLQI

SEQ ID NO: 8907 - protein, 818 aa, Homo sapiens
MVGCGVAVLCLWVSCGAAAGQLEYSVPEETERGVAVGNLSADLRLPAAAMSSRNFRFLSSHRELYFGVDLPSGNLVVREPADREQLCRAKAACVLTYDLVLEDPLELHKIRIHVLDTNDNSPLFPAGDVQLHIPEFLTPGARFTLPNAQDDDEGSNGILSYSLSPSQHFRLDMGSRVDGSEYPELVLEKALDREQRATHLLVLTARDGGLPARSGDAQVTIIVVDTNDNAPVFERSVYRTKVPETAPNGTVLFRVQALDPDEGSNGEVQYSLSNSTQAELRHRFHVHPKSGEVQVAASLGPPETLLEAYIEARDEGVFGLASTAKLLVEVTDVNDHAPELDFLTLSNPVPEDAAPGTVIALFSVKDEDLDSNGRVICGMSSAGPFQLTASFDNYYSLLIDGPLDREQISEYQVLITASDSGSPPLSTRRTITVSVADVNDNTPNFPQPQQELFVAENNGPGPPLGRVFAQDPDLGKNGLVSYELLDVISEGPSASSLLAVESSSGAITAKTSFDFEQLRGFHFQVEGRDGGIPPRSATVTINLFVVDRNDNYPVILFPLPRNGSVPVEIVPRSARTGHLVTKVVAEDADSGSNAWLSYHISRASDSSLFRISANIGELRTARLVLPTDAVKQRVVVVVRDHGDPPLSSSVTLGVLLSNSVPQLLPDFEDVWEPGGQLSAQNLYLVIALACISFLFLGCLLFFVCTKLHQSPGCCAQSCCRSTEDLRYGSKMVSNPCMTSATIDVTTVERLSQTYLYRASLGLGSDNNSLLLRGEYNAADLRNLATGVGLNLPISCIQIRNRKGDHANVNAMVSKFYGI

SEQ ID NO: 8908 - protein, 963 aa, Homo sapiens [sequence omitted]

SEQ ID NO: 8909 - protein, 297 aa, Homo sapiens
MRLAVLFSGALLGLLAESTGTTSHRTTKSHKTTTHRTTTTGTTSHGPTTATHNPTTTSHGNATVHPTSNSTATSPGFTSSAHPEPPPPSPSPSPTSKETIGDYTWTNGSQPCVHLQAQIQIRVMYTTQGGGEAWGISVLNPNKTKVQGSCEGAHPHLLLSFPYGHLSFGFMQDLQQKVVYLSYMAVEYNVSFPHAAKWTFSAQNASLRDLQAPLGQSFSCSNSSIILSPAVHLDLLSLRLQAAQLPHTGVFGQSFSCPSDRSILLPLIIGLILLGLLALVLIAFCIIRRRPSAYQAL

SEQ ID NO: 8910 - protein, 354 aa, Homo sapiens
MRLAVLFSGALLGLLAAQGTGNDCPHKKSATLLPSFTVTPTVTESTGTTSHRTTKSHKTTTHRTTTTGTTSHGPTTATHNPTTTSHGNVTVHPTSNSTATSQGPSTATHSPATTSHGNATVHPTSNSTATSPGFTSSAHPEPPPPSPSPSPTSKETIGDYTWTNGSQPCVHLQAQIQIRVMYTTQGGGEAWGISVLNPNKTKVQGSCEGAHPHLLLSFPYGHLSFGFMQDLQQKVVYLSYMAVEYNVSFPHAAKWTFSAQNASLRDLQAPLGQSFSCSNSSIILSPAVHLDLLSLRLQAAQLPHTGVFGQSFSCPSDRSILLPLIIGLILLGLLALVLIAFCIIRRRPSAYQAL

SEQ ID NO: 8911 - protein, 413 aa, Homo sapiens
MENMLLWLIFFTPGWTLIDGSEMEWDFMWHLRKVPRIVSERTFHLTSPAFEADAKMMVNTVCGIECQKELPTPSLSELEDYLSYETVFENGTRTLTRVKVQDLVLEPTQNITTKGVSVRRKRQVYGTDSRFSILDKRFLTNFPFSTAVKLSTGCSGILISPQHVLTAAHCVHDGKDYVKGSKKLRVGLLKMRNKSGGKKRRGSKRSRREASGGDQREGTREHLQERAKGGRRRKKSGRGQRIAEGRPSFQWTRVKNTHIPKGWARGGMGDATLDYDYALLELKRAHKKKYMELGISPTIKKMPGGMIHFSGFDNDRADQLVYRFCSVSDESNDLLYQYCDAESGSTGSGVYLRLKDPDKKNWKRKIIAVYSGHQWVDVHGVQKDYNVAVRITPLKYAQICLWIHGNDANCAYG

SEQ ID NO: 8912 - protein, 377 aa, Homo sapiens
MADFLPSRSVLSVCFPGCLLTSGEAEQQRKSKEIDKCLSREKTYVKRLVKILLLGAGESGKSTFLKQMRIIHGQDFDQRAREEFRPTIYSNVIKGMRVLVDAREKLHIPWGDNSNQQHGDKMMSFDTRAPMAAQGMVETRVFLQYLPAIRALWADSGIQNAYDRRREFQLGESVKYFLDNLDKLGEPDYIPSQQDILLARRPTKGIHEYDFEIKNVPFKMVDVGGQRSERKRWFECFDSVTSILFLVSSSEFDQVLMEDRLTNRLTESLNIFETIVNNRVFSNVSIILFLNKTDLLEEKVQIVSIKDYFLEFEGDPHCLRDVQKFLVECFRNKRRDQQQKPLYHHFTTAINTENIRLVFRDVKDTILHDNLKQLMLQ

SEQ ID NO: 8913 - protein, 1101 aa, Homo sapiens
RRRRPSSSRRLRGRGAAQMACPALGLEALQPLQPEPPPEPAFSEAQKWIEQVTGRSFGDKDFRTGLENGILLCELLNAIKPGLVKKINRLPTPIAGLDNIILFLRGCKELGLKESQLFDPSDLQDTSNRVTVKSLDYSRKLKNVLVTIYWLGKAANSCTSYSGTTLNLKEFEGLLAQMRKDTDDIESPKRSIRDSGYIDCWDSERSDSLSPPRHGRDDSFDSLDSFGSRSRQTPSPDVVLRGSSDGRGSDSESDLPHRKLPDVKKDDMSARRTSHGEPKSAVPFNQYLPNKSNQTAYVPAPLRKKKAEREEYRKSWSTATSPLGGERPFRYGPRTPVSDDAESTSMFDMRCEEEAAVQPHSRARQEQLQLINNQLREEDDKWQDDLARWKSRRRSVSQDLIKKEEERKKMEKLLAGEDGTSERRKSIKTYREIVQEKERRERELHEAYKNARSQEEAEGILQQYIERFTISEAVLERLEMPKILERSHSTEPNLSSFLNDPNPMKYLRQQSLPPPKFTATVETTIARASVLDTSMSAGSGSPSKTVTPKAVPMLTPKPYSQPKNSQDVLKTFKVDGKVSVNGETVHREEEKERECPTVAPAHSLTKSQMFEGVARVHGSPLELKQDNGSIEINIKKPNSVPQELAATTEKTEPNSQEDKNDGGKSRKGNIELASSEPQHFTTTVTRCSPTVAFVEFPSSPQLKNDVSEEKDQKKPENEMSGKVELVLSQKVVKPKSPEPEATLTFPFLDKMPEANQLHLPNLNSQVDSPSSEKSPVTTPQFKFWAWDPEEERRRQEKWQQEQERLLQERYQKEQDKLKEEWEKAQKEVEEEERRYYEEERKIIEDTVVPFTVSSSSADQLSTSSSMTEGSGTMNKIDLGNCQDEKQDRRWKKSFQGDDSDLLLKTRESDRLEEKGSLTEGALAHSGNPVSKGVHEDHQLDTEAGAPHCGTNPQLAQDPSQNQQTSNPTHSSEDVKPKTLPLDKSINHQIESPSERRKKSPREHFQAGPFSPCSPTPPGQSPNRSISGKKLCSSCGLPLGKGAAMIIETLNLYFHIQCFRCGICKGQLGDAVSGTDVRIRNGLLNCNDCYMRSRSAGQPTTL

SEQ ID NO: 8914 - protein, 1449 aa, Homo sapiens
GRSRSRTSGRVGLAARGGGGAATAVAAAAKMAEGLERVRISASELRGILATLAPQAGSRENMKELKEARPRKDNRRPDLEIYKPGLSRLRNKPKIKEPPGSEEFKDEIVNDRDCSAVENGTQPVKDVCKELNNQEQNGPIDPENNRGQESFPRTAGQEDRSLKIIKRTKKPDLQIYQPGRRLQTVSKESASRVEEEEVLNQVEQLRVEEDECRGNVAKEEVANKPDRAEIEKSPGGGRVGAAKGEKGKRMGKGEGVRETHDDPARGRPGSAKRYSRSDKRRNRYRTRSTSSAGSNNSAEGAGLTDNGCRRRRQDRTKERPPLKKQVSVSSTDSLDEDRIDEPDGLGPRRSSERKRHLERNWSGRGEGEQKTSAKEYRGTLRVTFDAEAMNKESPMVRSARDDMDRGKPDKGLSSGGKGSEKQESKNPKQELRGRGRGILILPAHTTLSVNSAGSPESAPLGPRLLFGSGSKGSRSWGRGGTTRRLWDPNNPDQKPALKTQTPQLHFLDTDDEVSPTSWGDSRQAQASYYKFQNSDNPYYYPRTPGPASQYPYTGYNPLQYPVGPTNGVYPGPYYPGYPTPSGQYVCSPLPTSTMSPEEVEQHMRNLQQQELHRLLRVADNQELQLSNLLSRDRISPEGLEKMAQLRAELLQLYERCILLDIEFSDNQNVDQILWKNAFYQVIEKFRQLVKDPNVENPEQIRNRLLELLDEGSDFFDSLLQKLQVTYKFKLEDYMDGLAIRSKPLRKTVKYALISAQRCMICQGDIARYREQASDTANYGKARSWYLKAQHIAPKNGRPYNQLALLAVYTRRKLDAVYYYMRSLAASNPILTAKESLMSLFEETKRKAEQMEKKQHEEFDLSPDQWRKGKKSTFRHVGDDTTRLEIWIHPSHPRSSQGTESGKDSEQENGLGSLSPSDLNKRFILSFLHAHGKLFTRIGMETFPAVAEKVLKEFQVLLQHSPSPIGSTRMLQLMTINMFAVHNSQLKDCFSEECRSVIQEQAAALGLAMFSLLVRRCTCLLKESAKAQLSSPEDQDDQDDIKVSSFVPDLKELLPSVKVWSDWMLGYPDTWNPPPTSLDLPSHVAVDVWSTLADFCNILTAVNQSEVPLYKDPDDDLTLLILEEDRLLSGFVPLLAAPQDPCYVEKTSDKVIAADCKRVTVLKYFLEALCGQEEPLLAFKGGKYVSVAPVPDTMGKEMGSQEGTRLEDEEEDVVIEDFEEDSEAEGSGGEDDIRELRAKKLALARKIAEQQRRQEKIQAVLEDHSQMRQMELEIRPLFLVPDTNGFIDHLASLARLLESRKYILVVPLIVINELDGLAKGQETDHRAGGYARVVQEKARKSIEFLEQRFESRDSCLRALTSRGNELESIAFRSEDITGQLGNNDDLILSCCLHYCKDKAKDFMPASKEEPIRLLREVVLLTDDRNLRVKALTRNVPVRDIPAFLTWAQVG

SEQ ID NO: 8915 - protein, 411 aa, Homo sapiens
MKELKEARPRKDNRRPDLEIYKPGLSRLRNKPKIKEPPGSEEFKDEIVNDRDCSAVENGTQPVKDVCKELNNQEQNGPIDPENNRGQESFPRTAGQEDRSLKIIKRTKKPDLQIYQPGRRLQTVSKESASRVEEEEVLNQVEQLRVEEDECRGNVAKEEVANKPDRAEIEKSPGGGRVGAAKGEKGKRMGKGEGVRETHDDPARGRPGSAKRYSRSDKRRNRYRTRSTSSAGSNNSAEGAGLTDNGCRRRRQDRTKERPRLKQQVSVSSTDSLDEDRIDEPDGLGPRRSSERKRHLERNWSGRGEGEQKNSAKEYRGTLRVTFDAEAMNKESPMVRSARDDMDRGKPDKGLSSGGKGSEKQESKNPKQELRGRGRGILILPAHTTLSVNSAGSPESAPLGPRPPKVLGLQV

SEQ ID NO: 8916 - protein, 184 aa, Homo sapiens
MAPLLPIRTLPLILILLALLSPGAADFNISSLSGLLSPALTESLLVALPPCHLTGGNATLMVRRANDSKVVTSSFVVPPCRGRRELVSVVDSGAGFTVTRLSAYQVTNLVPGTKFYISYLVKKGTATESSREIPMSTLPRRNMESIGLGMARTGGMVVITVLLSVAMFLLVLGFIIALALGSRK

SEQ ID NO: 8917 - protein, 423 aa, Homo sapiens
MAELLLMLLLPGPSGRAATNSTPRRRRRRVFPAKDKPPLEQPHPPGHRECWVPLTPPGSDRLPSTLLASPGSIHTGQVLGKYAMSNECLLSKGAWHSFYKQNGPSAVRASTWLALNQSLHTVGAQSIPAHSRRSINPCTQSGHNQSLHTVGAQSITAHSRHSTNHSTQSSLNQSQHTVGTQPIPAHSRRSTNHSTQSALNQSLHTVGAQPIPAHSRRSTNHCTQSALNQSQHTVGAQPITAHSRRSTNPCTQSALNQSQHTVGAQPITAHSRRSTNHSTQSALNQSLHTVGAQPITAHSRRSINPCTQSALNQSLHTSALNQSLHTVGAQPIPAHSRRSTNHCTQSALNQSQHTVGAQPIPAHSRRRSTNHSTQSALNQSQHTVGAQPIPAHSRRSTNHCTQSALNQSLHTVSAQQITAHSRR

SEQ ID NO: 8918 - protein, 569 aa, Homo sapiens
MKVLLRLICFIALLISSLEADKCKEREEKIILVSSANEIDVRPCPLNPNEHKGTITWYKDDSKTPVSTEQASRIHQHKEKLWFVPAKVEDSGHYYCVVRNSSYCLRIKISAKFVENEPNLCYNAQAIFKQKLPVAGDGGLVCPYMEFFKNENNELPKLQWYKDCKPLLLDNIHFSGVKDRLIVMNVAEKHRGNYTCHASYTYLGKQYPITRVIEFITLEENKPTRPVIVSPANETMEVDLGSQIQLICNVTGQLSDIAYWKWNGSVIDEDDPVLGEDYYSVENPANKRRSTLITVLNISEIESRFYKHPFTCFAKNTHGIDAAYIQLIYPVTNFQKHMIGICVTLTVIIVCSVFIYKIFKIDIVLWYRDSCYDFLPIKASDGKTYDAYILYPKTVGEGSTSDCDIFVFKVLPEVLEKQCGYKLFIYGRDDYVGEDIVEVINENVKKSRRLIIILVRETSGFSWLGGSSEEQIAMYNALVQDGIKVVLLELEKIQDYEKMPESIKFIKQKHGAIRWSGDFTQGPQSAKTRFWKNVRYHMPVQRRSPSSKHQLLSPATKEKLQREAHVPLG

SEQ ID NO: 8919 - protein, 745 aa, Homo sapiens
  VARIANT 228, 391, 402: Xaa = Any Amino Acid
MGVEQRFIIRGLGQPIVFSIEKNNSDSCLKLTTQRDFDFRIRKGPWVRKQDILVLDSAAVLARSLERRCRAGSTGSARRLGWRPKVPPLGNQSAFASSPVPRGSVARAPRRGRPRQPLAGIAGANFPEREACPSRPYGKDGSESEPPTPGPTHPYSTLRGWLPARRGLLTFTDVAIEFSLMEWQFLDTAQWNLYRNVMLENYRNLVFPGIAVSKPDLIICLEQKKEPXNMKRHEMVDEHPVMCSHFTQDFLPEKNIEESLHKSKIFQCDKYVKVFHKFSHLKAYKIRHADKKPFKCKECGKSFCMLLHLIQHKRIHATVKFYKCKECGKVYNRSSTFTTHKRIHTGEKPYKCEECGKAFNQSTNLTRHKRIHTAEKPYKCEECGKAFNHPXNLTEHKKIHTXEKPYKCEECGKAFNQSSILSKHKKTHTGEKPYKYKECGKAFNRSSNLTTHKIIHTGEKPYKCEECGKAFHQSSKLAKHKKIHTGEKPYKCEDCCRAFTDSATLTRHKRIHTGEKPYKYEDCGKAFTYSTTLTRHKIIHTGEKPYKYKDCGKAFNESSMLTTHKKIHTGEKPYKCEQCGKAFTDSATLTRRKRIHTGEKPYKYEDCGKAFTDSAILSRQNSYWRKKPYKCEDCGKAFNESSTLTAHKRIHTGETPYKCEECGKAFNHSSHLTTHKRIHTGEKPYKCEEYGKAFSQSSSLTKHKIIYTGEQPYKCEECDKAFNLSASLIKNKKIHTREKLYKTRK

SEQ ID NO: 8920 - protein, 503 aa, Homo sapiens
LQFRDVAIEFSLEEWHCLDTAQRNLYRNVMLENYSNLVFLGITVSKPDLITCLEQGRKPLTMKRNEMIAKPSGRYENYGHDNLQFKKGCESVDECKVHKRGYNGLNQYLTTTQSKIFQCDKYVKVIHKFSNSNRHKIRHTGKKPFKCIECGKAFNQSSTLTTHKKIHTGEKPFKCEECGKAFNWSSHLTTHKRIHTGEKRYKCEDCGKAFSRFSYLTAHKIIHSGEKPYKCEECGKAFKRSSNLTTHKIIHTGEKPYKCEECGKAFKRSSILTAHKIIHSGEKPYKCEECGKAFKHPSVLTTHKRIHTGEKPYKCEECGRAFKYFSSLTTHKIIHSGEKPYKCEECGKAFNWSSHLTTHKRIHTGEKPYKCEECGEAFKYSSSLTTHKIIHTGQQPFKCEECGKAFKCFSILTTHKRIHTGEKPYKCEECGKAFNSSSHLTAHKRIHTGEKPYKCERCGKAFKRSFILTRHKRIHTGEKPYKCEECGKGFKCPSTLTTHKVIH

SEQ ID NO: 8921 - protein, 557 aa, Homo sapiens
MGGFFCLFLPVDVMLAGILVGPLQFRDVAIEFSLEEWHCLDTAQRNLYRNVMLENYRNLVFLGIVVSKPDLITCLEQGKKPLTMKKHEMVANPSVTCSHFARDLWPEQSIKDSFQKVTLRRYENYGHDNLQFKKGCESVDECKVHKRGYNGLNQYLTTTQSKIFQCDKYVKVIHKFSNSNRHKIRHTGKKPFKCIECGKAFNQSSTLTTHKKIHTGEKPFKCEECGKAFNWSSHLTTHKRIHTGEKRYKCEDCGKAFSRFSYLTAHKIIHSGEKPYKCEECGKAFKRSSNLTTHKIIHTGEKPYKCEECGKAFKRSSILTAHKIIHSGEKPYKCEECGKAFKHPSVLTTHKRIHTGEKPYKCEECGRAFKYFSSLTTHKIIHSGEKPYKCEECGKAFNWSSHLTTHKRIHTGEKPYKCEECGEAFKYSSSLTTHKIIHTGQQPFKCEECGKAFKCFSILTTHKRIHTGEKPYKCEECGKAFNSSSHLTAHKRIHTGEKPYKCERCGKAFKRSFILTRHKRIHTGEKPYKCEECGKGFKCPSTLTTHKIIHAGKKPNK

SEQ ID NO: 8922 - protein, 537 aa, Homo sapiens
LQFRDVAIEFSLEEWHCLDTAQRNLYRNVMLENYSNLVFLEQSMKDSFQKVVLRRYEKCEHDNLQLKKGCISVDEFTCSHFARDLWPEQSIKDSFQKVTLRRYENYGHDNLQFKKGCESVDECKVHKRGYNGLNQYLTTTQSKIFQCDKYVKVIHKFSNSNRHKIRHTGKKPFKCIECGKAFNQSSTLTTHKKIHTGEKPFKCEECGKAFNWSSHLTTHKRIHTGEKRYKCEDCGKAFSRFSYLTAHKIIHSGEKPYKCEECGKAFKRSSNLTTHKIIHTGEKPYKCEECGKAFKRSSILTAHKIIHSGEKPYKCEECGKAFKHPSVLTTHKRIHTGEKPYKCEECGRAFKYFSSLTTHKIIHSGEKPYKCEECGKAFNWSSHLTTHKRIHTGEKPYKCEECGEAFKYSSSLTTHKIIHTGQQPFKCEECGKAFKCFSILTTHKRIHTGEKPYKCEECGKAFNSSSHLTAHKRIHTGEKPYKCERCGKAFKRSFILTRHKRIHTGEKPYKCEECGKGFKCPSTLTTHNSYWRETINV

SEQ ID NO: 8923 - protein, 272 aa, Homo sapiens
MHLRLISWLFIILNFMEYIGSQNASRGRRQRRMHPNVSQGCQGGCATCSDYNGCLSCKPRLFFALERIGMKQIGVCLSSCPSGYYGTRYPDINKCTKCKADCDTCFNKNFCTKCKSGFYLHLGKCLDNCPEGLEANNHTMECVSIVHCEVSEWNPWSPCTKKGKTCGFKRGTETRVREIIQHPSAKGNLCPPTNETRKCTVQRKKCQKGERGKKGRERKRKKPNKGESKEAIPDSKSLESSKEIPEQRENKQQQKKRKVQDKQKSVSVSTVH

SEQ ID NO: 8924 - protein, 584 aa, Homo sapiens
MDLLWMPLLLVAACVSAVHSSPEVNAGVSSIHITKPVHILEERSLLVLTPAGLTQMLNQTRFLMVLFHNPSSKQSRNLAEELGKAVEIMGKGKNGIGFGKVDITIEKELQQEFGITKAPELKLFFEGNRSEPISCKGVVESAALVVWLRRQISQKAFLFNSSEQVAEFVISRPLVIVGFFQDLEEEVAELFYDVIKDFPELTFGVITIGNVIGRFHVTLDSVLVFKKGKIVNRQKLINDSTNKQELNRVIKQHLTDFVIEYNTENKDLISELHIMSHMLLFVSKSSESYGIIIQHYKLASKEFQNKILFILVDADEPRNGRVFKYFRVTEVDIPSVQILNLSSDARYKMPSDDITYESLKKFGRSFLSKNATKHQSSEEIPKYWDQGLVKQLVGKNFNVVVFDKEKDVFVMFYAPWSKKCKMLFPLLEELGRKYQNHSTIIIAKIDVTANDIQLMYLDRYPFFRLFPSGSQQAVLYKGEHTLKGFSDFLESHIKTKIEDEDELLSVEQNEVIEEEVLAEEKEVPMMRKGLPEQQSPELENMTKYVSKLEEPAGKKKTSEEVVVVVAKPKGPPVQKKKPKVKEEL

SEQ ID NO: 8925 - protein, 530 aa, Homo sapiens
MERMVGSGLLWLALVSCILTQASAVQRGYGNPIEASSYGLDLDCGAPGTPEAHVCFDPCQNYTLLDEPFRSTENSAGSQGCDKNMSGWYRFVGEGGVRMSETCVQVHRCQTDAPMWLNGTHPALGDGITNHTACAHWSGNCCFWKTEVLVKACPGGYHVYRLEGTPWCNLRYCTDPSTVEDKCEKACRPEEECLALNSTWGCFCRQDLNSSDVHSLQPQLDCGPREIKVKVDKCLLGGLGLGEEVIAYLRDPNCSSILQTEERNWVSVTSPVQASACRNILERNQTHAIYKNTLSLVNDFIIRDTILNINFQCAYPLDMKVSLQAALQPIVSSLNVSVDGNGEFIVRMALFQDQNYTNPYEGDAVELSVESVLYVGAILEQGDTSRFNLVLRNCYATPTEDKADLVKYFIIRNSCSNQRDSTIHVEENGQSSESRFSVQMFMFAGHYDLVFLHCEIHLCDSLNEQCQPSCSRSQVRSEVPAIDLARVLDLGPITRRGAQSPGVMNGTPSTAGFLVAWPMVLLTVLLAWLF

SEQ ID NO: 8926 - protein, 380 aa, Homo sapiens
MVGSGLLWLALVSCILTQASAVQRDPSTVEDKCEKACRPEEECLALNSTWGCFCRQDLNSSDVHSLQPQLDCGPREIKVKVDKCLLGGLGLGEEVIAYLRDPNCSSILQTEERNWVSVTSPVQASACRNILERNQTHAIYKNTLSLVNDFIIRDTILNINFQCAYPLDMKVSLQAALQPIVSSLNVSVDGNGEFIVRMALFQDQNYTNPYEGDAVELSVESVLYVGAILEQGDTSRFNLVLRNCYATPTEDKADLVKYFIIRNSCSNQRDSTIHVEENGQSSESRFSVQMFMFAGHYDLVFLHCEIHLCDSLNEQCQPSCSRSQVRSEVPAIDLARVLDLGPITRRGAQSPGVMNGTPSTAGFLVAWPMVLLTVLLAWLF

SEQ ID NO: 8927 - protein, 261 aa, Homo sapiens
MAAAVPRAAFLSPLLPLLLGFLLLSAPHGGSGLHTKGALPLDTVTFYKVIPKSKFVLVKFDTQYPYGEKQDEFKRLAENSASSDDLLVAEVGISDYGDKLNMELSEKYKLDKESYPVFYLFRDGDFENPVPYTGAVKVGAIQRWLKGQGVYLGMPGCLPVYDALAGEFIRASGVEARQALLKQGQDNLSSVKETQKKWAEQYLKIMGKILDQGEDFPASEMTRIARLIEKNKMSDGKKEELQKSLNILTAFQKKGAEKEEL

SEQ ID NO: 8928 - protein, 2351 aa, Homo sapiens
MQIELSTCFFLCLLRFCFSATRRYYLGAVELSWDYMQSDLGELPVDARFPPRVPKSFPFNTSVVYKKTLFVEFTDHLFNIAKPRPPWMGLLGPTIQAEVYDTVVITLKNMASHPVSLHAVGVSYWKASEGAEYDDQTSQREKEDDKVFPGGSHTYVWQVLKENGPMASDPLCLTYSYLSHVDLVKDLNSGLIGALLVCREGSLAKEKTQTLHKFILLFAVFDEGKSWHSETKNSLMQDRDAASARAWPKMHTVNGYVNRSLPGLIGCHRKSVYWHVIGMGTTPEVHSIFLEGHTFLVRNHRQASLEISPITFLTAQTLLMDLGQFLLFCHISSHQHDGMEAYVKVDSCPEEPQLRMKNNEEAEDYDDDLTDSEMDVVRFDDDNSPSFIQIRSVAKKHPKTWVHYIAAEEEDWDYAPLVLAPDDRSYKSQYLNNGPQRIGRKYKKVRFMAYTDETFKTREAIQHESGILGPLLYGEVGDTLLIIFKNQASRPYNIYPHGITDVRPLYSRRLPKGVKHLKDFPILPGEIFKYKWTVTVEDGPTKSDPRCLTRYYSSFVNMERDLASGLIGPLLICYKESVDQRGNQIMSDKRNVILFSVFDENRSWYLTENIQRFLPNPAGVQLEDPEFQASNIMHSINGYVFDSLQLSVCLHEVAYWYILSIGAQTDFLSVFFSGYTFKHKMVYEDTLTLFPFSGETVFMSMENPGLWILGCHNSDFRNRGMTALLKVSSCDKNTGDYYEDSYEDISAYLLSKNNAIEPRSFSQNSRHPSTRQKQFNATTIPENDIEKTDPWFAHRTPMPKIQNVSSSDLLMLLRQSPTPHGLSLSDLQEAKYETFSDDPSPGAIDSNNSLSEMTHFRPQLHHSGDMVFTPESGLQLRLNEKLGTTAATELKKLDFKVSSTSNNLISTIPSDNLAAGTDNTSSLGPPSMPVHYDSQLDTTLFGKKSSPLTESGGPLSLSEENNDSKLLESGLMNSQESSWGKNVSSTESGRLFKGKRAHGPALLTKDNALFKVSISLLKTNKTSNNSATNRKTHIDGPSLLIENSPSVWQNILESDTEFKKVTPLIHDRMLMDKNATALRLNHMSNKTTSSKNMEMVQQKKEGPIPPDAQNPDMSFFKMLFLPESARWIQRTHGKNSLNSGQGPSPKQLVSLGPEKSVEGQNFLSEKNKVVVGKGEFTKDVGLKEMVFPSSRNLFLTNLDNLHENNTHNQEKKIQEEIEKKETLIQENVVLPQIHTVTGTKNFMKNLFLLSTRQNVEGSYDGAYAPVLQDFRSLNDSTNRTKKHTAHFSKKGEEENLEGLGNQTKQIVEKYACTTRISPNTSQQNFVTQRSKRALKQFRLPLEETELEKRIIVDDTSTQWSKNMKHLTPSTLTQIDYNEKEKGAITQSPLSDCLTRSHSIPQANRSPLPIAKVSSFPSIRPIYLTRVLFQDNSSHLPAASYRKKDSGVQESSHFLQGAKKNNLSLAILTLEMTGDQREVGSLGTSATNSVTYKKVENTVLPKPDLPKTSGKVELLPKVHIYQKDLFPTETSNGSPGHLDLVEGSLLQGTEGAIKWNEANRPGKVPFLRVATESSAKTPSKLLDPLAWDNHYGTQIPKEEWKSQEKSPEKTAFKKKDTILSLNACESNHAIAAINEGQNKPEIEVTWAKQGRTERLCSQNPPVLKRHQREITRTTLQSDQEEIDYDDTISVEMKKEDFDIYDEDENQSPRSFQKKTRHYFIAAVERLWDYGMSSSPHVLRNRAQSGSVPQFKKVVFQEFTDGSFTQPLYRGELNEHLGLLGPYIRAEVEDNIMVTFRNQASRPYSFYSSLISYEEDQRQGAEPRKNFVKPNETKTYFWKVQHHMAPTKDEFDCKAWAYFSDVDLEKDVHSGLIGPLLVCHTNTLNPAHGRQVTVQEFALFFTIFDETKSWYFTENMERNCRAPCNIQMEDPTFKENYRFHAINGYIMDTLPGLVMAQDQRIRWYLLSMGSNENIHSIHFSGHVFTVRKKEEYKMALYNLYPGVFETVEMLPSKAGIWRVECLIGEHLHAGMSTLFLVYSNKCQTPLGMASGHIRDFQITASGQYGQWAPKLARLHYSGSINAWSTKEPFSWIKVDLLAPMIIHGIKTQGARQKFSSLYISQFIIMYSLDGKKWQTYRGNSTGTLMVFFGNVDSSGIKHNIFNPPIIARYIRLHPTHYSIRSTLRMELMGCDLNSCSMPLGMESKAISDAQITASSYFTNMFATWSPSKARLHLQGRSNAWRPQVNNPKEWLQVDFQKTMKVTGVTTQGVKSLLTSMYVKEFLISSSQDGHQWTLFFQNGKVKVFQGNQDSFTPVVNSLDPPLLTRYLRIHPQSWVHQIALRMEVLGCEAQDLY

SEQ ID NO: 8929 - protein, 551 aa, Homo sapiens
MLPLLLLPLLWGGSLQEKPVYELQVQKSVTVQEGLCVLVPCSFSYPWRSWYSSPPLYVYWFRDGEIPYYAEVVATNNPDRRVKPETQGRFRLLGDVQKKNCSLSIGDARMEDTGSYFFRVERGRDVKYSYQQNKLNLEVTALIEKPDIHFLEPLESGRPTRLSCSLPGSCEAGPPLTFSWTGNALSPLDPETTRSSELTLTPRPEDHGTNLTCQMKRQGAQVTTERTVQLNVSYAPQTITIFRNGIALEILQNTSYLPVLEGQALRLLCDAPSNPPAHLSWFQGSPALNATPISNTGILELRRVRSAEEGGFTCRAQHPLGFLQIFLNLSVYSLPQLLGPSCSWEAEGLHCRCSFRARPAPSLCWRLEEKPLEGNSSQGSFKVNSSSAGPWANSSLILHGGLSSDLKVSCKAWNIYGSQSGSVLLLQGRSNLGTGVVPAALGGAGVMALLCICLCLIFFLIVKARRKQAAGRPEKMDDEDPIMGTITSGSRKKPWPDSPGDQASPPGDAPPLEEQKELHYASLSFSEMKSREPKDQEAPSTTEYSEIKTSK

SEQ ID NO: 8930 - protein, 540 aa, Homo sapiens
MWLLRCVLLCVSLSLAVSGQHKPEAPDYSSVLHCGPWSFQFAVNLNQEATSPPVLIAWDNQGLLHELQNDSDCGTWIRKGPGSSVVLEATYSSCYVTEWDSHYIMPVGVEGAGAAEHKVVTERKLLKCPMDLLARDAPDTDWCDSIPARDRLPCAPSPISRGDCEGLGCCYSSEEVNSCYYGNTVTLHCTREGHFSIAVSRNVTSPPLLLDSVRLALRNDSACNPVMATQAFVLFQFPFTSCGTTRQITGDRAVYENELVATRDVKNGSRGSVTRDSIFRLHVSCSYSVSSNSLPINVQVFTLPPPFPETQPGPLTLELQIAKDKNYGSYYGVGDYPVVKLLRDPIYVEVSILHRTDPYLGLLLQQCWATPSTDPLSQPQWPILVKGCPYIGDNYQTQLIPVQKALDLPFPSHHQRFSIFTFSFVNPTVEKQALRGPVHLHCSVSVCQPAETPSCVVTCPDLSRRRNFDNSSQNTTASVSSKGPMILLQATKDPPEKLRVPVDSKVLWVAGLSGTLILGALLVSYLAVKKQKSCPDQMCQ

SEQ ID NO: 8931 - protein, 660 aa, Homo sapiens
MLVCYSVLACEILWDLPCSIMGSPLGHFTWDKYLKETCSVPAPVHCFKQSYTPPSNEFKISMKLEAQDPRNTTSTCIATVVGLTGARLRLRLDGSDNKNDFWRLVDSAEIQPIGNCEKNGGMLQPPLGFRLNASSWPMFLLKTLNGAEMAPIRIFHKEPPSPSHNFFKMGMKLEAVDRKNPHFICPATIGEVRGSEVLVTFDGWRGAFDYWCRFDSRDIFPVGWCSLTGDNLQPPGTKVVIPKNPYPASDVNTEKPSIHSSTKTVLEHQPGQRGRKPGKKRGRTPKTLISHPISAPSKTAEPLKFPKKRGPKPGSKRKPRTLLNPPPASPTTSTPEPDTSTVPQDAATIPSSAMQAPTVCIYLNKNGSTGPHLDKKKVQQLPDHFGPARASVVLQQAVQACIDCAYHQKTVFSFLKQGHGGEVISAVFDREQHTLNLPAVNSITYVLRFLEKLCHNLRSDNLFGNQPFTQTHLSLTAIEYSHSHDRYLPGETFVLGNSLARSLEPHSDSMDSASNPTNLVSTSQRHRPLLSSCGLPPSTASAVRRLCSRGVLKGSNERRDMESFWKLNRSPGSDRYLESRDASRLSGRDPSSWTVEDVMQFVREADPQLGPHADLFRKHEIDGKALLLLRSDMMMKYMGLKLGPALKLSYHIDRLKQGKF

SEQ ID NO: 8932 - protein, 616 aa, Homo sapiens
NNAGHFTWDKYLKETCSVPAPVHCFKQSYTPPSNEFKISMKLEAQDPRNTTSTCIATVVGLTGARLRLRLDGSDNKNDFWRLVDSAEIQPIGNCEKNGGMLQPPLGFRLNASSWPMFLLKTLNGAEMAPIRIFHKEPPSPSHNFFKMGMKLEAVDRKNPHFICPATIGEVRGSEVLVTFDGWRGAFDYWCRFDSRDIFPVGWCSLTGDNLQPPGTKVVIPKNPYPASDVNTEKPSIHSSTKTVLEHQPGQRGRKPGKKRGRTPKTLISHPISAPSKTAEPLKFPKKRGPKPGSKRKPRTLLNPPPASPTTSTPEPDTSTVPQDAATIPSSAMQAPTVCIYLNKNGSTGPHLDKKKVQQLPDHFGPARASVVLQQAVQACIDCAYHQKTVFSFLKQGHGGEVISAVFDREQHTLNLPAVNSITYVLRFLEKLCHNLRSDNLFGNQPFTQTHLSLTAIEYSHSHDRYLPGETFVLGNSLARSLEPHSDSMDSASNPTNLVSTSQRHRPLLSSCGLPPSTASAVRRLCSRGSDRYLESRDASRLSGRDPSSWTVEDVMQFVREADPQLGPHADLFRKHEIDGKALLLLRSDMMMKYMGLKLGPALKLSYHIDRLKQGKF

SEQ ID NO: 8933 - protein, 649 aa, Homo sapiens
FSPSAVIDWSDVRKHKYGHLSESASQYQEAADILDLGHFTWDKYLKETCSVPAPVHCFKQSYTPPSNEFKISMKLEAQDPRNTTSTCIATVVGLTGARLRLRLDGSDNKNDFWRLVDSAEIQPIGNCEKNGGMLQPPLGFRLNASSWPMFLLKTLNGAEMAPIRIFHKEPPSPSHNFFKMGMKLEAVDRKNPHFICPATIGEVRGSEVLVTFDGWRGAFDYWCRFDSRDIFPVGWCSLTGDNLQPPGTKVVIPKNPYPASDVNTEKPSIHSSTKTVLEHQPGQRGRKPGKKRGRTPKTLISHPISAPSKTAEPLKFPKKRGPKPGSKRKPRTLLNPPPASPTTSTPEPDTSTVPQDAATIPSSAMQAPTVCIYLNKNGSTGPHLDKKKVQQLPDHFGPARASVVLQQAVQACIDCAYHQKTVFSFLKQGHGGEVISAVFDREQHTLNLPAVNSITYVLRFLEKLCHNLRSDNLFGNQPFTQTHLSLTAIEYSHSHDRYLPGETFVLGNSLARSLEPHSDSMDSASNPTNLVSTSQRHRPLLSSCGLPPSTASAVRRLCSRGSDRYLESRDASRLSGRDPSSWTVEDVMQFVREADPQLGPHADLFRKHEIDGKALLLLRSDMMMKYMGLKLGPALKLSYHIDRLKQGKF

SEQ ID NO: 8934 - protein, 1477 aa, Homo sapiens
MGTALLQRGGCFLLCLSLLLLGCWAELGSGLEFPGAEGQWTRFPKWNACCESEMSFQLKTRSARGLVLYFDDEGFCDFLELILTRGGRLQLSFSIFCAEPATLLADTPVNDGAWHSVRIRRQFRNTTLFIDQVEAKWVEVKSKRRDMTVFSGLFVGGLPPELRAAALKLTLASVREREPFKGWIRDVRVNSSQVLPVDSGEVKLDDEPPNSGGGSPCEAGEEGEGGVCLNGGVCSVVDDQAVCDCSRTGFRGKDCSQEDNNVEGLAHLMMGDQGKSKGKEEYIATFKGSEYFCYDLSQNPIQSSSDEITLSFKTLQRNGLMLHTGKSADYVNLALKNGAVSLVINLGSGAFEALVEPVNGKFNDNAWHDVKVTRNLRQHSGIGHAMVTISVDGILTTTGYTQEDYTMLGSDDFFYVGGSPSTADLPGSPVSNNFMGCLKEVVYKNNDVRLELSRLAKQGDPKMKIHGVVAFKCENVATLDPITFETPESFISLPKWNAKKTGSISFDFRTTEPNGLILFSHGKPRHQKDAKHPQMIKVDFFAIEMLDGHLYLLLDMGSGTIKIKALLKKVNDGEWYHVDFQRDGRSGTISVNTLRTPYTAPGESEILDLDDELYLGGLPENKAGLVFPTEVWTALLNYGYVGCIRDLFIDGQSKDIRQMAEVQSTAGVKPSCSKETAKPCLSNPCKNNGMCRDGWNRYVCDCSGTGYLGRSCEREATVLSYDGSMFMKIQLPVVMHTEAEDVSLRFRSQRAYGILMATTSRDSADTLRLELDAGRVKLTVNLDCIRINCNSSKGPETLFAGYNLNDNEWHTVRVVRRGKSLKLTVDDQQAMTGQMAGDHTRLEFHNIETGIITERRYLSSVPSNFIGHLQSLTFNGMAYIDLCKNGDIDYCELNARFGFRNIIADPVTFKTKSSYVALATLQAYTSMHLFFQFKTTSLDGLILYNSGDGNDFIVVELVKGYLHYVFDLGNGANLIKGSSNKPLNDNQWHNVMISRDTSNLHTVKIDTKITTQITAGARNLDLKSDLYIGGVAKETYKSLPKLVHAKEGFQGCLASVDLNGRLPDLISDALFCNGQIERGCEGPSTTCQEDSCSNQGVCLQQWDGFSCDCSMTSFSGPLCNDPGTTYIFSKGGGQITYKWPPNDRPSTRADRLAIGFSTVQKEAVLVRVDSSSGLGDYLELHIHQGKIGVKFNVGTDDIAIEESNAIINDGKYHVVRFTRSGGNATLQVDSWPVIERYPAGRQLTIFNSQATIIIGGKEQGQPFQGQLSGLYYNGLKVLNMAAENDANIAIVGNVRLVGEVPSSMTTESTATAMQSEMSTSIMETTTTLATSTARRGKPPTKEPISQTTDDILVASAECPSDDEDIDPCEPSSGGLANPTRAGGREPYPGSAEVIRESSSTTGMVVGIVAAAALCILILLYAMYKYRNRDEGSYHVDESRNYISNSAQSNGAVVKEKQPSSAKSSNKNKKNKDKEYYV

SEQ ID NO: 8935 - protein, 339 aa, Homo sapiens
MVSKSRWKLLAMLALVLVVMVWYSISREDRYIELFYFPIPEKKEPCLQGEAESKASKLFGKLSPLCSYSRDQPIFLRLEDYFWVKTPSAYELPYGTKGSEDLLLRVLAITSSSIPKNIQSLRCRRCVVVGNGHRLRNSSLGDAINKYDVVIRLNNAPVAGYEGDVGSKTTMRLFYPESAHFDPKVENNPDTLLVLVAFKAMDFHWIETILSDKKRVRKGFWKQPPLIWDVNPKQIRILNPFFMEIAADKLLSLPMQQPRKIKQKPTTGLLAITLALHLCDLVHIAGFGYPDAYNKKQTIHYYEQITLKSMAGSGHNVSQEALAIKRMLEMGAIKNLTSF

SEQ ID NO: 8936 - protein, 332 aa, Homo sapiens
MCPAGWKLLAMLALVLVVMVWYSISREDRYIELFYFPIPEKKEPCLQGEAESKASKLFGNYSRDQPIFLRLEDYFWVKTPSAYELPYGTKGSEDLLLRVLAITSSSIPKNIQSLRCRRCVVVGNGHRLRNSSLGDAINKYDVVIRLNNAPVAGYEGDVGSKTTMRLFYPESAHFDPKVENNPDTLLVLVAFKAMDFHWIETILSDKKRVRKGFWKQPPLIWDVNPKQIRILNPFFMEIAADKLLSLPMQQPRKIKQKPTTGLLAITLALHLCDLVHIAGFGYPDAYNKKQTIHYYEQITLKSMAGSGHNVSQEALAIKRMLEMGAIKNLTSF

SEQ ID NO: 8937 - protein, 333 aa, Homo sapiens
MVSKSRWKLLAMLALVLVVMVWYSISREDRYIELFYFPIPEKKEPCLQGEAESKASKLFGNYSRDQPIFLRLEDYFWVKTPSAYELPYGTKGSEDLLLRVLAITSSSIPKNIQSLRCRRCVVVGNGHRLRNSSLGDAINKYDVVIRLNNAPVAGYEGDVGSKTTMRLFYPESAHFDPKVENNPDTLLVLVAFKAMDFHWIETILSDKKRVRKGFWKQPPLIWDVNPKQIRILNPFFMEIAADKLLSLPMQQPRKIKQKPTTGLLAITLALHLCDLVHIAGFGYPDAYNKKQTIHYYEQITLKSMAGSGHNVSQEALAIKRMLEMGAIKNLTSF

SEQ ID NO: 8938 - protein, 322 aa, Homo sapiens
MLALVLVVMVWYSISREDRYIELFYFPIPEKKEPCLQGEAESKASKLFGNYSRDQPIFLRLEDYFWVKTPSAYELPYGTKGSEDLLLRVLAITSSSIPKNIQSLRCRRCVVVGNGHRLRNSSLGDAINKYDVVIRLNNAPVAGYEGDVGSKTTMRLFYPESAHFDPKVENNPDTLLVLVAFKAMDFHWIETILSDKKRVRKGFWKQPPLIWDVNPKQIRILNPFFMEIAADKLLSLPMQQPRKIKQKPTTGLLAITLALHLCDLVHIAGFGYPDAYNKKQTIHYYEQITLKSMAGSGHNVSQEALAIKRMLEMGAIKNLTSF

SEQ ID NO: 8939 - protein, 489 aa, Homo sapiens [sequence omitted]

SEQ ID NO: 8940 - protein, 1067 aa, Homo sapiens
MNSMDRHIQQTNDRLQCIKQHLQNPANFHNAATELLDWCGDPRAFQRPFEQSLMGCLTVVSRVAAQQGFDLDLGYRLLAVCAANRDKFTPKSAALLSSWCEELGRLLLLRHQKSRQSDPPGKLPMQPPLSSMSSMKPTLSHSDGSFPYDSVPWQQNTNQPPGSLSVVTTVWGVTNTSQSQVLGNPMANANNPMNPGGNPMASGMTTSNPGLNSPQFAGQQQQFSAKAGPAQPYIQQSMYGRPNYPGSGGFGASYPGGPNAPAGMGIPPHTRPPADFTQPAAAAAAAAVAAAAATATATATATVAALQETQNKDINQYGPMGPTQAYNSQFMNQPGPRGPASMGGSMNPASMAAGMTPSGMSGPPMGMNQPRPPGISPFGTHGQRMPQQTYPGPRPQSLPIQNIKRPYPGEPNYGNQQYGPNSQFPTQPGQYPAPNPPRPLTSPNYPGQRMPSQPSSGQYPPPTVNMGQYYKPEQFNGQNNTFSGSSYSNYSQGNVNRPPRPVPVANYPHSPVPGNPTPPMTPGSSIPPYLSPSQDVKPPFPPDIKPNMSALPPPPANHNDELRLTFPVRDGVVLEPFRLEHNLAVSNHVFHLRPTVHQTLMWRSDLELQFKCYHHEDRQMNTNWPASVQVSVNATPLTIERGDNKTSHKPLHLKHVCQPGRNTIQITVTACCCSHLFVLQLVHRPSVRSVLQGLLKKRLLPAEHCITKIKRNFSSVAASSGNTTLNGEDGVEQTAIKVSLKCPITFRRIQLPARGHDCKHVQCFDLESYLQLNCERGTWRCPVCNKTALLEGLEVDQYMWGILNAIQHSEFEEVTIDPTCSWRPVPIKSDLHIKDDPDGIPSKRFKTMSPSQMIMPNVMEMIAALGPGPSPYPLPPPPGGTNSNDYSSQGNNYQGHGNFDFPHGNPGGTSMNDFMHGPPQLSHPPDMPNNMAALEKPLSHPMQETMPHAGSSDQPHPSIQQGLHVPHPSSQSGPPLHHSGAPPPPPSQPPRQPPQAAPSSHPHSDLTFNPSSALEGQAGAQGASDMPEPSLDLLPELTNPDELLSYLDPPDLPSNSNDDLLSLFENN

SEQ ID NO: 8941 - protein, 997 aa, Homo sapiens
RPPPAGPQAPEGARAGSRPVQLLALLSSWCEELGRLLLLRHQKSRQSDPPGKLPMQPPLSSMSSMKPTLSHSDGSFPYDSVPWQQNTNQPPGSLSVVTTVWGVTNTSQSQVLGNPMANANNPMNPGGNPMASGMTTSNPGLNSPQFAGQQQQFSAKAGPAQPYIQQSMYGRPNYPGSGGFGASYPGGPNAPAGMGIPPHTRPPADFTQPAAAAAAAAVAAAAATATATATATVAALQETQNKDINQYGPMGPTQAYNSQFMNQPGPRGPASMGGSMNPASMAAGMTPSGMSGPPMGMNQPRPPGISPFGTHGQRMPQQTYPGPRPQSLPIQNIKRPYPGEPNYGNQQYGPNSQFPTQPGQYPAPNPPRPLTSPNYPGQRMPSQPSSGQYPPPTVNMGQYYKPEQFNGQNNTFSGSSYSNYSQGNVNRPPRPVPVANYPHSPVPGNPTPPMTPGSSIPPYLSPSQDVKPPFPPDIKPNMSALPPPPANHNDELRLTFPVRDGVVLEPFRLEHNLAVSNHVFHLRPTVHQTLMWRSDLELQFKCYHHEDRQMNTNWPASVQVSVNATPLTIERGDNKTSHKPLHLKHVCQPGRNTIQITVTACCCSHLFVLQLVHRPSVRSVLQGLLKKRLLPAEHCITKIKRNFSSVAASSGNTTLNGEDGVEQTAIKVSLKCPITFRRIQLPARGHDCKHVQCFDLESYLQLNCERGTWRCPVCNKTALLEGLEVDQYMWGILNAIQHSEFEEVTIDPTCSWRPVPIKSDLHIKDDPDGIPSKRFKTMSPSQMIMPNVMEMIAALGPGPSPYPLPPPPGGTNSNDYSSQGNNYQGHGNFDFPHGNPGGTSMNDFMHGPPQLSHPPDMPNNMAALEKPLSHPMQETMPHAGSSDQPHPSIQQGLHVPHPSSQSGPPLHHSGAPPPPPSQPPRQPPQAAPSSHPHSDLTFNPSSALEGQAGAQGASDMPEPSLDLLPELTNPDELLSYLDPPDLPSNSNDDLLSLFENN

SEQ ID NO: 8942 - protein, 1297 aa, Homo sapiens
MSSGDPAHLGLCLWLWLGATLGREQVQASGLLRLAVLPEDRLQMKWRESEGSGLGYLVQVKPMAGDSEQEVILTTKTPKATVGGLSPSKGYTLQIFELTGSGRFLLARREFVIEDLKSSSLDRSSQRPLGSGAPEPTPSHTGSPDPEQASEPQVAFTPSQDPRTPGGSEWRETGPQFRCLPPVPADMVFLVDGSWSIGHSHFQQVKDFLASVIAPFEIGPDKVQVGLTQYSGDAQTEWDLNSLSTKEQVLAAVRRLRYKGGNTFTGLALTHVLGQNLQPAAGLRPEAAKVVILVTDGKSQDDVHTAARVLKDLGVNVFAVGVKNADEAELRLLASPPRDITVHSVLDFLQLGALAGLLSRLICQRLQGGSPRQGPAAAPALDTLPAPTSLVLSQVTSSSIRLSWTPAPRHPLKYLIVWRASRGGTPREVVVEGPAASTELHNLASRTEYLVSVFPIYEGGVGEGLRGLVTTAPLPPPRALTLAAVTPRTVHLTWQPSAGATHYLVRCSPASPKGEEEEREVQVGRPEVLLDGLEPGRDYEVSVQSLRGPEGSEARGIRARTPTLAPPRHLGFSDVSHDAARVFWEGAPRPVRLVRVTYVSSEGGHSGQTEAPGNATSAMLGPLSSSTTYTVRVTCLYPGGGSSTLTGRVTTKKAPSPSQLSMTELPGDAVQLAWVAAAPSGVLVYQITWTPLGEGKAHEISVPGNLGTAVLPGLGRHTEYDVTILAYYRDGARSDPVSLRYTPSTVSRSPPSNLALASETPDSLQVSWTPPLGRVLHYWLTYAPASGLGPEKSVSVPGARSHVTLPDLQAATKYRVLVSAIYAAGRSEAVSATGQTACPALRPDGSLPGFDLMVAFSLVEKAYASIRGVAMEPSAFGGTPTFTLFKDAQLTRRVSDVYPAPLPPEHTIVFLVRLLPETPREAFALWQMTAEDFQPLLGVLLDAGKKSLTYFHRDPRAALQEATFDPQEVRKIFFGSFHKVHVAVGRSKVRLYVDCRKVAERPLGEMGSPPAAGFVTLGRLAKARGPRSSSAAFQLQMLQIVCSDTWADEDRCCELPASRDGETCPAFVSACSCSSETPGPPGPQGPPGLPGRNGTPGEQGFPGPRGPPGVKGEKGDHGLPGLQGHPGHQGIPGRVGLQGPKGMRGLEGTAGLPGPPGPRGFQGMAGARGTSGERGPPGTVGPTGLPGPKGERGEKGEPQSLATLYQLVSQACESAIQTHVSKFDSFHENTRPPMPILEQKLEPGTEPLGSPGTRSKALVPGEWGRGGRHLEGRGEPGAVGQMGSPGQQGASTQGLWE

SEQ ID NO: 8943 - protein, 1279 aa, Homo sapiens
MSSGDPAHLGLCLWLWLGATLGREQVQASGLLRLAVLPEDRLQMKWRESEGSGLGYLVQVKPMAGDSEQEVILTTKTPKATVGGLSPSKGYTLQIFELTGSGRFLLARREFVIEDLKSSSLDRSSQRPLGSGAPEPTPSHTGSPDPEQASEPQVAFTPSQDPRTPGGSEWRETGPQFRCLPPVPADMVFLVDGSWSIGHSHFQQVKDFLASVIAPFEIGPDKVQVGLTQYSGDAQTEWDLNSLSTKEQVLAAVRRLRYKGGNTFTGLALTHVLGQNLQPAAGLRPEAAKVVILVTDGKSQDDVHTAARVLKDLGVNVFAVGVKNADEAELRLLASPPRDITVHSVLDFLQLGALAGLLSRLICQRLQGGSPRQGPAAAPALDTLPAPTSLVLSQVTSSSIRLSWTPAPRHPLKYLIVWRASRGGTPREVVVEGPAASTELHNLASRTEYLVSVFPIYEGGVGEGLRGLVTTAPLPPPRALTLAAVTPRTVHLTWQPSAGATHYLVRCSPASPKGEEEEREVQVGRPEVLLDGLEPGRDYEVSVQSLRGPEGSEARGIRARTPTLAPPRHLGFSDVSHDAARVFWEGAPRPVRLVRVTYVSSEGGHSGQTEAPGNATSAMLGPLSSSTTYTVRVTCLYPGGGSSTLTGRVTTKKAPSPSQLSMTELPGDAVQLAWVAAAPSGVLVYQITWTPLGEGKAHEISVPGNLGTAVLPGLGRHTEYDVTILAYYRDGARSDPVSLRYTPSTVSRSPPSNLALASETPDSLQVSWTPPLGRVLHYWLTYAPASGLGPEKSVSVPGARSHVTLPDLQAATKYRVLVSAIYAAGRSEAVSATGQTACPALRPDGSLPGFDLMVAFSLVEKAYASIRGVAMEPSAFGGTPTFTLFKDAQLTRRVSDVYPAPLPPEHTIVFLVRLLPETPREAFALWQMTAEDFQPLLGVLLDAGKKSLTYFHRDPRAALQEATFDPQEVRKIFFGSFHKVHVAVGRSKVRLYVDCRKVAERPLGEMGSPPAAGFVTLGRLAKARGPRSSSAAFQLQMLQIVCSDTWADEDRCCELPASRDGETCPAFVSACSCSSETPGPPGPQGPPGPPGVKGEKGDHGLPGLQGHPGHQGIPGRVGLQGPKGMRGLEGTAGLPGPPGPRGFQGMAGARGTSGERGPPGTVGPTGLPGPKGERGEKGEPQSLATLYQLVSQACESAIQTHVSKFDSFHENTRPPMPILEQKLEPGTEPLGSPGTRSKALVPGEWGRGGRHLEGRGEPGAVGQMGSPGQQGASTQGLWE

SEQ ID NO: 8944 - protein, 761 aa, Homo sapiens
MNWRFVELLYFLFIWGRISVQPSHQEPAGTDQHVSKEFDWLISDRGPFHHSRSYLSFVERHRQGFTTRYKIYREFARWKVRNTAIERRDLVRHPVPLMPEFQRSIRLLGRRPTTQQFIDTIIKKYGTHLLISATLGGEEALTMYMDKSRLDRKSGNATQSVEALHQLASSYFVDRDGTMRRLHEIQISTGAIKVTETRTGPLGCNSYDNLDSVSSVLLQSTESKLHLQGLQIIFPQYLQEKFVQSALSYIMCNGEGEYLCQNSQCRCQCAEEFPQCNCPITDIQIMEYTLANMAKSWAEAYKDLENSDEFKSFMKRLPSNHFLTIGSIHQHWGNDWDLQNRYKLLQSATEAQRQKIQRTARKLFGLSVRCRHNPNHQLPRERTIQQWLARVQSLLYCNENGFWGTFLESQRSCVCHGSTTLCQRPIPCVIGGNNSCTMCSLANISLCGSCNKGYKLYRGRCEPQNVDSERSEQFISFETDLDFQDLELKYLLQKMDSRLYVHTTFISNEIRLDTFFDPRWRKRMSLTLKSNKNRMDFIHMVIGMSMRICQMRNSSLDPMFFVYVNPFSGSHSEGWNMPFGEFGYPRWEKIRLQNSQCYNWTLLLGNRWKTFFETVHIYLRSRTRLPTLLRNETGQGPVDLSDPSKRQFYIKISDVQVFGYSLRFNADLLRSAVQQVNQSYTQGGQFYSSSSVMLLLLDIRDRINRLAPPVAPGKPQLDLFSCMLKHRLKLTNSEIIRVNHALDLYNTEILKQSDQMTAKLC

SEQ ID NO: 8945 - protein, 462 aa, Homo sapiens
MLLLARCLLLVLVSSLLVCSGLACGPGRGFGKRRHPKKLTPLAYKQFIPNVAEKTLGASGRYEGKISRNSERFKELTPNYNPDIIFKDEENTGADRLMTQRCKDKLNALAISVMNQWPGVKLRVTEGWDEDGHHSEESLHYEGRAVDITTSDRDRSKYGMLARLAVEAGFDWVYYESKAHIHCSVKAENSVAAKSGGCFPGSATVHLEQGGTKLVKDLSPGDRVLAADDQGRLLYSDFLTFLDRDDGAKKVFYVIETREPRERLLLTAAHLLFVAPHNDSATGEPEASSGSGPPSGGALGPRALFASRVRPGQRVYVVAERDGDRRLLPAAVHSVTLSEEAAGAYAPLTAQGTILINRVLASCYAVIEEHSWAHRAFAPFRLAHALLAALAPARTDRGGDSGGGDRGGGGGRVALTAPGAADAPGAGATAGIHWYSQLLYQIGTWLLDSEALHPLGMAVKSS

SEQ ID NO: 8946 - protein, 852 aa, Homo sapiens
MGPPSLVLCLLSATVFSLLGGSSAFLSHHRLKGRFQRDRRNIRPNIILVLTDDQDVELGSMQVMNKTRRIMEQGGAHFINAFVTTPMCCPSRSSILTGKYVHNHNTYTNNENCSSPSWQAQHESRTFAVYLNSTGYRTAFFGKYLNEYNGSYVPPGWKEWVGLLKNSRFYNYTLCRNGVKEKHGSDYSKDYLTDLITNDSVSFFRTSKKMYPHRPVLMVISHAAPHGPEDSAPQYSRLFPNASQHITPSYNYAPNPDKHWIMRYTGPMKPIHMEFTNMLQRKRLQTLMSVDDSMETIYNMLVETGELDNTYIVYTADHGYHIGQFGLVKGKSMPYEFDIRVPFYVRGPNVEAGCLNPHIVLNIDLAPTILDIAGLDIPADMDGKSILKLLDTERPVNRFHLKKKMRVWRDSFLVERGKLLHKRDNDKVDAQEENFLPKYQRVKDLCQRAEYQTACEQLGQKWQCVEDATGKLKLHKCKGPMRLGGSRALSNLVPKYYGQGSEACTCDSGDYKLSLAGRRKKLFKKKYKASYVRSRSIRSVAIEVDGRVYHVGLGDAAQPRNLTKRHWPGAPEDQDDKDGGDFSGTGGLPDYSAANPIKVTHRCYILENDTVQCDLDLYKSLQAWKDHKLHIDHEIETLQNKIKNLREVRGHLKKKRPEECDCHKISYHTQHKGRLKHRGSSLHPFRKGLQEKDKVWLLREQKRKKKLRKLLKRLQNNDTCSMPGLTCFTHDNQHWQTAPFWTLGPFCACTSANNNTYWCMRTINETHNFLFCEFATGFLEYFDLNTDPYQLMNAVNTLDRDVLNQLHVQLMELRSCKGYKQCNPRTRNMDLGLKDGGSYEQYRGQLWEGWEG

SEQ ID NO: 8947 - protein, 870 aa, Homo sapiens
MGPPSLVLCLLSATVFSLLGGSSAFLSHHRLKGRFQRDRRNIRPNIILVLTDDQDVELGSMQVMNKTRRIMEQGGAHFINAFVTTPMCCPSRSSILTGKYVHNHNTYTNNENCSSPSWQAQHESRTFAVYLNSTGYRTAFFGKYLNEYNGSYVPPGWKEWVGLLKNSRFYNYTLCRNGVKEKHGSDYSKDYLTDLITNDSVSFFRTSKKMYPHRPVLMVISHAAPHGPEDSAPQYSRLFPNASQHITPSYNYAPNPDKHWIMRYTGPMKPIHMEFTNMLQRKRLQTLMSVDDSMETIYNMLVETGELDNTYIVYTADHGYHIGQFGLVKGKSMPYEFDIRVPFYVRGPNVEAGCLNPHIVLNIDLAPTILDIAGLDIPADMDGKSILKLLDTERPVNRFHLKKKMRVWRDSFLVERGKLLHKRDNDKVDAQEENFLPKYQRVKDLCQRAEYQTACEQLGQKWQCVEDATGKLKLHKCKGPMRLGGSRALSNLVPKYYGQGSEACTCDSGDYKLSLAGRRKKLFKKKYKASYVRSRSIRSVAIEVDGRVYHVGLGDAAQPRNLTKRHWPGAPEDQDDKDGGDFSGTGGLPDYSAANPIKVTHRCYILENDTVQCDLDLYKSLQAWKDHKLHIDHEIETLQNKIKNLREVRGHLKKKRPEECDCHKISYHTQHKGRLKHRGSSLHPFRKGLQEKDKVWLLREQKRKKKLRKLLKRLQNNDTCSMPGLTCFTHDNQHWQTAPFWTLGPFCACTSANNNTYWCMRTINETHNFLFCEFATGFLEYFDLNTDPYQLMNAVNTLDRDVLNQLHVQLMELRSCKGYKQCNPRTRNMDLGLKDGGSYEQYRQFQRRKWPEMKRPSSKSLGQLWEGWEG

SEQ ID NO: 8948 - protein, 622 aa, Homo sapiens
MPGVARLPLLLGLLLLPRPGRPLDLADYTYDLAEEDDSEPLNYKDPCKAAAFLGDIALDEEDLRAFQVQQAVDLRRHTARKSSIKAAVPGNTSTPSCQSTNGQPQRGACGRWRGRSRSRRAATSRPERVWPDGVIPFVIGGNFTGSQRAVFRQAMRHWEKHTCVTFLERTDEDSYIVFTYRPCGCCSYVGRRGGGPQAISIGKNCDKFGIVVHELGHVVGFWHEHTRPDRDRHVSIVRENIQPGQEYNFLKMEPQEVESLGETYDFDSIMHYARNTFSRGIFLDTIVPKYEVNGVKPPIGQRTRLSKGDIAQARKLYKCPACGETLQDSTGNFSSPEYPNGYSAHMHCVWRISVTPGEKIILNFTSLDLYRSRLCWYDYVEVRDGFWRKAPLRGRFCGSKLPEPIVSTDSRLWVEFRSSSNWVGKGFFAVYEAICGGDVKKDYGHIQSPNYPDDYRPSKVCIWRIQVSEGFHVGLTFQSFEIERHDSCAYDYLEVRDGHSESSTLIGRYCGYEKPDDIKSTSSRLWLKFVSDGSINKAGFAVNFFKEVDECSRPNRGGCEQRCLNTLGSYKCSCDPGYELAPDKRRCEGCYDLQVGKPLLWDRHCFRLSTHGPEMLGTALRG

SEQ ID NO: 8949 - protein, 986 aa, Homo sapiens
MPGVARLPLLLGLLLLPRPGRPLDLADYTYDLAEEDDSEPLNYKDPCKAAAFLGDIALDEEDLRAFQVQQAVDLRRHTARKSSIKAAVPGNTSTPSCQSTNGQPQRGACGRWRGRSRSRRAATSRPERVWPDGVIPFVIGGNFTGSQRAVFRQAMRHWEKHTCVTFLERTDEDSYIVFTYRPCGCCSYVGRRGGGPQAISIGKNCDKFGIVVHELGHVVGFWHEHTRPDRDRHVSIVRENIQPGQEYNFLKMEPQEVESLGETYDFDSIMHYARNTFSRGIFLDTIVPKYEVNGVKPPIGQRTRLSKGDIAQARKLYKCPACGETLQDSTGNFSSPEYPNGYSAHMHCVWRISVTPGEKIILNFTSLDLYRSRLCWYDYVEVRDGFWRKAPLRGRFCGSKLPEPIVSTDSRLWVEFRSSSNWVGKGFFAVYEAICGGDVKKDYGHIQSPNYPDDYRPSKVCIWRIQVSEGFHVGLTFQSFEIERHDSCAYDYLEVRDGHSESSTLIGRYCGYEKPDDIKSTSSRLWLKFVSDGSINKAGFAVNFFKEVDECSRPNRGGCEQRCLNTLGSYKCSCDPGYELAPDKRRCEAACGGFLTKLNGSITSPGWPKEYPPNKNCIWQLVAPTQYRISLQFDFFETEGNDVCKYDFVEVRSGLTADSKLHGKFCGSEKPEVITSQYNNMRVEFKSDNTVSKKGFKAHFFSDKDECSKDNGGCQQDCVNTFGSYECQCRSGFVLHDNKHDCKEAGCDHKVTSTSGTITSPNWPDKYPSKKECTWAISSTPGHRVKLTFMEMDIESQPECAYDHLEVFDGRDAKAPVLGRFCGSKKPEPVLATGSRMFLRFYSDNSVQRKGFQASHATECGGQVRADVKTKDLYSHAQFGDNNYPGGVDCEWVIVAEEGYGVELVFQTFEVEEETDCGYDYMELFDGYDSTAPRLGRYCGSGPPEEVYSAGDSVLVKFHSDDTITKKGFHLRYTSTKFQDTLHSRK

SEQ ID NO: 8950 - protein, 717 aa, Homo sapiens
MPGVARLPLLLGLLLLPRPGRPLDLADYTYDLAEEDDSEPLNYKDPCKAAAFLGDIALDEEDLRAFQVQQAVDLRRHTARKSSIKAAVPGNTSTPSCQSTNGQPQRGACGRWRGRSRSRRAATSRPERVWPDGVIPFVIGGNFTGSQRAVFRQAMRHWEKHTCVTFLERTDEDSYIVFTYRPCGCCSYVGRRGGGPQAISIGKNCDKFGIVVHELGHVVGFWHEHTRPDRDRHVSIVRENIQPGQEYNFLKMEPQEVESLGETYDFDSIMHYARNTFSRGIFLDTIVPKYEVNGVKPPIGQRTRLSKGDIAQARKLYKCPACGETLQDSTGNFSSPEYPNGYSAHMHCVWRISVTPGEKIILNFTSLDLYRSRLCWYDYVEVRDGFWRKAPLRGRFCGSKLPEPIVSTDSRLWVEFRSSSNWVGKGFFAVYEAICGGDVKKDYGHIQSPNYPDDYRPSKVCIWRIQVSEGFHVGLTFQSFEIERHDSCAYDYLEVRDGHSESSTLIGRYCGYEKPDDIKSTSSRLWLKFVSDGSINKAGFAVNFFKEVDECSRPNRGGCEQRCLNTLGSYKCSCDPGYELAPDKRRCEAACGGFLTKLNGSITSPGWPKEYPPNKNCIWQLVAPTQYRISLQFDFFETEGNDVCKYDFVEVRSGLTADSKLHGKFCGSEKPEVITSQYNNMRVEFKSDNTVSKKGFKAHFFSGGELFGLLGHPPRRP

SEQ ID NO: 8951 - protein, 730 aa, Homo sapiens
MPGVARLPLLLGLLLLPRPGRPLDLADYTYDLAEEDDSEPLNYKDPCKAAAFLGDIALDEEDLRAFQVQQAVDLRRHTARKSSIKAAVPGNTSTPSCQSTNGQPQRGACGRWRGRSRSRRAATSRPERVWPDGVIPFVIGGNFTGSQRAVFRQAMRHWEKHTCVTFLERTDEDSYIVFTYRPCGCCSYVGRRGGGPQAISIGKNCDKFGIVVHELGHVVGFWHEHTRPDRDRHVSIVRENIQPGQEYNFLKMEPQEVESLGETYDFDSIMHYARNTFSRGIFLDTIVPKYEVNGVKPPIGQRTRLSKGDIAQARKLYKCPACGETLQDSTGNFSSPEYPNGYSAHMHCVWRISVTPGEKIILNFTSLDLYRSRLCWYDYVEVRDGFWRKAPLRGRFCGSKLPEPIVSTDSRLWVEFRSSSNWVGKGFFAVYEAICGGDVKKDYGHIQSPNYPDDYRPSKVCIWRIQVSEGFHVGLTFQSFEIERHDSCAYDYLEVRDGHSESSTLIGRYCGYEKPDDIKSTSSRLWLKFVSDGSINKAGFAVNFFKEVDECSRPNRGGCEQRCLNTLGSYKCSCDPGYELAPDKRRCEAACGGFLTKLNGSITSPGWPKEYPPNKNCIWQLVAPTQYRISLQFDFFETEGNDVCKYDFVEVRSGLTADSKLHGKFCGSEKPEVITSQYNNMRVEFKSDNTVSKKGFKAHFFSEKRPALQPPRGRPHQLKFRVQKRNRTPQ

SEQ ID NO: 8952 - protein, 823 aa, Homo sapiens
MPGVARLPLLLGLLLLPRPGRPLDLADYTYDLAEEDDSEPLNYKDPCKAAAFLGDIALDEEDLRAFQVQQAVDLRRHTARKSSIKAAVPGNTSTPSCQSTNGQPQRGACGRWRGRSRSRRAATSRPERVWPDGVIPFVIGGNFTGSQRAVFRQAMRHWEKHTCVTFLERTDEDSYIVFTYRPCGCCSYVGRRGGGPQAISIGKNCDKFGIVVHELGHVVGFWHEHTRPDRDRHVSIVRENIQPGQEYNFLKMEPQEVESLGETYDFDSIMHYARNTFSRGIFLDTIVPKYEVNGVKPPIGQRTRLSKGDIAQARKLYKCPACGETLQDSTGNFSSPEYPNGYSAHMHCVWRISVTPGEKIILNFTSLDLYRSRLCWYDYVEVRDGFWRKAPLRGRFCGSKLPEPIVSTDSRLWVEFRSSSNWVGKGFFAVYEAICGGDVKKDYGHIQSPNYPDDYRPSKVCIWRIQVSEGFHVGLTFQSFEIERHDSCAYDYLEVRDGHSESSTLIGRYCGYEKPDDIKSTSSRLWLKFVSDGSINKAGFAVNFFKEVDECSRPNRGGCEQRCLNTLGSYKCSCDPGYELAPDKRRCEAACGGFLTKLNGSITSPGWPKEYPPNKNCIWQLVAPTQYRISLQFDFFETEGNDVCKYDFVEVRSGLTADSKLHGKFCGSEKPEVITSQYNNMRVEFKSDNTVSKKGFKAHFFSVLEGAGDRHSHLSGLELLLCPHALVDTVPAPPSALHGDTHAHTHTHVHTHCPIAQETCRGPPLGASRLSPQGPGHLTLAPQEGSYLDFWDTHRGDPKPRRRRKSLKTFSLTPATFRGIWAL

SEQ ID NO: 8953 - protein, 530 aa, Homo sapiens
MACTGWTSPLPLCVCLLLTCGFAEAGKLVVVPMDGSHWFTMRSVVEKLILRGHEVVVVSARGELATGKINELHSEDLFNFIYLEDLDREFKAFAHAQWKAQVRSIYSLLMGSYNDIFDLFFSNCRSLFKDKKLVEYLKESSFDAVFLDPFDNCGLIVAKYFSLPSVVFARGILCHYLEEGAQCPAPLSYVPRILLGFSDDMTFKERVRNHIMHLEEHLLCHRFFKNALEIASEILQTPVTEYDLYSHTSIWLLRTDFVLDYPKPVMPNMIFIGGINCHERKALPMEFEAYINASGEHGIVVFSLGSMVSEIPEKKAMAIADALGKIPQTVLWRYTGTRPSNLANNTILVKWLPQNDLLGHPMTRAFITHAGSHGVYESICNGVPMVMMPLFGDQMDNAKRMETKGAGVTLNVLEMTSEDLENALKAVINDKSYKENIMRLSSLHKDRPVEPLDLAVFWVEFVMRHKGAPHLRPAAHDLTWYQYHSLDVIGFLLAVVLTVAFITFKCCAYGYRKCLGKKGRVKKAHKSKTH

SEQ ID NO: 8954 - protein, 2828 aa, Homo sapiens
MPKRAHWGALSVVLILLWGHPRVALACPHPCACYVPSEVHCTFRSLASVPAGIARHVERINLGFNSIQALSETSFAGLTKLELLMIHGNEIPSIPDGALRDLSSLQVFKFSYNKLRVITGQTLQGLSNLMRLHIDHNKIEFIHPQAFNGLTSLRLLHLEGNLLHQLHPSTFSTFTFLDYFRLSTIRHLYLAENMVRTLPASMLRNMPLLENLYLQGNPWTCDCEMRWFLEWDAKSRGILKCKKDKAYEGGQLCAMCFSPKKLYKHEIHKLKDMTCLKPSIESPLRQNRSRSIEEEQEQEEDGGSQLILEKFQLPQWSISLNMTDEHGNMVNLVCDIKKPMDVYKIHLNQTDPPDIDINATVALDFECPMTRENYEKLWKLIAYYSEVPVKLHRELMLSKDPRVSYQYRQDADEEALYYTGVRAQILAEPEWVMQPSIDIQLNRRQSTAKKVLLSYYTQYSQTISTKDTRQARGRSWVMIEPSGAVQRDQTVLEGGPCQLSCNVKASESPSIFWVLPDGSILKAPMDDPDSKFSILSSGWLRIKSMEPSDSGLYQCIAQVRDEMDRMVYRVLVQSPSTQPAEKDTVTIGKNPGESVTLPCNALAIPEAHLSWILPNRRIINDLANTSHVYMLPNGTLSIPKVQVSDSGYYRCVAVNQQGADHFTVGITVTKKGSGLPSKRGRRPGAKALSRVREDIVEDEGGSGMGDEENTSRRLLHPKDQEVFLKTKDDAINGDKKAKKGRRKLKLWKHSEKEPETNVAEGRRVFESRRRINMANKQINPERWADILAKVRGKNLPKGTEVPPLIKTTSPPSLSLEVTPPFPAVSPPSASPVQTVTSAEESSADVPLLGEEEHVLGTISSASMGLEHNHNGVILVEPEVTSTPLEEVVDDLSEKTEEITSTEGDLKGTAAPTLISEPYEPSPTLHTLDTVYEKPTHEETATEGWSAADVGSSPEPTSSEYEPPLDAVSLAESEPMQYFDPDLETKSQPDEDKMKEDTFAHLTPTPTIWVNDSSTSQLFEDSTIGEPGVPGQSHLQGLTDNIHLVKSSLSTQDTLLIKKGMKEMSQTLQGGNMLEGDPTHSRSSESEGQESKSITLPDSTLGIMSSMSPVKKPAETTVGTLLDKDTTTVTTTPRQKVAPSSTMSTHPSRRRPNGRRRLRPNKFRHRHKQTPPTTFAPSETFSTQPTQAPDIKISSQVESSLVPTAWVDNTVNTPKQLEMEKNAEPTSKGTPRRKHGKRPNKHRYTPSTVSSRASGSKPSPSPENKHRNIVTPSSETILLPRTVSLKTEGPYDSLDYMTTTRKIYSSYPKVQETLPVTYKPTSDGKEIKDDVATNVDKHKSDILVTGESITNAIPTSRSLVSTMGEFKEESSPVGFPGTPTWNPSRTAQPGRLQTDIPVTTSGENLTDPPLLKELEDVDFTSEFLSSLTVSTPFHQEEAGSSTTLSSIKVEVASSQAETTTLDQDHLETTVAILLSETRPQNHTPTAARMKEPASSSPSTILMSLGQTTTTKPALPSPRISQASRDSKENVFLNYVGNPETEATPVNNEGTQHMSGPNELSTPSSDRDAFNLSTKLELEKQVFGSRSLPRGPDSQRQDGRVHASHQLTRVPAKPILPTATVRLPEMSTQSASRYFVTSQSPRHWTNKPEITTYPSGALPENKQFTTPRLSSTTIPLPLHMSKPSIPSKFTDRRTDQFNGYSKVFGNNNIPEARNPVGKPPSPRIPHYSNGRLPFFTNKTLSFPQLGVTRRPQIPTSPAPVMRERKVIPGSYNRIHSHSTFHLDFGPPAPPLLHTPQTTGSPSTNLQNIPMVSSTQSSISFITSSVQSSGSFHQSSSKFFAGGPPASKFWSLGEKPQILTKSPQTVSVTAETDTVFPCEATGKPKPFVTWTKVSTGALMTPNTRIQRFEVLKNGTLVIRKVQVQDRGQYMCTASNLHGLDRMVVLLSVTVQQPQILASHYQDVTVYLGDTIAMECLAKGTPAPQISWIFPDRRVWQTVSPVESRITLHENRTLSIKEASFSDRGVYKCVASNAAGADSLAIRLHVAALPPVIHQEKLENISLPPGLSIHIHCTAKAAPLPSVRWVLGDGTQIRPSQFLHGNLFVFPNGTLYIRNLAPKDSGRYECVAANLVGSARRTVQLNVQRAAANARITGTSPRRTDVRYGGTLKLDCSASGDPWPRILWRLPSKRMIDALFSFDSRIKVFANGTLVVKSVTDKDAGDYLCVARNKVGDDYVVLKVDVVMKPAKIEHKEENDHKVFYGGDLKVDCVATGLPNPEISWSLPDGSLVNSFMQSDDSGGRTKRYVVFNNGTLYFNEVGMREEGDYTCFAENQVGKDEMRVRVKVVTAPATIRNKTYLAVQVPYGDVVTVACEAKGEPMPKVTWLSPTNKVIPTSSEKYQIYQDGTLLIQKAQRSDSGNYTCLVRNSAGEDRKTVWIHVNVQPPKINGNPNPITTVREIAAGGSRKLIDCKAEGIPTPRVLWAFPEGVVLPAPYYGNRITVHGNGSLDIRSLRKSDSVQLVCMARNEGGEARLIVQLTVLEPMEKPIFHDPISEKITAMAGHTISLNCSAAGTPTPSLVWVLPNGTDLQSGQQLQRFYHKADGMLHISGLSSVDAGAYRCVARNAAGHTERLVSLKVGLKPEANKQYHNLVSIINGETLKLPCTPPGAGQGRFSWTLPNGMHLEGPQTLGRVSLLDNGTLTVREASVFDRGTYVCRMETEYGPSVTSIPVIVIAYPPRITSEPTPVIYTRPGNTVKLNCMAMGIPKADITWELPDKSHLKAGVQARLYGNRFLHPQGSLTIQHATQRDAGFYKCMAKNILGSDSKTTYIHVF

SEQ ID NO: 8955 - protein, 583 aa, Homo sapiens
IEHKEENDHKVFYRGDLKVDCVATGLPNPEISWSLLDGSLVNSFMQSDDSGGRTKHYVVFNNGTLYFSEVGMREEGDYTCFAENQVGKDEMRVRVKMVTPATIWNKTYLAVQVPYGDVVTVTCEAKGEPMPKVTWLSPANRVIPTSSEKYQIYQYGTLLIQKAQCSDSGNYTCLVRNSAGEDRKTVWIHVNLQPPKINGNPNPITTVWEIAAGGSRKLIDCKAEGIPTPRVLWAFPEGVVLPDPYYGNRITVHGNGSLDIRSLRKSDSVQLVCMARNEGGEARLIVQLTVLEPMEKPIFHDPISEKITAMAGHTISLNCSAAGTLTPSLVWVLPNGTDLQSGQQLQRFYHKADGMLHISGLSSVDAGAYRCVARNAAGHTERLVSLKVGLKPEANKQYHNLVSIINGETLKLPCTPPAAGQGHFSWTLPNGMHLEGPQTLGRVSLLDNGTLTVREASVFDRGTYVCRMETAYGPSVTSIPVIVIAYPPRITSEPTPVIYTRPGNTVKLNCMAMGIPKGDITWELPDKLHLKAGVQARLYGNRFLHPQGSLTIQQARRRDAGFYKCTAKNILSSDSKTTYIHVF

SEQ ID NO: 8956 - protein, 1007 aa, Homo sapiens
MGSGGDSLLGGRGSLPLLLLLIMGGMAQDSPPQILVHPQDQLFQGPGPARMSCQASGQPPPTIRWLLNGQPLSMVPPDPHHLLPDGTLLLLQPPARGHAHDGQALSTDLGVYTCEASNRLGTAVSRGARLSVAVLREDFQIQPRDMVAVVGEQFTLECGPPWGHPEPTVSWWKDGKPLALQPGRHTVSGGSLLMARAEKSDEGTYMCVATNSAGHRESRAARVSIQEPQDYTEPVELLAVRIQLENVTLLNPDPAEGPKPRPAVWLSWKVSGPAAPAQSYTALFRTQTAPGGQGAPWAEELLAGWQSAELGGLHWGQDYEFKVRPSSGRARGPDSNVLLLRLPEKVPSAPPQEVTLKPGNGTVFVSWVPPPAENHNGIIRGYQVWSLGNTSLPPANWTVVGEQTQLEIATHMPGSYCVQVAAVTGAGAGEPSRPVCLLLEQAMERATQEPSEHGPWTLEQLRATLKRPEVIATCGVALWLLLLGTAVCIHRRRRARVHLGPGLYRYTSEDAILKHRMDHSDSQWLADTWRSTSGSRDLSSSSSLSSRLGADARDPLDCRRSLLSWDSRSPGVPLLPDTSTFYGSLIAELPSSTPARPSPQVPAVRRLPPQLAQLSSPCSSSDSLCSRRGLSSPRLSLAPAEAWKAKKKQELQHANSSPLLRGSHSLELRACELGNRGSKNLSQSPGAVPQALVAWRALGPKLLSSSNELVTRHLPPAPLFPHETPPTQSQQTQPPVAPQAPSSILLPAAPIPILSPCSPPSPQASSLSGPSPASSRLSSSSLSSLGEDQDSVLTPEEVALCLELSEGEETPRNSVSPMPRAPSPPTTYGYISVPTASEFTDMGRTGGGVGPKGGVLLCPPRPCLTPTPSEGSLANGWGSASEDNAASARASLVSSSDGSFLADAHFARALAVAVDSFGFGLEPREADCVFIDASSPPSPRDEIFLTPNLSLPLWEWRPDWLEDMEVSHTQRLGRGMPPWPPDSQISSQRSQLHCRMPKAGASPVDYS

SEQ ID NO: 8957 - protein, 791 aa, Homo sapiens
MGSGGDSLLGGRGSLPLLLLLIMGGMAQDSPPQILVHPQDQLFQGPGPARMSCQASGQPPPTIRWLLNGQPLSMVPPDPHHLLPDGTLLLLQPPARGHAHDGQALSTDLGVYTCEASNRLGTAVSRGARLSVAVLREDFQIQPRDMVAVVGEQFTLECGPPWGHPEPTVSWWKDGKPLALQPGRHTVSGGSLLMARAEKSDEGTYMCVATNSAGHRESRAARVSIQEPQDYTEPVELLAVRIQLENVTLLNPDPAEGPKPRPAVWLSWKVSGPAAPAQSYTALFRTQTAPGGQGAPWAEELLAGWQSAELGGLHWGQDYEFKVRPSSGRARGPDSNVLLLRLPEKVPSAPPQEVTLKPGNGTVFVSWVPPPAENHNGIIRGYQVWSLGNTSLPPANWTVVGEQTQLEIATHMPGSYCVQVAAVTGAGAGEPSRPVCLLLEQAMERATQEPSEHGPWTLEQLRATLKRPEVIATCGVALWLLLLGTAVCIHRRRRARVHLGPGLYRYTSEDAILKHRMDHSDSQWLADTWRSTSGSRDLSSSSSLSSRLGADARDPLDCRRSLLSWDSRSPGVPLLPDTSTFYGSLIAELPSSTPARPSPQVPAVRRLPPQLAQLSSPCSSSDSLCSRRGLSSPRLSLAPAEAWKAKKKQELQHANSSPLLRGSHSLELRACELGNRGSKNLSQSPGAVPQALVAWRALGPKLLSQMSWLLVISLQHPSFLMKLPQLRVNRPSLRWHHRLPPPSCCQQPPSPSLAPAVPLAPRPLPSLAPAQLPVACPAPHCHPWGRIKTAC

SEQ ID NO: 8958 - protein, 792 aa, Homo sapiens [sequence omitted]

SEQ ID NO: 8959 - protein, 1749 aa, Homo sapiens
MDLAPDRATGRPWLPLHTLSVSQLLRVFWLLSLLPGQAWVHGAEPRQVFQVLEEQPPGTLVGTIQTRPGFTYRLSESHALFAINSSTGALYTTSTIDRESLPSDVINLVVLSSAPTYPTEVRVLVRDLNDNAPVFPDPSIVVTFKEDSSSGRQVILDTATDSDIGSNGVDHRSYRIIRGNEAGRFRLDITLNPSGEGAFLHLVSKGGLDREVTPQYQLLVEVEDKGEPKRRGYLQVNVTVQDINDNPPVFGSSHYQAGVPEDAVVGSSVLQVAAADADEGTNADIRYRLQDEGTPFQMDPETGLITVREPLDFEARRQYSLTVQAMDRGVPSLTGRAEALIQLLDVNDNDPVVKFRYFPATSRYASVDENAQVGTVVALLTVTDADSPAANGNISVQILGGNEQRHFEVQSSKVPNLSLIKVASALDRERIPSYNLTVSVSDNYGAPPGAAVQARSSVASLVIFVNDINDHPPVFSQQVYRVNLSEEAPPGSYVSGISATDGDSGLNANLRYSIVSGNGLGWFHISEHSGLVTTGSSGGLDRELASQIVLNISARDQGVHPKVSYAQLVVTLLDVNDEKPVFSQPEGYDVSVVENAPTGTELLMLRATDGDLGDNGTVRFSLQEAETDRRSFRLDPVSGRLSTISSLDREEQAFYSLLVLATDLGSPPQSSMARINVSLLDINDNSPVFYPVQYFAHIKENEPGGSYITTVSATDPDLGTNGTVKYSISAGDRSRFQVNAQSGVISTRMALDREEKTAYQLQIVATDGGNLQSPNQAIVTITVLDTQDNPPVFSQVAYSFVVFENVALGYHVGSVSASTMDLNSNISYLITTGDQKGMFAINQVTGQLTTANVIDREEQSFYQLKVVASGGTVTGDTMVNITVKDLNDNSPHFLQAIESVNVVENWQAGHSIFQAKAVDPDEGVNGMVLYSLKQNPKNLFAINEKNGTISLLGPLDVHAGSYQIEILASDMGVPQLSSSVILTVYVHDVNDNSPVFDQLSYEVTLSESEPVNSRFFKVQASDKDSGANGEIAYTIAEGNTGDAFGIFPDGQLYIKSELDRELQDRYVLMVVASDRAVEPLSATVNVTVILEDVNDNRPLFNSTNYTFYFEEEQRAGSFVGKVSAVDKDFGPNGEVRYSFEMVQPDFELHAISGEITNTHQFDRESLMRRRGTAVFSFTVIATDQGIPQPLKDQATVHVYMKDINDNAPKFLKDFYQATISESAANLTQVLRVSASDVDEGNNGLIHYSIIKGNEERQFAIDSTSGQVTLIGKLDYEATPAYSLVIQAVDSGTIPLNSTCTLNIDILDENDNTPSFPKSTLFVDVLENMRIGELVSSVTATDSDSGDNADLYYSITGTNNHGTFSISPNTGSIFLAKKLDFETQSLYKLNITAKDQGRPPRSSTMSVVIHVRDFNDNPPSFPPGDIFKSIVENIPIGTSVISVTAHDPDADINGQLSYTIIQQMPRGNHFTIDEVKGTIYTNAEIDREFANLFELTVKANDQAVPIETRRYALKNVTILVTDLNDNVPMFISQNALAADPSAVIGSVLTTIMAADPDEGANGEIEYEIINGDTDTFIVDRYSGDLRVASALVPSQLIYNLIVSATDLGPERRKSTTELTIILQGLDGPVFTQPKYITILKEGEPIGTNVISIEAASPRGSEAPVEYYIVSVRCEEKTVGRLFTIGRHTGIIQTAAILDREQGACLYLVDVYAIEKSTAFPRTQRAEAPQRHSSVSQPKTQTSNVVCDTWQ

SEQ ID NO: 8960 - protein, 761 aa, Homo sapiens
SQLLRVFWLLSLLPGQAWVHGAEPRQVFQVLEEQPPGTLVGTIQTRPGFTYRLSESHALFAINSSTGALYTTSTIDRESLPSDVINLVVLSSAPTYPTEVRVLVRDLNDNAPVFPDPSIVVTFKEDSSSGRQVILDTATDSDIGSNGVDHRSYRIIRGNEAGRFRLDITLNPSGEGAFLHLVSKGGLDREVTPQYQLLVEVEDKGEPKRRGYLQVNVTVQDINDNPPVFGSSHYQAGVPEDAVVGSSVLQVAAADADEGTNADIRYRLQDEGTPFQMDPETGLITVREPLDFEARRQYSLTVQAMDRGVPSLTGRAEALIQLLDVNDNDPVVKFRYFPATSRYASVDENAQVGTVVALLTVTDADSPAANGNISVQILGGNEQRHFEVQSSKVPNLSLIKVASALDRERIPSYNLTVSVSDNYGAPPGAAVQARSSVASLVIFVNDINDHPPVFSQQVYRVNLSEEAPPGSYVSGISATDGDSGLNANLRYSIVSGNGLGWSRFQVNAQSGVISTRMALDREEKTAYQLQIVATDGGNLQSPNQAIVTITVLDTQDNPPVFSQVAYSFVVFENVALGYHVGSVSASTMDLNSNISYLITTGDQKGMFAINQVTGQLTTANVIDREEQSFYQLKVVAMDSGTIPLNSTCTLNIDILDENDNTPSFPKSTLFVDVLENMRIGELVSSVTATDSDSGDNADLYYSITGTNNHGTFSISPNTGSIFLAKKLDFETQSLYKLNITAKDQGRPPRSSTMSVVIHVRD

SEQ ID NO: 8961 - protein, 771 aa, Homo sapiens
MSGRSVRLRSVPIQSLSELERARLQEVPFYQLQQDCDLSCQITIPKDGQKRKKSLRKKLDSLGKEKNKDKEFIPQAFGMPLSQVIANDRAYKLKQDLQRDEQKDASDFVASLLPFGNKRQNKELSSSNSSLSSTSETPNESTSPNTPEPAPRARRRGAMSVDSITDLDDNQSRLLEALQLSLPAEAQSKKEKARDKKLSLNPIYRQVPRLVDSCCQHLEKHGLQTVGIFRVGSSKKRVRQLREEFDRGIDVSLEEEHSVHDVAALLKEFLRDMPDPLLTRELYTAFINTLLLEPEEQLGTLQLLIYLLPPCNCDTLHRLLQFLSIVARHADDNISKDGQEVTGNKMTSLNLATIFGPNLLHKQKSSDKEFSVQSSARAEESTAIIAVVQKMIENYEALFMVPPDLQNEVLISLLETDPDVVDYLLRRKASQSSSPDMLQSEVSFSVGGRHSSTDSNKASSGDISPYDNNSPVLSERSLLAMQEDAAPGGSEKLYRVPGQFMLVGHLSSSKSRESSPGPRLGKDLSEEPFDIWGTWHSTLKSGSKDPGMTGSSGDIFESSSLRAGPCSLSQGNLSPNWPRWQGSPAELDSDTQGARRTQAAAPATEGRAHPAVSRACSTPHVQVAGKAERPTARSEQYLTLSGAHDLSESELDVAGLQSRATPQCQRPHGSGRDDKRPPPPYPGPGKPAAAAAWIQGPPEGVETPTDQGGQAAEREQQVTQKKLSSANSLPAGEQDSPRLGDAGWLDWQRERWQIWELLSTDNPDALPETLV

SEQ ID NO: 8962 - protein, 562 aa, Homo sapiens
MSGRSVRLRSVPIQSLSELERARLQEVPFYQLQQDCDLSCQITIPKDGQKRKKSLRKKLDSLGKEKNKDKEFIPQAFGMPLSQVIANDRAYKLKQDLQRDEQKDASDFVASLLPFGNKRQNKELSSSNSSLSSTSETPNESTSPNTPEPAPRARRRGAMSVDSITDLDDNQSRLLEALQLSLPAEAQSKKEKARDKKLSLNPIYRQVPRLVDSCCQHLEKHGLQTVGIFRVGSSKKRVRQLREEFDRGIDVSLEEEHSVHDVAALLKEFLRDMPDPLLTRELYTAFINTLLLEPEEQLGTLQLLIYLLPPCNCDTLHRLLQFLSIVARHADDNISKDGQEVTGNKMTSLNLATIFGPNLLHKQKSSDKEFSVQSSARAEESTAIIAVVQKMIENYEALFMVPPDLQNEVLISLLETDPDVVDYLLRRKASQSSSPDMLQSEVSFSVGGRHSSTDSNKASSGDISPYDNNSPVLSERSLLAMQEDAAPGGSEKLYRVPGQFMLVGHLSSSKSRESSPGPRLGKGNWSLASRRWPKQATLLLLHVAWCGALRTFSSSLPYLMFL

SEQ ID NO: 8963 - protein, 765 aa, Homo sapiens
MSAQSLLHSVFSCSSPASSSAASAKGFSKRKLRQTRSLDPALIGGCGSDEAGAEGSARGATAGRLYSPSLPAESLGPRLASSSRGPPPRATRLPPPGPLCSSFSTPSTPQEKSPSGSFHFDYEVPLGRGGLKKSMAWDLPSVLAGPASSRSASSILCSSGGGPNGIFASPRRWLQQRKFQSPPDSRGHPYVVWKSEGDFTWNSMSGRSVRLRSVPIQSLSELERARLQEVPFYQLQQDCDLSCQITIPKDGQKRKKSLRKKLDSLGKEKNKDKEFIPQAFGMPLSQVIANDRAYKLKQDLQRDEQKDASDFVASLLPFGNKRQNKELSSSNSSLSSTSETPNESTSPNTPEPAPRARRRGAMSVDSITDLDDNQSRLLEALQLSLPAEAQSKKEKARDKKLSLNPIYRQVPRLVDSCCQHLEKHGLQTVGIFRVGSSKKRVRQLREEFDRGIDVSLEEEHSVHDVAALLKEFLRDMPDPLLTRELYTAFINTLLLEPEEQLGTLQLLIYLLPPCNCDTLHRLLQFLSIVARHADDNISKDGQEVTGNKMTSLNLATIFGPNLLHKQKSSDKEFSVQSSARAEESTAIIAVVQKMIENYEALFMVPPDLQNEVLISLLETDPDVVDYLLRRKASQSSSPDMLQSEVSFSVGGRHSSTDSNKASSGDISPYDNNSPVLSERSLLAMQEDAAPGGSEKLYRVPGQFMLVGHLSSSKSRESSPGPRLGKGNWSLASRRWPKQATLLLLHVAWCGALRTFSSSLPYLMFL

SEQ ID NO: 8964 - protein, 974 aa, Homo sapiens
MSAQSLLHSVFSCSSPASSSAASAKGFSKRKLRQTRSLDPALIGGCGSDEAGAEGSARGATAGRLYSPSLPAESLGPRLASSSRGPPPRATRLPPPGPLCSSFSTPSTPQEKSPSGSFHFDYEVPLGRGGLKKSMAWDLPSVLAGPASSRSASSILCSSGGGPNGIFASPRRWLQQRKFQSPPDSRGHPYVVWKSEGDFTWNSMSGRSVRLRSVPIQSLSELERARLQEVPFYQLQQDCDLSCQITIPKDGQKRKKSLRKKLDSLGKEKNKDKEFIPQAFGMPLSQVIANDRAYKLKQDLQRDEQKDASDFVASLLPFGNKRQNKELSSSNSSLSSTSETPNESTSPNTPEPAPRARRRGAMSVDSITDLDDNQSRLLEALQLSLPAEAQSKKEKARDKKLSLNPIYRQVPRLVDSCCQHLEKHGLQTVGIFRVGSSKKRVRQLREEFDRGIDVSLEEEHSVHDVAALLKEFLRDMPDPLLTRELYTAFINTLLLEPEEQLGTLQLLIYLLPPCNCDTLHRLLQFLSIVARHADDNISKDGQEVTGNKMTSLNLATIFGPNLLHKQKSSDKEFSVQSSARAEESTAIIAVVQKMIENYEALFMVPPDLQNEVLISLLETDPDVVDYLLRRKASQSSSPDMLQSEVSFSVGGRHSSTDSNKASSGDISPYDNNSPVLSERSLLAMQEDAAPGGSEKLYRVPGQFMLVGHLSSSKSRESSPGPRLGKDLSEEPFDIWGTWHSTLKSGSKDPGMTGSSGDIFESSSLRAGPCSLSQGNLSPNWPRWQGSPAELDSDTQGARRTQAAAPATEGRAHPAVSRACSTPHVQVAGKAERPTARSEQYLTLSGAHDLSESELDVAGLQSRATPQCQRPHGSGRDDKRPPPPYPGPGKPAAAAAWIQGPPEGVETPTDQGGQAAEREQQVTQKKLSSANSLPAGEQDSPRLGDAGWLDWQRERWQIWELLSTDNPDALPETLV

SEQ ID NO: 8965 - protein, 522 aa, Homo sapiens
MSLRVHTLPTLLGAVVRPGCRELLCLLMITVTVGPGASGVCPTACICATDIVSCTNKNLSKVPGNLFRLIKRLDLSYNRIGLLDSEWIPVSFAKLNTLILRHNNITSISTGSFSTTPNLKCLDLSSNKLKTVKNAVFQELKVLEVLLLYNNHISYLDPSAFGGLSQLQKLYLSGNFLTQFPMDLYVGRFKLAELMFLDVSYNRIPSMPMHHINLVPGKQLRGIYLHGNPFVCDCSLYSLLVFWYRRHFSSVMDFKNDYTCRLWSDSRHSRQVLLLQDSFMNCSDSIINGSFRALGFIHEAQVGERLMVHCDSKTGNANTDFIWVGPDNRLLEPDKEMENFYVFHNGSLVIESPRFEDAGVYSCIAMNKQRLLNETVDVTINVSNFTVSRSHAHEAFNTAFTTLAACVASIVLVLLYLYLTPCPCKCKTKRQKNMLHQSNAHSSILSPGPASDASADERKAGAGKRVVFLEPLKDTAAGQNGKVRLFPSEAVIAEGILKSTRGKSDSDSVNSVFSDTPFVAST

SEQ ID NO: 8966 - protein, 3695 aa, Homo sapiens
MAKRLCAGSALCVRGPRGPAPLLLVGLALLGAARAREEAGGGFSLHPPYFNLAEGARIAASATCGEEAPARGSPRPTEDLYCKLVGGPVAGGDPNQTIQGQYCDICTAANSNKAHPASNAIDGTERWWQSPPLSRGLEYNEVNVTLDLGQVFHVAYVLIKFANSPRPDLWVLERSMDFGRTYQPWQFFASSKRDCLERFGPQTLERITRDDAAICTTEYSRIVPLENGEIVVSLVNGRPGAMNFSYSPLLREFTKATNVRLRFLRTNTLLGHLMGKALRDPTVTRRYYYSIKDISIGGRCVCHGHADACDAKDPTDPFRLQCTCQHNTCGGTCDRCCPGFNQQPWKPATANSANECQSCNCYGHATDCYYDPEVDRRRASQSLDGTYQGGGVCIDCQHHTTGVNCERCLPGFYRSPNHPLDSPHVCRRCNCESDFTDGTCEDLTGRCYCRPNFSGERCDVCAEGFTGFPSCYPTPSSSNDTREQVLPAGQIVNCDCSAAGTQGNACRKDPRVGRCLCKPNFQGTHCELCAPGFYGPGCQPCQCSSPGVADDRCDPDTGQCRCRVGFEGATCDRCAPGYFHFPLCQLCGCSPAGTLPEGCDEAGRCLCQPEFAGPHCDRCRPGYHGFPNCQACTCDPRGALDQLCGAGGLCRCRPGYTGTACQECSPGFHGFPSCVPCHCSAEGSLHAACDPRSGQCSCRPRVTGLRCDTCVPGAYNFPYCEAGSCHPAGLAPVDPALPEAQVPCMCRAHVEGPSCDRCKPGFWGLSPSNPEGCTRCSCDLRGTLGGVAECQPGTGQCFCKPHVCGQACASCKDGFFGLDQADYFGCRSCRCDIGGALGQSCEPRTGVCRCRPNTQGPTCSEPARDHYLPDLHHLRLELEEAATPEGHAMRFGFNPLEFENFSWRGYAQMAPVQPRIVARLNLTSPDLFWLVFRYVNRGAMSVSGRVSVREEGRSATCANCTAQSQPVAFPPSTEPAFITVPQRGFGEPFVLNPGTWALRVEAEGVLLDYVVLLPSAYYEAALLQLRVTEACTYRPSAQQSGDNCLLYTHLPLDGFPSAAGLEALCRQDNSLPRPCPTEQLSPSHPPLITCTGSDVDVQLQVAVPQPGRYALVVEYANEDARQEVGVAVHTPQRAPQQGLLSLHPCLYSTLCRGTARDTQDHLAVFHLDSEASVRLTAEQARFFLHGVTLVPIEEFSPEFVEPRVSCISSHGAFGPNSAACLPSRFPKPPQPIILRDCQVIPLPPGLPLTHAQDLTPAMSPAGPRPRPPTAVDPDAEPTLLREPQATVVFTTHVPTLGRYAFLLHGYQPAHPTFPVEVLINAGRVWQGHANASFCPHGYGCRTLVVCEGQALLDVTHSELTVTVRVPEGRWLWLDYVLVVPENVYSFGYLREEPLDKSYDFISHCAAQGYHISPSSSSLFCRNAAASLSLFYNNGARPCGCHEVGATGPTCEPFGGQCPCHAHVIGRDCSRCATGYWGFPNCRPCDCGARLCDELTGQCICPPRTIPPDCLLCQPQTFGCHPLVGCEECNCSGPGIQELTDPTCDTDSGQCKCRPNVTGRRCDTCSPGFHGYPRCRPCDCHEAGTAPGVCDPLTGQCYCKENVQGPKCDQCSLGTFSLDAANPKGCTRCFCFGATERCRSSSYTRQEFVDMEGWVLLSTDRQVVPHERQPGTEMLRADLRHVPEAVPEAFPELYWQAPPSYLGDRVSSYGGTLRYELHSETQRGDVFVPMESRPDVVLQGNQMSITFLEPAYPTPGHVHRGQLQLVEGNFRHTETRNTVSREELMMVLASLEQLQIRALFSQISSAVSLRRVALEVASPAGQGALASNVELCLCPASYRGDSCQECAPGFYRDVKGLFLGRCVPCQCHGHSDRCLPGSGVCVDCQHNTEGAHCERCQAGFVSSRDDPSAPCVSCPCPLSVPSNNFAEGCVLRGGRTQCLCKPGYAGASCERCAPGFFGNPLVLGSSCQPCDCSGNGDPNLLFSDCDPLTGACRGCLRHTTGPRCEICAPGFYGNALLPGNCTRCDCTPCGTEACDPHSGHCLCKAGVTGRRCDRCQEGHFGFNGCGGCRPCACGPAAEGSECHPQSGQCHCRPGTMGPQCRECAPGYWGLPEQGCRRCQCPGGRCDPHTGRCNCPPGLSGERCDTCSQQHQVPVPGGPVGHSIHCEVCDHCVVLLLDDLERAGALLPAIHEQLRGINASSMAWARLHRLNASIADLQSQLRSPLGPRHETAQQLEVLEQQSTSLGQDARRLGGQAVGTRDQASQLLAGTEATLGHAKTLLAAIRAVDRTLSELMSQTGHLGLANASAPSGEQLLRTLAEVERLLWEMRARDLGAPQAAAEAELAAAQRLLARVQEQLSSLWEENQALATQTRDRLAQHEAGLMDLREALNRAVDATREAQELNSRNQERLEEALQRKQELSRDNATLQATLHAARDTLASVFRLLHSLDQAKEELERLAASLDGARTPLLQRMQTFSPAGSKLRLVEAAEAHAQQLGQLALNLSSIILDVNQDRLTQRAIEASNAYSRILQAVQAAEDAAGQALQQADHTWATVVRQGLVDRAQQLLANSTALEEAMLQEQQRLGLVWAALQGARTQLRDVRAKKDQLEAHIQAAQAMLAMDTDETSKKIAHAKAVAAEAQDTATRVQSQLQAMQENVERWQGQYEGLRGQDLGQAVLDAGHSVSTLEKTLPQLLAKLSILENRGVHNASLALSASIGRVRELIAQARGAASKVKVPMKFNGRSGVQLRTPRDLADLAAYTALKFYLQGPEPEPGQGTEDRFVMYMGSRQATGDYMGVSLRDKKVHWVYQLGEAGPAVLSIDEDIGEQFAAVSLDRTLQFGHMSVTVERQMIQETKGDTVAPGAEGLLNLRPDDFVFYVGGYPSTFTPPPLLRFPGYRGCIEMDTLNEEVVSLYNFERTFQLDTAVDRPCARSKSTGDPWLTDGSYLDGTGFARISFDSQISTTKRFEQELRLVSYSGVLFFLKQQSQFLCLAVQEGSLVLLYDFGAGLKKAVPLQPPPPLTSASKAIQVFLLGGSRKRVLVRVERATVYSVEQDNDLELADAYYLGGVPPDQLPPSLRWLFPTGGSVRGCVKGIKALGKYVDLKRLNTTGVSAGCTADLLVGRAMTFHGHGFLRLALSNVAPLTGNVYSGFGFHSAQDSALLYYRASPDGLCQVSLQQGRVSLQLLRTEVKTQAGFADGAPHYVAFYSNATGVWLYVDDQLQQMKPHRGPPPELQPQPEGPPRLLLGGLPESGTIYNFSGCISNVFVQRLLGPQRVFDLQQNLGSVNVSTGCAPALQAQTPGLGPRGLQATARKASRRSRQPARHPACMLPPHLRTTRDSYQFGGSLSSHLEFVGILARHRNWPSLSMHVLPRSSRGLLLFTARLRPGSPSLALFLSNGHFVAQMEGLGTRLRAQSRQRSRPGRWHKVSVRWEKNRILLVTDGARAWSQEGPHRQHQGAEHPQPHTLFVGGLPASSHSSKLPVTVGFSGCVKRLRLHGRPLGAPTRMAGVTPCILGPLEAGLFFPGSGGVITLDLPGATLPDVGLELEVRPLAVTGLIFHLGQARTPPYLQLQVTEKQVLLRADDGAGEFSTSVTRPSVLCDGQWHRLAVMKSGNVLRLEVDAQSNHTVGPLLAAAAGAPAPLYLGGLPEPMAVQPWPPAYCGCMRRLAVNRSPVAMTRSVEVHGAVGASGCPAA

SEQ ID NO: 8967 - protein, 115 aa, Homo sapiens
MQSRQRSCFPTPGFDSPTSPPPGKRALGWHRGTRARLLSSFLSFLNGSSANQAVGQGPEAGEGRGEGCLQLGEKNGRPQVSRFVPVWGFANQTGAEGTAAPFQWRRSQVPHARVY

SEQ ID NO: 8968 - protein, 1955 aa, Homo sapiens [sequence omitted]

SEQ ID NO: 8969 - protein, 1061 aa, Homo sapiens
MPGPRRPAGSRLRLLLLLLLPPLLLLLRGSHAGNLTVAVVLPLANTSYPWSWARVGPAVELALAQVKARPDLLPGWTVRTVLGSSENALGVCSDTAAPLAAVDLKWEHNPAVFLGPGCVYAAAPVGRFTAHWRVPLLTAGAPALGFGVKDEYALTTRAGPSYAKLGDFVAALHRRLGWERQALMLYAYRPGDEEHCFFLVEGLFMRVRDRLNITVDHLEFAEDDLSHYTRLLRTMPRKGRVIYICSSPDAFRTLMLLALEAGLCGEDYVFFHLDIFGQSLQGGQGPAPRRPWERGDGQDVSARQAFQAAKIITYKDPDNPEYLEFLKQLKHLAYEQFNFTMEDGLVNTIPASFHDGLLLYIQAVTETLAHGGTVTDGENITQRMWNRSFQGVTGYLKIDSSGDRETDFSLWDMDPENGAFRVVLNYNGTSQELVAVSGRKLNWPLGYPPPDIPKCGFDNEDPACNQDHLSTLEVLALVGSLSLLGILIVSFFIYRKMQLEKELASELWRVRWEDVEPSSLERHLRSAGSRLTLSGRGSNYGSLLTTEGQFQVFAKTAYYKGNLVAVKRVNRKRIELTRKVLFELKHMRDVQNEHLTRFVGACTDPPNICILTEYCPRGSLQDILENESITLDWMFRYSLTNDIVKGMLFLHNGAICSHGNLKSSNCVVDGRFVLKITDYGLESFRDLDPEQGHTVYAKKLWTAPELLRMASPPVRGSQAGDVYSFGIILQEIALRSGVFHVEGLDLSPKEIIERVTRGEQPPFRPSLALQSHLEELGLLMQRCWAEDPQERPPFQQIRLTLRKFNRENSSNILDNLLSRMEQYANNLEELVEERTQAYLEEKRKAEALLYQILPHSVAEQLKRGETVQAEAFDSVTIYFSDIVGFTALSAESTPMQVVTLLNDLYTCFDAVIDNFDVYKVETIGDAYMVVSGLPVRNGRLHACEVARMALALLDAVRSFRIRHRPQEQLRLRIGIHTGPVCAGVVGLKMPRYCLFGDTVNTASRMESNGEALKIHLSSETKAVLEEFGGFELELRGDVEMKGKGKVRTYWLLGERGSSTRG

SEQ ID NO: 8970 - protein, 493 aa, Homo sapiens
MGSWALLWPPLLFTGLLVRPPGTMAQAQYCSVNKDIFEVEENTNVTEPLVDIHVPEGQEVTLGALSTPFAFRIQGNQLFLNVTPDYEEKSLLEAQLLCQSGGTLVTQLRVFVSVLDVNDNAPEFPFKTKEIRVEEDTKVNSTVIPETQLQAEDRDKDDILFYTLQEMTAGASDYFSLVSVNRPALRLDRPLDFYERPNMTFWLLVRDTPGENVEPSHTATATLVLNVVPADLRPPWFLPCTFSDGYVCIQAQYHGAVPTGHILPSPLVLRPGPIYAEDGDRGINQPIIYSIFRGNVNGTFIIHPDSGNLTVARSVPSPMTFLLLVKGQQADLARYSVTQVTVEAVAAAGSPPRFPQSLYRGTVARGAGAGVVVKDAAAPSQPLRIQAQDPEFSDLNSAITYRITNHSHFRMEGEVVLTTTTLAQAGAFYAEPEGGSPPPTCTGDLRHPAQLRPPAPDPTQRLPGEAEEPMQTPKATHLGAGGLKHLPGVLVPF

SEQ ID NO: 8971 - protein, 651 aa, Homo sapiens [sequence omitted]

SEQ ID NO: 8972 - protein, 845 aa, Homo sapiens
MGSWALLWPPLLFTGLLVRPPGTMAQAQYCSVNKDIFEVEENTNVTEPLVDIHVPEGQEVTLGALSTPFAFRIQGNQLFLNVTPDYEEKSLLEAQLLCQSGGTLVTQLRVFVSVLDVNDNAPEFPFKTKEIRVEEDTKVNSTVIPETQLQAEDRDKDDILFYTLQEMTAGASDYFSLVSVNRPALRLDRPLDFYERPNMTFWLLVRDTPGENVEPSHTATATLVLNVVPADLRPPWFLPCTFSDGYVCIQAQYHGAVPTGHILPSPLVLRPGPIYAEDGDRGINQPIIYSIFRGNVNGTFIIHPDSGNLTVARSVPSPMTFLLLVKGQQADLARYSVTQVTVEAVAAAGSPPRFPQSLYRGTVARGAGAGVVVKDAAAPSQPLRIQAQDPEFSDLNSAITYRITNHSHFRMEGEVVLTTTTLAQAGAFYAEVEAHNTVTSGTATTVIEIQVSEQEPPSTDVPPSPEAGGTTGPWTSTTSEVPRPPEPSQGPSTTSSGGGTGPHPPSGTTLRPPTSSTPGGSPGAENSTSHQPATPGGDTAQTPKPGTSQPMPPGVGTSTSHQPATPSGGTVQTPEPGTSQPMPPSMGTSTSHQPATPGGGTAQTPEAGTSQPMPPGMGTSTSHQPTTPGGGTAQTPEPGTSQPMPLSKSTPSSGGGPSEDKRFSVVDMAALGGVLGALLLLALLGLAVLVHKHYGPRLKCCSGKAPEPQPQGFDNQAFLPDHKANWAPVPSPTHDPKPAEAPMPAEPAPPGPASPGGAPEPPAAARAGGSPTAVRSILTKERRPEGGYKAVWFGEDIGTEADVVVLNAPTLDVDGASDSGSGDEGEGAGRGGGPYDAPGGDDSYI

SEQ ID NO: 8973 - protein, 845 aa, Homo sapiens [sequence omitted]

SEQ ID NO: 8974 - protein, 3623 aa, Homo sapiens
MMNMSLPFLWSLLTLLIFAEVNGERGELELQRQKRSINLQQPRMATERGNLVFLTGSAQNIEFRTGSLGKIKLNDEDLSECLHQIQKNKEDIIELKGSAIGLPQNISSQIYQLNSKLVDLERKFQGLQQTVDKKVCSSNPCQNGGNCLNLHDSFFCICPPQWKGPLCSADVNECEIYSGTPLSCQNGGTCVNTMGSYSCHCPPETYGPQCASKYDDCEGGSVARCVHGICEDLMREQAGEPKYSCVCDAGWMSSPNSPACTLDRDECSFQPGPCSTLVQCFNTQGSFYCGACPTGWQGNGYICEDINECEINNGGCSVAPPVECVNTPGSSHCQACPPGYQGDGRVCTLTDICSVSNGGCHPDASCSSTLGSLPLCTCLPGYTGNGYGPNGCVQLSNICLSHPCLNGQCIDTVSGYFCKCDSGWTGVNCTENINECLSNPCLNGGTCVDGVDSFSCECTRLWTGALCQVPQQVCGESLSGINGSFSYRSPDVGYVHDVNCFWVIKTEMGKVLRITFTFFRLESMDNCPHEFLQVYDGDSSSAFQLGRFCGSSLPHELLSSDNALYFHLYSEHLRNGRGFTVRWETQQPECGGILTGPYGSIKSPGYPGNYPPGRDCVWIVVTSPDLLVTFTFGTLSLEHHDDCNKDYLEIRDGPLYQDPLLGKFCTTFSVPPLQTTGPFARIHFHSDSQISDQGFHITYLTSPSDLRCGGNYTDPEGELFLPELSGPFTHTRQCVYMMKQPQGEQIQINFTHVELQCQSDSSQNYIEVRDGETLLGKVCGNGTISHIKSITNSVWIRFKIDASVEKASFRAVYQVACGDELTGEGVIRSPFFPNVYPGERTCRWTIHQPQSQVILLNFTVFEIGSSAHCETDYVEIGSSSILGSPENKKYCGTDIPSFITSVYNFLYVTFVKSSSTENHGFMAKFSAEDLACGEILTESTGTIQSPGHPNVYPHGINCTWHILVQPNHLIHLMFETFHLEFHYNCTNDYLEVYDTDSETSLGRYCGKSIPPSLTSSGNSLMLVFVTDSDLAYEGFLINYEAISAATACLQDYTDDLGTFTSPNFPNNYPNNWECIYRITVRTGQLIAVHFTNFSLEEAIGNYYTDFLEIRDGGYEKSPLLGIFYGSNLPPTIISHSNKLWLKFKSDQIDTRSGFSAYWDGSSTGCGGNLTTSSGTFISPNYPMPYYHSSECYWWLKSSHGSAFELEFKDFHLEHHPNCTLDYLAVYDGPSSNSHLLTQLCGDEKPPLIRSSGDSMFIKLRTDEGQQGRGFKAEYRQTCENVVIVNQTYGILESIGYPNPYSENQHCNWTIRATTGNTVNYTFLAFDLEHHINCSTDYLELYDGPRQMGRYCGVDLPPPGSTTSSKLQVLLLTDGVGRREKGFQMQWFVYGCGGELSGATGSFSSPGFPNRYPPNKECIWYIRTDPGSSIQLTIHDFDVEYHSRCNFDVLEIYGGPDFHSPRIAQLCTQRSPENPMQVSSTGNELAIRFKTDLSINGRGFNASWQAVTGGCGGIFQAPSGEIHSPNYPSPYRSNTDCSWVIRVDRYHRVLLNFTDFDLEPQDSCIMAYDGLSSTMSRLARTCGREQLANPIVSSGNSLFLRFQSGPSRQNRGFRAQFRQACGGHILTSSFDTVSSPRFPANYPNNQNCSWIIQAQPPLNHITLSFTHFELERSTTCARDFVEILDGGHEDAPLRGRYCGTDMPHPITSFSSALTLRFVSDSSISAGGFHTTVTASVSACGGTFYMAEGIFNSPGYPDIYPPNVECVWNIISSPGNRLQLSFISFQLEDSQDCSRDFVEIREGNATGHLVGRYCGNSFPLNYSSIVGHTLWVRFISDGSGSGTGFQATFMKIFGNDNIVGTHGKVASPFWPENYPHNSNYQWTVNVNASHVVHGRILEMDIEEIQNCYYDKLRIYDGPSIHARLIGAYCGTQTESFSSTGNSLTFHFYSDSSISGKGFLLEWFAVDAPDGVLPTIAPGACGGFLRTGDAPVFLFSPGWPDSYSNRVDCTWLIQAPDSTVELNILSLDIESHRTCAYDSLVIRDGDNNLAQQLAVLCGREIPGPIRSTGEYMFIRFTSDSSVTRAGFNASFHKSCGGYLHADRGIITSPKYPETYPSNLNCSWHVLVQSGLTIAVHFEQPFQIPNGDSSCNQGDYLVLRNGPDIYSPPLGPPGGNGHFCGSHASSTLFTSDNQMFVQFISDHSNEGQGFKIKYEAKSLACGGNVYIHDADSAGYVTSPNHPHNYPPHADCIWILAAPPETRIQLQFEDRFDIEVTPNCTSNYLELRDGVDSDAPILSKFCGTSLPSSQWSSGEVMYLRFRSDNSPTHVGFKAKYSIAQCGGRVPGQSGVVESIGHPTLPYRDNLFCEWHLQGLSGHYLTISFEDFNLQNSSGCEKDFVEIWDNHTSGNILGRYCGNTIPDSIDTSSNTAVVRFVTDGSVTASGFRLRFESSMEECGGDLQGSIGTFTSPNYPNPNPHGRICEWRITAPEGRRITLMFNNLRLATHPSCNNEHVIVFNGIRSNSPQLEKLCSSVNVSNEIKSSGNTMKVIFFTDGSRPYGGFTASYTSSEDAVCGGSLPNTPEGNFTSPGYDGVRNYSRNLNCEWTLSNPNQGNSSISIHFEDFYLESHQDCQFDVLEFRVGDADGPLMWRLCGPSKPTLPLVIPYSQVWIHFVTNERVEHIGFHAKYSFTDCGGIQIGDSGVITSPNYPNAYDSLTHCSWLLEAPQGHTITLTFSDFDIEPHTTCAWDSVTVRNGGSPESPIIGQYCGNSNPRTIQSGSNQLVVTFNSDHSLQGGGFYATWNTQTLGCGGIFHSDNGTIRSPHWPQNFPENSRCSWTAITHKSKHLEISFDNNFLIPSGDGQCQNSFVKVWAGTEEVDKALLATGCGNVAPGPVITPSNTFTAVFQSQEAPAQGFSASFVSRCGSNFTGPSGYIISPNYPKQYDNNMNCTYVIEANPLSVVLLTFVSFHLEARSAVTGSCVNDGVHIIRGYSVMSTPFATVCGDEMPAPLTIAGPVLLNFYSNEQITDFGFKFSYRIISCGGVFNFSSGIITSPAYSYADYPNDMHCLYTITVSDDKVIELKFSDFDVVPSTSCSHDYLAIYDGANTSDPLLGKFCGSKRPPNVKSSNNSMLLVFKTDSFQTAKGWKMSFRQTLGPQQGCGGYLTGSNNTFASPDSDSNGMYDKNLNCVWIIIAPVNKVIHLTFNTFALEAASTRQRCLYDYVKLYDGDSENANLAGTFCGSTVPAPFISSGNFLTVQFISDLTLEREGFNATYTIMDMPCGGTYNATWTPQNISSPNSSDPDVPFSICTWVIDSPPHQQVKITVWALQLTSQDCTQNYLQLQDSPQGHGNSRFQFCGRNASAVPVFYSSMSTAMVIFKSGVVNRNSRMSFTYQIADCNRDYHKAFGNLRSPGWPDNYDNDKDCTVTLTAPQNHTISLFFHSLGIENSVECRNDFLEVRNGSNSNSPLLGKYCGTLLPNPVFSQNNELYLRFKSDSVTSDRGYEIIWTSSPSGCGGTLYGDRGSFTSPGYPGTYPNNTYCEWVLVAPAGRLVTINFYFISIDDPGDCVQNYLTLYDGPNASSPSSGPYCGGDTSIAPFVASSNQVFIKFHADYARRPSAFRLTWDS

SEQ ID NO: 8975 - protein, 443 aa, Homo sapiens
MKLRSKAAALLLLALAALLLALLSLRAGRAEPPALPARPASAPQRHPAPVPARWPGPGALPGASPGVRRRRPPRPRPRAGRRGAARLEKLARRPGEPRSFQAVLPPELWIHLAVVACGNRLEETLVMLKSAVLFSHRKIQFHIFTEDSLKPEFDKQLRQWPDSYTKKFEHRIYPITFSVGNPQEWKKLFKPCAAQRLFLPVILKDVDSLLYVDTDVLFLRPVDDIWKLLRLFNSTQLAAMAPEHEIPKIGWYSRFARHPFYGSAGVNSGVMLMNLTRIRSTQFKNSMIPTGLAWEDMLYPLYQKYKNAITWGDQDLLNIIFYFNPECLYVFPCQWNYRPDHCMYGSNCREAEHEGVSVLHGNRGVYHDDKQPTFRALYEAIRDFPFQDNLFQSMYYPLQLKFLETVHTLCGRIPQVFLKQIEKTMKRAYEKHVIIHVGPNQMH

SEQ ID NO: 8976 - protein, 863 aa, Homo sapiens
MVPEAWRSGLVSTGRVVGVLLLLGALNKASTVIHYEIPEEREKGFAVGNVVANLGLDLGSLSARRFRVVSGASRRFFEVNRETGEMFVNDRLDREELCGTLPSCTVTLELVVENPLELFSVEVVIQDINDNNPAFPTQEMKLEISEAVAPGTRFPLESAHDPDVGSNSLQTYELSRNEYFALRVQTREDSTKYAELVLERALDREREPSLQLVLTALDGGTPALSASLPIHIKVLDANDNAPVFNQSLYRARVLEDAPSGTRVVQVLATDLDEGPNGEIIYSFGSHNRAGVRQLFALDLVTGMLTIKGRLDFEDTKLHEIYIQAKDKGANPEGAHCKVLVEVVDVNDNAPEITVTSVYSPVPEDAPLGTVIALLSVTDLDAGENGLVTCEVPPGLPFSLTSSLKNYFTLKTSADLDRETVPEYNLSITARDAGTPSLSALTIVRVQVSDINDNPPQSSQSSYDVYIEENNLPGAPILNLSVWDPDAPQNARLSFFLLEQGAETGLVGRYFTINRDNGIVSSLVPLDYEDRREFELTAHISDGGTPVLATNISVNIFVTDRNDNAPQVLYPRPGGSSVEMLPRGTSAGHLVSRVVGWDADAGHNAWLSYSLLGSPNQSLFAIGLHTGQISTARPVQDTDSPRQTLTVLIKDNGEPSLSTTATLTVSVTEDSPEARAEFPSGSAPREQKKNLTFYLLLSLILVSVGFVVTVFGVIIFKVYKWKQSRDLYRAPVSSLYRTPGPSLHADAVRGGLMSPHLYHQVYLTTDSRRSDPLLKKPGAASPLASRQNTLRSCDPVFYRQVLGAESAPPGQVRFSKSCLTLLVLFYSYIILRKEWSCFFSDEDVFLVMHSHFQLALPRSKLVPL

SEQ ID NO: 8977 - protein, 352 aa, Homo sapiens
MTSSLLLAFLLLAPTTVATPRAGGQCPACGGPTLELESQRELLLDLAKRSILDKLHLTQRPTLNRPVSRAALRTALQHLHGVPQGALLEDNREQECEIISFAETGLSTINQTRLDFHFSSDRTAGDREVQQASLMFFVQLPSNTTWTLKVRVLVLGPHNTNLTLATQYLLEVDASGWHQLPLGPEAQAACSQGHLTLELVLEGQVAQSSVILGGAAHRPFVAARVRVGGKHQIHRRGIDCQGGSRMCCRQEFFVDFREIGWHDWIIQPEGYAMNFCIGQCPLHIAGMPGIAASFHTAVLNLLKANTAAGTTGGGSCCVPTARRPLSLLYYDRDSNIVKTDIPDMVVEACGCS

SEQ ID NO: 8978 - protein, 655 aa, Homo sapiens
MGTSPSSSTALASCSRIARRATATMIAGSLLLLGFLSTTTAQPEQKASNLIGTYRHVDRATGQVLTCDKCPAGTYVSEHCTNTSLRVCSSCPVGTFTRHENGIEKCHDCSQPCPWPMIEKLPCAALTDRECTCPPGMFQSNATCAPHTVCPVGWGVRKKGTETEDVRCKQCARGTFSDVPSSVMKCKAYTDCLSQNLVVIKPGTKETDNVCGTLPSFSSSTSPSPGTAIFPRPEHMETHEVPSSTYVPKGMNSTESNSSASVRPKVLSSIQEGTVPDNTSSARGKEDVNKTLPNLQVVNHQQGPHHRHILKLLPSMEATGGEKSSTPIKGPKRGHPRQNLHKHFDINEHLPWMIVLFLLLVLVVIVVCSIRKSSRTLKKGPRQDPSAIVEKAGLKKSMTPTQNREKWIYYCNGHGIDILKLVAAQVGSQWKDIYQFLCNASEREVAAFSNGYTADHERAYAALQHWTIRGPEASLAQLISALRQHRRNDVVEKIRGLMEDTTQLETDKLALPMSPSPLSPSPIPSPNAKLENSALLTVEPSPQDKNKGFFVDESEPLLRCDSTSSGSSALSRNGSFITKEKKDTVLRQVRLDPCDLQPIFDDMLHFLNPEELRVIEEIPQAEDKLDRLFEIIGVKSQEASQTLLDSVYSHLPDLL

SEQ ID NO: 8979 - protein, 820 aa, Homo sapiens
MGGSCAQRRRAGPRQVLFPLLLPLFYPTLSEPIRYSIPEELAKGSVVGNLAKDLGLSVLDVSARKLRVSAEKLHFSVDAESGDLLVKNRIDREQICKERRRCELQLEAVVENPLNIFHVIVVIEDVNDHAPQFDKKEIHLEIFESASAGTRLSLDPATDPDININSIKDYKINSNPYFSLMVRVNSDGGKYPELSLEKLLDREEQRSHSLILTALDGGDPPRSATAHIEISVKDTNDNPPVFSRDEYRISLSENLPPGSPVLQVTATDQDEGVNAEINYYFRSTAQSTKHMFSLDEKTGMIKNNQSFDFEDVERYTMEVEAKDGGGLSTQCKVIIEILDENDNSPEIIITSLSDQILENSPPGMVVALFKTRDLDFGGNGEVRCNIETDIPFKIYSSSNNYYKLVTDGALDREQTPEYNVTIVATDRGKPPLSSSRSITLYVADINDNAPVFDQTSYVVHVAENNPPGASIAQVSASDPDLGLNGHISYSIVASDLEPLAVSSYVSVSAQSGVVFAQRAFDHEQLRAFALTLQARDHGSPTLSANVSLRVLVGDRNDNAPRVLYPALGPDGSAFFDMVPRSAEPGYLVTKVVAVDADSGHNAWLSYHVLQASEPGLFSLGLRTGEVRTARALGDRDAARQRLLVAVRDGGQPPLSATATLHLVFADNLQEILPDLSDRPVLSDPQAELQFYLVVALALISVLFLLAVILAIALRLRRSLSPATWDCFHPGLCVKSGPVVPPNYSEGTLPYSYNLCIAHTGTKEFNFLKCSVPLHSNEDMVCSVSPGALIPPHGGEDLTSHPETLTSVSFSFLCVIYLIVY

SEQ ID NO: 8980 - protein, 1612 aa, Homo sapiens
MIAEPAHFYLFGLICLCSGSRLRQEDFPPRIVEHPSDLIVSKGEPATLNCKAEGRPTPTIEWYKGGERVETDKDDPRSHRMLLPSGSLFFLRIVHGRKSRPDEGVYVCVARNYLGEAVSHNASLEVAILRDDFRQNPSDVMVAVGEPAVMECQPPRGHPEPTISWKKDGSPLDDKDERITIRGGKLMITYTRKSDAGKYVCVGTNMVGERESEVAELTVLERPSFVKRPSNLAVTVDDSAEFKCEARGDPVPTVRWRKDDGELPKSRYEIRDDHTLKIRKVTAGDMGSYTCVAENMVGKAEASATLTVQEPPHFVVKPRDQVVALGRTVTFQCEATGNPQPAIFWRREGSQNLLFSYQPPQSSSRFSVSQTGDLTITNVQRSDVGYYICQTLNVAGSIITKAYLEVTDVIADRPPPVIRQGPVNQTVAVDGTFVLSCVATGSPVPTILWRKDGVLVSTQDSRIKQLENGVLQIRYAKLGDTGRYTCIASTPSGEATWSAYIEVQEFGVPVQPPRPTDPNLIPSAPSKPEVTDVSRNTVTLSWQPNLNSGATPTSYIIEAFSHASGSSWQTVAENVKTETSAIKGLKPNAIYLFLVRAANAYGISDPSQISDPVKTQDVLPTSQGVDHKQVQRELGNAVLHLHNPTVLSSSSIEVHWTVDQQSQYIQGYKILYRPSGANHGESDWLVFEVRTPAKNSVVIPDLRKGVNYEIKARPFFNEFQGADSEIKFAKTLEEAPSAPPQGVTVSKNDGNGTAILVSWQPPPEDTQNGMVQEYKVWCLGNETRYHINKTVDGSTFSVVIPFLVPGIRYSVEVAASTGAGSGVKSEPQFIQLDAHGNPVSPEDQVSLAQQISDVVKQPAFIAGIGAACWIILMVFSIWLYRHRKKRNGLTSTYAGIRKVPSFTFTPTVTYQRGGEAVSSGGRPGLLNISEPAAQPWLADTWPNTGNNHNDCSISCCTAGNGNSDSNLTTYSRPADCIANYNNQLDNKQTNLMLPESTVYGDVDLSNKINEMKTFNSPNLKDGRFVNPSGQPTPYATTQLIQSNLSNNMNNGSGDSGEKHWKPLGQQKQEVAPVQYNIVEQNKLNKDYRANDTVPPTIPYNQSYDQNTGGSYNSSDRGSSTSGSQGHKKGARTPKVPKQGGMNWADLLPPPPAHPPPHSNSEEYNISVDESYDQEMPCPVPPARMYLQQDELEEEEDERGPTPPVRGAASSPAAVSYSHQSTATLTPSPQEELQPMLQDCPEETGHMQHQPDRRRQPVSPPPPPRPISPPHTYGYISGPLVSDMDTDAPEEEEDEADMEVAKMQTRRLLLRGLEQTPASSVGDLESSVTGSMINGWGSASEEDNISSGRSSVSSSDGSFFTDADFAQAVAAAAEYAGLKVARRQMQDAAGRRHFHASQCPRPTSPVSTDSNMSAAVMQKTRPAKKLKHQPGHLRRETYTDDLPPPPVPPPAIKSPTAQSKTQLEVRPVVVPKLPSMDARTDRSSDRKGSSYKGREVLDGRQVVDMRTNPGDPREAQEQQNDGKGRGNKAAKRDLPPAKTHLIQEDILPYCRPTFPTSNNPRDPSSSSSMSSRGSGSRQREQANVGRRNIAEMQVLGGYERGEDNNEELEETES

SEQ ID NO: 8981 - protein, 1651 aa, Homo sapiens
MKWKHVPFLVMISLLSLSPNHLFLAQLIPDPEDVERGNDHGTPIPTSDNDDNSLGYTGSRLRQEDFPPRIVEHPSDLIVSKGEPATLNCKAEGRPTPTIEWYKGGERVETDKDDPRSHRMLLPSGSLFFLRIVHGRKSRPDEGVYVCVARNYLGEAVSHNASLEVAILRDDFRQNPSDVMVAVGEPAVMECQPPRGHPEPTISWKKDGSPLDDKDERITIRGGKLMITYTRKSDAGKYVCVGTNMVGERESEVAELTVLERPSFVKRPSNLAVTVDDSAEFKCEARGDPVPTVRWRKDDGELPKSRYEIRDDHTLKIRKVTAGDMGSYTCVAENMVGKAEASATLTVQEPPHFVVKPRDQVVALGRTVTFQCEATGNPQPAIFWRREGSQNLLFSYQPPQSSSRFSVSQTGDLTITNVQRSDVGYYICQTLNVAGSIITKAYLEVTDVIADRPPPVIRQGPVNQTVAVDGTFVLSCVATGSPVPTILWRKDGVLVSTQDSRIKQLENGVLQIRYAKLGDTGRYTCIASTPSGEATWSAYIEVQEFGVPVQPPRPTDPNLIPSAPSKPEVTDVSRNTVTLSWQPNLNSGATPTSYIIEAFSHASGSSWQTVAENVKTETSAIKGLKPNAIYLFLVRAANAYGISDPSQISDPVKTQDVLPTSQGVDHKQVQRELGNAVLHLHNPTVLSSSSIEVHWTVDQQSQYIQGYKILYRPSGANHGESDWLVFEVRTPAKNSVVIPDLRKGVNYEIKARPFFNEFQGADSEIKFAKTLEEAPSAPPQGVTVSKNDGNGTAILVSWQPPPEDTQNGMVQEYKVWCLGNETRYHINKTVDGSTFSVVIPFLVPGIRYSVEVAASTGAGSGVKSEPQFIQLDAHGNPVSPEDQVSLAQQISDVVKQPAFIAGIGAACWIILMVFSIWLYRHRKKRNGLTSTYAGIRKVPSFTFTPTVTYQRGGEAVSSGGRPGLLNISEPAAQPWLADTWPNTGNNHNDCSISCCTAGNGNSDSNLTTYSRPADCIANYNNQLDNKQTNLMLPESTVYGDVDLSNKINEMKTFNSPNLKDGRFVNPSGQPTPYATTQLIQSNLSNNMNNGSGDSGEKHWKPLGQQKQEVAPVQYNIVEQNKLNKDYRANDTVPPTIPYNQSYDQNTGGSYNSSDRGSSTSGSQGHKKGARTPKVPKQGGMNWADLLPPPPAHPPPHSNSEEYNISVDESYDQEMPCPVPPARMYLQQDELEEEEDERGPTPPVRGAASSPAAVSYSHQSTATLTPSPQEELQPMLQDCPEETGHMQHQPDRRRQPVSPPPPPRPISPPHTYGYISGPLVSDMDTDAPEEEEDEADMEVAKMQTRRLLLRGLEQTPASSVGDLESSVTGSMINGWGSASEEDNISSGRSSVSSSDGSFFTDADFAQAVAAAAEYAGLKVARRQMQDAAGRRHFHASQCPRPTSPVSTDSNMSAAVMQKTRPAKKLKHQPGHLRRETYTDDLPPPPVPPPAIKSPTAQSKTQLEVRPVVVPKLPSMDARTDRSSDRKGSSYKGREVLDGRQVVDMRTNPGDPREAQEQQNDGKGRGNKAAKRDLPPAKTHLIQEDILPYCRPTFPTSNNPRDPSSSSSMSSRGSGSRQREQANVGRRNIAEMQVLGGYERGEDNNEELEETES

SEQ ID NO: 8982 - protein, 356 aa, Homo sapiens
MHHQWLLLAACFWVIFMFMVASKFITLTFKDPDVYSAKQEFLFLTTMPEVRKLPEEKHIPEELKPTGKELPDSQLVQPLVYMERLELIRNVCRDDALKNLSHTPVSKFVLDRIFVCDKHKILFCQTPKVGNTQWKKVLIVLNGAFSSIEEIPENVVHDHEKNGLPRLSSFSDAEIQKRLKTYFKFFIVRDPFERLISAFKDKFVHNPRFEPWYRHEIAPGIIRKYRRNRTETRGIQFEDFVRYLGDPNHRWLDLQFGDHIIHWVTYVELCAPCEIMYSVIGHHETLEDDAPYILKEAGIDHLVSYPTIPPGITVYNRTKVEHYFLGISKRDIRRLYARFEGDFKLFGYQKPDFLLN

SEQ ID NO: 8983 - protein, 2653 aa, Homo sapiens
MVSPPLLIISVAGTIECKPDHLLWRPGSTSPQSVSFLHGKVVMESLGRPIPPTSSPSLLPSAQLPSSHNPPPVSCQMPLLDSNTSHQIMDTNPDEEFSPNSYLLRACSGPQQASSSGPPNHHSQSTLRPPLPPPHNHTLSHHHSSANSLNRNSLTNRRSQIHAPAPAPNDLATTPESVQLQDSWVLNSNVPLETRHFLFKTSSGSTPLFSSSSPGYPLTSGTVYTPPPRLLPRNTFSRKAFKLKKPSKYCSWKCAALSAIAAALLLAILLAYFIAMHLLGLNWQLQPADGHTFNNGIRTGLPGNDDVATMPSGGKVPWSLKNSSIDSGEAEVGRRVTQEVPPGVFWRSQIHISQPQFLKFNISLGKDALFGVYIRRGLPPSHAQYDFMERLDGKEKWSVVESPRERRSIQTLVQNEAVFVQYLDVGLWHLAFYNDGKDKEMVSFNTVVLDSVQDCPRNCHGNGECVSGVCHCFPGFLGADCAKAACPVLCSGNGQYSKGTCQCYSGWKGAECDVPMNQCIDPSCGGHGSCIDGNCVCSAGYKGEHCEEVDCLDPTCSSHGVCVNGECLCSPGWGGLNCELARVQCPDQCSGHGTYLPDTGLCSCDPNWMGPDCSVEVCSVDCGTHGVCIGGACRCEEGWTGAACDQRVCHPRCIEHGTCKDGKCECREGWNGEHCTIGRQTAGTETDGCPDLCNGNGRCTLGQNSWQCVCQTGWRGPGCNVAMETSCADNKDNEGDGLVDCLDPDCCLQSACQNSLLCRGSRDPLDIIQQGQTDWPAVKSFYDRIKLLAGKDSTHIIPGENPFNSSLVSLIRGQVVTTDGTPLVGVNVSFVKYPKYGYTITRQDGTFDLIANGGASLTLHFERAPFMSQERTVWLPWNSFYAMDTLVMKTEENSIPSCDLSGFVRPDPIIISSPLSTFFSAAPGQNPIVPETQVLHEEIELPGSNVKLRYLSSRTAGYKSLLKITMTQSTVPLNLIRVHLMVAVEGHLFQKSFQASPNLAYTFIWDKTDAYGQRVYGLSDAVVSVGFEYETCPSLILWEKRTALLQGFELDPSNLGGWSLDKHHILNVKSGILHKGTGENQFLTQQPAIITSIMGNGRRRSISCPSCNGLAEGNKLLAPVALAVGIDGSLYVGDFNYIRRIFPSRNVTSILELRNKEFKHSNNPAHKYYLAVDPVSGSLYVSDTNSRRIYRVKSLSGTKDLAGNSEVVAGTGEQCLPFDEARCGDGGKAIDATLMSPRGIAVDKNGLMYFVDATMIRKVDQNGIISTLLGSNDLTAVRPLSCDSSMDVAQVRLEWPTDLAVNPMDNSLYVLENNVILRITENHQVSIIAGRPMHCQVPGIDYSLSKLAIHSALESASAIAISHTGVLYITETDEKKINRLRQVTTNGEICLLAGAASDCDCKNDVNCNCYSGDDAYATDAILNSPSSLAVAPDGTIYIADLGNIRIRAVSKNKPVLNAFNQYEAASPGEQELYVFNADGIHQYTVSLVTGEYLYNFTYSTDNDVTELIDNNGNSLKIRRDSSGMPRHLLMPDNQIITLTVGTNGGLKVVSTQNLELGLMTYDGNTGLLATKSDETGWTTFYDYDHEGRLTNVTRPTGVVTSLHREMEKSITIDIENSNRDDDVTVITNLSSVEASYTVVQDQVRNSYQLCNNGTLRVMYANGMGISFHSEPHVLAGTITPTIGRCNISLPMENGLNSIEWRLRKEQIKGKVTIFGRKLRVHGRNLLSIDYDRNIRTEKIYDDHRKFTLRIIYDQVGRPFLWLPSSGLAAVNVSYFFNGRLAGLQRGAMSERTDIDKQGRIVSRMFADGKVWSYSYLDKSMVLLLQSQRQYIFEYDSSDRLLAVTMPSVARHSMSTHTSIGYIRNIYNPPESNASVIFDYSDDGRILKTSFLGTGRQVFYKYGKLSKLSEIVYDSTAVTFGYDETTGVLKMVNLQSGGFSCTIRYRKIGPLVDKQIYRFSEEGMVNARFDYTYHDNSFRIASIKPVISETPLPVDLYRYDEISGKVEHFGKFGVIYYDINQIITTAVMTLSKHFDTHGRIKEVQYEMFRSLMYWMTVQYDSMGRVIKRELKLGPYANTTKYTYDYDGDGQLQSVAVNDRPTWRYSYDLNGNLHLLNPGNSVRLMPLRYDLRDRITRLGDVQYKIDDDGYLCQRGSDIFEYNSKGLLTRAYNKASGWSVQYRYDGVGRRASYKTNLGHHLQYFYSDLHNPTRITHVYNHSNSEITSLYYDLQGHLFAMESSSGEEYYVASDNTGTPLAVFSINGLMIKQLQYTAYGEIYYDSNPDFQMVIGFHGGLYDPLTKLVHFTQRDYDVLAGRWTSPDYTMWKNVGKEPAPFNLYMFKSNNPLSSELDLKNYVTDVKSWLVMFGFQLSNIIPGFPRAKMYFVPPPYELSESQASENGQLITGVQQTTERHNQAFMALEGQVITKKLHASIREKAGHWFATTTPIIGKGIMFAIKEGRVTTGVSSIASEDSRKVASVLNNAYYLDKMHYSIEGKDTHYFVKIGSADGDLVTLGTTIGRKVLESGVNVTVSQPTLLVNGRTRRFTNIEFQYSTLLLSIRYGLTPDTLDEEKARVLDQARQRALGTAWAKEQQKARDGREGSRLWTEGEKQQLLSTGRVQGYEGYYVLPVEQYPELADSSSNIQFLRQNEMGKR

SEQ ID NO: 8984 - protein, 4655 aa, Homo sapiens
MDRGPAAVACTLLLALVACLAPASGQECDSAHFRCGSGHCIPADWRCDGTKDCSDDADEIGCAVVTCQQGYFKCQSEGQCIPSSWVCDQDQDCDDGSDERQDCSQSTCSSHQITCSNGQCIPSEYRCDHVRDCPDGADENDCQYPTCEQLTCDNGACYNTSQKCDWKVDCRDSSDEINCTEICLHNEFSCGNGECIPRAYVCDHDNDCQDGSDEHACNYPTCGGYQFTCPSGRCIYQNWVCDGEDDCKDNGDEDGCESGPHDVHKCSPREWSCPESGRCISIYKVCDGILDCPGREDENNTSTGKYCSMTLCSALNCQYQCHETPYGGACFCPPGYIINHNDSRTCVEFDDCQIWGICDQKCESRPGRHLCHCEEGYILERGQYCKANDSFGEASIIFSNGRDLLIGDIHGRSFRILVESQNRGVAVGVAFHYHLQRVFWTDTVQNKVFSVDINGLNIQEVLNVSVETPENLAVDWVNNKIYLVETKVNRIDMVNLDGSYRVTLITENLGHPRGIAVDPTVGYLFFSDWESLSGEPKLERAFMDGSNRKDLVKTKLGWPAGVTLDMISKRVYWVDSRFDYIETVTYDGIQRKTVVHGGSLIPHPFGVSLFEGQVFFTDWTKMAVLKANKFTETNPQVYYQASLRPYGVTVYHSLRQPYATNPCKDNNGGCEQVCVLSHRTDNDGLGFRCKCTFGFQLDTDERHCIAVQNFLIFSSQVAIRGIPFTLSTQEDVMVPVSGNPSFFVGIDFDAQDSTIFFSDMSKHMIFKQKIDGTGREILAANRVENVESLAFDWISKNLYWTDSHYKSISVMRLADKTRRTVVQYLNNPRSVVVHPFAGYLFFTDWFRPAKIMRAWSDGSHLLPVINTTLGWPNGLAIDWAASRLYWVDAYFDKIEHSTFDGLDRRRLGHIEQMTHPFGLAIFGEHLFFTDWRLGAIIRVRKADGGEMTVIRSGIAYILHLKSYDVNIQTGSNACNQPTHPNGDCSHFCFPVPNFQRVCGCPYGMRLASNHLTCEGDPTNEPPTEQCGLFSFPCKNGRCVPNYYLCDGVDDCHDNSDEQLCGTLNNTCSSSAFTCGHGECIPAHWRCDKRNDCVDGSDEHNCPTHAPASCLDTQYTCDNHQCISKNWVCDTDNDCGDGSDEKNCNSTETCQPSQFNCPNHRCIDLSFVCDGDKDCVDGSDEVGCVLNCTASQFKCASGDKCIGVTNRCDGVFDCSDNSDEAGCPTRPPGMCHSDEFQCQEDGICIPNFWECDGHPDCLYGSDEHNACVPKTCPSSYFHCDNGNCIHRAWLCDRDNDCGDMSDEKDCPTQPFRCPSWQWQCLGHNICVNLSVVCDGIFDCPNGTDESPLCNGNSCSDFNGGCTHECVQEPFGAKCLCPLGFLLANDSKTCEDIDECDILGSCSQHCYNMRGSFRCSCDTGYMLESDGRTCKVTASESLLLLVASQNKIIADSVTSQVHNIYSLVENGSYIVAVDFDSISGRIFWSDATQGKTWSAFQNGTDRRVVFDSSIILTETIAIDWVGRNLYWTDYALETIEVSKIDGSHRTVLISKNLTNPRGLALDPRMNEHLLFWSDWGHHPRIERASMDGSMRTVIVQDKIFWPCGLTIDYPNRLLYFMDSYLDYMDFCDYNGHHRRQVIASDLIIRHPYALTLFEDSVYWTDRATRRVMRANKWHGGNQSVVMYNIQWPLGIVAVHPSKQPNSVNPCAFSRCSHLCLLSSQGPHFYSCVCPSGWSLSPDLLNCLRDDQPFLITVRQHIIFGISLNPEVKSNDAMVPIAGIQNGLDVEFDDAEQYIYWVENPGEIHRVKTDGTNRTVFASISMVGPSMNLALDWISRNLYSTNPRTQSIEVLTLHGDIRYRKTLIANDGTALGVGFPIGITVDPARGKLYWSDQGTDSGVPAKIASANMDGTSVKTLFTGNLEHLECVTLDIEEQKLYWAVTGRGVIERGNVDGTDRMILVHQLSHPWGIAVHDSFLYYTDEQYEVIERVDKATGANKIVLRDNVPNLRGLQVYHRRNAAESSNGCSNNMNACQQICLPVPGGLFSCACATGFKLNPDNRSCSPYNSFIVVSMLSAIRGFSLELSDHSETMVPVAGQGRNALHVDVDVSSGFIYWCDFSSSVASDNAIRRIKPDGSSLMNIVTHGIGENGVRGIAVDWVAGNLYFTNAFVSETLIEVLRINTTYRRVLLKVTVDMPRHIVVDPKNRYLFWADYGQRPKIERSFLDCTNRTVLVSEGIVTPRGLAVDRSDGYVYWVDDSLDIIARIRINGENSEVIRYGSRYPTPYGITVFENSIIWVDRNLKKIFQASKEPENTEPPTVIRDNINWLRDVTIFDKQVQPRSPAEVNNNPCLENNGGCSHLCFALPGLHTPKCDCAFGTLQSDGKNCAISTENFLIFALSNSLRSLHLDPENHSPPFQTINVERTVMSLDYDSVSDRIYFTQNLASGVGQISYATLSSGIHTPTVIASGIGTADGIAFDWITRRIYYSDYLNQMINSMAEDGSNRTVIARVPKPRAIVLDPCQGYLYWADWDTHAKIERATLGGNFRVPIVNSSLVMPSGLTLDYEEDLLYWVDASLQRIERSTLTGVDREVIVNAAVHAFGLTLYGQYIYWTDLYTQRIYRANKYDGSGQIAMTTNLLSQPRGINTVVKNQKQQCNNPCEQFNGGCSHICAPGPNGAECQCPHEGNWYLANNRKHCIVDNGERCGASSFTCSNGRCISEEWKCDNDNDCGDGSDEMESVCALHTCSPTAFTCANGRCVQYSYRCDYYNDCGDGSDEAGCLFRDCNATTEFMCNNRRCIPREFICNGVDNCHDNNTSDEKNCPDRTCQSGYTKCHNSNICIPRVYLCDGDNDCGDNSDENPTYCTTHTCSSSEFQCASGRCIPQHWYCDQETDCFDASDEPASCGHSERTCLADEFKCDGGRCIPSEWICDGDNDCGDMSDEDKRHQCQNQNCSDSEFLCVNDRPPDRRCIPQSWVCDGDVDCTDGYDENQNCTRRTCSENEFTCGYGLCIPKIFRCDRHNDCGDYSDERGCLYQTCQQNQFTCQNGRCISKTFVCDEDNDCGDGSDELMHLCHTPEPTCPPHEFKCDNGRCIEMMKLCNHLDDCLDNSDEKGCGINECHDPSISGCDHNCTDTLTSFYCSCRPGYKLMSDKRTCVDIDECTEMPFVCSQKCENVIGSYICKCAPGYLREPDGKTCRQNSNIEPYLIFSNRYYLRNLTIDGYFYSLILEGLDNVVALDFDRVEKRLYWIDTQRQVIERMFLNKTNKETIINHRLPAAESLAVDWVSRKLYWLDARLDGLFVSDLNGGHRRMLAQHCVDANNTFCFDNPRGLALHPQYGYLYWADWGHRAYIGRVGMDGTNKSVIISTKLEWPNGITIDYTNDLLYWADAHLGYIEYSDLEGHHRHTVYDGALPHPFAITIFEDTIYWTDWNTRTVEKGNKYDGSNRQTLVNTTHRPFDIHVYHPYRQPIVSNPCGTNNGGCSHLCLIKPGGKGFTCECPDDFRTLQLSGSTYCMPMCSSTQFLCANNEKCIPIWWKCDGQKDCSDGSDELALCPQRFCRLGQFQCSDGNCTSPQTLCNAHQNCPDGSDEDRLLCENHHCDSNEWQCANKRCIPESWQCDTFNDCEDNSDEDSSHCASRTCRPGQFRCANGRCIPQAWKCDVDNDCGDHSDEPIEECMSSAHLCDNFTEFSCKTNYRCIPKWAVCNGVDDCRDNSDEQGCEERTCHPVGDFRCKNHHCIPLRWQCDGQNDCGDNSDEENCAPRECTESEFRCVNQQCIPSRWICDHYNDCGDNSDERDCEMRTCHPEYFQCTSGHCVHSELKCDGSADCLDASDEADCPTRFPDGAYCQATMFECKNHVCIPPYWKCDGDDDCGDGSDEELHLCLDVPCNSPNRFRCDNNRCIYSHEVCNGVDDCGDGTDETEEHCRKPTPKPCTEYEYKCGNGHCIPHDNVCDDADDCGDWSDELGCNKGKERTCAENICEQNCTQLNEGGFICSCTAGFETNVFDRTSCLDINECEQFGTCPQHCRNTKGSYECVCADGFTSMSDRPGKRCAAEGSSPLLLLPDNVRIRKYNLSSERFSEYLQDEEYIQAVDYDWDPKDIGLSVVYYTVRGEGSRFGAIKRAYIPNFESGRNNLVQEVDLKLKYVMQPDGIAVDWVGRHIYWSDVKNKRIEVAKLDGRYRKWLISTDLDQPAAIAVNPKLGLMFWTDWGKEPKIESAWMNGEDRNILVFEDLGWPTGLSIDYLNNDRIYWSDFKEDVIETIKYDGTDRRVIAKEAMNPYSLDIFEDQLYWISKEKGEVWKQNKFGQGKKEKTLVVNPWLTQVRIFHQLRYNKSVPNLCKQICSHLCLLRPGGYSCACPQGSSFIEGSTTECDAAIELPINLPPPCRCMHGGNCYFDETDLPKCKCPSGYTGKYCEMAFSKGISPGTTAVAVLLTILLIVVIGALAIAGFFHYRRTGSLLPALPKLPSLSSLVKPSENGNGVTFRSGADLNMDIGVSGFGPETAIDRSMAMSEDFVMEMGKQPIIFENPMYSARDSAVKVVQPIQVTVSENVDNKNYGSPINPSEIVPETNPTSPAADGTQVTKWNLFKRKSKQTTNFENPIYAQMENEQKESVAATPPPSPSLPAKPKPPSRRDPTPTYSATEDTFKDTANLVKEDSEV

SEQ ID NO: 8985 - protein, 970 aa, Homo sapiens
CFFLCLLRFCFSATRRYYLGAVELSWDYMQSDLGELPVDARFPPRVPKSFPFNTSVVYKKTLFVEFTDHLFNIAKPRPPWMGLLGPTIQAEVYDTVVITLKNMASHPVSLHAVGVSYWKASEGAEYDDQTSQREKEDDKVFPGGSHTYVWQVLKENGPMASDPLCLTYSYLSHVDLVKDLNSGLIGALLVCREGKSWHSETKNSLMQDRDAASARAWPKMHTVNGYVNRSLPGLIGCHRKSVYWHVIGMGTTPEVHSIFLEGHTFLVRNHRQASLEISPITFLTAQTLLMDLGQFLLFCHISSHQHVAKKHPKTWVHYIAAEEEDWDYAPLVLAPDDRSYKSQYLNNGPQRIGRKYKKVRFMAYTDETFKTREAIQHESGILGPLLYGEVGDTLLIIFKNQASRPYNIYPHGITDVRPLYSRRLPKGEIFKYKWTVTVEDGPTKSDPRCLTRYYSSFVNMERDLASGLIGPLLICYKESVDQRGNQIMSDKRNVILFSVFDENRSWYLTENIQRFLPNPAGVQLEDPEFQASNIMHSINGYVFDSLQLSVCLHEVAYWYILSIGAQTDFLSVFFSGYTFKHKMVYEDTLTLFPFSGETVFMSMENPDQEEIDYDDTISVEMKKEDFDIYDEDENQSPRSFQKKTRHYFIAAVERLWDYGMSSSPHVLRNRAQSGSVPQFKKVVFQEFTDGSFTQPLYRGELNEHLGLLGPYIRAEVEDNIMVTFRNQASRPYSFYSSLISYEEDQRQGAEPRKNFVKPNETKTYFWKVQHHMAPTKDEFDCKAWAYFSDVDLEKDVHSGLIGPLLVCHTNTLNPAHGRQVTVQEFALFFTIFDETKSWYFTENMERNCRAPSNIQMEDPTFKENYRFHAINGYIMDTLPGLVMAQDQRIRWYLLSMGSNENIHSIHFSGHVFTVRKKEEYKMALYNLYPGVFETVEMLPSKAGIWRVECLIGEHLHAGMSTLFLVYSNSE

SEQ ID NO: 8986 - protein, 979 aa, Homo sapiens
RRYYLGAVELSWDYMQSDLGELPVDARFPPRVPKSFPFNTSVVYKKTLFVEFTDHLFNIAKPRPPWMGLLGPTIQAEVYDTVVITLKNMASHPVSLHAVGVSYWKASEGAEYDDQTSQREKEDDKVFPGGSHTYVWQVLKENGPMASDPLCLTYSYLSHVDLVKDLNSGLIGALLVCREGKSWHSETKNSLMQDRDAASARAWPKMHTVNGYVNRSLPGLIGCHRKSVYWHVIGMGTTPEVHSIFLEGHTFLVRNHRQASLEISPITFLTAQTLLMDLGQFLLFCHISSHQHDGMEAYVKVDSFAKKHPKTWVHYIAAEEEDWDYAPLVLAPDDRSYKSQYLNNGPQRIGRKYKKVRFMAYTDETFKTREAIQHESGILGPLLYGEVGDTLLIIFKNQASRPYNIYPHGITDVRPLYSRRLPKGVKHLKDFPILPGEIFKYKWTVTVEDGPTKSDPRCLTRYYSSFVNMERDLASGLIGPLLICYKESVDQRGNQIMSDKRNVILFSVFDENRSWYLTENIQRFLPNPAGVQLEDPEFQASNIMHSINGYVFDSLQLSVCLHEVAYWYILSIGAQTDFLSVFFSGYTFKHKMVYEDTLTLFPFSGETVFMSMENPDQEEIDYDDTISVEMKKEDFDIYDEDENQSPRSFQKKTRHYFIAAVERLWDYGMSSSPHVLRNRAQSGSVPQFKKVVFQEFTDGSFTQPLYRGELNEHLGLLGPYIRAEVEDNIMVTFRNQASRPYSFYSSLISYEEDQRQGAEPRKNFVKPNETKTYFWKVQHHMAPTKDEFDCKAWAYFSDVDLEKDVHSGLIGPLLVCHTNTLNPAHGRQVTVQEFALFFTIFDETKSWYFTENMERNCRAPSNIQMEDPTFKENYRFHAINGYIMDTLPGLVMAQDQRIRWYLLSMGSNENIHSIHFSGHVFTVRKKEEYKMALYNLYPGVFETVEMLPSKAGIWRVECLIGEHLHAGMSTLFLVYSNSE

SEQ ID NO: 8987 - protein, 781 aa, Homo sapiens
MWGLVRLLLAWLGGWGCMGRLAAPARAWAGSREHPGPALLRTRRSWVWNQFFVIEEYAGPEPVLIGKLHSDVDRGEGRTKYLLTGEGAGTVFVIDEATGNIHVTKSLDREEKAQYVLLAQAVDRASNRPLEPPSEFIIKVQDINDNPPIFPLGPYHATVPEMSNVGTSVIQVTAHDADDPSYGNSAKLVYTVLDGLPFFSVDPQTGVVRTAIPNMDRETQEEFLVVIQAKDMGGHMGGLSGSTTVTVTLSDVNDNPPKFPQSLYQFSVVETAGPGTLVGRLRAQDPDLGDNALMAYSILDGEGSEAFSISTDLQGRDGLLTVRKPLDFESQRSYSFRVEATNTLIDPAYLRRGPFKDVASVRVAVQDAPEPPAFTQAAYHLTVPENKAPGTLVGQISAADLDSPASPIRYSILPHSDPERCFSIQPEEGTIHTAAPLDREARAWHNLTVLATELDSSAQASRVQVAIQTLDENDNAPQLAEPYDTFVCDSAAPGQLIQVIRALDRDEVGNSSHVSFQGPLGPDANFTVQDNRDGSASLLLPSRPAPPRHAPYLVPIELWDWGQPALSSTATVTVSVCRCQPDGSVASCWPEAHLSAAGLSTGALLAIITCVGALLALVVLFVALRRQKQEALMVLEEEDVRENIITYDDEGGGEEDTEAFDITALQNPDGAAPPAPGPPARRDVLPRARVSRQPRPPGPADVAQLLALRLREADEDPGVPPYDSVQVYGYEGRGSSCGSLSSLGSGSEAGGAPGPAEPLDDWGPLFRTLAELYGAKEPPAP

SEQ ID NO: 8988 - protein, 376 aa, Homo sapiens [sequence omitted]

SEQ ID NO: 8989 - protein, 376 aa, Homo sapiens
MHLLKVGTWRNNTASSWLMKFSVLWLVSQNCCRASVVWMAYMNISFHVGNHVLSELGETGVFGRSSTLKRVAGVIVPPEGKIQNACNPNTIFSRSKYSETWLALIERGGCTFTQKIKVATEKGASGVIIYNVPGTGNQVFPMFHQAFEDVVVVMIGNLKGTEIFHLIKKGVLITAVVEVGRKHIIWMNHYLVSFVIVTTATLAYFIFYHIHRLCLARIQNRRWQRLTTDLQNTFGQLQLRVVKEGDEEINPNGDSCVICFERYKPNDIVRILTCKHFFHKNCIDPWILPHGTCPICKCDILKVLGIQVVVENGTEPLQVLMSNELPETLSPSEEETNNEVSPAGTSDKVIHVEENPTSQNNDIQPHSVVEDVHPSP

SEQ ID NO: 8990 - protein, 160 aa, Homo sapiens
MLPFLFFSTLFSSIFTEAQKQYWVCNSSDASISYTYCDKMQYPISINVNPCIELKGSKGLLHIFYIPRRDLKQLYFNLYITVNTMNLPKRKEVICRGSDDDYSFCRALKGETVNTTISFSFKGIKFSKGKYKCVVEAISGSPEEMLFCLEFVILHQPNSN

SEQ ID NO: 8991 - protein, 788 aa, Homo sapiens [sequence omitted]

SEQ ID NO: 8992 - protein, 2550 aa, Homo sapiens
PGWRKEAATMVALSLKISIGNVVKTMQFEPSTMVYDACRIIRERIPEAPAGPPSDFGLFLSDDDPKKGIWLEAGKALDYYMLRNGDTMEYRKKQRPLKIRMLDGTVKTIMVDDSKTVTDMLMTICARIGITNHDEYSLVRELMEEKKEEITGTLRKDKTLLRDEKKMEKLKQKLHTDDELNWLDHGRTLREQGVEEHETLLLRRKFFYSDQNVDSRDPVQLNLLYVQARDDILNGSHPVSFDKACEFAGFQCQIQFGPHNEQKHKAGFLDLKDFLPKEYVKQKGERKIFQAHKNCGQMSEIEAKVRYVKLARSLKTYGVSFFLVKEKMKGKNKLVPRLLGITKECVMRVDEKTKEVIQEWNLTNIKRWAASPKSFTLDFGDYQDGYYSVQTTEGEQIAQLIAGYIDIILKKKKSKDHFGLEGDEESTMLEDSVSPKKSTVLQQQYNRVGKVEHGSVALPAIMRSGASGPENFQVGSMPPAQQQITSGQMHRGHMPPLTSAQQALTGTINSSMQAVQAAQATLDDFDTLPPLGQDAASKAWRKNKMDESKHEIHSQVDAITAGTASVVNLTAGDPAETDYTAVGCAVTTISSNLTEMSRGVKLLAALLEDEGGSGRPLLQAAKGLAGAVSELLRSAQPASAEPRQNLLQAAGNVGQASGELLQQIGESDTDPHFQDALMQLAKAVASAAAALVLKAKSVAQRTEDSGLQTQVIAAATQCALSTSQLVACTKVVAPTISSPVCQEQLVEAGRLVAKAVEGCVSASQAATEDGQLLRGVGAAATAVTQALNELLQHVKAHATGAGPAGRYDQATDTILTVTENIFSSMGDAGEMVRQARILAQATSDLVNAIKADAEGESDLENSRKLLSAAKILADATAKMVEAAKGAAAHPDSEEQQQRLREAAEGLRMATNAAAQNAIKKKLVQRLEHAAKQAAASATQTIAAAQHAASTPKASAGPQPLLVQSCKAVAEQIPLLVQGVRGSQAQPDSPSAQLALIAASQSFLQPGGKMVAAAKASVPTIQDQASAMQLSQCAKNLGTALAELRTAAQKAQEACGPLEMDSALSVVQNLEKDLQEVKAAARDGKLKPLPGETMEKCTQDLGNSTKAVSSAIAQLLGEVAQGNENYAGIAARDVAGGLRSLAQAARGVAALTSDPAVQAIVLDTASDVLDKASSLIEEAKKAAGHPGDPESQQRLAQVAKAVTQALNRCVSCLPGQRDVDNALRAVGDASKRLLSDSLPPSTGTFQEAQSRLNEAAAGLNQAATELVQASRGTPQDLARASGRFGQDFSTFLEAGVEMAGQAPSQEDRAQVVSNLKGISMSSSKLLLAAKALSTDPAAPNLKSQLAAAARAVTDSINQLITMCTQQAPGQKECDNALRELETVRELLENPVQPINDMSYFGCLDSVMENSKVLGEAMTGISQNAKNGNLPEFGDAISTASKALCGFTEAAAQAAYLVGVSDPNSQAGQQGLVEPTQFARANQAIQMACQSLGEPGCTQAQVLSAATIVAKHTSALCNSCRLASARTTNPTAKRQFVQSAKEVANSTANLVKTIKALDGAFTEENRAQCRAATAPLLEAVDNLSAFASNPEFSSIPAQISPEGRAAMEPIVISAKTMLESAGGLIQTARALAVNPRDPPSWSVLAGHSRTVSDSIKKLITSMRDKAPGQLECETAIAALNSCLRDLDQASLAAVSQQLAPREGISQEALHTQMLTAVQEISHLIEPLANAARAEASQLGHKVSQMAQYFEPLTLAAVGAASKTLSHPQQMALLDQTKTLAESALQLLYTAKEAGGNPKQAAHTQEALEEAVQMMTEAVEDLTTTLNEAASAAGVVGGMVDSITQAINQLDEGPMGEPEGSFVDYQTTMVRTAKAIAVTVQEMVTKSNTSPEELGPLANQLTSDYGRLASEAKPAAVAAENEEIGSHIKHRVQELGHGCAALVTKAGALQCSPSDAYTKKELIECARRVSEKVSHVLAALQAGNRGTQACITAASAVSGIIADLDTTIMFATAGTLNREGTETFADHREGILKTAKVLVEDTKVLVQNAAGSQEKLAQAAQSSVATITRLADVVKLGAASLGAEDPETQVVLINAVKDVAKALGDLISATKAAAGKVGDDPAVWQLKNSAKVMVTNVTSLLKTVKAVEDEATKGTRALEATTEHIRQELAVFCSPEPPAKTSTPEDFIRMTKGITMATAKAVAAGNSCRQEDVIATANLSRRAIADMLRACKEAAYHPEVAPDVRLRALHYGRECANGYLELLDHVLLTLQKPSPELKQQLTGHSKRVAGSVTELIQAAEAMKGTEWVDPEDPTVIAENELLGAAAAIEAAAKKLEQLKPRAKPKEADESLNFEEQILEAAKSIAAATSALVKAASAAQRELVAQGKVGAIPANALDDGQWSQGLISAARMVAAATNNLCEAANAAVQGHASQEKLISSAKQVAASTAQLLVACKVKADQDSEAMKRLQAAGNAVKRASDNLVKAAQKAAAFEEQENETVVVKEKMVGGIAQIIAAQEEMLRKERELEEARKKLAQIRQQQYKFLPSELRDEH

SEQ ID NO: 8993 - protein, 1307 aa, Homo sapiens
MDSLPRLTSVLTLLFSGLWHLGLTATNYNCDDPLASLLSPMAFSSSSDLTGTHSPAQLNWRVGTGGWSPADSNAQQWLQMDLGNRVEITAVATQGRYGSSDWVTSYSLMFSDTGRNWKQYKQEDSIWTFAGNMNADSVVHHKLLHSVRARFVRFVPLEWNPSGKIGMRVEVYGCSYKSDVADFDGRSSLLYRFNQKLMSTLKDVISLKFKSMQGDGVLFHGEGQRGDHITLELQKGRLALHLNLGDSKARLSSSLPSATLGSLLDDQHWHSVLIERVGKQVNFTVDKHTQHFRTKGETDALDIDYELSFGGIPVPGKPGTFLKKNFHGCIENLYYNGVNIIDLAKRRKHQIYTVGNVTFSCSEPQIVPITFVNSSGSYLLLPGTPQIDGLSVSFQFRTWNKDGLLLSTELSEGSGTLLLSLEGGILRLVIQKMTERVAEILTGSNLNDGLWHSVSINARRNRITLTLDDEAAPPAPDSTWVQIYSGNSYYFGGCPDNLTDSQCLNPIKAFQGCMRLIFIDNQPKDLISVQQGSLGNFSDLHIDLCSIKDRCLPNYCEHGGSCSQSWTTFYCNCSDTSYTGATCHNSIYEQSCEVYRHQGNTAGFFYIDSDGSGPLGPLQVYCNITEDKIWTSVQHNNTELTRVRGANPEKPYAMALDYGGSMEQLEAVIDGSEHCEQEVAYHCRRSRLLNTPDGTPFTWWIGRSNERHPYWGGSPPGVQQCECGLDESCLDIQHFCNCDADKDEWTNDTGFLSFKDHLPVTQIVITDTDRSNSEAAWRIGPLRCYGDRRFWNAVSFYTEASYLHFPTFHAEFSADISFFFKTTALSGVFLENLGIKDFIRLEISSPSEITFAIDVGNGPVELVVQSPSLLNDNQWHYVRAERNLKETSLQVDNLPRSTRETSEEGHFRLQLNSQLFVGGTSSRQKGFLGCIRSLHLNGQKMDLEERAKVTSGVRPGCPGHCSSYGSICHNGGKCVEKHNGYLCDCTNSPYEGPFCKKEVSAVFEAGTSVTYMFQEPYPVTKNISLSSSAIYTDSAPSKENIALSFVTTQAPSLLLFINSSSQDFVVVLLCKNGSLQVRYHLNKEETHVFTIDADNFANRRMHHLKINREGRELTIQMDQQLRLSYNFSPEVEFRVIRSLTLGKVTENLGLDSEVAKANAMGFAGCMSSVQYNHIAPLKAALRHATVAPVTVHGTLTESSCGFMVDSDVNAVTTVHSSSDPFGKTDEREPLTNAVRSDSAVIGGVIAVVIFIIFCIIGIMTRFLYQHKQSHRTSQMKEKEYPENLDSSFRNEIDLQNTVSECKREYFI

SEQ ID NO: 8994 - protein, 506 aa, Homo sapiens
YNLSSHAFFLPLLPKSSTIEEEENMSGHKCYPWDLQDRYAQDKSVVNKMQQKYWETKQAFIKATGKKEDEHVVASDADLDAKLELFHSIQRTCLDLSKAIVLYQKRICFLSQEENELGKFLRSQGFQDKTRAGKMMQATGKALCFSSQQRLALRNPLCRFHQEVETFRHRAISDTWLTVNRMEQCRTEYRGALLWMKDVSQELDPDLYKQMEKFRKVQTQVRLAKKNFDKLKMDVCQKVDLLGASRCNLLSHMLATYQTTLLHFWEKTSHTMAAIHESFKGYQPYEFTTLKSLQDPMKKLVEKEEKKKINQQESTDAAVQEPSQLISLEEENQRKESSSFKTEDGKSILSALDKGSTHTACSGPIDELLDMKSEEGACLGPVAGTPEPEGADKDDLLLLSEIFNASSLEEGEFSKEWAAVFGDGQVKEPVPTMALGEPDPKAQTGSGFLPSQLLDQNMKDLQASLQEPAKAASDLTAWFSLFADLDPLSNPDAVGKTDKEHELLNA

SEQ ID NO: 8995 - protein, 462 aa, Homo sapiens
MGTQALQGFLFLLFLPLLQPRGASAGSLHSPGLSECFQVNGADYRGHQNRTGPRGAGRPCLFWDQTQQHSYSSASDPHGRWGLGAHNFCRNPDGDVQPWCYVAETEEGIYWRYCDIPSCHMPGYLGCFVDSGAPPALSGPSGTSTKLTVQVCLRFCRMKGYQLAGVEAGYACFCGSESDLARGRLAPATDCDQICFGHPGQLCGGDGRLGVYEVSVGSCQGNWTAPQGVIYSPDFPDEYGPDRNCSWALGPPGAALELTFRLFELADPRDRLELRDAASGSLLRAFDGARPPPSGPLRLGTAALLLTFRSDARGHAQGFALTYRGLQDAAEDPEAPEGSAQTPAAPLDGANVSCSPRPGAPPAAIGARVFSTVTAVSVLLLLLLGLLRPLRRRSCLLAPGKGPPALGASRGPRRSWAVWYQQPRGVALPCSPGDPQAEGSAAGYRPLSASSQSSLRSLISAL

SEQ ID NO: 8996 - protein, 420 aa, Homo sapiens
MGTQALQGFLFLLFLPLLQPRGASAGSLHSPGLSECFQVNGADYRGHQNRTGPRGAGRPCLFWDQTQQHSYSSASDPHGRWGLGAHNFCRNPDGDVQPWCYVAETEEGIYWRYCDIPSCHMPGYLGCFVDSGAPPALSGPSGTSTKLTVQVCLRFCRMKGYQLAGVEAGYACFCGSESDLARGRLAPATDCDQICFGHPGQLCGGDGRLGVYEVSVGSCQGNWTAPQGVIYSPDFPDEYGPDRNCSWALGPPGAALELTFRLFELADPRDRLELRDAASGSLLRAFDGARPPPSGPLRLGTAALLLTFRSDARGHAQGFALTYRGLQDAAEDPEAPEGSAQTPAAPLDGANVSCSPRPGAPPAAIGGAVCWLREKGPRRWGLPGAPGEAGLCGTNSPEGWPCPAPPGTPRLRVLPRATGL

SEQ ID NO: 8997 - protein, 424 aa, Homo sapiens
MGTQALQGFLFLLFLPLLQPRGASAGSLHSPGLSECFQVNGADYRGHQNRTGPRGAGRPCLFWDQTQQHSYSSASDPHGRWGLGAHNFCRNPDGDVQPWCYVAETEEGIYWRYCDIPSCHMPGYLGCFVDSGAPPALSGPSGTSTKLTVQVCLRFCRMKGYQLAGVEAGYACFCGSESDLARGRLAPATDCDQICFGHPGQLCGGDGRLGVYEVSVGSCQGNWTAPQGVIYSPDFPDEYGPDRNCSWALGPPGAALELTFRLFELADPRDRLELRDAASGSLLRAFDGARPPPSGPLRLGTAALLLTFRSDARGHAQGFALTYRGLQDAAEDPEAPEGSAQTPAAPLDGANVSCSPRPGAPPAAIGARVFSTVTAVSVLLLLLLGLLRPLRRRCGALGQGLRADRWWGAGAPEGNRARKELLGS

SEQ ID NO: 8998 - protein, 399 aa, Homo sapiens
MGTQALQGFLFLLFLPLLQPRGASAGSLHSPGLSECFQVNGADYRGHQNRTGPRGAGRPCLFWDQTQQHSYSSASDPHGRWGLGAHNFCRNPDGDVQPWCYVAETEEGIYWRYCDIPSCHMPGYLGCFVDSGAPPALSGPSGTSTKLTVQVCLRFCRMKGYQLAGVEAGYACFCGSESDLARGRLAPATDCDQICFGHPGQLCGGDGRLGVYEVSVGSCQGNWTAPQGVIYSPDFPDEYGPDRNCSWALGPPGAALELTFRLFELADPRDRLELRDAASGSLLRAFDGARPPPSGPLRLGTAALLLTFRSDARGHAQGFALTYRGLQDAAEDPEAPEGSAQTPAAPLDGANVSCSPRPGAPPAAIGGEAGARDGSESGSRPLAPILTAAVCPQPGSSRR

SEQ ID NO: 8999 - protein, 635 aa, Homo sapiens
MAPPLLLLLLASGAAACPLPCVCQNLSESLSTLCAHRGLLFVPPNVDRRTVELRLADNFIQALGPPDFRNMTGLVDLTLSRNAITRIGARAFGDLESLRSLHLDGNRLVELGTGSLRGPVNLQHLILSGNQLGRIAPGAFDDFLESLEDLDLSYNNLRQVPWAGIGAMPALHTLNLDHNLIDALPPGAFAQLGQLSRLDLTSNRLATLAPDPLFSRGRDAEASPAPLVLSFSGNPLHCNCELLWLRRLARPDDLETCASPPGLAGRYFWAVPEGEFSCEPPLIARHTQRLWVLEGQRATLRCRALGDPAPTMHWVGPDDRLVGNSSRARAFPNGTLEIGVTGAGDAGGYTCIATNPAGEATARVELRVLALPHGGNSSAEGGRPGPSDIAASARTAAEGEGTLESEPAVQVTEVTATSGLVSWGPGRPADPVWMFQIQYNSSEDETLIYRIVPASSHHFLLKHLVPGADYDLCLLALSPAAGPSDLTATRLLGCAHFSTLPASPLCHALQAHVLGGTLTVAVGGVLVAALLVFTVALLVRGRGAGNGRLPLKLSHVQSQTNGGPSPTPKAHPPRSPPPRPQRSCSLDLGDAGCYGYARRLGGAWARRSHSVHGGLLGAGCRGVGGSAERLEESVV

SEQ ID NO: 9000 - protein, 1444 aa, Homo sapiens
MASLAALALSLLLRLQLPPLPGARAQSAPGGCSFDEHYSNCGYSVALGTNGFTWEQINTTEKPMLDQAVPTGSFMMVNSSGRASGQKAHLLLPTLKENDTHCIDFHYYFSSRDRSSPGALNVYVKVNGGPQGNPVWNVSGVVTEGWVKAELAISTFWPHFYQVIFESVSLKGHPGYIAVDEVRVLAHPCRKAPHFLRLQNVEVNVGQNATFQCIAGGKWSQHDKLWLQQWNGRDTALMVTRVVNHRRFSATVSVADTAQRSVSKYRCVIRSDGGSGVSNYAELIVKEPPTPIAPPELLAVGATYLWIKPNANSIIGDGPIILKEVEYRTTTGTWAETHIVDSPNYKLWHLDPDVEYEIRVLLTRPGEGGTGPPGAPLTTRTKCADPVHGPQNVEIVDIRARQLTLQWEPFGYAVTRCHSYNLTVQYQYVFNQQQYEAEEVIQTSSHYTLRGLRPFMTIRLRLLLSNPEGRMESEELVVQTEEDVPGAVPLESIQGGPFEEKIYIQWKPPNETNGVITLYEINYKAVGSLDPSADLSSQRGKVFKLRNETHHLFVGLYPGTTYSFTIKASTAKGFGPPVTTRIATKISAPSMPEYDTDTPLNETDTTITVMLKPAQSRGAPVSVYQLVVKEERLQKSRRAADIIECFSVPVSYRNASSLDSLHYFAAELKPANLPVTQPFTVGDNKTYNGYWNPPLSPLKSYSIYFQALSKANGETKINCVRLATTGASTQNSNTVEPEKQVDNTVKMAGVIAGLLMFIIILLGVMLTIKRRRNAYSYSYYLSQRKLAKKQKETQSGAQREMGPVASADKPTTKLSASRNDEGFSSSSQDVNGFTDGSRGELSQPTLTIQTHPYRTCDPVEMSYPRDQFQLAIRVADLLQHITQMKRGQGYGFKEEYEALPEGQTASWDTAKEDENRNKNRYGNIISYDHSRVRLLVLDGDPHSDYINANYIDGYHRPRHYIATQGPMQETVKDFWRMIWQENSASIVMVTNLVEVGRVKCVRYWPDDTEVYGDIKVTLIETEPLAEYVIRTFTVQKKGYHEIRELRLFHFTSWPDHGVPCYATGLLGFVRQVKFLNPPEAGPIVVHCSAGAGRTGCFIAIDTMLDMAENEGVVDIFNCVRELRAQRVNLVQTEEQYVFVHDAILEACLCGNTAIPVCEFRSLYYNISRLDPQTNSSQIKDEFQTLNIVTPRVRPEDCSIGLLPRNHDKNRSMDVLPLDRCLPFLISVDGESSNYINAALMDSHKQPAAFVVTQHPLPNTVADFWRLVFDYNCSSVVMLNEMDTAQFCMQYWPEKTSGCYGPIQVEFVSADIDEDIIHRIFRICNMARPQDGYRIVQHLQYIGWPAYRDTPPSKRSLLKVVRRLEKWQEQYDGREGRTVVHCLNGGGRSGTFCAICSVCEMIQQQNIIDVFHIVKTLRNNKSNMVETLEQYKFVYEVALEYLSSF

SEQ ID NO: 9001 - protein, 1463 aa, Homo sapiens
MASLAALALSLLLRLQLPPLPGARAQSAPGGCSFDEHYSNCGYSVALGTNGFTWEQINTTEKPMLDQAVPTGSFMMVNSSGRASGQKAHLLLPTLKENDTHCIDFHYYFSSRDRSSPGALNVYVKVNGGPQGNPVWNVSGVVTEGWVKAELAISTFWPHFYQVIFESVSLKGHPGYIAVDEVRVLAHPCRKAPHFLRLQNVEVNVGQNATFQCIAGGKWSQHDKLWLQQWNGRDTALMVTRVVNHRRFSATVSVADTAQRSVSKYRCVIRSDGGSGVSNYAELIVKEPPTPIAPPELLAVGATYLWIKPNANSIIGDGPIILKEVEYRTTTGTWAETHIVDSPNYKLWHLDPDVEYEIRVLLTRPGEGGTGPPGAPLTTRTKCADPVHGPQNVEIVDIRARQLTLQWEPFGYAVTRCHSYNLTVQYQYVFNQQQYEAEEVIQTSSHYTLRGLRPFMTIRLRLLLSNPEGRMESEELVVQTEEDVPGAVPLESIQGGPFEEKIYIQWKPPNETNGVITLYEINYKAVGSLDPSADLSSQRGKVFKLRNETHHLFVGLYPGTTYSFTIKASTAKGFGPPVTTRIATKISAPSMPEYDTDTPLNETDTTITVMLKPAQSRGAPVSVYQLVVKEERLQKSRRAADIIECFSVPVSYRNASSLDSLHYFAAELKPANLPVTQPFTVGDNKTYNGYWNPPLSPLKSYSIYFQALSKANGETKINCVRLATKAPMGSAQVTPGTPLCLLTTGASTQNSNTVEPEKQVDNTVKMAGVIAGLLMFIIILLGVMLTIKRRRNAYSYSYYLSQRKLAKKQKETQSGAQREMGPVASADKPTTKLSASRNDEGFSSSSQDVNGFTDGSRGELSQPTLTIQTHPYRTCDPVEMSYPRDQFQLAIRVADLLQHITQMKRGQGYGFKEEYEALPEGQTASWDTAKEDENRNKNRYGNIISYDHSRVRLLVLDGDPHSDYINANYIDGYHRPRHYIATQGPMQETVKDFWRMIWQENSASIVMVTNLVEVGRVKCVRYWPDDTEVYGDIKVTLIETEPLAEYVIRTFTVQKKGYHEIRELRLFHFTSWPDHGVPCYATGLLGFVRQVKFLNPPEAGPIVVHCSAGAGRTGCFIAIDTMLDMAENEGVVDIFNCVRELRAQRVNLVQTEEQYVFVHDAILEACLCGNTAIPVCEFRSLYYNISRLDPQTNSSQIKDEFQTLNIVTPRVRPEDCSIGLLPRNHDKNRSMDVLPLDRCLPFLISVDGESSNYINAALMDSHKQPAAFVVTQHPLPNTVADFWRLVFDYNCSSVVMLNEMDTAQFCMQYWPEKTSGCYGPIQVEFVSADIDEDIIHRIFRICNMARPQDGYRIVQHLQYIGWPAYRDTPPSKRSLLKVVRRLEKWQEQYDGREGRTVVHCLNGGGRSGTFCAICSVCEMIQQQNIIDVFHIVKTLRNNKSNMVETLEQYKFVYEVALEYLSSF

SEQ ID NO: 9002 - protein, 1444 aa, Homo sapiens
MASLAALALSLLLRLQLPPLPGARAQSAPGGCSFDEHYSNCGYSVALGTNGFTWEQINTTEKPMLDQAVPTGSFMMVNSSGRASGQKAHLLLPTLKENDTHCIDFHYYFSSRDRSSPGALNVYVKVNGGPQGNPVWNVSGVVTEGWVKAELAISTFWPHFYQVIFESVSLKGHPGYIAVDEVRVLAHPCRKAPHFLRLQNVEVNVGQNATFQCIAGGKWSQHDKLWLQQWNGRDTALMVTRVVNHRRFSATVSVADTAQRSVSKYRCVIRSDGGSGVSNYAELIVKEPPTPIAPPELLAVGATYLWIKPNANSIIGDGPIILKEVEYRTTTGTWAETHIVDSPNYKLWHLDPDVEYEIRVLLTRPGEGGTGPPGAPLTTRTKCADPVHGPQNVEIVDIRARQLTLQWEPFGYAVTRCHSYNLTVQYQYVFNQQQYEAEEVIQTSSHYTLRGLRPFMTIRLRLLLSNPEGRMESEELVVQTEEDVPGAVPLESIQGGPFEEKIYIQWKPPNETNGVITLYEINYKAVGSLDPSADLSSQRGKVFKLRNETHHLFVGLYPGTTYSFTIKASTAKGFGPPVTTRIATKISAPSMPEYDTDTPLNETDTTITVMLKPAQSRGAPVSVYQLVVKEERLQKSRRAADIIECFSVPVSYRNASSLDSLHYFAAELKPANLPVTQPFTVGDNKTYNGYWNPPLSPLKSYSIYFQALSKANGETKINCVRLATKGASTQNSNTVEPEKQVDNTVKMAGVIAGLLMFIIILLGVMLTIKRRRNAYSYSYYLSQRKLAKKQKETQSGAQREMGPVASADKPTTKLSASRNDEGFSSSSQDVNGFTDGSRGELSQPTLTIQTHPYRTCDPVEMSYPRDQFQLAIRVADLLQHITQMKRGQGYGFKEEYEALPEGQTASWDTAKEDENRNKNRYGNIISYDHSRVRLLVLDGDPHSDYINANYIDGYHRPRHYIATQGPMQETVKDFWRMIWQENSASIVMVTNLVEVGRVKCVRYWPDDTEVYGDIKVTLIETEPLAEYVIRTFTVQKKGYHEIRELRLFHFTSWPDHGVPCYATGLLGFVRQVKFLNPPEAGPIVVHCSAGAGRTGCFIAIDTMLDMAENEGVVDIFNCVRELRAQRVNLVQTEEQYVFVHDAILEACLCGNTAIPVCEFRSLYYNISRLDPQTNSSQIKDEFQTLNIVTPRVRPEDCSIGLLPRNHDKNRSMDVLPLDRCLPFLISVDGESSNYINAALMDSHKQPAAFVVTQHPLPNTVADFWRLVFDYNCSSVVMLNEMDTAQFCMQYWPEKTSGCYGPIQVEFVSADIDEDIIHRIFRICNMARPQDGYRIVQHLQYIGWPAYRDTPPSKRSLLKVVRRLEKWQEQYDGREGRTVVHCLNGGGRSGTFCAICSVCEMIQQQNIIDVFHIVKTLRNNKSNMVETLEQYKFVYEVALEYLSSF

SEQ ID NO: 9003 - protein, 266 aa, Homo sapiens
MRVTLATIAWMVSFVSNYSHTANILPDIENEDFIKDCVRIHNKFRSEVKPTASDMLYMTWDPALAQIAKAWASNCQFSHNTRLKPPHKLHPNFTSLGENIWTGSVPIFSVSSAITNWYDEIQDYDFKTRICKKVCGHYTQVVWADSYKVGCAVQFCPKVSGFDALSNGAHFICNYGPGGNYPTWPYKRGATCSACPNNDKCLDNLCVNRQRDQVKRYYSVVYPGWPIYPRNRYTSLFLIVNSVILILSVIITILVQHKYPNLVLLD

SEQ ID NO: 9004 - protein, 647 aa, Homo sapiens
MLSGAAGAARRGGAALAPSLTRSLAGTHAGADSCAGADKGSHKETIEERDKRQQRQQRQRQHQGCGAAGSGSDSPTSGPHPVPVLFPLALSLEEQPLPPLPLGRAPGLLAREGQGREALASPSSRGQMPIEIVCKIKFAEEDAKPKEKEAGDEQSLLGAVAPGAAPRDLATFASTSTLHGLGRACGPGPHGLRRTLWALALLTSLAAFLYQAAGLARGYLTRPHLVAMDPAAPAPVAGFPAVTLCNINRFRHSALSDADIFHLANLTGLPPKDRDGHRAAGLRYPEPDMVDILNRTGHQLADMLKSCNFSGHHCSASNFSVVYTRYGKCYTFNADPRSSLPSRAGGMGSGLEIMLDIQQEEYLPIWRETNETSFEAGIRVQIHSQEEPPYIHQLGFGVSPGFQTFVSCQEQRLTYLPQPWGNCRAESELREPELQGYSAYSVSACRLRCEKEAVLQRCHCRMVHMPDSLGGGPEGPCFCPTPCNLTRYGKEISMVRIPNRGSARYLARKYNRNETYIRENFLVLDVFFEALTSEAMEQRAAYGLSALLGDLGGQMGLFIGASILTLLEILDYIYEVSWDRLKRVWRRPKTPLRTSTGGISTLGLQELKEQSPCPSLGRAEGGGVSSLLPNHHHPHGPPGGLFEDFAC

SEQ ID NO: 9005 - protein, 440 aa, Homo sapiens
MEYQILKMSLCLFILLFLTPGILCICPLQCICTERHRHVDCSGRNLSTLPSGLQENIIHLNLSYNHFTDLHNQLTQYTNLRTLDISNNRLESLPAHLPRSLWNMSAANNNIKLLDKSDTAYQWNLKYLDVSKNMLEKVVLIKNTLRSLEVLNLSSNKLWTVPTNMPSKLHIVDLSNNSLTQILPGTLINLTNLTHLYLHNNKFTFIPDQSFDQLFQLQEITLYNNRWSCDHKQNITYLLKWMMETKAHVIGTPCSTQISSLKEHNMYPTPSGFTSSLFTVSGMQTVDTINSLSVVTQPKVTKIPKQYRTKETTFGATLSKDTTFTSTDKAFVPYPEDTSTETINSHEAAAATLTIHLQDGMVTNTSLTSSTKSSPTPMTLSITSGMPNNFSEMPQQSTTLNLWREETTTNVKTPLPSVANAWKVNASFLLLLNVVVMLAV

SEQ ID NO: 9006 - protein, 500 aa, Homo sapiens
MLLTETWMCCYCFLTLPTTWPNDDEVDKVNQYQRLSLENLEKIEIGPEPTLFGKPKFSCMRLHYRYKEASGYFHTLRAVMRNPEEDGKDTLQCIAEMLQITKQAMGSDLPIIEKKLERKSSKPHEDIIGIRSQNQGSLAQGKNFLMSKFSSLNQKVKQTKSNVNIGNLRKLGNFTKPEMKVNFLKPNLKVNLWKSDSSLETMENTGVMDKVQAESDGDMSSDNDSYHSDEFLTNSKSDEDRQLANSLESVGPIDYVLPSCGIIASAPRLGSRSQSLSSTDSSVHAPSEITVAHGSGLGKGQESPLKKSPSAGDVHILTGFAKPMDIYCHRFVQDAQNKVTHLSETRSVSQQASQERNQMTNQVSNETQSESTEQTPSRPSQLDVSLSATGPQFLSVEPAHSVASQKTPTSASSMLELETGLHVTPSPSESSSSRAVSPFAKIRSSMVQVASITQAGLTHGINFAVSKVQKSPPEPEIINQVQQNELKKMFIQCQTRIIQI

SEQ ID NO: 9007 - protein, 349 aa, Homo sapiens
MGPISAPSCRWRIPWQGLLLTASLFTFWNPPTTAQLTIEAVPSNAAEGKEVLLLVHNLPQDPRGYNWYKGETVDANRRIIGYVISNQQITPGPAYSNRETIYPNASLLMRNVTRNDTGSYTLQVIKLNLMSEEVTGQFSVHPETPKPSISSNNSNPVEDKDAVAFTCEPETQNTTYLWWVNGQSLPVSPRLQLSNGNRTLTLLSVTRNDVGPYECEIQNPASANFSDPVTLNVLYGPDAPTISPSDTYYHAGVNLNLSCHAASNPPSQYSWSVNGTFQQYTQKLFIPNITTKNSGSYACHTTNSATGRNRTTVRMITVSDALVQGSSPGLSARATVSIMIGVLARVALI

SEQ ID NO: 9008 - protein, 860 aa, Homo sapiens [sequence omitted]

SEQ ID NO: 9009 - protein, 545 aa, Homo sapiens
MPPFLLLTCLFITGTSVSPVALDPCSAYISLNEPWRNTDHQLDESQGPPLCDNHVNGEWYHFTGMAGDAMPTFCIPENHCGTHAPVWLNGSHPLEGDGIVQRQACASFNGNCCLWNTTVEVKACPGGYYVYRLTKPSVCFHVYCGHFYDICDEDCHGSCSDTSECTCAPGTVLGPDRQTCFDENECEQNNGGCSEICVNLKNSYRCECGVGRVLRSDGKTCEDVEGCHNNNGGCSHSCLGSEKGYQCECPRGLVLSEDNHTCQVPVLCKSNAIEVNIPRELVGGLELFLTNTSCRGVSNGTHVNILFSLKTCGTVVDVVNDKIVASNLVTGLPKQTPGSSGDFIIRTSKLLIPVTCEFPRLYTISEGYVPNLRNSPLEIMSRNHGIFPFTLEIFKDNEFEEPYREALPTLKLRDSLYFGIEPVVHVSGLESLVESCFATPTSKIDEVLKYYLIRDGCVSDDSVKQYTSRDHLAKHFQVPVFKFVGKDHKEVFLHCRVLVCGVLDERSRCAQGCHRRMRRGAGGEDSAGLQGQTLTGGPIRIDWED

SEQ ID NO: 9010 - protein, 532 aa, Homo sapiens
MAPSFTARIQLFLLRALGFLIGLVGRAALVLGGPKFASKTPRPVTEPLLLLSGMQLAKLIRQRKVKCIDVVQAYINRIKDVNPMINGIVKYRFEEAMREAHAVDQKLAEKQEDEATLENKWPFLGVPLTVKEAFQLQGMPNSSGLMNRRDAIAKTDATVVALLKGAGAIPLGITNCSELCMWYESSNKIYGRSNNPYDLQHIVGGSSGGEGCTLAAACSVIGVGSDIGGSIRMPAFFNGIFGHKPSPGVVPNKGQFPLAVGAQELFLCTGPMCRYAEDLAPMLKVMAGPGIKRLKLDTKVHLKDLKFYWMEHDGGSFLMSKVDQDLIMTQKKVVVHLETILGASVQHVKLKKMKYSFQLWIAMMSAKGHDGKEPVKFVDLLGDHGKHVSPLWELIKWCLGLSVYTIPSIGLALLEEKLRYSNEKYQKFKAVEESLRKELVDMLGDDGVFLYPSHPTVAPKHHVPLTRPFNFAYTGVFSALGLPVTQCPLGLNAKGLPLGIQVVAGPFNDHLTLAVAQYLEKTFGGWVCPGKF

SEQ ID NO: 9011 - protein, 533 aa, Homo sapiens
MIHGRSVLHIVASLIILHLSGATKKGTEKQTTSETQKSVQCGTWTKHAEGGIFTSPNYPSKYPPDRECIYIIEAAPRQCIELYFDEKYSIEPSWECKFDHIEVRDGPFGFSPIIGRFCGQQNPPVIKSSGRFLWIKFFADGELESMGFSARYNFTPDPDFKDLGALKPLPACEFEMGGSEGIVESIQIMKEGKATASEAVDCKWYIRAPPRSKIYLRFLDYEMQNSNECKRNFVAVYDGSSSVEDLKAKFCSTVANDVMLRTGLGVIRMWADEGSRNSRFQMLFTSFQEPPCEGNTFFCHSNMCINNTLVCNGLQNCVYPWDENHCKEKRKTSLLDQLTNTSGTVIGVTSCIVIILIIISVIVQIKQPRKKYVQRKSDFDQTVFQEVFEPPHYELCTLRGTGATADFADVADDFENYHKLRRSSSKCIHDHHCGSQLSSTKGSRSNLSTRDASILTEMPTQPGKPLIPPMNRRNILVMKHNYSQDAADACDIDEIEEVPTTSHRLSRHDKAVQRFCLIGSLSKHESEYNTTRV

SEQ ID NO: 9012 - protein, 532 aa, Homo sapiens
MLAEPFPKVVASLIILHLSGATKKGTEKQTTSETQKSVQCGTWTKHAEGGIFTSPNYPSKYPPDRECIYIIEAAPRQCIELYFDEKYSIEPSWECKFDHIEVRDGPFGFSPIIGRFCGQQNPPVIKSSGRFLWIKFFADGELESMGFSARYNFTPDPDFKDLGALKPLPACEFEMGGSEGIVESIQIMKEGKATASEAVDCKWYIRAPPRSKIYLRFLDYEMQNSNECKRNFVAVYDGSSSVEDLKAKFCSTVANDVMLRTGLGVIRMWADEGSRNSRFQMLFTSFQEPPCEGNTFFCHSNMCINNTLVCNGLQNCVYPWDENHCKEKRKTSLLDQLTNTSGTVIGVTSCIVIILIIISVIVQIKQPRKKYVQRKSDFDQTVFQEVFEPPHYELCTLRGTGATADFADVADDFENYHKLRRSSSKCIHDHHCGSQLSSTKGSRSNLSTRDASILTEMPTQPGKPLIPPMNRRNILVMKHNYSQDAADACDIDEIEEVPTTSHRLSRHDKAVQRFCLIGSLSKHESEYNTTRV

SEQ ID NO: 9013 - protein, 378 aa, Homo sapiens
MLLLVTSLLLCELPHPAFLLIPEKSDLRTVAPASSLNVRFDSRTMNLSWDCQENTTFSKCFLTDKKNRVVEPRLSNNECSCTFREICLHEGVTFEVHVNTSQRGFQQKLLYPNSGREGTAAQNFSCFIYNADLMNCTWARGPTAPRDVQYFLYIRNSKRRREIRCPYYIQDSGTHVGCHLDNLSGLTSRNYFLVNGTSREIGIQFFDSLLDTKKIERFNPPSNVTVRCNTTHCLVRWKQPRTYQKLSYLDFQYQLDVHRKNTQPGTENLLINVSGDLENRYNFPSSEPRAKHSVKIRAADVRILNWSSWSEAIEFDDHLGGIHPRGRERLPRRGLDREGNYLRPRGCRNGMDISASATRGNCFLDDAVNLYIIFYVFI

SEQ ID NO: 9014 - protein, 410 aa, Homo sapiens
MLLLVTSLLLCELPHPAFLLIPEKSDLRTVAPASSLNVRFDSRTMNLSWDCQENTTFSKCFLTDKKNRVVEPRLSNNECSCTFREICLHEGVTFEVHVNTSQRGFQQKLLYPNSGREGTAAQNFSCFIYNADLMNCTWARGPTAPRDVQYFLYIRNSKRRREIRCPYYIQDSGTHVGCHLDNLSGLTSRNYFLVNGTSREIGIQFFDSLLDTKKIERFNPPSNVTVRCNTTHCLVRWKQPRTYQKLSYLDFQYQLDVHRKNTQPGTENLLINVSGDLENRYNFPSSEPRAKHSVKIRAADVRILNWSSWSEAIEFGSDDGNLGSVYIYVLLIVGTLVCGIVLGFLFKRFLRIQRLFPPVPQIKDKLNDNHEVEDEMGPQRHHRCGWNLYPTPGPSPGSGSSPRLGSESSL

SEQ ID NO: 9015 - protein, 333 aa, Homo sapiens
MLLLVTSLLLCELPHPAFLLIPEKSDLRTVAPASSLNVRFDSRTMNLSWDCQENTTFSKCFLTDKKNRVVEPRLSNNECSCTFREICLHEGVTFEVHVNTSQRGFQQKLLYPNSGREGTAAQNFSCFIYNADLMNCTWARGPTAPRDVQYFLYIRNSKRRREIRCPYYIQDSGTHVGCHLDNLSGLTSRNYFLVNGTSREIGIQFFDSLLDTKKIERFNPPSNVTVRCNTTHCLVRWKQPRTYQKLSYLDFQYQLDVHRKNTQPGTENLLINVSGDLENRYNFPSSEPRAKHSVKIRAADVRILNWSSWSEAIEFGSLGYSGCSRQFHRSKTN

SEQ ID NO: 9016 - protein, 233 aa, Homo sapiens
MLLLVTSLLLCELPHPAFLLIPEKSDLRTVAPASSLNVRFDSRTMNLSWDCQENTTFSKCFLTDKKNRVVEPRLSNNECSCTFREICLHEGVTFEVHVNTSQRGFQQKLLYPNSGREGTAAQNFSCFIYNADLMNCTWARGPTAPRDVQYFLYIRNSKRRREIRCPYYIQDSGTHVGCHLDNLSGLTSRNYFLVNGTSREIGIQFFDSLLDTKKIGSLGYSGCSRQFHRSKTN

SEQ ID NO: 9017 - protein, 400 aa, Homo sapiens
MLLLVTSLLLCELPHPAFLLIPEKSDLRTVAPASSLNVRFDSRTMNLSWDCQENTTFSKCFLTDKKNRVVEPRLSNNECSCTFREICLHEGVTFEVHVNTSQRGFQQKLLYPNSGREGTAAQNFSCFIYNADLMNCTWARGPTAPRDVQYFLYIRNSKRRREIRCPYYIQDSGTHVGCHLDNLSGLTSRNYFLVNGTSREIGIQFFDSLLDTKKIERFNPPSNVTVRCNTTHCLVRWKQPRTYQKLSYLDFQYQLDVHRKNTQPGTENLLINVSGDLENRYNFPSSEPRAKHSVKIRAADVRILNWSSWSEAIEFGSDDGNLGSVYIYVLLIVGTLVCGIVLGFLFKRFLRIQRLFPPVPQIKDKLNDNHEVEDEIIWEEFTPEEGKGYREEVLTVKEIT

SEQ ID NO: 9018 - protein, 286 aa, Homo sapiens
MLLLVTSLLLCELPHPAFLLIPEKSDLRTVAPASSLNVRFDSRTMNLSWDCQENTTFSKCFLTDKKNRVVEPRLSNNECSCTFREICLHEGVTFEVHVNTSQRGFQQKLLYPNSGREGTAAQNFSCFIYNADLMNCTWARGPTAPRDVQYFLYIRNSKRRREIRCPYYIQDSGTHVGCHLDNLSGLTSRNYFLVNGTSREIGIQFFDSLLDTKKIERFNPPSNVTVRCNTTHCLVRWKQPRTYQKLSYLDFQYQLDVHRKNTQPGTENLLVVLTTGTSALCTFMCS

SEQ ID NO: 9019 - protein, 529 aa, Homo sapiens [sequence omitted]

SEQ ID NO: 9020 - protein, 502 aa, Homo sapiens
MFGTLLLYCFFLATVPALAETGGERQLSPEKSEIWGPGLKADVVLPARYFYIQAVDTSGNKFTSSPGEKVFQVKVSAPEEQFTRVGVQVLDRKDGSFIVRYRMYASYKNLKVEVKFQGQHVAKSPYILKGPVYHENCDCPLQDSAAWLREMNCPETIAQIQRDLAHFPAVDPEKIAVEIPKRFGQRQSLCHYTLKDNKVYIKTHGEHVGFRIFMDAILLSLTRKVKMPDVELFVNLGDWPLEKKKSNSNIHPIFSWCGSTDSKDIVMPTYDLTDSVLETMGRVSLDMMSVQANTGPPWESKNSTAVWRGRDSRKERLELVKLSRKHPELIDAAFTNFFFFKHDENLYGPIVKHISFFDFFKHKYQINIDGTVAAYRLPYLLVGDSVVLKQDSIYYEHFYNELQPWKHYIPVKSNLSDLLEKLKWAKDHDEEAKKIAKAGQEFARNNLMGDDIFCYYFKLFQEYANLQVSEPQIREGMKRVEPQTEDDLFPCTCHRKKTKDEL

SEQ ID NO: 9021 - protein, 532 aa, Homo sapiens
MPLFLILCLLQGSSFALPQKRPHPRWLWEGSLPSRTHLRAMGTLRPSSPLCWREESSFAAPNSLKGSRLVSGEPGGAVTIQCHYAPSSVNRHQRKYWCRLGPPRWICQTIVSTNQYTHHRYRDRVALTDFPQRGLFVVRLSQLSPDDIGCYLCGIGSENNMLFLSMNLTISAGPASTLPTATPAAGELTMRSYGTASPVANRWTPGTTQTLGQGTAWDTVASTPGTSKTTASAEGRRTPGATRPAAPGTGSWAEGSVKAPAPIPESPPSKSRSMSNTTEGVWEGTRSSVTNRARASKDRREMTTTKADRPREDIEGVRIALDAAKKVLGTIGPPALVSETLAWEILPQATPVSKQQSQGSIGETTPAAGMWTLGTPAADVWILGTPAADVWTSMEAASGEGSAAGDLDAATGDRGPQATLSQTPAVGPWGPPGKESSVKRTFPEDESSSRTLAPVSTMLALFMLMALVLLQRKLWRRRTSQEAERVTLIQMTHFLEVNPQADQLPHVERKMLQDDSLPAGASLTAPERNPGP

SEQ ID NO: 9022 - protein, 544 aa, Homo sapiens
MDGEATVKPGEQKVPLWTHGWPPDDPSPSFAAGSSFALPQKRPHPRWLWEGSLPSRTHLRAMGTLRPSSPLCWREESSFAAPNSLKGSRLVSGEPGGAVTIQCHYAPSSVNRHQRKYWCRLGPPRWICQTIVSTNQYTHHRYRDRVALTDFPQRGLFVVRLSQLSPDDIGCYLCGIGSENNMLFLSMNLTISAGPASTLPTATPAAGELTMRSYGTASPVANRWTPGTTQTLGQGTAWDTVASTPGTSKTTASAEGRRTPGATRPAAPGTGSWAEGSVKAPAPIPESPPSKSRSMSNTTEGVWEGTRSSVTNRARASKDRREMTTTKADRPREDIEGVRIALDAAKKVLGTIGPPALVSETLAWEILPQATPVSKQQSQGSIGETTPAAGMWTLGTPAADVWILGTPAADVWTSMEAASGEGSAAGDLDAATGDRGPQATLSQTPAVGPWGPPGKESSVKRATCPGLSTLKEIKVSAVLTQNPHSLLCVSAAQEAERVTLIQMTHFLEVNPQADQLPHVERKMLQDDSLPAGASLTAPERNPGP

SEQ ID NO: 9023 - protein, 530 aa, Homo sapiens
MSLKWMSVFLLMQLSCYFSSGSCGKVLVWPTEYSHWINMKTILEELVQRGHEVIVLTSSASILVNASKSSAIKLEVYPTSLTKNDLEDFFMKMFDRWTYSISKNTFWSYFSQLQELCWEYSDYNIKLCEDAVLNKKLMRKLQESKFDVLLADAVNPCGELLAELLNIPFLYSLRFSVGYTVEKNGGGFLFPPSYVPVVMSELSDQMIFMERIKNMIYMLYFDFWFQAYDLKKWDQFYSEVLGRPTTLFETMGKAEMWLIRTYWDFEFPRPFLPNVDFVGGLHCKPAKPLPKEMEEFVQSSGENGIVVFSLGSMISNMSEESANMIASALAQIPQKVLWRFDGKKPNTLGSNTRLYKWLPQNDLLGHPKTKAFITHGGTNGIYEAIYHGIPMVGIPLFADQHDNIAHMKAKGAALSVDIRTMSSRDLLNALKSVINDPIYKENIMKLSRIHHDQPVKPLDRAVFWIEFVMRHKGAKHLRVAAHNLTWIQYHSLDVIAFLLACVATMIFMITKCCLFCFRKLAKTGKKKKRD

SEQ ID NO: 9024 - protein, 530 aa, Homo sapiens
MSLKWTSVFLLIQLSCYFSSGSCGKVLVWPTEYSHWINMKTILEELVQRGHEVTVLTSSASTLVNASKSSAIKLEVYPTSLTKNDLEDSLLKILDRWIYGVSKNTFWSYFSQLQELCWEYYDYSNKLCKDAVLNKKLMMKLQESKFDVILADALNPCGELLAELFNIPFLYSLRFSVGYTFEKNGGGFLFPPSYVPVVMSELSDQMIFMERIKNMIHMLYFDFWFQIYDLKKWDQFYSEVLGRPTTLFETMGKAEMWLIRTYWDFEFPRPFLPNVDFVGGLHCKPAKPLPKEMEEFVQSSGENGIVVFSLGSMISNMSEESANMIASALAQIPQKVLWRFDGKKPNTLGSNTRLYKWLPQNDLLGHPKTKAFITHGGTNGIYEAIYHGIPMVGIPLFADQHDNIAHMKAKGAALSVDIRTMSSRDLLNALKSVINDPVYKENVMKLSRIHHDQPMKPLDRAVFWIEFVMRHKGAKHLRVAAHNLTWIQYHSLDVIAFLLACVATVIFIITKFCLFCFRKLAKTGKKKKRD

SEQ ID NO: 9025 - protein, 976 aa, Homo sapiens
MDLNSASTVVLQVLTQATSQDTAVLKPAEEQLKQWETQPGFYSVLLNIFTNHTLDINVRWLAVLYFKHGIDRYWRRVAPHALSEEEKTTLRAGLITNFNEPINQIATQIAVLIAKVARLDCPRQWPELIPTLIESVKVQDDLRQHRALLTFYHVTKTLASKRLAADRKLFYDLASGIYNFACSLWNHHTDTFLQEVSSGNEAAILSSLERTLLSLKVLRKLTVNGFVEPHKNMEVMGFLHGIFERLKQFLECSRSIGTDNVCRDRLEKTIILFTKVLLDFLDQHPFSFTPLIQRSLEFSVSYVFTEVGEGVTFERFIVQCMNLIKMIVKNYAYKPSKNFEDSSPETLEAHKIKMAFFTYPTLTEICRRLVSHYFLLTEEELTMWEEDPEGFTVEETGGDSWKYSLRPCTEVLFIDIFHEYNQTLTPVLLEMMQTLQGPTNVEDMNALLIKDAVYNAVGLAAYELFDSVDFDQWFKNQLLPELQVIHNRQYKPLRRRVIWLIGQWISVKFKSDLRPMLYEAICNLLQDQDLVVCFLIFLNCSSPVDDFEFRTDQFLPYLETMFTLLFQLLQQVTECDTKMHVLHVLSCVIERVNMQIRPYVGCLVQYLPLLWKQSEEHNMLRCAILTTLIHLVQGLGADSKNLYPFLLPVIQLSTDVSQPPHVYLLEDGLELWLVTLENSPCITPELLRIFQNMSPLLELSSENLRTCFKIINGYIFLSSTEFLQTYAVGLCQSFCELLKEITTEGQVQVLKVVENALKVNPILGPQMFQPILPYVFKGIIEGERYPVVMSTYLGVMGRVLLQNTSFFSSLLNEMAHKFNQEMDQLLGNMIEMWVDRMDNITQPERRKLSALALLSLLPSDNSVIQDKFCGIINISVEGLHDVMTEDPETGTYKDCMLMSHLEEPKVTEDEEPPTEQDKRKKMLALKDPVHTVSLQQFIYEKLKAQQEMLGEQGFQSLMETVDTEIVTQLQEFLQGF

SEQ ID NO: 9026 - protein, 1342 aa, Homo sapiens
MRANDALQVLGLLFSLARGSEVGNSQAVCPGTLNGLSVTGDAENQYQTLYKLYERCEVVMGNLEIVLTGHNADLSFLQWIREVTGYVLVAMNEFSTLPLPNLRVVRGTQVYDGKFAIFVMLNYNTNSSHALRQLRLTQLTEILSGGVYIEKNDKLCHMDTIDWRDIVRDRDAEIVVKDNGRSCPPCHEVCKGRCWGPGSEDCQTLTKTICAPQCNGHCFGPNPNQCCHDECAGGCSGPQDTDCFACRHFNDSGACVPRCPQPLVYNKLTFQLEPNPHTKYQYGGVCVASCPHNFVVDQTSCVRACPPDKMEVDKNGLKMCEPCGGLCPKACEGTGSGSRFQTVDSSNIDGFVNCTKILGNLDFLITGLNGDPWHKIPALDPEKLNVFRTVREITGYLNIQSWPPHMHNFSVFSNLTTIGGRSLYNRGFSLLIMKNLNVTSLGFRSLKEISAGRIYISANRQLCYHHSLNWTKVLRGPTEERLDIKHNRPRRDCVAEGKVCDPLCSSGGCWGPGPGQCLSCRNYSRGGVCVTHCNFLNGEPREFAHEAECFSCHPECQPMEGTATCNGSGSDTCAQCAHFRDGPHCVSSCPHGVLGAKGPIYKYPDVQNECRPCHENCTQGCKGPELQDCLGQTLVLIGKTHLTMALTVIAGLVVIFMMLGGTFLYWRGRRIQNKRAMRRYLERGESIEPLDPSEKANKVLARIFKETELRKLKVLGSGVFGTVHKGVWIPEGESIKIPVCIKVIEDKSGRQSFQAVTDHMLAIGSLDHAHIVRLLGLCPGSSLQLVTQYLPLGSLLDHVRQHRGALGPQLLLNWGVQIAKGMYYLEEHGMVHRNLAARNVLLKSPSQVQVADFGVADLLPPDDKQLLYSEAKTPIKWMALESIHFGKYTHQSDVWSYGVTVWELMTFGAEPYAGLRLAEVPDLLEKGERLAQPQICTIDVYMVMVKCWMIDENIRPTFKELANEFTRMARDPPRYLVIKRESGPGIAPGPEPHGLTNKKLEEVELEPELDLDLDLEAEEDNLATTTLGSALSLPVGTLNRPRGSQSLLSPSSGYMPMNQGNLGESCQESAVSGSSERCPRPVSLHPMPRGCLASESSEGHVTGSEAELQEKVSMCRSRSRSRSPRPRGDSAYHSQRHSLLTPVTPLSPPGLEEEDVNGYVMPDTHLKGTPSSREGTLSSVGLSSVLGTEEEDEDEEYEYMNRRRRHSPPHPPRPSSLEELGYEYMDVGSDLSASLGSTQSCPLHPVPIMPTAGTTPDEDYEYMNRQRDGGGPGGDYAAMGACPASEQGYEEMRAFQGPGHQAPHVHYARLKTLRSLEATDSAFDNPDYWHSRLFPKANAQRT

SEQ ID NO: 9027 - protein, 521 aa, Homo sapiens
VSLPFSFFSSFLFFIYIFWHCFADVGMRVGAEYQARIPEFDPGATKYTDKDNGGMLVWSPYHSIPDAKLDEYIAIAKEKHGYNVEQALGMLFWHKHNIEKSLADLPNFTPFPDEWTVEDKVLFEQAFSFHGKSFHRIQQMLPDKTIASLVKYYYSWKKTRSRTSLMDRQARKLANRHNQGDSDDDVEETHPMDGNDSDYDPKKEAKKEGNTEQPVQTSKIGLGRREYQSLQHRHHSQRSKCRPPKGMYLTQEDVVAVSCSPNAANTILRQLDMELISLKRQVQNAKQVNSALKQKMEGGIEEFKPPESNQKINARWTTEEQLLAVQGVRKYGKDFQAIADVIGNKTVGQVKNFFVNYRRRFNLEEVLQEWEAEQGTQASNGDASTLGEETKSASNVPSGKSTDEEEEAQTPQAPRTLGPSPPAPSSTPTPTAPIATLNQPPPLLRPTLPAAPALHRQPPPLQQQARFIQPRPTLNQPPPPLIRPANSMPPRLNPRPVLSTVGGQQPPSLIGIQTDSQSSLH

SEQ ID NO: 9028 - protein, 437 aa, Homo sapiens
MPGMMEKGPELLGKNRSANGSAKSPAGGGGSGASSTNGGLHYSEPESGCSSDDEHGDVGMRVGAEYQARIPEFDPGATKYTDKDNGGMLVWSPYHSIPDAKLDEYIAIAKEKHGYNVEQALGMLFWHKHNIEKSLADLPNFTPFPDEWTVEDKVLFEQAFSFHGKSFHRIQQMLPDKTIASLVKYYYSWKKTRSRTSLMDRQARKLANRHNQGDSDDDVEETHPMDGNDSDYDPKKEAKKEGNTEQPVQTSKIGLGRREYQSLQHRHHSQRSKCRPPKGMYLTQEDVVAVSCSPNAANTILRQLDMELISLKRQVQNAKQVNSALKQKMEGGIEEFKPPESNQKINARWTTEEQLLAVQGTDPTGSSDTGSITSCPIIHSNTNSPYCHSEPASTTSSSNTACCPGSSPAASSTPAAGSVHPAPANFKSASTTSYSPC

SEQ ID NO: 9029 - protein, 1049 aa, Homo sapiens
MDWSFFRVVAVLFIFLVVVEVNSEFRIQVRDYNTKNGTIKWHSIRRQKREWIKFAAACREGEDNSKRNPIAKIHSDCAANQQVTYRISGVGIDQPPYGIFVINQKTGEINITSIVDREVTPFFIIYCRALNSMGQDLERPLELRVRVLDINDNPPVFSMATFAGQIEENSNANTLVMILNATDADEPNNLNSKIAFKIIRQEPSDSPMFIINRNTGEIRTMNNFLDREQYGQYALAVRGSDRDGGADGMSAECECNIKILDVNDNIPYMEQSSYTIEIQENTLNSNLLEIRVIDLDEEFSANWMAVIFFISGNEGNWFEIEMNERTNVGILKVVKPLDYEAMQSLQLSIGVRNKAEFHHSIMSQYKLKASAISVTVLNVIEGPVFRPGSKTYVVTGNMGSNDKVGDFVATDLDTGRPSTTVRYVMGNNPADLLAVDSRTGKLTLKNKVTKEQYNMLGGKYQGTILSIDDNLQRTCTGTININIQSFGNDDRTNTEPNTKITTNTGRQESTSSTNYDTSTTSTDSSQVYSSEPGNGAKDLLSDNVHFGPAGIGLLIMGFLVLGLVPFLMICCDCGGAPRSAAGFEPVPECSDGAIHSWAVEGPQPEPRDITTVIPQIPPDNANIIECIDNSGVYTNEYGGREMQDLGGGERMTGFELTEGVKTSGMPEICQEYSGTLRRNSMRECREGGLNMNFMESYFCQKAYAYADEDEGRPSNDCLLIYDIEGVGSPAGSVGCCSFIGEDLDDSFLDTLGPKFKKLADISLGKESYPDLDPSWPPQSTEPVCLPQETEPVVSGHPPISPHFGTTTVISESTYPSGPGVLHPKPILDPLGYGNVTVTESYTTSDTLKPSVHVHDNRPASNVVVTERVVGPISGADLHGMLEMPDLRDGSNVIVTERVIAPSSSLPTSLTIHHPRESSNVVVTERVIQPTSGMIGSLSMHPELANAHNVIVTERVVSGAGVTGISGTTGISGGIGSSGLVGTSMGAGSGALSGAGISGGGIGLSSLGGTASIGHMRSSSDHHFNQTIGSASPSTARSRITKYSTVQYSK

SEQ ID NO: 9030 - protein, 358 aa, Homo sapiens
MAPQNLSTFCLLLLYLIGAVIAGRDFYKILGVPRSASIKDIKKAYRKLALQLHPDRNPDDPQAQEKFQDLGAAYEVLSDSEKRKQYDTYGEEGLKDGHQSSHGDIFSHFFGDFGFMFGGTPRQQDRNIPRGSDIIVDLEVTLEEVYAGNFVEVVRNKPVARQAPGKRKCNCRQEMRTTQLGPGRFQMTQEVVCDECPNVKLVNEERTLEVEIEPGVRDGMEYPFIGEGEPHVDGEPGDLRFRIKVVKHPIFERRGDDLYTNVTISLVESLVGFEMDITHLDGHKVHISRDKITRPGAKLWKKGEGLPNFDNNNIKGSLIITFDVDFPKEQLTEEAREGIKQLLKQGSVQKVYNGLQGY

SEQ ID NO: 9031 - protein, 530 aa, Homo sapiens
MTSSLQRPWRVPWLPWTILLVSTAAASQNQERLCAFKDPYQQDLGIGESRISHENGTILCSKGSTCYGLWEKSKGDINLVKQGCWSHIGDPQECHYEECVVTTTPPSIQNGTYRFCCCSTDLCNVNFTENFPPPDTTPLSPPHSFNRDETIIIALASVSVLAVLIVALCFGYRMLTGDRKQGLHSMNMMEAAASEPSLDLDNLKLLELIGRGRYGAVYKGSLDERPVAVKVFSFANRQNFINEKNIYRVPLMEHDNIARFIVGDERVTADGRMEYLLVMEYYPNGSLCKYLSLHTSDWVSSCRLAHSVTRGLAYLHTELPRGDHYKPAISHRDLNSRNVLVKNDGTCVISDFGLSMRLTGNRLVRPGEEDNAAISEVGTIRYMAPEVLEGAVNLRDCESALKQVDMYALGLIYWEIFMRCTDLFPGESVPEYQMAFQTEVGNHPTFEDMQVLVSREKQRPKFPEAWKENSLAVRSLKETIEDCWDQDAEARLTAQCAEERMAELMMIWERNKSVSPTVNPMSTAMQNERR

SEQ ID NO: 9032 - protein, 431 aa, Homo sapiens
MMLRFSMCRGNDEGFAMEQIWLLLLLTIRVLPGSAQFNGYNCDANLHSRFPAERDISVYCGVQAITMKINFCTVLFSGYSETDLALNGRHGDSHCRGFINNNTFPAVVIFIINLSTLEGCGNNLVVSTIPGVSAYGNATSVQVGNISGYIDTPDPPTIISYLPGLLYKFSCSYPLEYLVNNTQLASSSAAISVRENNGTFVSTLNLLLYNDSTYNQQLIIPSIGLPLKTKVFAAVQATNLDGRWNVLMDYCYTTPSGNPNDDIRYDLFLSCDKDPQTTVIENGRSQRGRFSFEVFRFVKHKNQKMSTVFLHCVTKLCRADDCPFLMPICSHRERRDAGRRTTWSPQSSSGSAVLSAGPIITRSDETPTNNSQLGSPSMPPFQLNAITSALISGMVILGVTSFSLLLCSLALLHRKGPTSLVLNGIRNPVFD

SEQ ID NO: 9033 - protein, 498 aa, Homo sapiens
PVPGRLGPLLCLLLPASCAWSGVAGEEELQVIQPEKSVSVAAGESAALQCTVTSLNPVGPIQRFRGAGPGRKLIYHQKEGHFPRVTTVSDLTKRTNMDFSICISNITPADAGTYYCVKFQKGSPDVELKSGAGTELSVRAKPSAPVVSGPAARATPDHTVSFTCESHGFSPRDISLKWFKNGNQLSDFQTNVDPARESVSYSIHSTANVVLTRGDIHSQVICEVAHVTLRGDSFRGTANLSETIQVPPTLEVTQQPMRAENQVNITCQVTKFYPQRLQLTWLENGNVSRTETASTLTENKDGTYNWMSWLLVNVSAHRDDVKLTCQVEHDGQSAVSKSHDLKVSAHLKEQSSNTAAENTGPNEQNIYIVVGVVCTLLVALLMEALYLVRIRQKKAQGSTSSTRLHEPEKNARKITQDTNDITYADLNLPKGKKPAPRAAEPNNHTEYASIQTSLQPASEDTLTYADLDMVHLNRTPKQLAPKPELSFSEYASIQVPRK

SEQ ID NO: 9034 - protein, 1505 aa, Homo sapiens
MWVAKWLTGLLYHLSLFITRSWEVDFHPRQEALVRTLTSYEVVIPERVNEFGEVFPQSHHFSRQKRSSEALEPMPFRTHYRFTAYGQLFQLNLTADASFLAAGYTEVHLGTPERGAWESDAGPSDLRHCFYRGQVNSQEDYKAVVSLCGGLTGTFKGQNGEYFLEPIMKADGNEYEDGHNKPHLIYRQDLNNSFLQTLKYCSVSESQIKETSLPFHTYSNMNEDLNVMKERVLGHTSKNVPLKDERRHSRKKRLISYPRYIEIMVTADAKVVSAHGSNLQNYILTLMSIVATIYKDPSIGNLIHIVVVKLVMIHREEEGPVINFDGATTLKNFCSWQQTQNDLDDVHPSHHDTAVLITREDICSSKEKCNTLGLSYLGTICDPLQSCFINEEKGLISAFTIAHELGHTLGVQHDDNPRCKEMKVTKYHVMAPALSFHMSPWSWSNCSRKYVTEFLDTGYGECLLDKPDEEIYNLPSELPGSRYDGNKQCELAFGPGSQMCPHINICMHLWCTSTEKLHKGCFTQHVPPADGTDCGPGMHCRHGLCVNKETETRPVNGEWGPWEPYSSCSRTCGGGIESATRRCNRPEPRNGGNYCVGRRMKFRSCNTDSCPKGTQDFREKQCSDFNGKHLDISGIPSNVRWLPRYSGIGTKDRCKLYCQVAGTNYFYLLKDMVEDGTPCGTESYNIDCNCVLKAAGCDHVLNSSAKIDKCGVCGGDNSSCKTITGVFNSSHYGYNVVVKIPAGATNVDIRQYSYSGQPDDSYLALSDAEGNFLFNGNFLLSTSKKEINVQGTRTVIEYSGSNNAVERINSTNRQEKELILQVLCVGNLYNPDVHYSFNIPLEERSDMFTWDPYGPWEGCTKMCQGLQRRNITCIHKSDHSVVSDKECDHLPLPSFVTQSCNTDCELRGMLLAKKSECSSQCGQGYRTLDIHCMKYSIHEGQTVQVDDHYCGDQLKPPTQELCHGNCVFTRWHYSEWSQCSRSCGGGERSRESYCMNNFGHRLADNECQELSRVTRENCNEFSCPSWAASEWSECLVTCGKGTKQRQVWCQLNVDHLSDGFCNSSTKPESLSPCELHTCASWQVGPWGPCTTTCGHGYQMRDVKCVNELASAVLEDTECHEASRPSDRQSCVLTPCSFISKLETALLPTVLIKKMAQWRHGSWTPCSVSCGRGTQARYVSCRDALDRIADESYCAHLPRPAEIWDCFTPCGEWQAGDWSPCSASCGHGKTTRQVLCMNYHQPIDENYCDPEVRPLMEQECSLAACPPAHSHFPSSPVQPSYYLSTNLPLTQKLEDNENQVVHPSVRGNQWRTGPWGSCSSSCSGGLQHTAVVCQDENGQSASYCDAASKPPELQQCGPGPCPQWNYGNWGECSQTCGGGIKSRLVICQFPNGQILEDHNCEIVNKPPSVIQCHMHACPADVSWHQEPWTSEDLKVKLLPQRTIILWELMKNIFCHGKHSHMYLINVVTDHLLYPRHCDPETIETYFLSLWSLQFTWGDLKYYKNSL

SEQ ID NO: 9035 - protein, 1911 aa, Homo sapiens [sequence omitted]

SEQ ID NO: 9036 - protein, 454 aa, Homo sapiens
MLRILCLALCSLLTGTRADPGALLRLGMDIMNREVQSAMDESHILEKMAAEAGKKQPGMKPIKGITNLKVKDVQLPVITLNFVPGVGIFQCVSTGMTVTGKSFMGGNMEIIVALNITATNRLLRDEETGLPVFKSEGCEVILVNVKTNLPSNMLPKMVNKFLDSTLHKVLPGLMCPAIDAVLVYVNRKWTNLSDPMPVGQMGTVKYVLMSAPATTASYIQLDFSPVVQQQKGKTIKLADAGEALTFPEGYAKGSSQLLLPATFLSAELALLQKSFHVNIQDTMIGELPPQTTKTLARFIPEVAVAYPKSKPLTTQIKIKKPPKVTMKTGKSLLHLHSTLEMFAARWRSKAPMSLFLLEVHFNLKVQYSVHENQLQMATSLDRLLSLSRKSSSIGNFNERELTGFITSYLEEAYIPVVNDVLQVGLPLPDFLAMNYNLAELDIVENALMLDLKLG

SEQ ID NO: 9037 - protein, 484 aa, Homo sapiens
MAGPWTFTLLCGLLAATLIQATLSPTAVLILGPKVIKEKLTQELKDHNATSILQQLPLLSAMREKPAGGIPVLGSLVNTVLKHIIWLKVITANILQLQVKPSANDQELLVKIPLDMVAGFNTPLVKTIVEFHMTTEAQATIRMDTSASGPTRLVLSDCATSHGSLRIQLLHKLSFLVNALAKQVMNLLVPSLPNLVKNQLCPVIEASFNGMYADLLQLVKVPISLSIDRLEFDLLYPAIKGDTIQLYLGAKLLDSQGKVTKWFNNSAASLTMPTLDNIPFSLIVSQDVVKAAVAAVLSPEEFMVLLDSVLPESAHRLKSSIGLINEKAADKLGSTQIVKILTQDTPEFFIDQGHAKVAQLIVLEVFPSSEALRPLFTLGIEASSEAQFYTKGDQLILNLNNISSDRIQLMNSGIGWFQPDVLKNIITEIIHSILLPNQNGKLRSGVPVSLVKALGFEAAESSLTKDALVLTPASLWKPSSPVSQ

SEQ ID NO: 9038 - protein, 352 aa, Homo sapiens
MAGTICFIMWVLFITDTVWSRSVRQVYEVHDSDDWTIHDFECPMECFCPPSFPTALYCENRGLKEIPAIPSRIWYLYLQNNLIETIPEKPFENATQLRWINLNKNKITNYGIEKGALSQLKKLLFLFLEDNELEEVPSPLPRSLEQLQLARNKVSRIPQGTFSNLENLTLLDLQNNKLVDNAFQRDTFKGLKNLMQLNMAKNALRNMPPRLPANTMQLFLDNNSIEGIPENYFNVIPKVAFLRLNHNKLSDEGLPSRGFDVSSILDLQLSHNQLTKVPRISAHLQHLHLDHNKIKSVNVSVICPSPSMLPAERDSFSYGPHLRYLRLDGNEIKPPIPMALMTCFRLLQAVII

SEQ ID NO: 9039 - protein, 325 aa, Homo sapiens
MDMWTALLILQALLLPSLADGATPALRFVAVGDWGGVPNAPFHTAREMANAKEIARTVQILGADFILSLGDNFYFTGVQDINDKRFQETFEDVFSDRSLRKVPWYVLAGNHDHLGNVSAQIAYSKISKRWNFPSPFYRLHFKIPQTNVSVAIFMLDTVTLCGNSDDFLSQQPERPRDVKLARTQLSWLKKQLAAAREDYVLVAGHYPVWSIAEHGPTHCLVKQLRPLLATYGVTAYLCGHDHNLQYLQDENGVGYVLSGAGNFMDPSKRHQRKVPNGYLRFHYGTEDSLGGFAYVEISSKEMTVTYIEASGKSLFKTRLPRRARP

SEQ ID NO: 9040 - protein, 766 aa, Homo sapiens
MGRRRLLVWLCAVAALLSGAQARGTPLLARPAPPGASRYSLYTTGWRPRLRPGPHKALCAYVVHRNVTCILQEGAESYVKAEYRQCRWGPKCPGTVTYRTVLRPKYKVGYKTVTDLAWRCCPGFTGKRCPEHLTDHGAASPQLEPEPQIPSGQLDPGPRPPSYSRAAPSPHGRKGPGLFGERLERLEGDVQRLAQTYGTLSGLVASHEDPNRMTGGPRAPAVPVGFGVIPEGLVGPGDRARGPLTPPLDEILSKVTEVSNTLQTKVQLLDKVHGLALGHEAHLQRLREAPPSPLTSLALLEEYVDRRLHRLWGSLLDGFEQKLQGVQSECDLRVQEVRRQCEEGQAASRRLHQSLDGRELALRQELSQLGSQLQGLSVSGRGSCCGQLALINARMDGLERALQAVTETQRGPGAPAGDELTRLSAAMLEGGVDGLLEGLETLNGTEGGARGCCLRLDMGGWGVGGFGTMLEERVQSLEERLATLAGELSHDSASPGRSARPLVQTELAVLEQRLVSLETSCTPSTTSAILDSLVAEVKAWQSRSEALLRQVASHAALLQQLNGTVAEVQGQLAEGTGSSLQGEITLLKVNLNSVSKSLTGLSDSVSQYSDAFLAANTSLDERERKVEAEVQAIQEQVSSQGSRLQAGHRQVLNLRGELEQLKAGVAKVASGLSRCQDTAQKLQHTVGHFDQRVAQVEGACRRLGLLAAGLDSLPTEPLRPREGLWSHVDQLNRTLAQHTQDIARLRDDLLDCQAQLAEQVRPGQAN

SEQ ID NO: 9041 - protein, 123 aa, Homo sapiens
MSLSFLLLLFFSHLILSAWAHGEKRLAPKGQPGPAATDRNPRGSSSRQSSSSAMSSSSASSSPAASLGSQGSGLEQSSFQWSPSGRRTGSLYCRVGIGFHLQIYPDGKVNGSHEANMLSQVHR

SEQ ID NO: 9042 - protein, 815 aa, Homo sapiens
MFRLGLLVCFYNDLELLDATVAQVLLYQMIKCSHLRGFQAGVQKLKAELLDIAMENQTLNETLGSLSDAVVGLTYSQLESLSPEAVHGAISTLNQVSGWAKSQVIILSAKYLAHEKVLSFYNVSQMGALLAGVSTQAFCSMKRKDISQVLRSAVSQYVSDLSPAQQQGILSKMVQAEDTAPGIVEIQGAFFKEVSLFDLRRQPGFNSTVLKDKELGRSQALFLYELLLKTTRRPEELLSAGQLVKGVTCSHIDAMSTDFFLAHFQDFQNNFALLSPYQVNCLAWKYWEVSRLSMPPFLLAALPARYLASVPASQCVPFLISLGKSWLDSLVLDSHKKTSVLRKVQQCLDDSIADEYTVDIMGNLLCHLPAAIIDRGISPRAWATALHGLRDCPDLNPEQKAAVRLKLLGQYGLPQHWTAETTKDLGPFLVLFSGDELSSIATKFPEILLQAASKMARTLPTKEFLWAVFQSVRNSSDKIPSYDPMPGCHGVVAPSSDDIFKLAEANACWALEDLRCMEEDTFIRTVELLGAVQGFSRPQLMTLKEKAIQVWDMPSYWREHHIVSLGRIALALNESELEQLDLSSIDTVASLSWQTEWTPGQAESILQGYLDDSGYSIQDLKSFHLVGLGATLCAINITEIPLIKISEFRVVVARIGTLLCSTHVLAEFKRKAEVVFGDPTEWTSSVLQELGTIAAGLTKAELRMLDKDLMPYFQPSAIKCLPDEIFKELSAEQIASLGPENAAAVTHAQRRRLSPLQLQSLQQALDGAKTHSWQDAPASAGPTRTSSSRSPAGALQSWGLWLGCPLLVLMAKLLW

SEQ ID NO: 9043 - protein, 1153 aa, Homo sapiens
MSQEPTTYSLFLFLFLSHGVSSYTVPNSRQDLHPLLQNMAEEIIDGSYLNALLDLIQFQSSHVWTDDLSHRVLAYLNSRNVAFTIPSLQAAVENHLEQRLHQPQKLLEDLRKTDAQQFRTAMKCLLEDKKDGLDLKDIIIDLGEIRERALQSPGVNRSLFLITLERCFQMLNSLECVEILGKVLRGSSGSFLQPDITERLPRDLREDAFKNLSAVFKDLYDKTSAHSQRALYSWMTGILQTSSNATDDSASWVSAEHLWVLGRYMVHLSFEEITKISPIEIGLFISYDNATKQLDMVYDITPELAQAFLERISSSNFNMRNTSTIHRQAHELWALEPFPKMLGLLVCFYNDLELLDATVAQVLLYQMIKCSHLRGFQAGVQKLKAELLDIAMENQTLNETLGSLSDAVVGLTYSQLESLSPEAVHGAISTLNQVSGWAKSQVIILSAKYLAHEKVLSFYNVSQMGALLAGVSTQAFCSMKRKDISQVLRSAVSQYVSDLSPAQQQGILSKMVQAEDTAPGIVEIQGAFFKEVSLFDLRRQPGFNSTVLKDKELGRSQALFLYELLLKTTRRPEELLSAGQLVKGVTCSHIDAMSTDFFLAHFQDFQNNFALLSPYQVNCLAWKYWEVSRLSMPPFLLAALPARYLASVPASQCVPFLISLGKSWLDSLVLDSHKKTSVLRKVQQCLDDSIADEYTVDIMGNLLCHLPAAIIDRGISPRAWATALHGLRDCPDLNPEQKAAVRLKLLGQYGLPQHWTAETTKDLGPFLVLFSGDELSSIATKFPEILLQAASKMARTLPTKEFLWAVFQSVRNSSDKIPSYDPMPGCHGVVAPSSDDIFKLAEANACWALEDLRCMEEDTFIRTVELLGAVQGFSRPQLMTLKEKAIQVWDMPSYWREHHIVSLGRIALALNESELEQLDLSSIDTVASLSWQTEWTPGQAESILQGYLDDSGYSIQDLKSFHLVGLGATLCAINITEIPLIKISEFRVVVARIGTLLCSTHVLAEFKRKAEVVFGDPTEWTSSVLQELGTIAAGLTKAELRMLDKDLMPYFQPSAIKCLPDEIFKELSAEQIASLGPENAAAVTHAQRRRLSPLQLQSLQQALDGAKTHSWQDAPASAGPTRTSSSRSPAGALQSWGLWLGCPLLVLMAKLLW

SEQ ID NO: 9044 - protein, 895 aa, Homo sapiens
MAASTGYVRLWGAARCWVLRRPMLAAAGGRVPTAAGAWLLRGPVITALTPMTIPDVFPHLPLIAITRNPVFPRFIKIIEVKNKKLVELLRRKVRLAQPYVGVFLKRDDSNESDVVESLDEIYHTGTFAQIHEMQDLGDKLRMIVMGHRRVHISRQLEVEPEEPEAENKHKPRRKSKRGKKEAEDELSARHPAELAMEPTPELPAEVLMVEVENVVHEDFQVTEEVKALTAEIVKTIRDIIALNPLYRESVLQMMQAGQRVVDNPIYLSDMGAALTGAESHELQDVLEETNIPKRLYKALSLLKKEFELSKLQQRLGREVEEKIKQTHRKYLLQEQLKIIKKELGLEKDDKDAIEEKFRERLKELVVPKHVMDVVDEELSKLGLLDNHSSEFNVTRNYLDWLTSIPWGKYSNENLDLARAQAVLEEDHYGMEDVKKRILEFIAVSQLRGSTQGKILCFYGPPGVGKTSIARSIARALNREYFRFSVGGMTDVAEIKGHRRTYVGAMPGKIIQCLKKTKTENPLILIDEVDKIGRGYQGDPSSALLELLDPEQNANFLDHYLDVPVDLSKVLFICTANVTDTIPEPLRDRMEMINVSGYVAQEKLAIAERYLVPQARALCGLDESKAKLSSDVLTLLIKQYCRESGVRNLQKQVEKVLRKSAYKIVSGEAESVEVTPENLQDFVGKPVFTVERMYDVTPPGVVMGLAWTAMGGSTLFVETSLRRPQDKDAKGDKDGSLEVTGQLGEVMKESARIAYTFARAFLMQHAPANDYLVTSHIHLHVPEGATPKDGPSAGCTIVTALLSLAMGRPVRQNLAMTGEVSLTGKILPVGGIKEKTIAAKRAGVTCIVLPAENKKDFYDLAAFITEGLEVHFVEHYREIFDIAFPDEQAEALAVER

SEQ ID NO: 9045 - protein, 959 aa, Homo sapiens
MAASTGYVRLWGAARCWVLRRPMLAAAGGRVPTAAGAWLLRGQRTCDASPPWALWGRGPAIGGQWRGFWEASSRGGGAFSGGEDASEGGAEEGAGGAGGSAGAGEGPVITALTPMTIPDVFPHLPLIAITRNPVFPRFIKIIEVKNKKLVELLRRKVRLAQPYVGVFLKRDDSNESDVVESLDEIYHTGTFAQIHEMQDLGDKLRMIVMGHRRVHISRQLEVEPEEPEAENKHKPRRKSKRGKKEAEDELSARHPAELAMEPTPELPAEVLMVEVENVVHEDFQVTEEVKALTAEIVKTIRDIIALNPLYRESVLQMMQAGQRVVDNPIYLSDMGAALTGAESHELQDVLEETNIPKRLYKALSLLKKEFELSKLQQRLGREVEEKIKQTHRKYLLQEQLKIIKKELGLEKDDKDAIEEKFRERLKELVVPKHVMDVVDEELSKLGLLDNHSSEFNVTRNYLDWLTSIPWGKYSNENLDLARAQAVLEEDHYGMEDVKKRILEFIAVSQLRGSTQGKILCFYGPPGVGKTSIARSIARALNREYFRFSVGGMTDVAEIKGHRRTYVGAMPGKIIQCLKKTKTENPLILIDEVDKIGRGYQGDPSSALLELLDPEQNANFLDHYLDVPVDLSKVLFICTANVTDTIPEPLRDRMEMINVSGYVAQEKLAIAERYLVPQARALCGLDESKAKLSSDVLTLLIKQYCRESGVRNLQKQVEKVLRKSAYKIVSGEAESVEVTPENLQDFVGKPVFTVERMYDVTPPGVVMGLAWTAMGGSTLFVETSLRRPQDKDAKGDKDGSLEVTGQLGEVMKESARIAYTFARAFLMQHAPANDYLVTSHIHLHVPEGATPKDGPSAGCTIVTALLSLAMGRPVRQNLAMTGEVSLTGKILPVGGIKEKTIAAKRAGVTCIVLPAENKKDFYDLAAFITEGLEVHFVEHYREIFDIAFPDEQAEALAVER

SEQ ID NO: 9046 - protein, 477 aa, Homo sapiens
MQPVMLALWSLLLLWGLATPYCQELLETVGTLARIDKDELGKAIQNSLVGEPILQNVLGSVTAVNRGLLGSGGLLGGGGLLGHGGVFGVVEELSGLKIEELTLPKVLLKLLPGFGVQLSLHTKVGMHCSGPLGGLLQLAAEVNVTSRVALAVSSRGTPILILKRCSTLLGHISLFSGLLPTPLFGVVEQMLFKVLPGLLCPVVDSVLGVVNELLGAVLGLVSLGALGSVEFSLATLPLISNQYIELDINPIVKSVAGDIIDFPKSRAPAKVPPKKDHTSQVMVPLYLFNTTFGLLQTNGALDMDITPELVPSDVPLTTTDLAALLPEALGKLPLHQQLLLFLRVREAPTVTLHNKKALVSLPANIHVLFYVPKGTPESLFELNSVMTVRAQLAPSATKLHISLSLERLSVKVASSFTHAFDGSRLEEWLSHVVGAVYAPKLNVALDVGIPLPKVLNINFSNSVLEIVENAVVLTVAS

SEQ ID NO: 9047 - protein, 226 aa, Homo sapiens
WSQGCRAFLGSAGAAPPHPPVVLMWRLALGGVFLAAAQACVFCRLPAHDLSGRLARLCSQMEARQKECGASPDFSAFALDEVSMNKVTEKTHRVLRVMEIKEAVSSLPSYWSWLRKTKLPEYTREALCPPACRGSTTLYNCSTCKGTEVSCWPRKRCFPGSLGSQDSAPLHLRSFPASGCSEPPGGVPPPPSKKWLVKTLKTSQPPALRGMHSQLPHPLEGNQSAP

SEQ ID NO: 9048 - protein, 593 aa, Homo sapiens
MESGSTAASEEARSLRECELYVQKHNIQALLKDSIVQLCTARPERPMAFLREYFERLEKEEAKQIQNLQKAGTRTDSREDEISPPPPNPVVKGRRRRGAISAEVYTEEDAASYVRKVIPKDYKTMAALAKAIEKNVLFSHLDDNERSDIFDAMFSVSFIAGETVIQQGDEGDNFYVIDQGETDVYVNNEWATSVGEGGSFGELALIYGTPRAATVKAKTNVKLWGIDRDSYRRILMEDPKWEFPRKNLVLGKTLGEGEFGKVVKATAFHLKGRAGYTTVAVKMLKENASPSELRDLLSEFNVLKQVNHPHVIKLYGACSQDGPLLLIVEYAKYGSLRGFLRESRKVGPGYLGSGGSRNSSSLDHPDERALTMGDLISFAWQISQGMQYLAEMKLVHRDLAARNILVAEGRKMKISDFGLSRDVYEEDPYVKRSQGRIPVKWMAIESLFDHIYTTQSDVWSFGVLLWEIVTLGGNPYPGIPPERLFNLLKTGHRMERPDNCSEEMYRLMLQCWKQEPDKRPVFADISKDLEKMMVKRRDYLDLAASTPSDSLIYDDGLSEEETPLVDCNNAPLPRALPSTWIENKLYGRISHAF

SEQ ID NO: 9049 - protein, 1114 aa, Homo sapiens
MAKATSGAAGLRLLLLLLLPLLGKVALGLYFSRDAYWEKLYVDQAAGTPLLYVHALRDAPEEVPSFRLGQHLYGTYRTRLHENNWICIQEDTGLLYLNRSLDHSSWEKLSVRNRGFPLLTVYLKVFLSPTSLREGECQWPGCARVYFSFFNTSFPACSSLKPRELCFPETRPSFRIRENRPPGTFHQFRLLPVQFLCPNISVAYRLLEGEGLPFRCAPDSLEVSTRWALDREQREKYELVAVCTVHAGAREEVVMVPFPVTVYDEDDSAPTFPAGVDTASAVVEFKRKEDTVVATLRVFDADVVPASGELVRRYTSTLLPGDTWAQQTFRVEHWPNETSVQANGSFVRATVHDYRLVLNRNLSISENRTMQLAVLVNDSDFQGPGAGVLLLHFNVSVLPVSLHLPSTYSLSVSRRARRFAQIGKVCVENCQAFSGINVQYKLHSSGANCSTLGVVTSAEDTSGILFVNDTKALRRPKCAELHYMVVATDQQTSRQAQAQLLVTVEGSYVAEEAGCPLSCAVSKRRLECEECGGLGSPTGRCEWRQGDGKGITRNFSTCSPSTKTCPDGHCDVVETQDINICPQDCLRGSIVGGHEPGEPRGIKAGYGTCNCFPEEEKCFCEPEDIQDPLCDELCRTVIAAAVLFSFIVSVLLSAFCIHCYHKFAHKPPISSAEMTFRRPAQAFPVSYSSSGARRPSLDSMENQVSVDAFKILEDPKWEFPRKNLVLGKTLGEGEFGKVVKATAFHLKGRAGYTTVAVKMLKENASPSELRDLLSEFNVLKQVNHPHVIKLYGACSQDGPLLLIVEYAKYGSLRGFLRESRKVGPGYLGSGGSRNSSSLDHPDERALTMGDLISFAWQISQGMQYLAEMKLVHRDLAARNILVAEGRKMKISDFGLSRDVYEEDSYVKRSQGRIPVKWMAIESLFDHIYTTQSDVWSFGVLLWEIVTLGGNPYPGIPPERLFNLLKTGHRMERPDNCSEEMYRLMLQCWKQEPDKRPVFADISKDLEKMMVKRRDYLDLAASTPSDSLIYDDGLSEEETPLVDCNNAPLPRALPSTWIENKLYGMSDPNWPGESPVPLTRADGTNTGFPRYPNDSVYANWMLSPSAAKLMDTFDS

SEQ ID NO: 9050 - protein, 1106 aa, Homo sapiens
MAKATSGAAGLRLLLLLLLPLLGKVALGLYFSRDAYWEKLYVDQAAGTPLLYVHALRDAPEEVPSFRLGQHLYGTYRTRLHENNWICIQEDTGLLYLNRSLDHSSWEKLSVRNRGFPLLTVYLKVFLSPTSLREGECQWPGCARVYFSFFNTSFPACSSLKPRELCFPETRPSFRIRENRPPGTFHQFRLLPVQFLCPNISVAYRLLEGEGLPFRCAPDSLEVSTRWALDREQREKYELVAVCTVHAGAREEVVMVPFPVTVYDEDDSAPTFPAGVDTASAVVEFKRKEDTVVATLRVFDADVVPASGELVRRYTSTLLPGDTWAQQTFRVEHWPNETSVQANGSFVRATVHDYRLVLNRNLSISENRTMQLAVLVNDSDFQGPGAGVLLLHFNVSVLPVSLHLPSTYSLSVSRRARRFAQIGKVCVENCQAFSGINVQYKLHSSGANCSTLGVVTSAEDTSGILFVNDTKALRRPKCAELHYMVVATDQQTSRQAQAQLLVTVEGSYVAEEAGCPLSCAVSKRRLECEECGGLGSPTGRCEWRQGDGKGITRNFSTCSPSTKTCPDGHCDVVETQDINICPQDCLRGSIVGGHEPGEPRGIKAGYGTCNCFPEEEKCFCEPEDIQDPLCDELCRTVIAAAVLFSFIVSVLLSAFCIHCYHKFAHKPPISSAEMTFRRPAQAFPVSYSSSGARRPSLDSMENQVSVDAFKILEDPKWEFPRKNLVLGKTLGEGEFGKVVKATAFHLKGRAGYTTVAVKMLKENASPSELRDLLSEFNVLKQVNHPHVIKLYGACSQDGPLLLIVEYAKYGSLRGFLRESRKVGPGYLGSGGSRNSSSLDHPDERALTMGDLISFAWQISQGMQYLAEMKLVHRDLAARNILVAEGRKMKISDFGLSRDVYEEDSYVKRSQGRIPVKWMAIESLFDHIYTTQSDVWSFGVLLWEIVTLGGNPYPGIPPERLFNLLKTGHRMERPDNCSEEMYRLMLQCWKQEPDKRPVFADISKDLEKMMVKRRDYLDLAASTPSDSLIYDDGLSEEETPLVDCNNAPLPRALPSTWIENKLYDAQHSSSLVGAAFGKSQQLFWLCCQHCNFAEKSRITKTLPALQT

SEQ ID NO: 9051 - protein, 503 aa, Homo sapiens
MADSASESDTDGAGGNSSSSAAMQSSCSSTSGGGGGGGGGGGGGKSGGIVISPFRLEELTNRLASLQQENKVLKIELETYKLKCKALQEENRDLRKASVTIEDPKWEFPRKNLVLGKTLGEGEFGKVVKATAFHLKGRGGYTTVAVKMLKENASPSELRDLLSEFNVLKQVNHPHVIKLYGACSQDGPLLLIVEYAKYGSLRGFLRESRKVGPGYLGSGGSRNSSSLDHPDERALTMGDLISFAWQISQGMQYLAEMKLVHRDLAARNILVAEGRKMKISDFGLSRDVYEEDSYVKRSQGRIPVKWMAIESLFDHIYTTQSDVWSFGVLLWEIVTLGGNPYPGIPPERLFNLLKTGHRMERPDNCSEEMYRLMLQCWKQEPDKRPVFADISKDLEKMMVKRRDYLDLAASTPSDSLIYDDGLSEEETPLVDCNNAPLPRALPSTWIENKLYGMSDPNWPGESPVPLTRADGTNTGFPRYPNDSVYANWMLSPSAAKLMDTFDS

SEQ ID NO: 9052 - protein, 435 aa, Homo sapiens
MEELIVELRLFLELLDHEYLTSTVREKKAVITNILLRIQSSKGFDVKDHAQKQETANSLPAPPQMPLPEIPQPWLEDPKWEFPRKNLVLGKTLGEGEFGKVVKATAFHLKGRAGYTTVAVKMLKENASPSELRDLLSEFNVLKQVNHPHVIKLYGACSQDGPLLLIVEYAKYGSLRGFLRESRKVGPGYLGSGGSRNSSSLDHPDERALTMGDLISFAWQISQGMQYLAEMKLVHRDLAARNILVAEGRKMKISDFGLSRDVYEEDSYVKRSQGRIPVKWMAIESLFDHIYTTQSDVWSFGVLLWEIVTLGGNPYPGIPPERLFNLLKTGHRMERPDNCSEEMYRLMLQCWKQEPDKRPVFADISKDLEKMMVKRRDYLDLAASTPSDSLIYDDGLSEEETPLVDCNNAPLPRALPSTWIENKLYGRISHAFTRF

SEQ ID NO: 9053 - protein, 956 aa, Homo sapiens
MPPRAPPAPGPRPPPRAAAATDTAAGAGGAGGAGGAGGPGFRPLAPRPWRWLLLLALPAACSAPPPRPVYTNHWAVQVLGGPAEADRVAAAHGYLNLGQIGNLEDYYHFYHSKTFKRSTLSSRGPHTFLRMDPQVKWLQQQEVKRRVKRQVRSDPQALYFNDPIWSNMWYLHCGDKNSRCRSEMNVQAAWKRGYTGKNVVVTILDDGIERNHPDLAPNYDSYASYDVNGNDYDPSPRYDASNENKHGTRCAGEVAASANNSYCIVGIAYNAKIGGIRMLDGDVTDVVEAKSLGIRPNYIDIYSASWGPDDDGKTVDGPGRLAKQAFEYGIKKGRQGLGSIFVWASGNGGREGDYCSCDGYTNSIYTISVSSATENGYKPWYLEECASTLATTYSSGAFYERKIVTTDLRQRCTDGHTGTSVSAPMVAGIIALALEANSQLTWRDVQHLLVKTSRPAHLKASDWKVNGAGHKVSHFYGFGLVDAEALVVEAKKWTAVPSQHMCVAASDKRPRSIPLVQVLRTTALTSACAEHSDQRVVYLEHVVVRTSISHPRRGDLQIYLVSPSGTKSQLLAKRLLDLSNEGFTNWEFMTVHCWGEKAEGQWTLEIQDLPSQVRNPEKQGKLKEWSLILYGTAEHPYHTFSAHQSRSRMLELSAPELEPPKAALSPSQVEVPEDEEDYTGVCHPECGDKGCDGPNADQCLNCVHFSLGSVKTSRKCVSVCPLGYFGDTAARRCRRCHKGCETCSSRAATQCLSCRRGFYHHQEMNTCVTLCPAGFYADESQKNCLKCHPSCKKCVDEPEKCTVCKEGFSLARGSCIPDCEPGTYFDSELIRCGECHHTCGTCVGPGREECIHCAKNFHFHDWKCVPACGEGFYPEEMPGLPHKVCRRCDENCLSCAGSSRNCSRCKTGFTQLGTSCITNHTCSNADETFCEMVKSNRLCERKLFIQFCCRTCLLAG

SEQ ID NO: 9054 - protein, 969 aa, Homo sapiens
MPPRAPPAPGPRPPPRAAAATDTAAGAGGAGGAGGAGGPGFRPLAPRPWRWLLLLALPAACSAPPPRPVYTNHWAVQVLGGPAEADRVAAAHGYLNLGQIGNLEDYYHFYHSKTFKRSTLSSRGPHTFLRMDPQVKWLQQQEVKRRVKRQVRSDPQALYFNDPIWSNMWYLHCGDKNSRCRSEMNVQAAWKRGYTGKNVVVTILDDGIERNHPDLAPNYDSYASYDVNGNDYDPSPRYDASNENKHGTRCAGEVAASANNSYCIVGIAYNAKIGGIRMLDGDVTDVVEAKSLGIRPNYIDIYSASWGPDDDGKTVDGPGRLAKQAFEYGIKKGRQGLGSIFVWASGNGGREGDYCSCDGYTNSIYTISVSSATENGYKPWYLEECASTLATTYSSGAFYERKIVTTDLRQRCTDGHTGTSVSAPMVAGIIALALEANSQLTWRDVQHLLVKTSRPAHLKASDWKVNGAGHKVSHFYGFGLVDAEALVVEAKKWTAVPSQHMCVAASDKRPRSIPLVQVLRTTALTSACAEHSDQRVVYLEHVVVRTSISHPRRGDLQIYLVSPSGTKSQLLAKRLLDLSNEGFTNWEFMTVHCWGEKAEGQWTLEIQDLPSQVRNPEKQGKLKEWSLILYGTAEHPYHTFSAHQSRSRMLELSAPELEPPKAALSPSQVEVPEDEEDYTAQSTPGSANILQTSVCHPECGDKGCDGPNADQCLNCVHFSLGSVKTSRKCVSVCPLGYFGDTAARRCRRCHKGCETCSSRAATQCLSCRRGFYHHQEMNTCVTLCPAGFYADESQKNCLKCHPSCKKCVDEPEKCTVCKEGFSLARGSCIPDCEPGTYFDSELIRCGECHHTCGTCVGPGREECIHCAKNFHFHDWKCVPACGEGFYPEEMPGLPHKVCRRCDENCLSCAGSSRNCSRCKTGFTQLGTSCITNHTCSNADETFCEMVKSNRLCERKLFIQFCCRTCLLAG

SEQ ID NO: 9055 - protein, 2070 aa, Homo sapiens
  VARIANT 121: Xaa = Any Amino Acid
MLFSWPFLKSVVAAAAAAADKWLEDDFRVKDETELTMHQSVESDIHGLHKIIDDTNVTQLQLEAEVKALKEELLFMKKNHEEEVKGLQSQIASSGLSMEVDTPKSQDLTKIMADIQAQYDXLARENQEELDKYGSQQTEESTTMVTTQSAEVGAAEMALTELRHTVQSLEIDLDSMRNLKASLESSLRKVEARYALQMEQINGILLHLESELAQIRAEGQCQAQEYKALLNIKVKLEAKIATYCHLLEDGKDFNLGDALDTSNSMQTIQKTTICRIVDHKVMSDIKPAEAGHVMQEESANDMECEQLPAEILRQVTVHRDPIYGFGFVAGSERPVVVRSVRPGGPSENKLLAGDQIVAINEEDVSEAPRERLIELIRSAKEFIVLTVLHTHQSPKSAFISAAKKAKLRSNPVKVRFSEQVAVGETDAKMMKKEALLLIPNVLKVFLENGQIKSFTFDGRTTVKDVMLTLQDRLSLRFIEHFALVLEYAGPEQNHKFLLLQDKQPLAYVVQRTHYHGMKCLFRISFFPKDPVELLRRDPAAFEYLYIQSRNDVIRERFGMDPKPEMLLGLAALHIYITVSATRPSQKISLKNVEKEWGLEPFLPPSLLQVIKEKNLRKSLSQQLKAHQTHPSCGTKGSAIQAKLQYLRILNELPTFTGVLFNTVGLDEKQSATTLLVGPRHGISHVIDLKTNLTTVLSEFSKISKIQLFRENQGVARVETSIMDAKPLVLLMEWPEATNFACLIAGYCRLLLDSRKMVFSRPASQPLPPPMIKADYMHSAHRPVTGGHLGKKESSYVGSVGTSPRKSSRCTPPPADSELVSFCYLHMREQRKEQESRTDVNENLIFFEETRPRTKSDPTSKSSGQGYEVVPDDFDAASLDHEPCASRARSYTLDNSLGAEALNFYCDSCKAKLQEQLGPRKGGKPGSSRDNIVDLMSLPPPGSEEEEEEEDETTSLLPAIAAPPPGFRDNSSDEDDPKRRAVQSQEQGRHLRGLLYDEIPVTLIDSVQTRTVRDHAQELDDALVSTLQALEALAASEDGPHPPPPQTAGLIVLATITPESSLDSGHETNSSELTDMSEMMSAMKQHQNTTYFLAQHLNKDSLLARKDLPFRIQSCAAQAVLTAPYSLGRPDPNPSLQPIATGQSPGPPGARRKLPQSEGQVQGERTYSLAVHPALSPQLSEQKNLSLLSPVPEDKGPGHTRAGLEMSLRAATSSLSEEQVSELRDNLPKEVRLSPKLILDPKSSVTPAIISAALQQVVHNKSLVTAGGALGNPPSRGERRLEASMGRPEVSMMSSSASKNLKFKISPSAPETSWNSQHQLGAEVSSSPRAPTGSRADSLHLSQQEDSLPVQNFPPKSYLLRTSRESVGKQATGEVAGKGGPVGGKPTLQKQGTISSQGEKAQLESTPKRSKLEETSLVPRATYPMALQSPSCQSRSHSPSCQPHGHSPSSQSRGQSPSCQPRGQSPLRSQAASRQVSTMPSRKLETTLNGAHSTSEGPAKPKSSRGPFRLRNLFSATFPTRQKKETDERQAQLQKVKQYELEFLEELLKPPSQGELPGTEYLQPPAPGRCSCQLRSSPVQQGPGMSREQRRSCDCKRICRGGRPQATQTPVPSLRGRERDRVLPSQRQPEAGPGVSLSSPINVQRIRSTSLESRECRSDPESGVSCLTTCASGGECLGAPNYRKLMRRYSISELDQGDRASLTSDVYPHPPLGMLPREAKEVEASLPIALGPKSRSLESPTLGDPSYVQVAPETKGPRQMAVFSLPEEVYRKPAELDEDSESSKCCSIRYCFYYRKCDMADDASDGKDELSYSIPMKILPGMKLDEQVVPVVSRTLQVLDAATCSSSSPEASRTQEIDLRVSTFEGSLAKINALRAHAYGLPDGFLAARLDTNELLTVLRQCVASPEARAPKPYVSQISEYKLELALKFKELRASCRRVANVDKSPTHMLAAITGSFQVLSSLIETFVRLVFIVRSEAQRQELLAKVEEVVRNYTFLLRAAEESTARNLNQQQQQQQQQQQQQQQQQQQQQQQQQQQVAAAAGAATEHPPGSPTSATVMSTFTHSLKTLIK

SEQ ID NO: 9056 - protein, 1997 aa, Homo sapiens [sequence omitted]

SEQ ID NO: 9057 - protein, 2302 aa, Homo sapiens
MDSLAGLSPREAAGVLSLSCVGVCSTCAWAWPHGSMRDLRAQVTSGLLPFPEVTLQALGEDEITLESVLRGKFAAGKNGLACLACGPQLEVVNSITGERLSAYRFSGVNEQPPVVLAVKEFSWQKRTGLLIGLEETEGSVLCLYDLGISKVVKAVVLPGRVTAIEPIINHGGASASTQHLHPSLRWLFGVAAVVTDVGQILLVDLCLDDLSCNQNEVEASDLEVLTGIPAEVPHIRESVMRQGRHLCFQLVSPTGTAVSTLSYISRTNQLAVGFSDGYLALWNMKSMKREYYIQLESGQVPVYAVTFQEPENDPRNCCYLWAVQSTQDSEGDVLSLHLLQLAFGNRKCLASGQILYEGLEYCEERYTLDLTGGMFPLRGQTSNTKLLGCQSIEKFRSHGDREEGVNEALSPDTSVSVFTWQVNIYGQGKPSVYLGLFGINRWYHAQMPDSLRSGEYLHNCSYFALWSLESVVSRTSPHGILDILVHERSLNRGVPPSYPPPEQFFNPSTYNFDATCLLNSGVVHLTCTGFQKETLTFLKKSGPSLNELIPDGYNRCLVAGLLSPRFVDVQPSSLSQEEQLEAILSAAIQTSSLGLLTGYIRRWITEEQPNSATNLRFVLEWTWNKVVLTKEEFDRLCVPLFDGSCHFMDPQTIQSIQQCYLLLSNLNIVLSCFASEAREITERGLIDLSNKFVVSHLICQYAQVVLWFSHSGLLPEGIDDSVQLSRLCYNYPVIQNYYTSRRQKFERLSRGKWNPDCLMIDGLVSQLGERIEKLWKRGEGGTGKYPPGSLHAVLDMYLLDGVTEAAKHSITIYLLLDIMYSFPNKTDTPIESFPTVFAISWGQVKLIQGFWLIDHNDYESGLDLLFHPATAKPLSWQHSKIIQAFMSQGEHRQALRYIQTMKPTVSSGNDVILHLTVLLFNRCMVEAWNFLRQHCNRLNIEELLKHMYEVCQEMGLMEDLLKLPFTDTEQECLVKFLQSSASVQNHEFLLVHHLQRANYVPALKLNQTLKINVMNDRDPRLRERSLARNSILDQYGKILPRVHRKLAIERAKPYHLSTSSVFRLVSRPKPLSAVPKQVVTGTVLTRSVFINNVLSKIGEVWASKEPINSTTPFNSSKIEEPSPIVYSLPAPELPEAFFGTPISKASQKISRLLDLVVQPVPRPSQCSESIQQSSMKSPLYLVSRSLPSSSQLKGSPQAISRASELHLLETPLVVKKAKSLAMSVTTSGFSEFTPQSILRSTLRSTPLASPSPSPGRSPQRLKETRISFVEEDVHPKWIPGAADDSKLEVFTTPKKCAVPVETEWLKSKDRTTSFFLNSPEKEHQEMDEGSQSLEKLDVSKGNSSVSITSDETTLEYQDAPSPEDLEETVFTASKPKSSSTALTTNVTEQTEKDGDKDVFASEVTPSDLQKQMGQFRRCRNKGSLTCSRGIFRIESLKPRFKATEASLCAPSVYEGKIFTQKSKVPVLDEGLTSVETYTPAIRANDNKSMADVLGDGGNSSLTISEGPIVSERRLNQEVALNLKEDHEVEVGVLKESVDLPEEKLPISDSPPDTQEIHVIEQEKLEAQDSGEEARNLSFNELYPSGTLKLQYNFDTIDQQFCDLADNKDTAECDIAEVDGELFVAQSNFTLILEGEEGEVEPGDFASSDVLPKAANTATEEKLVCSGENDNHGQIANLPSAVTSDQKSQKVDTLPYVPEPIKVAIAENLLDVIKDTRSKEITSDTMEQSIHETIPLVSQNIMCPTKLVKSAFKTAQETSTMTMNVSQVDDVVSSKTRTRGQRIQNVNVKSAQQEASADVATPKMPGQSVRKKTRKAKEISEASENIYSDVRGLSQNQQIPQNSVTPRRGRRKKEVNQDILENTSSVGQELQITTGRESKRLKSSQLLEPAVEETTKKEVKVSSVTKRTPRRIKRSVENQESVEIINDLKVSTVTSPSRMIRKLRSTNLDASENTGNKQDDKSSDKQLRIKHVRRVRGREVSPSDVREDSNLESSQLTVQAEFDMSAIPRKRGRPRKINPSEDVGSKAVKEERSPKKKEAPSIRRRSTRNTPAKSENVDVGKPALGKSILVPNEELSMVMSSKKKLTKKTESQSQKRSLHSVSEERTDEMTHKETNEQEERLLATASFTKSSRSSRTRSSKAILLPDLSEPNNEPLFSPASEVPREAKAKKIEVPAQLKELVSDLSSQFVISPPALRSRQKNTSNKNKLEDELKDDAQSVETLGKPKAKRIRTSKTKQASKNTEKESAWSPPPIEIRLISPLASPADGVKSKPRKTTEVTGTGLGRNRKKLSSYPKQILRRKML

SEQ ID NO: 9058 - protein, 2266 aa, Homo sapiens
MRDLRAQVTSGLLPFPEVTLQALGEDEITLESVLRGKFAAGKNGLACLACGPQLEVVNSITGERLSAYRFSGVNEQPPVVLAVKEFSWQKRTGLLIGLEETEGSVLCLYDLGISKVVKAVVLPGRVTAIEPIINHGGASASTQHLHPSLRWLFGVAAVVTDVGQILLIDLCLDDLSCNQNEVEASDLEVLTGIPAEVPHIRESVMREGRHLCFQLVSPTGTAVSTLSYISRTNQLAAGFSDGYLALWNMKSMKREYYIQLESGQVPVYAVTFQEPENDRRNCCYLWAVQSTQDSEGDVLSLHLLQLAFGNRKCLASGQILYEGLEYCEERYTLDLTGGMFPLRGQTSNTKLLGCQSIEKFRSHGDREEGVNEALSPDTSVSVFTWQVNIYGQGKPSVYLGLFDINRWYHAQMPDSLRSGEYLHNCSYFALWSLESVVSRTSPHGILDILVHERSLNRGVPPSYPPPEQFFNPSTYNFDATCLLNSGVVHLTCTGFQKETLTFLKKSGPSLNELIPDGYNRCLVAGLLSPRFVDVQPSSLSQEEQLEAILSAAIQTSSLGLLTGYIRRWITEEQPNSATNLRFVLEWTWNKVVLTKEEFDRLCVPLFDGSCHFMDPQTIQSIQQCYLLLSNLNIVLSCFASEAREIAERGLIDLSNKFVVSHLICQYAQVVLWFSHSGLLPEGIDDSVQLSRLCYNYPVIQNYYTSRRQKFERLSRGKWNPDCLMIDGLVSQLGERIEKLWKRDEGGTGKYPPASLHAVLDMYLLDGVTEAAKHSITIYLLLDIMYSFPNKTDTPIESFPTVFAISWGQVKLIQGFWLIDHNDYESGLDLLFHPATAKPLSWQHSKIIQAFMSQGEHRQALRYIQTMKPTVSSGNDVILHLTVLLFNRCMVEAWNFLRQHCNRLNIEELLKHMYEVCQEMGLMEDLLKLPFTDTEQECLVKFLQSSASVQNHEFLLVHHLQRANYVPALKLNQTLKINVMNDRDPRLRERSLARNSILDQYGKILPRVHRKLAIERAKPYHLSTSSVFRLVSRPKPLSAVPKQVVTGTVLTRSVFINNVLSKIGEVWASKEPINSTTPFNSSKIEEPSPIVYSLPAPELPEAFFGTPISKASQKISRLLDLVVQPVPRPSQCSEFIQQSSMKSPLYLVSRSLPSSSQLKGSPQAISRASELHLLETPLVVKKAKSLAMSVTTSGFSEFTPQSILRSTPRSTPLASPSPSPGRSPQRLKETRISFVEEDVHPKWIPGAADDSKLEVFTTPKKCAVPVETEWPKSKDRTTSFFLNSPEKEHQEMDEGSQSLEKLDVSKGNSSVSITSDETTLEYQDAPSPEDLEETVFTASKPKSSSTALTTNVTEQTEKDGDKDVFASEVTPSDLQKQMGNLEDAETKDLLVAAEAFSELNHLSPVQGTEASLCAPSVYEGKIFTQKSKVPVLDEGLTSVETYTPAIRANDNKSMADVLGDGGNSSLTISEGPIVSERRLNQEVALNLKEDHEVEVGVLKESVDLPEEKLPISDSPPDTQEIHVIEQEKLEAQDSGEEARNLSFNELYPSGTLKLQYNFDTIDQQFCDLADNKDTAECDIAEVDGELFVAQSNFTLILEGEEGEVEPGDFASSDVLPKAANTATEEKLVCSGENDNHGQIANLPSAVTSDQKSQKVDTLPYVPEPIKVAIAENLLDVIKDTRSKEITSDTMEQSIHETIPLVSQNIMCPTKLVKSAFKTAQETSTMTMNVSQVDDVVSSKTRTRGQRIQNVNVKSAQQEASADVATPKMPGQSVRKKTRKAKEISEASENIYSDVRGLFQNQQIPQNSVTPRRGRRKKEVNQDILENTSSVEQELQITTGRESKRLKSSQLLEPAVEETTKKEVKVSSVTKRTPRRIKRSVENQESVEIINDLKVSTVTSPSRMIRKLRSTNLDASENTGNKQDDKSSDKQLRIKHVRRVRGREVSPSDVREDSNLESSQLTVQAEFDMSAIPRKRGRPRKINPSEDVGSKAVKEERSPKKKEAPSIRRRSTRNTPAKSENVDVGKPALGKSILVPNEELSMVMSSKKKLTKKTESQSQKRSLHSVSEERTDEMTHKETNEQEERLLATASFTKSSRSSRTRSSKAILLPDLSEPNNEPLFSPASEVPRKAKAKKIEVPAQLKELVSDLSSQFVISPPALRSRQKNTSNKNKLEDELKDDAQSVETLGKPKAKRIRTSKTKQASKNTEKESAWSLPPIEIRLISPLASPADGVKSKPRKTTEVTGTGLGRNRKKLSSYPKQILRRKML

SEQ ID NO: 9059 - protein, 1189 aa, Homo sapiens
MKSEEQPMDLENRSTANVLEETTVKKEKEDEKELVKLPVIVKLEKPLPENEEKKIIKEESDSFKENVKPIKVEVKECRADPKDTKSSMEKPVAQEPERIEFGGNIKSSHEITEKSTEETEKLKNDQQAKIPLKKREIKLSDDFDSPVKGPLCKSVTPTKEFLKDEIKQEEETCKRISTITALGHEGKQLVNGEVSDERVAPNFKTEPIETKFYETKEESYSPSKDRNIITEGNGTESLNSVITSMKTGELEKETAPLRKDADSSISVLEIHSQKAQIEEPDPPEMETSLDSSEMAKDLSSKTALSSTESCTMKGEEKSPKTKKDKRPPILECLEKLEKSKKTFLDKDAQRLSPIPEEVPKSTLESEKPGSPEAAETSPPSNIIDHCEKLASEKEVVECQSTSTVGGQSVKKVDLETLKEDSEFTKVEMDNLDNAQTSGIEEPSETKGSMQKSKFKYKLVPEEETTASENTEITSERQKEGIKLTIRISSRKKKPDSPPKVLEPENKQEKTEKEEEKTNVGRTLRRSPRISRPTAKVAEIRDQKADKKRGEGEDEVEEESTALQKTDKKEILKKSEKDTNSKVSKVKPKGKVRWTGSRTRGRWKYSSNDESEGSGSEKSSAASEEEEEKESEEAILADDDEPCKKCGLPNHPELILLCDSCDSGYHTACLRPPLMIIPDGEWFCPPCQHKLLCEKLEEQLQDLDVALKKKERAERRKERLVYVGISIENIIPPQEPDFSEDQEEKKKDSKKSKANLLERRSTRTRKCISYRFDEFDEAIDEAIEDDIKEADGGGVGRGKDISTITGHRGKDISTILDEERKENKRPQRAAAARRKKRRRLNDLDSDSNLDEEESEDEFKISDGSQDEFVVSDENPDESEEDPPSNEDSDTDFCSRRLRRHPSRPMRQSRRLRRKTPKKKYSDDDEEEESEENSRDSESDFSDDFSDDFVETRRRRSRRNQKRQINYKEDSESDGSQKSLRRGKEIRRVHKRRLSSSESEESYLSKNSEDDELAKESKRSVRKRGRSTDEYSEADEEEEEEEGKPSRKRLHRIETDEEESCDNAHGDANQPARDSQPRVLPSEQESTKKPYRIESDEEEDFENVGKVGSPLDYSLVDLPSTNGQSPGKAIENLIGKPTEKSQTPKDNSTASASLASNGTSGGQEAGAPEEEEDELLRVTDLVDYVCNSEQL

SEQ ID NO: 9060 - protein, 1441 aa, Homo sapiens
MATAAAAAAVMAPPGCPGSCPNFAVVCSFLERYGPLLDLPELPFPELERVLQAPPPDVGNGEVPKELVELHLKLMRKIGKSVTADRWEKYLIKICQEFNSTWAWEMEKKGYLEMSVECKLALLKYLCECQFDDNLKFKNIINEEDADTMRLQPIGRDKDGLMYWYQLDQDHNVRMYIEEQDDQDGSSWKCIVRNRNELAETLALLKAQIDPVLLKNSSQQDNSSRESPSLEDEETKKEEETPKQEEQKESEKMKSEEQPMDLENRSTANVLEETTVKKEKEDEKELVKLPVIVKLEKPLPENEEKKIIKEESDSFKENVKPIKVEVKECRADPKDTKSSMEKPVAQEPERIEFGGNIKSSHEITEKSTEETEKLKNDQQAKIPLKKREIKLSDDFDSPVKGPLCKSVTPTKEFLKDEIKQEEETCKRISTITALGHEGKQLVNGEVSDERVAPNFKTEPIETKFYETKEESYSPSKDRNIITEGNGTESLNSVITSMKTGELEKETAPLRKDADSSISVLEIHSQKAQIEEPDPPEMETSLDSSEMAKDLSSKTALSSTESCTMKGEEKSPKTKKDKRPPILECLEKLEKSKKTFLDKDAQRLSPIPEEVPKSTLESEKPGSPEAAETSPPSNIIDHCEKLASEKEVVECQSTSTVGGQSVKKVDLETLKEDSEFTKVEMDNLDNAQTSGIEEPSETKGSMQKSKFKYKLVPEEETTASENTEITSERQKEGIKLTIRISSRKKKPDSPPKVLEPENKQEKTEKEEEKTNVGRTLRRSPRISRPTAKVAEIRDQKADKKRGEGEDEVEEESTALQKTDKKEILKKSEKDTNSKVSKVKPKGKVRWTGSRTRGRWKYSSNDESEGSGSEKSSAASEEEEEKESEEAILADDDEPCKKCGLPNHPELILLCDSCDSGYHTACLRPPLMIIPDGEWFCPPCQHKLLCEKLEEQLQDLDVALKKKERAERRKERLVYVGISIENIIPPQEPDFSEDQEEKKKDSKKSKANLLERRSTRTRKCISYRFDEFDEAIDEAIEDDIKEADGGGVGRGKDISTITGHRGKDISTILDEERKENKRPQRAAAARRKKRRRLNDLDSDSNLDEEESEDEFKISDGSQDEFVVSDENPDESEEDPPSNDDSDTDFCSRRLRRHPSRPMRQSRRLRRKTPKKKYSDDDEEEESEENSRDSESDFSDDFSDDFVETRRRRSRRNQKRQINYKEDSESDGSQKSLRRGKEIRRVHKRRLSSSESEESYLSKNSEDDELAKESKRSVRKRGRSTDEYSEADEEEEEEEGKPSRKRLHRIETDEEESCDNAHGDANQPARDSQPRVLPSEQESTKKPYRIESDEEEDFENVGKVGSPLDYSLVDLPSTNGQSPGKAIENLIGKPTEKSQTPKDNSTASASLASNGTSGGQEAGAPEEEEDELLRVTDLVDYVCNSEQL

SEQ ID NO: 9061 - protein, 569 aa, Homo sapiens
MHTLTGFSLVSLLSFGYLSWDWAKPSFVADGPGEAGEQPSAAPPQPPHIIFILTDDQGYHDVGYHGSDIETPTLDRLAAKGVKLENYYIQPICTPSRSQLLTGRYQIHTGLQHSIIRPQQPNCLPLDQVTLPQKLQEAGYSTHMVGKWHLGFYRKECLPTRRGFDTFLGSLTGNVDYYTYDNCDGPGVCGFDLHEGENVAWGLSGQYSTMLYAQRASHILASHSPQRPLFLYVAFQAVHTPLQSPREYLYRYRTMGNVARRKYAAMVTCMDEAVRNITWALKRYGFYNNSVIIFSSDNGGQTFSGGSNWPLRGRKGTYWEGGVRGLGFVHSPLLKRKQRTSRALMHITDWYPTLVGLAGGTTSAADGLDGYDVWPAISEGRASPRTEILHNIDPLYNHAQHGSLEGGFGIWNTAVQAAIRVGEWKLLTGDPGYGDWIPPQTLATFPGSWWNLERMASVRQAVWLFNISADPYEREDLAGQRPDVVRTLLARLAEYNRTAIPVRYPAENPRAHPDFNGGAWGPWASDEEEEEEEGRARSFSRGRRKKKCKICKLRSFFRKLNTRLMSQRI

SEQ ID NO: 9062 - protein, 498 aa, Homo sapiens
MSFSATILFSPPSGSEARCCCCACKSETNGGNTGSQGGNPPPSTPITVTGHGLAVQSSEQLLHVIYQRVDKAVGLAEAALGLARANNELLKRLQEEVGDLRQGKVSIPDEDGESRAHSSPPEEPGPLKESPGEAFKALSAVEEECDSVGSGVQVVIEELRQLGAASVGPGPLGFPATQRDMRLPGCTLAASEAAPLLNPLVDDYVASEGAVQRVLVPAYAKQLSPATQLAIQRATPETGPENGTKLPPPRPEDMLNAAAALDSALEESGPGSTGELRHSLGLTVSPCRTRGSGQKNSRRKRDLVLSKLVHNVHNHITNDKRFNGSESIKSSWNISVVKFLLEKLKQELVTSPHNYTDKELKGACVAYFLTKRREYRNSLNPFKGLKEKEEKKLRSRRYRLFANRSSIMRHFGPEDQRLWNDVTEELMSDEEDSLNEPDRLPSAEAQLLPPELYNPNFQEEEDEGGDENAPGSPSFDQPHKTCCPDLNSFIEIKVEKDE

SEQ ID NO: 9063 - protein, 538 aa, Homo sapiens
MSFSATILFSPPSGSEARCCCCACKSETNGGNTGSQGGNPPPSTPITVTGHGLAVQSSEQLLHVIYQRVDKAVGLAEAALGLARANNELLKRLQEEVGDLRQGKVSIPDEDGESRAHSSPPEEPGPLKESPGEAFKALSAVEEECDSVGSGVQVVIEELRQLGAASVGPGPLGFPATQRDMRLPGCTLAASEAAPLLNPLVDDYVASEGAVQRVLVPAYAKQLSPATQLAIQRATPETGPENGTKLPPPRPEDMLNAAAALDSALEESGPGSTGELRHSLGLTVSPCRTRGSGQKNSRRKRDLVLSKLVHNVHNHITNDKRFNGSESIKSSWNISVVKFLLEKLKQELVTSPHNYTDKELKGACVAYFLTKRREYRNSLNPFKGLKEKEEKKLRSRRYRLFANRSSIMRHFGPEDQRLWNDVTEELMSDEEDSLNEPGVWVARPPRFRAQRLTELCYHLDANSKHGTKANRVYGPPSDRLPSAEAQLLPPELYNPNFQEEEDEGGDENAPGSPSFDQPHKTCCPDLNSFIEIKVEKDE

SEQ ID NO: 9064 - protein, 685 aa, Homo sapiens
MAAASRSASGWALLLLVALWQQRAAGSGVFQLQLQEFINERGVLASGRPCEPGCRTFFRVCLKHFQAVVSPGPCTFGTVSTPVLGTNSFAVRDDSSGGGRNPLQLPFNFTWPGTFSLIIEAWHAPGDDLRPEALPPDALISKIAIQGSLAVGQNWLLDEQTSTLTRLRYSYRVICSDNYYGDNCSRLCKKRNDHFGHYVCQPDGNLSCLPGWTGEYCQQPICLSGCHEQNGYCSKPAECLCRPGWQGRLCNECIPHNGCRHGTCSTPWQCTCDEGWGGLFCDQDLNYCTHHSPCKNGATCSNSGQRSYTCTCRPGYTGVDCELELSECDSNPCRNGGSCKDQEDGYHCLCPPGYYGLHCEHSTLSCADSPCFNGGSCRERNQGANYACECPPNFTGSNCEKKVDRCTSNPCANGGQCLNRGPSRMCRCRPGFTGTYCELHVSDCARNPCAHGGTCHDLENGLMCTCPAGFSGRRCEVRTSIDACASSPCFNRATCYTDLSTDTFVCNCPYGFVGSRCEFPVGLPPSFPWVAVSLGVGLAVLLVLLGMVAVAVRQLRLRRPDDGSREAMNNLSDFQKDNLIPAAQLKNTNQKKELEVDCGLDKSNCGKQQNHTLDYNLAPGPLGRGTMPGKFPHSDKSLGEKAPLRLHSEKPECRISAICSPRDSMYQSVCLISEERNECVIATEV

SEQ ID NO: 9065 - protein, 1401 aa, Homo sapiens
MKSCGVSLATAAAAAAAFGDEEKKMAAGKASGESEEASPSLTAEEREALGGLDSRLFGFVRFHEDGARTKALLGKAVRCYESLILKAEGKVESDFFCQLGHFNLLLEDYPKALSAYQRYYSLQSDYWKNAAFLYGLGLVYFHYNAFQWAIKAFQEVLYVDPSFCRAKEIHLRVGLMFKVNTDYESSLKHFQLALVDCNPCTLSNAEIQFHIAHLYETQRKYHSAKEAYEQLLQTENLSAQVKATVLQQLGWMHHTVDLLGDKATKESYAIQYLQKSLEADPNSGQSWYFLGRCYSSIGKVQDAFISYRQSIDKSEASADTWCSIGVLYQQQNQPMDALQAYICAVQLDHGHAAAWMDLGTLYESCNQPQDAIKCYLNATRSKSCSNTSALAARIKYLQAQLCNLPQGSLQNKTKLLPSIEEAWSLPIPAELTSRQGAMNTAQQNTSDNWSGGHAVSHPPVQQQAHSWCLTPQKLQHLEQLRANRNNLNPAQKLMLEQLESQFVLMQQHQMRPTGVAQVRSTGIPNGPTADSSLPTNSVSGQQPQLALTRVPSVSQPGVRPACPGQPLANGPFSAGHVPCSTSRTRGSTDTILIGNNHITGNGSNGNVPYLQRNALTLPHNRTNLTSSAKEPWKNQLSNSTQGLHKGQSSHSAGPNGERPLSSTGPSQHLQAAGSGIQNQNGHPTLPSNSVTQGAALNHLSSHTATSGGQQGITLTKESKPSGNILTVPETSRHTGETPNSTASVEGLPNHVHQMTADAVCSPSHGDSKSPGLLSSDNPQLSALLMGKANNNVGTGTCDKVNNIHPAVHTKTDNSVASSPSSAISTATPSPKSTEQTTTNSVTSLNSPHSGLHTINGEGMEESQSPMKTDLLLVNHKPSPQIIPSMSVSIYPSSAEVLKACRNLGKNGLSNSSILLDKCPPPRPPSSPYPPLPKDKLNPPTPSIYLENKRDAFFPPLHQFCTNPNNPVTVIRGLAGALKLDLGLFSTKTLVEANNEHMVEVRTQLLQPADENWDPTGTKKIWHCESNRSHTTIAKYAQYQASSFQESLREENEKRSHHKDHSDSESTSSDNSGRRRKGPFKTIKFGTNIDLSDDKKWKLQLHELTKLPAFVRVVSAGNLLSHVGHTILGMNTVQLYMKVPGSRTPGHQENNNFCSVNINIGPGDCEWFVVPEGYWGVLNDFCEKNNLNFLMGSWWPNLEDLYEANVPVYRFIQRPGDLVWINAGTVHWVQAIGWCNNIAWNVGPLTACQYKLAVERYEWNKLQSVKSIVPMVHLSWNMARNIKVSDPKLFEMIKYCLLRTLKQCQTLREALIAAGKEIIWHGRTKEEPAHYCSICEVEVFDLLFVTNESNSRKTYIVHCQDCARKTSGNLENFVVLEQYKMEDLMQVYDQFTLAPPLPSASS

SEQ ID NO: 9066 - protein, 1035 aa, Homo sapiens
IEEAWSLPIPAELTSRQGAMNTAQQACKPHHPNTEPVLGLSQTPISQQSLPLHMIPSSQVDDLSSPAKRKRTSSPTKNTSDNWSGGHAVSHPPVQQQAHSWCLTPQKLQHLEQLRANRNNLNPAQKLMLEQLESQFVLMQQHQMRPTGVAQVRSTGIPNGPTADSSLPTNSVSGQQPQLALTRVPSVSQPGVRPACPGQPLANGPFSAGHVPCSTSRTLGSTDTILIGNNHITGSGSNGNVPYLQRNALTLPHNRTNLTSSAEEPWKNQLSNSTQGLHKGQSSHSAGPNGERPLSSTGPSQHLQAAGSGIQNQNGHPTLPSNSVTQGAALNHLSSHTATSGGQQGITLTKESKPSGNILKVPETSRHTGETPNSTASVEGLPNHVHQMTADAVCSPSHGDSKSPGLLSSDNPQLSALLMGKANNNVGTGTCDKVNNIHPAVHTKTDNSVASSPSSAISTATPSPKSTEQTTTNSVTSLNSPHSGLHTINGEGMEESQSPMKTDLLLVNHKPSPQIIPSMSVSIYPSSAEVLKACRNLGKNGLSNSSILLDKCPPPRPPSSPYPPLPKDKLNPPTPSIYLENKRDAFFPPLHQFCTNPNNPVTVIRGLAGALKLDLGLFSTKTLVEANNEHMVEVRTQLLQPADENWDPTGTKKIWHCESNRSHTTIAKYAQYQASSFQESLREENEKRSHHKDHSDSESTSSDNSGRRRKGPFKTIKFGTNIDLSDDKKWKLQLHELTKLPAFVRVVSAGNLLSHVGHTILGMNTVQLYMKVPGSRTPGHQENNNFCSVNINIGPGDCEWFVVPEGYWGVLNDFCEKNNLNFLMGSWWPNLEDLYEANVPVYRFIQRPGDLVWINAGTVHWVQAIGWCNNIAWNVGPLTACQYKLAVERYEWNKLQSVKSIVPMVHLSWNMARNIKVSDPKLFEMIKYCLLRTLKQCQTLREALIAAGKEIIWHGRTKEEPAHYCSICEVEVFDLLFVTNESNSRKTYIVHCQDCARKTSGNLENFVVLEQYKMEDLMQVCDQFTLAPPLPSASS

SEQ ID NO: 9067 - protein, 496 aa, Homo sapiens
MGRRALLLLLLSFLAPWATIALRPALRALGSLHLPTNPTSLPAVAKNYSVLYFQQKVDHFGFNTVKTFNQRYLVADKYWKKNGGSILFYTGNEGDIIWFCNNTGFMWDVAEELKAMLVFAEHRYYGESLPFGDNSFKDSRHLNFLTSEQALADFAELIKHLKRTIPGAENQPVIAIGGSYGGMLAAWFRMKYPHMVVGALAASAPIWQFEDLVPCGVFMKIVTTDFRKSGPHCSESIHRSWDAINRLSNTGSGLQWLTGALHLCSPLTSQDIQHLKDWISETWVNLAMVDYPYASNFLQPLPAWPIKVVCQYLKNPNVSDSLLLQNIFQALNVYYNYSGQVKCLNISETATSSLGTLGWSYQACTEVVMPFCTNGVDDMFEPHSWNLKELSDDCFQQWGVRPRPSWITTMYGGKNISSHTNIVFSNGELDPWSGGGVTKDITDTLVAVTISEGAHHLDLRTKNALDPMSVLLARSLEVRHMKNWIRDFYDSAGKQH

SEQ ID NO: 9068 - protein, 3396 aa, Homo sapiens
MFINIKSILWMCSTLIVTHALHKVKVGKSPPVRGSLSGKVSLPCHFSTMPTLPPSYNTSEFLRIKWSKIEVDKNGKDLKETTVLVAQNGNIKIGQDYKGRVSVPTHPEAVGDASLTVVKLLASDAGLYRCDVMYGIEDTQDTVSLTVDGVVFHYRAATSRYTLNFEAAQKACLDVGAVIATPEQLFAAYEDGFEQCDAGWLADQTVRYPIRAPRVGCYGDKMGKAGVRTYGFRSPQETYDVYCYVDHLDGDVFHLTVPSKFTFEEAAKECENQDARLATVGELQAAWRNGFDQCDYGWLSDASVRHPVTVARAQCGGGLLGVRTLYRFENQTGFPPPDSRFDAYCFKPKEATTIDLSILAETASPSLSKEPQMVSDRTTPIIPLVDELPVIPTEFPPVGNIVSFEQKATVQPQAITDSLATKLPTPTGSTKKPWDMDDYSPSASGPLGKLDISEIKEEVLQSTTGVSHYATDSWDGVVEDKQTQESVTQIEQIEVGPLVTSMEILKHIPSKEFPVTETPLVTARMILESKTEKKMVSTVSELVTTGHYGFTLGEEDDEDRTLTVGSDESTLIFDQIPEVITVSKTSEDTIHTHLEDLESVSASTTVSPLIMPDNNGSSMDDWEERQTSGRITEEFLGKYLSTTPFPSQHRTEIELFPYSGDKILVEGISTVIYPSLQTEMTHRRERTETLIPEMRTDTYTDEIQEEITKSPFMGKTEEEVFSGMKLSTSLSEPIHVTESSVEMTKSFDFPTLITKLSAEPTEVRDMEEDFTATPGTTKYDENITTVLLAHGTLSVEAATVSKWSWDEDNTTSKPLESTEPSASSKLPPALLTTVGMNGKDKDIPSFTEDGADEFTLIPDSTQKQLEEVTDEDIAAHGKFTIRFQPTTSTGIAEKSTLRDSTTEEKVPPITSTEGQVYATMEGSALGEVEDVDLSKPVSTVPQFAHTSEVEGLAFVSYSSTQEPTTYVDSSHTIPLSVIPKTDWGVLVPSVPSEDEVLGEPSQDILVIDQTRLEATISPETMRTTKITEGTTQEEFPWKEQTAEKPVPALSSTAWTPKEAVTPLDEQEGDGSAYTVSEDELLTGSERVPVLETTPVGKIDHSVSYPPGAVTEHKVKTDEVVTLTPRIGPKVSLSPGPEQKYETEGSSTTGFTSSLSPFSTHITQLMEETTTEKTSLEDIDLGSGLFEKPKATELIEFSTIKVTVPSDITTAFSSVDRLHTTSAFKPSSAITKKPPLIDREPGEETTSDMVIIGESTSHVPPTTLEDIVAKETETDIDREYFTTSSPPATQPTRPPTVEDKEAFGPQALSTPQPPASTKFHPDINVYIIEVRENKTGRMSDLSVIGHPIDSESKEDEPCSEETDPVHDLMAEILPEFPDIIEIDLYHSEENEEEEEECANATDVTTTPSVQYINGKHLVTTVPKDPEAAEARRGQFESVAPSQNFSDSSESDTHPFVIAKTELSTAVQPNESTETTESLEVTWKPETYPETSEHFSGGEPDVFPTVPFHEEFESGTAKKGAESVTERDTEVGHQAHEHTEPVSLFPEESSGEIAIDQESQKIAFARATEVTFGEEVEKSTSVTYTPTIVPSSASAYVSEEEAVTLIGNPWPDDLLSTKESWVEATPRQVVELSGSSSIPITEGSGEAEEDEDTMFTMVTDLSQRNTTDTLITLDTSRIITESFFEVPATTIYPVSEQPSAKVVPTKFVSETDTSEWISSTTVEEKKRKEEEGTTGTASTFEVYSSTQRSDQLILPFELESPNVATSSDSGTRKSFMSLTTPTQSEREMTDSTPVFTETNTLENLGAQTTEHSSIHQPGVQEGLTTLPRSPASVFMEQGSGEAAADPETTTVSSFSLNVEYAIQAEKEVAGTLSPHVETTFSTEPTGLVLSTVMDRVVAENITQTSREIVISERLGEPNYGAEIRGFSTGFPLEEDFSGDFREYSTVSHPIAKEETVMMEGSGDAAFRDTQTSPSTVPTSVHISHISDSEGPSSTMVSTSAFPWEEFTSSAEGSGEQLVTVSSSVVPVLPSAVQKFSGTASSIIDEGLGEVGTVNEIDRRSTILPTAEVEGTKAPVEKEEVKVSGTVSTNFPQTIEPAKLWSRQEVNPVRQEIESETTSEEQIQEEKSFESPQNSPATEQTIFDSQTFTETELKTTDYSVLTTKKTYSDDKEMKEEDTSLVNMSTPDPDANGLESYTTLPEATEKSHFFLATALVTESIPAEHVVTDSPIKKEESTKHFPKGMRPTIQESDTELLFSGLGSGEEVLPTLPTESVNFTEVEQINNTLYPHTSQVESTSSDKIEDFNRMENVAKEVGPLVSQTDIFEGSGSVTSTTLIEILSDTGAEGPTVAPLPFSTDIGHPQNQTVRWAEEIQTSRPQTITEQDSNKNSSTAEINETTTSSTDFLARAYGFEMAKEFVTSAPKPSDLYYEPSGEGSGEVDIVDSFHTSATTQATRQESSTTFVSDGSLEKHPEVPSAKAVTADGFPTVSVMLPLHSEQNKSSPDPTSTLSNTVSYERSTDGSFQDRFREFEDSTLKPNRKKPTENIIIDLDKEDKDLILTITESTILEILPELTSDKNTIIDIDHTKPVYEDILGMQTDIDTEVPSEPHDSNDESNDDSTQVQEIYEAAVNLSLTEETFEGSADVLASYTQATHDESMTYEDRSQLDHMGFHFTTGIPAPSTETELDVLLPTATSLPIPRKSATVIPEIEGIKAEAKALDDMFESSTLSDGQAIADQSEIIPTLGQFERTQEEYEDKKHAGPSFQPEFSSGAEEALVDHTPYLSIATTHLMDQSVTEVPDVMEGSNPPYYTDTTLAVSTFAKLSSQTPSSPLTIYSGSEASGHTEIPQPSALPGIDVGSSVMSPQDSFKEIHVNIEATFKPSSEEYLHITEPPSLSPDTKLEPSEDDGKPELLEEMEASPTELIAVEGTEILQDFQNKTDGQVSGEAIKMFPTIKTPEAGTVITTADEIELEGATQWPHSTSASATYGVEAGVVPWLSPQTSERPTLSSSPEINPETQAALIRGQDSTIAASEQQVAARILDSNDQATVNPVEFNTEVATPPFSLLETSNETDFLIGINEESVEGTAIYLPGPDRCKMNPCLNGGTCYPTETSYVCTCVPGYSGDQCELDFDECHSNPCRNGATCVDGFNTFRCLCLPSYVGALCEQDTETCDYGWHKFQGQCYKYFAHRRTWDAAERECRLQGAHLTSILSHEEQMFVNRVGHDYQWIGLNDKMFEHDFRWTDGSTLQYENWRPNQPDSFFSAGEDCVVIIWHENGQWNDVPCNYHLTYTCKKGTVACGQPPVVENAKTFGKMKPRYEINSLIRYHCKDGFIQRHLPTIRCLGNGRWAIPKITCMNPSAYQRTYSMKYFKNSSSAKDNSINTSKHDHRWSRRWQESRR

SEQ ID NO: 9069 - protein, 3370 aa, Homo sapiens
MFINIKSILWMCSTLIVTHALHKVKVGKSPPVRGSLSGKVSLPCHFSTMPTLPPSYNTSEFLRIKWSKIEVDKNGKDLKETTVLVAQNGNIKIGQDYKGRVSVPTHPEAVGDASLTVVKLLASDAGLYRCDVMYGIEDTQDTVSLTVDGVVFHYRAATSRYTLNFEAAQKACLDVGAVIATPEQLFAAYEDGFEQCDAGWLADQTVRYPIRAPRVGCYGDKMGKAGVRTYGFRSPQETYDVYCYVDHLDGDVFHLTVPSKFTFEEAAKECENQDARLATVGELQAAWRNGFDQCDYGWLSDASVRHPVTVARAQCGGGLLGVRTLYRFENQTGFPPPDSRFDAYCFKPKEATTIDLSILAETASPSLSKEPQMVSDRTTPIIPLVDELPVIPTEFPPVGNIVSFEQKATVQPQAITDSLATKLPTPTGSTKKPWDMDDYSPSASGPLGKLDISEIKEEVLQSTTGVSHYATDSWDGVVEDKQTQESVTQIEQIEVGPLVTSMEILKHIPSKEFPVTETPLVTARMILESKTEKKMVSTVSELVTTGHYGFTLGEEDDEDRTLTVGSDESTLIFDQIPEVITVSKTSEDTIHTHLEDLESVSASTTVSPLIMPDNNGSSMDDWEERQTSGRITEEFLGKYLSTTPFPSQHRTEIELFPYSGDKILVEGISTVIYPSLQTEMTHRRERTETLIPEMRTDTYTDEIQEEITKSPFMGKTEEEVFSGMKLSTSLSEPIHVTESSVEMTKSFDFPTLITKLSAEPTEVRDMEEDFTATPGTTKYDENITTVLLAHGTLSVEAATVSKWSWDEDNTTSKPLESTEPSASSKLPPALLTTVGMNGKDKDIPSFTEDGADEFTLIPDSTQKQLEEVTDEDIAAHGKFTIRFQPTTSTGIAEKSTLRDSTTEEKVPPITSTEGQVYATMEGSALGEVEDVDLSKPVSTVPQFAHTSEVEGLAFVSYSSTQEPTTYVDSSHTIPLSVIPKTDWGVLVPSVPSEDEVLGEPSQDILVIDQTRLEATISPETMRTTKITEGTTQEEFPWKEQTAEKPVPALSSTAWTPKEAVTPLDEQEGDGSAYTVSEDELLTGSERVPVLETTPVGKIDHSVSYPPGAVTEHKVKTDEVVTLTPRIGPKVSLSPGPEQKYETEGSSTTGFTSSLSPFSTHITQLMEETTTEKTSLEDIDLGSGLFEKPKATELIEFSTIKVTVPSDITTAFSSVDRLHTTSAFKPSSAITKKPPLIDREPGEETTSDMVIIGESTSHVPPTTLEDIVAKETETDIDREYFTTSSPPATQPTRPPTVEDKEAFGPQALSTPQPPASTKFHPDINVYIIEVRENKTGRMSDLSVIGHPIDSESKEDEPCSEETDPVHDLMAEILPEFPDIIEIDLYHSEENEEEEEECANATDVTTTPSVQYINGKHLVTTVPKDPEAAEARRGQFESVAPSQNFSDSSESDTHPFVIAKTELSTAVQPNESTETTESLEVTWKPETYPETSEHFSGGEPDVFPTVPFHEEFESGTAKKGAESVTERDTEVGHQAHEHTEPVSLFPEESSGEIAIDQESQKIAFARATEVTFGEEVEKSTSVTYTPTIVPSSASAYVSEEEAVTLIGNPWPDDLLSTKESWVEATPRQVVELSGSSSIPITEGSGEAEEDEDTMFTMVTDLSQRNTTDTLITLDTSRIITESFFEVPATTIYPVSEQPSAKVVPTKFVSETDTSEWISSTTVEEKKRKEEEGTTGTASTFEVYSSTQRSDQLILPFELESPNVATSSDSGTRKSFMSLTTPTQSEREMTDSTPVFTETNTLENLGAQTTEHSSIHQPGVQEGLTTLPRSPASVFMEQGSGEAAADPETTTVSSFSLNVEYAIQAEKEVAGTLSPHVETTFSTEPTGLVLSTVMDRVVAENITQTSREIVISERLGEPNYGAEIRGFSTGFPLEEDFSGDFREYSTVSHPIAKEETVMMEGSGDAAFRDTQTSPSTVPTSVHISHISDSEGPSSTMVSTSAFPWEEFTSSAEGSGEQLVTVSSSVVPVLPSAVQKFSGTASSIIDEGLGEVGTVNEIDRRSTILPTAEVEGTKAPVEKEEVKVSGTVSTNFPQTIEPAKLWSRQEVNPVRQEIESETTSEEQIQEEKSFESPQNSPATEQTIFDSQTFTETELKTTDYSVLTTKKTYSDDKEMKEEDTSLVNMSTPDPDANGLESYTTLPEATEKSHFFLATALVTESIPAEHVVTDSPIKKEESTKHFPKGMRPTIQESDTELLFSGLGSGEEVLPTLPTESVNFTEVEQINNTLYPHTSQVESTSSDKIEDFNRMENVAKEVGPLVSQTDIFEGSGSVTSTTLIEILSDTGAEGPTVAPLPFSTDIGHPQNQTVRWAEEIQTSRPQTITEQDSNKNSSTAEINETTTSSTDFLARAYGFEMAKEFVTSAPKPSDLYYEPSGEGSGEVDIVDSFHTSATTQATRQESSTTFVSDGSLEKHPEVPSAKAVTADGFPTVSVMLPLHSEQNKSSPDPTSTLSNTVSYERSTDGSFQDRFREFEDSTLKPNRKKPTENIIIDLDKEDKDLILTITESTILEILPELTSDKNTIIDIDHTKPVYEDILGMQTDIDTEVPSEPHDSNDESNDDSTQVQEIYEAAVNLSLTEETFEGSADVLASYTQATHDESMTYEDRSQLDHMGFHFTTGIPAPSTETELDVLLPTATSLPIPRKSATVIPEIEGIKAEAKALDDMFESSTLSDGQAIADQSEIIPTLGQFERTQEEYEDKKHAGPSFQPEFSSGAEEALVDHTPYLSIATTHLMDQSVTEVPDVMEGSNPPYYTDTTLAVSTFAKLSSQTPSSPLTIYSGSEASGHTEIPQPSALPGIDVGSSVMSPQDSFKEIHVNIEATFKPSSEEYLHITEPPSLSPDTKLEPSEDDGKPELLEEMEASPTELIAVEGTEILQDFQNKTDGQVSGEAIKMFPTIKTPEAGTVITTADEIELEGATQWPHSTSASATYGVEAGVVPWLSPQTSERPTLSSSPEINPETQAALIRGQDSTIAASEQQVAARILDSNDQATVNPVEFNTEVATPPFSLLETSNETDFLIGINEESVEGTAIYLPGPDRCKMNPCLNGGTCYPTETSYVCTCVPGYSGDQCELDFDECHSNPCRNGATCVDGFNTFRCLCLPSYVGALCEQDTETCDYGWHKFQGQCYKYFAHRRTWDAAERECRLQGAHLTSILSHEEQMFVNRVGHDYQWIGLNDKMFEHDFRWTDGSTLQYENWRPNQPDSFFSAGEDCVVIIWHENGQWNDVPCNYHLTYTCKKGTVACGQPPVVENAKTFGKMKPRYEINSLIRYHCKDGFIQRHLPTIRCLGNGRWAIPKITCMNRKWSFRKNGLPCYNNY

SEQ ID NO: 9070 - protein, 2409 aa, Homo sapiens
MFINIKSILWMCSTLIVTHALHKVKVGKSPPVRGSLSGKVSLPCHFSTMPTLPPSYNTSEFLRIKWSKIEVDKNGKDLKETTVLVAQNGNIKIGQDYKGRVSVPTHPEAVGDASLTVVKLLASDAGLYRCDVMYGIEDTQDTVSLTVDGVVFHYRAATSRYTLNFEAAQKACLDVGAVIATPEQLFAAYEDGFEQCDAGWLADQTVRYPIRAPRVGCYGDKMGKAGVRTYGFRSPQETYDVYCYVDHLDGDVFHLTVPSKFTFEEAAKECENQDARLATVGELQAAWRNGFDQCDYGWLSDASVRHPVTVARAQCGGGLLGVRTLYRFENQTGFPPPDSRFDAYCFKRRMSDLSVIGHPIDSESKEDEPCSEETDPVHDLMAEILPEFPDIIEIDLYHSEENEEEEEECANATDVTTTPSVQYINGKHLVTTVPKDPEAAEARRGQFESVAPSQNFSDSSESDTHPFVIAKTELSTAVQPNESTETTESLEVTWKPETYPETSEHFSGGEPDVFPTVPFHEEFESGTAKKGAESVTERDTEVGHQAHEHTEPVSLFPEESSGEIAIDQESQKIAFARATEVTFGEEVEKSTSVTYTPTIVPSSASAYVSEEEAVTLIGNPWPDDLLSTKESWVEATPRQVVELSGSSSIPITEGSGEAEEDEDTMFTMVTDLSQRNTTDTLITLDTSRIITESFFEVPATTIYPVSEQPSAKVVPTKFVSETDTSEWISSTTVEEKKRKEEEGTTGTASTFEVYSSTQRSDQLILPFELESPNVATSSDSGTRKSFMSLTTPTQSEREMTDSTPVFTETNTLENLGAQTTEHSSIHQPGVQEGLTTLPRSPASVFMEQGSGEAAADPETTTVSSFSLNVEYAIQAEKEVAGTLSPHVETTFSTEPTGLVLSTVMDRVVAENITQTSREIVISERLGEPNYGAEIRGFSTGFPLEEDFSGDFREYSTVSHPIAKEETVMMEGSGDAAFRDTQTSPSTVPTSVHISHISDSEGPSSTMVSTSAFPWEEFTSSAEGSGEQLVTVSSSVVPVLPSAVQKFSGTASSIIDEGLGEVGTVNEIDRRSTILPTAEVEGTKAPVEKEEVKVSGTVSTNFPQTIEPAKLWSRQEVNPVRQEIESETTSEEQIQEEKSFESPQNSPATEQTIFDSQTFTETELKTTDYSVLTTKKTYSDDKEMKEEDTSLVNMSTPDPDANGLESYTTLPEATEKSHFFLATALVTESIPAEHVVTDSPIKKEESTKHFPKGMRPTIQESDTELLFSGLGSGEEVLPTLPTESVNFTEVEQINNTLYPHTSQVESTSSDKIEDFNRMENVAKEVGPLVSQTDIFEGSGSVTSTTLIEILSDTGAEGPTVAPLPFSTDIGHPQNQTVRWAEEIQTSRPQTITEQDSNKNSSTAEINETTTSSTDFLARAYGFEMAKEFVTSAPKPSDLYYEPSGEGSGEVDIVDSFHTSATTQATRQESSTTFVSDGSLEKHPEVPSAKAVTADGFPTVSVMLPLHSEQNKSSPDPTSTLSNTVSYERSTDGSFQDRFREFEDSTLKPNRKKPTENIIIDLDKEDKDLILTITESTILEILPELTSDKNTIIDIDHTKPVYEDILGMQTDIDTEVPSEPHDSNDESNDDSTQVQEIYEAAVNLSLTEETFEGSADVLASYTQATHDESMTYEDRSQLDHMGFHFTTGIPAPSTETELDVLLPTATSLPIPRKSATVIPEIEGIKAEAKALDDMFESSTLSDGQAIADQSEIIPTLGQFERTQEEYEDKKHAGPSFQPEFSSGAEEALVDHTPYLSIATTHLMDQSVTEVPDVMEGSNPPYYTDTTLAVSTFAKLSSQTPSSPLTIYSGSEASGHTEIPQPSALPGIDVGSSVMSPQDSFKEIHVNIEATFKPSSEEYLHITEPPSLSPDTKLEPSEDDGKPELLEEMEASPTELIAVEGTEILQDFQNKTDGQVSGEAIKMFPTIKTPEAGTVITTADEIELEGATQWPHSTSASATYGVEAGVVPWLSPQTSERPTLSSSPEINPETQAALIRGQDSTIAASEQQVAARILDSNDQATVNPVEFNTEVATPPFSLLETSNETDFLIGINEESVEGTAIYLPGPDRCKMNPCLNGGTCYPTETSYVCTCVPGYSGDQCELDFDECHSNPCRNGATCVDGFNTFRCLCLPSYVGALCEQDTETCDYGWHKFQGQCYKYFAHRRTWDAAERECRLQGAHLTSILSHEEQMFVNRVGHDYQWIGLNDKMFEHDFRWTDGSTLQYENWRPNQPDSFFSAGEDCVVIIWHENGQWNDVPCNYHLTYTCKKGTVACGQPPVVENAKTFGKMKPRYEINSLIRYHCKDGFIQRHLPTIRCLGNGRWAIPKITCMNPSAYQRTYSMKYFKNSSSAKDNSINTSKHDHRWSRRWQESRR

SEQ ID NO: 9071 - protein, 398 aa, Homo sapiens
MHLRIHARRSPPRRPAWTLGIWFLFWGCIVSSVWSSSNVASSSSTSSSPGSHSQHEHHFHGSKHHSVPISIYRSPVSLRGGHAGATYIFGKSGGLILYTWPANDRPSTRSDRLAVGFSTTVKDGILVRIDSAPGLGDFLQLHIEQGKIGVVFNIGTVDISIKEERTPVNDGKYHVVRFTRNGGNATLQVDNWPVNEHYPTGNTDNERFQMVKQKIPFKYNRPVEEWLQEKGRQLTIFNTQAQIAIGGKDKGRLFQGQLSGLYYDGLKVLNMAAENNPNIKINGSVRLVGEVPSILGTTQTTSMPPEMSTTVMETTTTMATTTTRKNRSTASIQPTSDDLVSSAECSSDDEDFVECEPSTGRSARSSNAARSLRAALTWTWRLTYTFTPIIFISCVVHS

SEQ ID NO: 9072 - protein, 536 aa, Homo sapiens
MHLRIHARRSPPRRPAWTLGIWFLFWGCIVSSVWSSSNVASSSSTSSSPGSHSQHEHHFHGSKHHSVPISIYRSPVSLRGGHAGATYIFGKSGGLILYTWPANDRPSTRSDRLAVGFSTTVKDGILVRIDSAPGLGDFLQLHIEQGKIGVVFNIGTVDISIKEERTPVNDGKYHVVRFTRNGGNATLQVDNWPVNEHYPTGRQLTIFNTQAQIAIGGKDKGRLFQGQLSGLYYDGLKVLNMAAENNPNIKINGSVRLVGEVPSILGTTQTTSMPPEMSTTVMETTTTMATTTTRKNRSTASIQPTSDDLVSSAECSSDDEDFVECEPSTDKSLSTSIFEGGYKAHAPKWESKDFRPNKVSETSRTTTTSLSPELIRFTASSSSGMVPKLPAGKMNNRDLKPQPDIVLLPLPTAYELDSTKLKSPLITSPMFRNVPTANPTEPGIRRVPGASEVIRESSSTTGMVVGIVAAAALCILILLYAMYKYRNRDEGSYQVDETRNYISNSAQSNGTLMKEKQQSSKSGHKKQKNKDREYYV

SEQ ID NO: 9073 - protein, 1541 aa, Homo sapiens
MSSTLHSVFFTLKVSILLGSLLGLCLGLEFMGLPNQWARYLRWDASTRSDLSFQFKTNVSTGLLLYLDDGGVCDFLCLSLVDGRVQLRFSMDCAETAVLSNKQVNDSSWHFLMVSRDRLRTVLMLDGEGQSGELQPQRPYMDVVSDLFLGGVPTDIRPSALTLDGVQAMPGFKGLILDLKYGNSEPRLLGSRGVQMDAEGPCGERPCENGGICFLLDGHPTCDCSTTGYGGKLCSEDVSQDPGLSHLMMSEQAREENVATFRGSEYLCYDLSQNPIQSSSDEITLSFKTWQRNGLILHTGKSADYVNLALKDGAVSLVINLGSGAFEAIVEPVNGKFNDNAWHDVKVTRNLRQVTISVDGILTTTGYTQEDYTMLGSDDFFYVGGSPSTADLPGSPVSNNFMGCLKEVVYKNNDIRLELSRLARIADTKMKIYGEVVFKCENVATLDPINFETPEAYISLPKWNTKRMGSISFDFRTTEPNGLILFTHGKPQERKDARSQKNTKVDFFAVELLDGNLYLLLDMGSGTIKVKATQKKANDGEWYHVDIQRDGRSGTISVNSRRTPFTASGESEILDLEGDMYLGGLPENRAGLILPTELWTAMLNYGYVGCIRDLFIDGRSKNIRQLAEMQNAAGVKSSCSRMSAKQCDSYPCKNNAVCKDGWNRFICDCTGTGYWGRTCEREASILSYDGSMYMKIIMPMVMHTEAEDVSFRFMSQRAYGLLVATTSRDSADTLRLELDGGRVKLMVNLDCIRINCNSSKGPETLYAGQKLNDNEWHTVRVVRRGKSLKLTVDDDVAEGTMVGDHTRLEFHNIETGIMTEKRYISVVPSSFIGHLQSLMFNGLLYIDLCKNGDIDYCELKARFGLRNIIADPVTFKTKSSYLSLATLQAYTSMHLFFQFKTTSPDGFILFNSGDGNDFIAVELVKGYIHYVFDLGNGPNVIKGNSDRPLNDNQWHNVVITRDNSNTHSLKVDTKVVTQVINGAKNLDLKGDLYMAGLAQGMYSNLPKLVASRDGFQGCLASVDLNGRLPDLINDALHRSGQIKRGCEGPSTTCQEDSCANQGVCMQQWEGFTCDCSMTSYSGNQCNDPGATYIFGKSGGLILYTWPANDRPSTRSDRLAVGFSTTVKDGILVRIDSAPGLGDFLQLHIEQGKIGVVFNIGTVDISIKEERTPVNDGKYHVVRFTRNGGNATLQVDNWPVNEHYPTGRQLTIFNTQAQIAIGGKDKGRLFQGQLSGLYYDGLKVLNMAAENNPNIKINGSVRLVGEVPSILGTTQTTSMPPEMSTTVMETTTTMATTTTRKNRSTASIQPTSDDLVSSAECSSDDEDFVECEPSTDKSLSTSIFEGGYKAHAPKWESKDFRPNKVSETSRTTTTSLSPELIRFTASSSSGMVPKLPAGKMNNRDLKPQPDIVLLPLPTAYELDSTKLKSPLITSPMFRNVPTANPTEPGIRRVPGASEVIRESSSTTGMVVGIVAAAALCILILLYAMYKYRNRDEGSYQVDETRNYISNSAQSNGTLMKEKQQSSKSGHKKQKNKDREYYV

SEQ ID NO: 9074 - protein, 1392 aa, Homo sapiens
MSSTLHSVFFTLKVSILLGSLLGLCLGLEFMGLPNQWARYLRWDASTRSDLSFQFKTNVSTGLLLYLDDGGVCDFLCLSLVDGRVQLRFSMDCAETAVLSNKQVNDSSWHFLMVSRDRLRTVLMLDGEGQSGELQPQRPYMDVVSDLFLGGVPTDIRPSALTLDGVQAMPGFKGLILDLKYGNSEPRLLGSRGVQMDAEGPCGERPCENGGICFLLDGHPTCDCSTTGYGGKLCSEGLSHLMMSEQGRSKAREENVATFRGSEYLCYDLSQNPIQSSSDEITLSFKTWQRNGLILHTGKSADYVNLALKDGAVSLVINLGSGAFEAIVEPVNGKFNDNAWHDVKVTRNLRQVTISVDGILTTTGYTQEDYTMLGSDDFFYVGGSPSTADLPGSPVSNNFMGCLKEVVYKNNDIRLELSRLARIADTKMKIYGEVVFKCENVATLDPINFETPEAYISLPKWNTKRMGSISFDFRTTEPNGLILFTHGKPQERKDARSQKNTKVDFFAVELLDGNLYLLLDMGSGTIKVKATQKKANDGEWYHVDIQRDGRSGTISVNSRRTPFTASGESEILDLEGDMYLGGLPENRAGLILPTELWTAMLNYGYVGCIRDLFIDGRSKNIRQLAEMQNAAGVKSSCSRMSAKQCDSYPCKNNAVCKDGWNRFICDCTGTGYWGRTCEREASILSYDGSMYMKIIMPMVMHTEAEDVSFRFMSQRAYGLLVATTSRDSADTLRLELDGGRVKLMVNLGKGPETLYAGQKLNDNEWHTVRVVRRGKSLKLTVDDDVAEGTMVGDHTRLEFHNIETGIMTEKRYISVVPSSFIGHLQSLMFNGLLYIDLCKNGDIDYCELKARFGLRNIIADPVTFKTKSSYLSLATLQAYTSMHLFFQFKTTSPDGFILFNSGDGNDFIAVELVKGYIHYVFDLGNGPNVIKGNSDRPLNDNQWHNVVITRDNSNTHSLKVDTKVVTQVINGAKNLDLKGDLYMAGLAQGMYSNLPKLVASRDGFQGCLASVDLNGRLPDLINDALHRSGQIERGCEGPSTTCQEDSCANQGVCMQQWEGFTCDCSMTSYSGNQCNDPGATYIFGKSGGLILYTWPANDRPSTRSDRLAVGFSTTVKDGILVRIDSAPGLGDFLQLHIEQGKIGVVFNIGTVDISIKEERTPVNDGKYHVVRFTRNGGNATLQVDNWPVNEHYPTGNTDNERFQMVKQKIPFKYNRPVEEWLQEKGRQLTIFNTQAQIAIGGKDKGRLFQGQLSGLYYDGLKVLNMAAENNPNIKINGSVRLVGEVPSILGTTQTTSMPPEMSTTVMETTTTMATTTTRKNRSTASIQPTSDDLVSSAECSSDDEDFVECEPSTGRSARSSNAARSLRAALTWTWRLTYTFTPIIFISCVVHS

SEQ ID NO: 9075 - protein, 688 aa, Homo sapiens
MKPLSLLIEILIILGVTIKTIKAEEHNKRQKERNVTTQVSVNEIKQYLSHILEQRTSSNVINKRENLLEKKKNQRKIRIKGIQNKDILKRNKNHLQKQAEKNFTDEGDQLFKMGIKVLQQSKSQKQKEEAYLLFAKAADMGNLKAMEKMADALLFGNFGVQNITAAIQLYESLAKEGSCKAQNALGFLSSYGIGMEYDQAKALIYYTFGSAGGNMMSQMILGYRYLSGINVLQNCEVALSYYKKVADYIADTFEKSEGVPVEKVRLTERPENLSSNSEILDWDIYQYYKFLAERGDVQIQVSLGQLHLIGRKGLDQDYYKALHYFLKAAKAGSANAMAFIGKMYLEGNAAVPQNNATAFKYFSMAASKGNAIGLHGLGLLYFHGKGVPLNYAEALKYFQKAAEKGWPDAQFQLGFMYYSGSGIWKDYKLAFKYFYLASQSGQPLAIYYLAKMYATGTGVVRSCRTAVELYKGVCELGHWAEKFLTAYFAYKDGDIDSSLVQYALLAEMGYEVAQSNSAFILESKKANILEKEKMYPMALLLWNRAAIQGNAFARVKIGDYHYYGYGTKKDYQTAATHYSIAANKYHNAQAMFNLAYMYEHGLGITKDIHLARRLYDMAAQTSPDAHIPVLFAVMKLETTHLLRDILFFNFTTRWNWLKLDNTIGPHWDLFVIGLIVPGLILLLRNHHG

SEQ ID NO: 9076 - protein, 753 aa, Homo sapiens
  VARIANT 157, 162, 232, 348: Xaa = Any Amino Acid
MSSWLGSLGSRWGQSLGQVGGSLASLTGQISNFTKVMLMEGSEEVEAELPDSRTKEIEAIHSILRSENERLKKLCTDLEDQLLKLRSAAQSVPSAAGDVPATTAASFIYVISHHSSAFHDDDMDFEDTILSQQEINRLLNEVSRLESEVGYWRHIAXTLKAXGTHSSAQSKTCKLQNIIKELKQNQSQEIDDHQHEISVLHNAHQQEISQRHREELSDYEERTEELKNLLQXGSSGVTEIDHSKVYEMQKTIQLLQTEKVESTKKIEELEDKIKDINKKLSSAENGRDILRREQEQLNVEKKQLLNAVKSVQGRQLYFNRRDQVMLALKQKQMENTALQREVQCLRDXEFQSNQKLERLRNHLLESEGSYTSEALASEHREAKLRKKVTVLEEKLVSSSNAMENASHQASVQVESLQEQLNVVSKQRDETALLSASQQQVKQYALSLANLQMVLQHFQKEEKSMYSAELQKQKQLIAEWKKKAESLERKVISLQERLDEADAALDSASRLTEQLDLKEEQIEELKKQNEFQQEMLDDVQKKLVNLANSLEGKVDKVLMRNLFISHFHMPKNQRHEVLRLMGSILGVRREEMEQLFHDNQGSVTRWMTGWLGRGSKSVPNTPLRPNQQSVLNSSFSECFVKFLETESHSSVPPPKLSVHDMKPLESPGRRKLDTNAPESFKDTAESRSGRRREVNSVLAPRSAAVPLINPAGLGPGGPQHLLLKPISDVWPTFTPLPVLPDNSAGVVLKDLGKQ

SEQ ID NO: 9077 - protein, 528 aa, Homo sapiens
  VARIANT 472: Xaa = Any Amino Acid
MLRLPTVFRQMRLVSRVLAPHLTGAYAKDVKFGADARALMLQGIDLLADAVALTMGPKGRRTVIIEQSWGSPKVTKDGVTVAKSIDLKDKYKNIGAKLVQDVANNTNEETGDGPTTATVLARSIAKEGIEKISKGANPVEIRRGVMLVVDAVIAELKKQSKPVTTPEEIAQVATISANGDKEIGNISDAMKKVGRKGVITVKDGKTLNDELEIIEGIKFDRGYISPYFINTSKGQKCEFQDAYVLLSEKRKPLVIIAEDVDGEALSTLVLNRLKVGLQDVAIKAPGFGDNRKNQLKDMAIATGGAVFGEEGLTLNLEDVQPHDLGNVGEVIVTKDDATLLKEKGDKAQIEKRIQEIIEQLDVTTSEYEKEKLNERLAKLSDVVAVLKVEGFVLGGGCALLRCILALDSLTPANEDQKIGTEIIKRTLKIPAMTIAKNAGVEGSSIVEKITQISSEAGYDAMVGDFVNMVEKXIIDPTKVVRTALLDAAGVTSLLTTAEVVVTEIPKEEKDPGMGAMGRMGGGMGSGMF

SEQ ID NO: 9078 - protein, 294 aa, Homo sapiens
ETMRALRDRAGLLLCVLLLAALLEAALGLPVKKPRLRGPRPGSLTRLAEVSASPDPRPLKEEEEAPLLPRTHLQAEPHQHGCWTVTEPAAMTPGNATPPRTPEVTPLRLELQKLPGLANTTLSTPNPDTQASASPDPRPLREEEEARLLPRTHLQAELHQHGCWTVTEPAALTPGNATPPRTQEVTPLLLELQKLPELVHATLSTPNPDNQTMSLRRSGVPGLPAVGTAALASSRGLGPVAMAALPPRPVPVTCPPVLALRTRTPWASPVRSGSSWPAMLRTCMIKMWTAVRSG

SEQ ID NO: 9079 - protein, 658 aa, Homo sapiens
MRALRDRAGLLLCVLLLAALLEAALGLPVKKPRLRGPRPGSLTRLAEVSGGGTGLRSALSVPPPQPAGSSRAGSGTGTHTGSDPPMERGAGAGRKLPDTGRCPVTEGSTVQLIAPWNAADVHSHGDKDSQTCIRVSASPDPRPLKEEEEAPLLPRTHLQAEPHQHGCWTVTEPAAMTPGNATPPRTPEVTPLRLELQKLPGLANTTLSTPNPDTQASASPDPRPLREEEEARLLPRTHLQAELHQHGCWTVTEPAALTPGNATPPRTQEVTPLLLELQKLPELVHATLSTPNPDNQVTIKVVEDPQAEVSIDLLAEPSNPPPQDTLSWLPALWSFLWGDYKGEEKDRAPGEKGEEKEEDEDYPSEDIEGEDQEDKEEDEEEQALWFNGTTDNWDQGWLAPGDWVFKDSVSYDYEPQKEWSPWSPCSGNCSTGKQQRTRPCGYGCTATETRTCDLPSCPGTEDKDTLGLPSEEWKLLARNATDMHDQDVDSCEKWLNCKSDFLIKYLSQMLRDLPSCPCAYPLEAMDSPVSLQDEHQGRSFRWRDASGPRERLDIYQPTARFCLRSMLSGESSTLAAQHCCYDEDSRLLTRGKGAGMPNLISTDFSPKLHFKFDTTPWILCKGDWSRLHAVLPPNNGRACTDNPLEEEYLAQLQEAKEY

SEQ ID NO: 9080 - protein, 468 aa, Homo sapiens
MGFLGTGTWILVLVLPIQAFPKPGGSQDKSLHNRELSAERPLNEQIAEAEEDKIKKTYPPENKPGQSNYSFVDNLNLLKAITEKEKIEKERQSIRSSPLDNKLNVEDVDSTKNRKLIDDYDSTKSGLDHKFQDDPDGLHQLDGTPLTAEDIVHKIAARIYEENDRAAFDKIVSKLLNLGLITESQAHTLEDEVAEVLQKLISKEANNYEEDPNKPTSWTENQAGKIPEKVTPMAAIQDGLAKGENDETVSNTLTLTNGLERRTKTYSEDNFEELQYFPNFYALLKSIDSEKEAKEKETLITIMKTLIDFVKMMVKYGTISPEEGVSYLENLDEMIALQTKNKLEKNATDNISKLFPAPSEKSHEETDSTKEEAAKMEKEYGSLKDSTKDDNSNPGGKTDEPKGKTEAYLEAIRKNIEWLKKHDKKGNKEDYDLSKMRDFINKQADAYVEKGILDKEEAEAIKRIYSSL

SEQ ID NO: 9081 - protein, 727 aa, Homo sapiens
VSLKSDEHHFCGGSLIQEDRVVTAAHCLDSLSEKQLKNITVTSGEYSLFQKDKQEQNIPVSKIITHPEYNSREYMSPDIALLYLKHKVKFGNAVQPICLPDSDDKVEPGILCLSSGWGKISKTSEYSNVLQEMELPIMDDRACNTVLKSMNLPPLGRTMLCAGFPDWGMDACQGDSGGPLVCRRGGGIWILAGITSWVAGCAGGSVPVRNNHVKASLGIFSKVSELMDFITQNLFTDCKPQGTVLFGESGKICYPHSKGDYYSHNCLYVWKIMVPEDKIILIKFTSLDMEKQVGCDHDYVSLRSSSGVLFSKVCGKILPSPLLAETSEAMVPFVSDTEDSGSGFELTVTAVQKSEAGSGCGSLAILVEEGTNHSAKYPDLYPSNTRCHWFICAPEKHIIKLTFEDFAVKFSPNCIYDAVVIYGDSEEKHKLAKLCGMLTITSIFSSSNMTVIYFKSDGKNRLQGFKARFTILPSDVCGIPPFSPQWLSRRIAGGEEACPHCWPWQVGLRFLGDYQCGGAIINPVWILTAAHCVQLKNNPLSWTIIAGDHDRNLKESTEQVRRAKHIIVHEDFNTLSYDSDIALIQLSSPLEYNSVVRPVCLPHSAEPLFSSEICAVTGWGSISADGGLASRLQQIQVHVLEREVCEHTYYSAHPGGITEKMICAGFAASGEKDFCQGDSGGPLVCRHENGPFVLYGIVSWGAGCVQPWKPGVFARVMIFLDWIQSKI

SEQ ID NO: 9082 - protein, 1134 aa, Homo sapiens
MGLLASAGLLLLLVIGHPRSLGLKCGIRMVNMKSKEPAVGSRFFSRISSWRNSTVTGHPWQVSLKSDEHHFCGGSLIQEDRVVTAAHCLDSLSEKQLKNITVTSGEYSLFQKDKQEQNIPVSKIITHPEYNSREYMSPDIALLYLKHKVKFGNAVQPICLPDSDDKVEPGILCLSSGWGKISKTSEYSNVLQEMELPIMDDRACNTVLKSMNLPPLGRTMLCAGFPDWGMDACQGDSGGPLVCRRGGGIWILAGITSWVAGCAGGSVPVRNNHVKASLGIFSKVSELMDFITQNLFTGLDRGQPLSKVGSRYITKALSSVQEVNGSQRGKGILDMEKQVGCDHDYVSLRSSSGVLFNQRSLMEDDGKQNKRVCGKILPSPLLAETSEAMVPFVSDTEDSGSGFELTVTAVQKSEAGSGCGSLAILVEEGTNHSAKYPDLYPSNTRCHWFICAPEKHIIKLTFEDFAVKFSPNCIYDAVVIYGDSEEKHKLAKLCGMLTITSIFSSSNMTVIYFKSDGKNRLQGFKARFTILPSESLNKFEPKLPPQNNPVSTVKAILHDVCGIPPFSPQWLSRRIAGGEEACPHCWPWQVGLRFLGDYQCGGAIINPVWILTAAHCVQLKNNPLSWTIIAGDHDRNLKESTEQVRRAKHIIVHEDFNTLSYDSDIALIQLSSPLEYNSVVRPVCLPHSAEPLFSSEICAVTGWGSISADGGLASRLQQIQVHVLEREVCEHTYYSAHPGGITEKMICAGFAASGEKDFCQGDSGGPLVCRHENGPFVLYGIVSWGAGCVQPWKPGVFARVMIFLDWIQSKINGPASLQTNNKCKTLKQQLPPPTPSPDSASWPGCCSEAELEKPRGFFPTPRYLLDYRGRLECSWVLRVSASSMAKFTIEYLSLLGSPVCQDSVLIIYEERHSKRKTAGGLHGRRLYSMTFMSPGPLVRVTFHALVRGAFGISYIDLKVLGPKDSKITRLSQSSNREHLVPCEDVLLTKPEGIMQIPRNSHRTTMGCQWRLVAPLNHIIQLNIINFPMKPTTFVCHGHLRVYEGFGPGKKLIASFAGTLAMILTKDILKREKLNFINTYIMHIWENSVYDNVRSVGKRKQKKFASNLSYSMEAEKSRIQVPADLVPAKGSLSGS

SEQ ID NO: 9083 - protein, 1180 aa, Homo sapiens
MQLKIMPKKKRLSAGRVPLILFLCQMISALEVPLDPKLLEDLVQPPTITQQSPKDYIIDPRENIVIQCEAKGKPPPSFSWTRNGTHFDIDKDPLVTMKPGTGTLIINIMSEGKAETYEGVYQCTARNERGAAVSNNIVVRPSRSPLWTKEKLEPITLQSGQSLVLPCRPPIGLPPPIIFWMDNSFQRLPQSERVSQGLNGDLYFSNVLPEDTREDYICYARFNHTQTIQQKQPISVKVISAKSSRERPPTFLTPEGNASNKEELRGNVLSLECIAEGLPTPIIYWAKEDGMLPKNRTVYKNFEKTLQIIHVSEADSGNYQCIAKNALGAIHHTISVRVKAAPYWITAPQNLVLSPGEDGTLICRANGNPKPRISWLTNGVPIEIAPDDPSRKIDGDTIIFSNVQERSSAVYQCNASNEYGYLLANAFVNVLAEPPRILTPANTLYQVIANRPALLDCAFFGSPLPTIEWFKGAKGSALHEDIYVLHENGTLEIPVAQKDSTGTYTCVARNKLGMAKNEVHLEIKDPTWIVKQPEYAVVQRGSMVSFECKVKHDHTLSLTVLWLKDNRELPSDERFTVDKDHLVVADVSDDDSGTYTCVANTTLDSVSASAVLSVVAPTPTPAPVYDVPNPPFDLELTDQLDKSVQLSWTPGDDNNSPITKFIIEYEDAMHKPGLWHHQTEVSGTQTTAQLKLSPYVNYSFRVMAVNSIGKSLPSEASEQYLTKASEPDKNPTAVEGLGSEPDNLVITWKPLNGFESNGPGLQYKVSWRQKDGDDEWTSVVVANVSKYIVSGTPTFVPYLIKVQALNDMGFAPEPAVVMGHSGEDLPMVAPGNVRVNVVNSTLAEVHWDPVPLKSIRGHLQGYRIYYWKTQSSSKRNRRHIEKKILTFQGSKTHGMLPGLEPFSHYTLNVRVVNGKGEGPASPDRVFNTPEGVPSAPSSLKIVNPTLDSLTLEWDPPSHPNGILTEYTLKYQPINSTHELGPLVDLKIPANKTRWTLKNLNFSTRYKFYFYAQTSAGSGSQITEEAVTTVDEAMASRQVDIATQGWFIGLMCAVALLILILLIVCFIRRNKGGKYPVKEKEDAHADPEIQPMKEDDGTFGEYSDAEDHKPLKKGSRTPSDRTVKKEDSDDSLVDYGEGVNGQFNEDGSFIGQYSGKKEKEPAEGNESSEAPSPVNAMNSFV

SEQ ID NO: 9084 - protein, 1183 aa, Homo sapiens
MQLKIMPKKKRLSAGRVPLILFLCQMISALEVPLDLVQPPTITQQSPKDYIIDPRENIVIQCEAKGKPPPSFSWTRNGTHFDIDKDPLVTMKPGTGTLIINIMSEGKAETYEGVYQCTARNERGAAVSNNIVVRPSRSPLWTKEKLEPITLQSGQSLVLPCRPPIGLPPPIIFWMDNSFQRLPQSERVSQGLNGDLYFSNVLPEDTREDYICYARFNHTQTIQQKQPISVKVISVDELNDTIAANLSDTEFYGAKSSRERPPTFLTPEGNASNKEELRGNVLSLECIAEGLPTPIIYWAKEDGMLPKNRTVYKNFEKTLQIIHVSEADSGNYQCIAKNALGAIHHTISVRVKAAPYWITAPQNLVLSPGEDGTLICRANGNPKPRISWLTNGVPIEIAPDDPSRKIDGDTIIFSNVQERSSAVYQCNASNEYGYLLANAFVNVLAEPPRILTPANTLYQVIANRPALLDCAFFGSPLPTIEWFKGAKGSALHEDIYVLHENGTLEIPVAQKDSTGTYTCVARNKLGMAKNEVHLEIKDPTWIVKQPEYAVVQRGSMVSFECKVKHDHTLSLTVLWLKDNRELPSDERFTVDKDHLVVADVSDDDSGTYTCVANTTLDSVSASAVLSVVDVPNPPFDLELTDQLDKSVQLSWTPGDDNNSPITKFIIEYEDAMHKPGLWHHQTEVSGTQTTAQLKLSPYVNYSFRVMAVNSIGKSLPSEASEQYLTKASEPDKNPTAVEGLGSEPDNLVITWKPLNGFESNGPGLQYKVSWRQKDGDDEWTSVVVANVSKYIVSGTPTFVPYLIKVQALNDMGFAPEPAVVMGHSGEDLPMVAPGNVRVNVVNSTLAEVHWDPVPLKSIRGHLQGYRIYYWKTQSSSKRNRRHIEKKILTFQGSKTHGMLPGLEPFSHYTLNVRVVNGKGEGPASPDRVFNTPEGVPSAPSSLKIVNPTLDSLTLEWDPPSHPNGILTEYTLKYQPINSTHELGPLVDLKIPANKTRWTLKNLNFSTRYKFYFYAQTSAGSGSQITEEAVTTVDEAMASRQVDIATQGWFIGLMCAVALLILILLIVCFIRRNKGGKYPVKEKEDAHADPEIQPMKEDDGTFGEYSDAEDHKPLKKGSRTPSDRTVKKEDSDDSLVDYGEGVNGQFNEDGSFIGQYSGKKEKEPAEGNESSEAPSPVNAMNSFV

SEQ ID NO: 9085 - protein, 1308 aa, Homo sapiens
MQLKIMPKKKRLSAGRVPLILFLCQMISALEVPLDPKLLEDLVQPPTITQQSPKDYIIDPRENIVIQCEAKGKPPPSFSWTRNGTHFDIDKDPLVTMKPGTGTLIINIMSEGKAETYEGVYQCTARNERGAAVSNNIVVRPSRSPLWTKEKLEPITLQSGQSLVLPCRPPIGLPPPIIFWMDNSFQRLPQSERVSQGLNGDLYFSNVLPEDTREDYICYARFNHTQTIQQKQPISVKVISVDELNDTIAANLSDTEFYGAKSSRERPPTFLTPEGNASNKEELRGNVLSLECIAEGLPTPIIYWAKEDGMLPKNRTVYKNFEKTLQIIHVSEADSGNYQCIAKNALGAIHHTISVRVKAAPYWITAPQNLVLSPGEDGTLICRANGNPKPRISWLTNGVPIEIAPDDPSRKIDGDTIIFSNVQERSSAVYQCNASNEYGYLLANAFVNVLAEPPRILTPANTLYQVIANRPALLDCAFFGSPLPTIEWFKGAKGSALHEDIYVLHENGTLEIPVAQKDSTGTYTCVARNKLGMAKNEVHLEIKDPTWIVKQPEYAVVQRGSMVSFECKVKHDHTLSLTVLWLKDNRELPSDERFTVDKDHLVVADVSDDDSGTYTCVANTTLDSVSASAVLSVVAPTPTPAPVYDVPNPPFDLELTDQLDKSVQLSWTPGDDNNSPITKFIIEYEDAMHKPGLWHHQTEVSGTQTTAQLKLSPYVNYSFRVMAVNSIGKSLPSEASEQYLTKASEPDKNPTAVEGLGSEPDNLVITWKPLNGFESNGPGLQYKVSWRQKDGDDEWTSVVVANVSKYIVSGTPTFVPYLIKVQALNDMGFAPEPAVVMGHSGEDLPMVAPGNVRVNVVNSTLAEVHWDPVPLKSIRGHLQGYRIYYWKTQSSSKRNRRHIEKKILTFQGSKTHGMLPGLEPFSHYTLNVRVVNGKGEGPASPDRVFNTPEGVPSAPSSLKIVNPTLDSLTLEWDPPSHPNGILTEYTLKYQPINSTHELGPLVDLKIPANKTRWTLKNLNFSTRYKFYFYAQTSAGSGSQITEEAVTTVDEAGILPPDVGAGKVQAVNTRISNLTAAAAETYANISWEYEGPEHVNFYVEYGVAGSKEEWRKEIVNGSRSFFGLKGLMPGTAYKVRVGAVGDSGFVSSEDVFETGPAMASRQVDIATQGWFIGLMCAVALLILILLIVCFIRRNKGGKYPVKEKEDAHADPEIQPMKEDDGTFGEYRSLESDAEDHKPLKKGSRTPSDRTVKKEDSDDSLVDYGEGVNGQFNEDGSFIGQYSGKKEKEPAEGNESSEAPSPVNAMNSFV

SEQ ID NO: 9086 - protein, 1304 aa, Homo sapiens
MQLKIMPKKKRLSAGRVPLILFLCQMISALEVPLDPKLLEDLVQPPTITQQSPKDYIIDPRENIVIQCEAKGKPPPSFSWTRNGTHFDIDKDPLVTMKPGTGTLIINIMSEGKAETYEGVYQCTARNERGAAVSNNIVVRPSRSPLWTKEKLEPITLQSGQSLVLPCRPPIGLPPPIIFWMDNSFQRLPQSERVSQGLNGDLYFSNVLPEDTREDYICYARFNHTQTIQQKQPISVKVISVDELNDTIAANLSDTEFYGAKSSRERPPTFLTPEGNASNKEELRGNVLSLECIAEGLPTPIIYWAKEDGMLPKNRTVYKNFEKTLQIIHVSEADSGNYQCIAKNALGAIHHTISVRVKAAPYWITAPQNLVLSPGEDGTLICRANGNPKPRISWLTNGVPIEIAPDDPSRKIDGDTIIFSNVQERSSAVYQCNASNEYGYLLANAFVNVLAEPPRILTPANTLYQVIANRPALLDCAFFGSPLPTIEWFKGAKGSALHEDIYVLHENGTLEIPVAQKDSTGTYTCVARNKLGMAKNEVHLEIKDPTWIVKQPEYAVVQRGSMVSFECKVKHDHTLSLTVLWLKDNRELPSDERFTVDKDHLVVADVSDDDSGTYTCVANTTLDSVSASAVLSVVAPTPTPAPVYDVPNPPFDLELTDQLDKSVQLSWTPGDDNNSPITKFIIEYEDAMHKPGLWHHQTEVSGTQTTAQLKLSPYVNYSFRVMAVNSIGKSLPSEASEQYLTKASEPDKNPTAVEGLGSEPDNLVITWKPLNGFESNGPGLQYKVSWRQKDGDDEWTSVVVANVSKYIVSGTPTFVPYLIKVQALNDMGFAPEPAVVMGHSGEDLPMVAPGNVRVNVVNSTLAEVHWDPVPLKSIRGHLQGYRIYYWKTQSSSKRNRRHIEKKILTFQGSKTHGMLPGLEPFSHYTLNVRVVNGKGEGPASPDRVFNTPEGVPSAPSSLKIVNPTLDSLTLEWDPPSHPNGILTEYTLKYQPINSTHELGPLVDLKIPANKTRWTLKNLNFSTRYKFYFYAQTSAGSGSQITEEAVTTVDEAGILPPDVGAGKVQAVNTRISNLTAAAAETYANISWEYEGPEHVNFYVEYGVAGSKEEWRKEIVNGSRSFFGLKGLMPGTAYKVRVGAVGDSGFVSSEDVFETGPAMASRQVDIATQGWFIGLMCAVALLILILLIVCFIRRNKGGKYPVKEKEDAHADPEIQPMKEDDGTFGEYSDAEDHKPLKKGSRTPSDRTVKKEDSDDSLVDYGEGVNGQFNEDGSFIGQYSGKKEKEPAEGNESSEAPSPVNAMNSFV

SEQ ID NO: 9087 - protein, 338 aa, Homo sapiens
MVGRVQPDRKQLPLVLLRLLCLLPTGLPVRSVDFNRGTDNITVRQGDTAILRCVLEDKNSKVAWLNRSGIIFAGHDKWSLDPRVELEKRHSLEYSLRIQKVDVYDEGSYTCSVQTQHEPKTSQVYLIVQVPPKISNISSDVTVNEGSNVTLVCMANGRPEPVITWRHLTPTGREFEGEEEYLEILGITREQSGKYECKAANEVSSADVKQVKVTVNYPPTITESKSNEATTGRQASLKCEASAVPAPDFEWYRDDTRINSANGLEIKSTEGQSSLTVTNVTEEHYGNYTCVAANKLGVTNASLVLFRPGSVRGINGSISLAVPLWLLAASLLCLLSKC

SEQ ID NO: 9088 - protein, 205 aa, Homo sapiens
MMRTLITTHPLPLLLLPQQLLQLVQFQEVDTDFDFPEEDKKEEFEECLEKFFSTGPARPPTKEKVKRRVLIEPGMPLNHIEYCNHEIMGKNVYYKHRWVAEHYFLLMQYDELQKICYNRFVPCKNGIRKCNRSKGLVEGVYCNLTEAFEIPACKYESLYRKGYVLITCSWQNEMQKRIPHTINDLVEPPEHRSFLSEDGVFVISP

SEQ ID NO: 9089 - protein, 139 aa, Homo sapiens
KYFLRVLDLLCKNMKHLWFFLLLVAAPRWVLSQVQLQESGPGLVKPSETLSLTCTVSGGSISSYYWSWIRQPPGKGLEWIGYIYYSGSTNYNPSLKSRVTISVDTSKNQFSLKLSSVTAADTAVYYCARDTVRGDVSSL

SEQ ID NO: 9090 - protein, 99 aa, Homo sapiens
QVQLQESGPGLVKPSETLSLTCTVSGGSVSSGGYYWSWIRQPPGKGLEWIGYIYYSGSTNYNPSLKSRVTISVDTSKNQFSLKLSSVTAADTAVYYCAR

SEQ ID NO: 9091 - protein, 665 aa, Homo sapiens
RTRGSAAAGAAGLAFTALCPLLAEAQPLWPCDLQVLRDPQLRRQVPRKPRNGRPEVWSVSSQGSKWIPGAERKLLVYSYFEKETLTFRDVAIEFSLEEWECLNPAQQNLYMNVMLENYKNLVFLAGIAVSKQDPITSLEQEKEPWNMKICEMVDESPAMCSSFTRDLWPEQDIKDSFQQVILRRHGKCEHENLQLRKGSANVVECKVYKKGYNELNQCLTTTQSKIFPCDKYIKVFHKIFNSNRHKTRHTGEKPFKCKKCDESFCMLLHLHQHKRIHIRENSYQCEECDKVFKRFSTLTRHKRVHTGEKPFKCEECGKAFKHSSTLTTHKMIHTGEKPYRCEECGKAFYHSSHLTTHKVIHTGEKPFKCEECGKAFNHPSALTTHKFIHVKEKPYKCEECDKAFNRFSYLTKHKIIHSGEKSYKCEQCGKGFNWSSTLTKHRRIHTGEKPYKCEECGKAFNVSSHLTTHKMIHTGEKPYKCEECGKAFNHSSKLTIHKIIHTGEKPYKCEECGKAFNQSSNLTKHKIIHTGEKLYKCEECGKAFNRSSNLTTHKRIHTGEKPYKCEECGKAFNRSSNLTKHNIIHTGEKSYKCEECGKAFNQSSTLTKHRKIQQGMVAHACNPNTLRGLGEQIARSGVQDQPGQHGKTPSLLKIQKFAGCGGRRL

SEQ ID NO: 9092 - protein, 142 aa, Homo sapiens
MFSHLPFDCVLLLLLLLLTRSSEVEYRAEVGQNAYLPCFYTPAAPGNLVPVCWGKGACPVFECGNVVLRTDERDVNYWTSRYWLNGDFRKGDVSLTIENVTLADSGIYCCRIQIPGIMNDEKFNLKLVIKPGEWTFACHLYE

SEQ ID NO: 9093 - protein, 316 aa, Homo sapiens
MMRTCVLLSAVLWCLTGDKIYVELHQNSPVLICMDFKLSKKEIVDPTYLWIGPNEKTLTGNNRINITETGQLMVKDFLEPLSGLYTCTLSYKTVKAETQEEKTVKKRYDFMVFAYREPDYSYQMAVRFTTRSCIGRYNDVFFRVLKKILDSLISDLSCHVIEPSYKCHSVEIPEHGLIHELFIAFQVNPFAPGWKGACNGSVDCEDTTNHNILQARDRIEDFFRSQAYIFYHNFNKTLPAMHFVDHSLQVVRLDSCRPGFGKNERLHSNCASCCVVCSPATFSPDVNVTCQTCVSVLTYGAKSCPQTSNKNQQYED

SEQ ID NO: 9094 - protein, 338 aa, Homo sapiens
MMRTCVLLSAVLWCLTGVQCPRFTLFNKKGFIYGKTGQPDKIYVELHQNSPVLICMDFKLSKKEIVDPTYLWIGPNEKTLTGNNRINITETGQLMVKDFLEPLSGLYTCTLSYKTVKAETQEEKTVKKRYDFMVFAYREPDYSYQMAVRFTTRSCIGRYNDVFFRVLKKILDSLISDLSCHVIEPSYKCHSVEIPEHGLIHELFIAFQVNPFAPGWKGACNGSVDCEDTTNHNILQARDRIEDFFRSQAYIFYHNFNKTLPAMHFVDHSLQVVRLDSCRPGFGKNERLHSNCASCCVVCSPATFSPDVNVTCQTCVSVLTYGAKSCPQTSNKNQQYED

SEQ ID NO: 9095 - protein, 564 aa, Homo sapiens
MLISRNKLILLLGIVFFERGKSATLSLPKAPSCGQSLVKVQPWNYFNIFSRILGGSQVEKGSYPWQVSLKQRQKHICGGSIVSPQWVITAAHCIANRNIVSTLNVTAGEYDLSQTDPGEQTLTIETVIIHPHFSTKKPMDYDIALLKMAGAFQFGHFVGPICLPELREQFEAGFICTTAGWGRLTEGGVLSQVLQEVNLPILTWEECVAALLTLKRPISGKTFLCTGFPDGGRDACQGDSGGSLMCRNKKGAWTLAGVTSWGLGCGRGWRNNVRKSDQGSPGIFTDISKVLPWIHEHIQTGNRRKSSRAWCSEQDVIVSGAEGKLHFPESLHLYYESKQRCVWTLLVPEEMHVLLSFSHLDVESCHHSYLSMYSLEDRPIGKFCGESLPSSILIGSNSLRLKFVSDATDYAAGFNLTYKALKPNYIPDSGCSYLTVLFEEGLIQSLNYPENYSDKANCDWIFQASKHHLIKLSFQSLEIEESGDCTSDYVTVHSDVERKKEIARLCGYDVPTPVLSPSSIMLISFQSDENGTCRGFQATVSFIPKAGKKIELPTLWFPVLILVM

SEQ ID NO: 9096 - protein, 199 aa, Homo sapiens
MKSGLWYFFLFCLRIKVLTGEINGSANYEMFIFHNGGVQILCKYPDIVQQFKMQLLKGGQILCDLTKTKGSGNTVSIKSLKFCHSQLSNNSVSFFLYNLDHSHANYYFCNLSIFDPPPFKVTLTGGYLHIYESQLCCQLKFWLPIGCAAFVVVCILGCILICWLTKKKYSSSVHDPNGEYMFMRAVNTAKKSRLTDVTL

SEQ ID NO: 9097 - protein, 1525 aa, Homo sapiens
MRGVGWQMLSLSLGLVLAILNKVAPQACPAQCSCSGSTVDCHGLALRSVPRNIPRNTERLDLNGNNITRITKTDFAGLRHLRVLQLMENKISTIERGAFQDLKELERLRLNRNHLQLFPELLFLGTAKLYRLDLSENQIQAIPRKAFRGAVDIKNLQLDYNQISCIEDGAFRALRDLEVLTLNNNNITRLSVASFNHMPKLRTFRLHSNNLYCDCHLAWLSDWLRQRPRVGLYTQCMGPSHLRGHNVAEVQKREFVCSDEEEGHQSFMAPSCSVLHCPAACTCSNNIVDCRGKGLTEIPTNLPETITEIRLEQNTIKVIPPGAFSPYKKLRRIDLSNNQISELAPDAFQGLRSLNSLVLYGNKITELPKSLFEGLFSLQLLLLNANKINCLRVDAFQDLHNLNLLSLYDNKLQTIAKGTFSPLRAIQTMHLAQNPFICDCHLKWLADYLHTNPIETSGARCTSPRRLANKRIGQIKSKKFRCSGTEDYRSKLSGDCFADLACPEKCRCEGTTVDCSNQKLNKIPEHIPQYTAELRLNNNEFTVLEATGIFKKLPQLRKINFSNNKITDIEEGAFEGASGVNEILLTSNRLENVQHKMFKGLESLKTLMLRSNRITCVGNDSFIGLSSVRLLSLYDNQITTVAPGAFDTLHSLSTLNLLANPFNCNCYLAWLGEWLRKKRIVTGNPRCQKPYFLKEIPIQDVAIQDFTCDDGNDDNSCSPLSRCPTECTCLDTVVRCSNKGLKVLPKGIPRDVTELYLDGNQFTLVPKELSNYKHLTLIDLSNNRISTLSNQSFSNMTQLLTLILSYNRLRCIPPRTFDGLKSLRLLSLHGNDISVVPEGAFNDLSALSHLAIGANPLYCDCNMQWLSDWVKSEYKEPGIARCAGPGEMADKLLLTTPSKKFTCQGPVDVNILAKCNPCLSNPCKNDGTCNSDPVDFYRCTCPYGFKGQDCDVPIHACISNPCKHGGTCHLKEGEEDGFWCICADGFEGENCEVNVDDCEDNDCENNSTCVDGINNYTCLCPPEYTGELCEEKLDFCAQDLNPCQHDSKCILTPKGFKCDCTPGYVGEHCDIDFDDCQDNKCKNGAHCTDAVNGYTCICPEGYSGLFCEFSPPMVLPRTSPCDNFDCQNGAQCIVRINEPICQCLPGYQGEKCEKLVSVNFINKESYLQIPSAKVRPQTNITLQIATDEDSGILLYKGDKDHIAVELYRGRVRASYDTGSHPASAIYSVETINDGNFHIVELLALDQSLSLSVDGGNPKIITNLSKQSTLNFDSPLYVGGMPGKSNVASLRQAPGQNGTSFHGCIRNLYINSELQDFQKVPMQTGILPGCEPCHKKVCAHGTCQPSSQAGFTCECQEGWMGPLCDQRTNDPCLGNKCVHGTCLPINAFSYSCKCLEGHGGVLCDEEEDLFNPCQAIKCKHGKCRLSGLGQPYCECSSGYTGDSCDREISCRGERIRDYYQKQQGYAACQTTKKVSRLECRGGCAGGQCCGPLRSKRRKYSFECTDGSSFVDEVEKVVKCGCTRCVS

SEQ ID NO: 9098 - protein, 1529 aa, Homo sapiens
MRGVGWQMLSLSLGLVLAILNKVAPQACPAQCSCSGSTVDCHGLALRSVPRNIPRNTERLDLNGNNITRITKTDFAGLRHLRVLQLMENKISTIERGAFQDLKELERLRLNRNHLQLFPELLFLGTAKLYRLDLSENQIQAIPRKAFRGAVDIKNLQLDYNQISCIEDGAFRALRDLEVLTLNNNNITRLSVASFNHMPKLRTFRLHSNNLYCDCHLAWLSDWLRQRPRVGLYTQCMGPSHLRGHNVAEVQKREFVCSGHQSFMAPSCSVLHCPAACTCSNNIVDCRGKGLTEIPTNLPETITEIRLEQNTIKVIPPGAFSPYKKLRRIDLSNNQISELAPDAFQGLRSLNSLVLYGNKITELPKSLFEGLFSLQLLLLNANKINCLRVDAFQDLHNLNLLSLYDNKLQTIAKGTFSPLRAIQTMHLAQNPFICDCHLKWLADYLHTNPIETSGARCTSPRRLANKRIGQIKSKKFRCSAKEQYFIPGTEDYRSKLSGDCFADLACPEKCRCEGTTVDCSNQKLNKIPEHIPQYTAELRLNNNEFTVLEATGIFKKLPQLRKINFSNNKITDIEEGAFEGASGVNEILLTSNRLENVQHKMFKGLESLKTLMLRSNRITCVGNDSFIGLSSVRLLSLYDNQITTVAPGAFDTLHSLSTLNLLANPFNCNCYLAWLGEWLRKKRIVTGNPRCQKPYFLKEIPIQDVAIQDFTCDDGNDDNSCSPLSRCPTECTCLDTVVRCSNKGLKVLPKGIPRDVTELYLDGNQFTLVPKELSNYKHLTLIDLSNNRISTLSNQSFSNMTQLLTLILSYNRLRCIPPRTFDGLKSLRLLSLHGNDISVVPEGAFNDLSALSHLAIGANPLYCDCNMQWLSDWVKSEYKEPGIARCAGPGEMADKLLLTTPSKKFTCQGPVDVNILAKCNPCLSNPCKNDGTCNSDPVDFYRCTCPYGFKGQDCDVPIHACISNPCKHGGTCHLKEGEEDGFWCICADGFEGENCEVNVDDCEDNDCENNSTCVDGINNYTCLCPPEYTGELCEEKLDFCAQDLNPCQHDSKCILTPKGFKCDCTPGYVGEHCDIDFDDCQDNKCKNGAHCTDAVNGYTCICPEGYSGLFCEFSPPMVLPRTSPCDNFDCQNGAQCIVRINEPICQCLPGYQGEKCEKLVSVNFINKESYLQIPSAKVRPQTNITLQIATDEDSGILLYKGDKDHIAVELYRGRVRASYDTGSHPASAIYSVETINDGNFHIVELLALDQSLSLSVDGGNPKIITNLSKQSTLNFDSPLYVGGMPGKSNVASLRQAPGQNGTSFHGCIRNLYINSELQDFQKVPMQTGILPGCEPCHKKVCAHGTCQPSSQAGFTCECQEGWMGPLCDQRTNDPCLGNKCVHGTCLPINAFSYSCKCLEGHGGVLCDEEEDLFNPCQAIKCKHGKCRLSGLGQPYCECSSGYTGDSCDREISCRGERIRDYYQKQQGYAACQTTKKVSRLECRGGCAGGQCCGPLRSKRRKYSFECTDGSSFVDEVEKVVKCGCTRCVS

SEQ ID NO: 9099 - protein, 1521 aa, Homo sapiens
MRGVGWQMLSLSLGLVLAILNKVAPQACPAQCSCSGSTVDCHGLALRSVPRNIPRNTERLDLNGNNITRITKTDFAGLRHLRVLQLMENKISTIERGAFQDLKELERLRLNRNHLQLFPELLFLGTAKLYRLDLSENQIQAIPRKAFRGAVDIKNLQLDYNQISCIEDGAFRALRDLEVLTLNNNNITRLSVASFNHMPKLRTFRLHSNNLYCDCHLAWLSDWLRQRPRVGLYTQCMGPSHLRGHNVAEVQKREFVCSGHQSFMAPSCSVLHCPAACTCSNNIVDCRGKGLTEIPTNLPETITEIRLEQNTIKVIPPGAFSPYKKLRRIDLSNNQISELAPDAFQGLRSLNSLVLYGNKITELPKSLFEGLFSLQLLLLNANKINCLRVDAFQDLHNLNLLSLYDNKLQTIAKGTFSPLRAIQTMHLAQNPFICDCHLKWLADYLHTNPIETSGARCTSPRRLANKRIGQIKSKKFRCSGTEDYRSKLSGDCFADLACPEKCRCEGTTVDCSNQKLNKIPEHIPQYTAELRLNNNEFTVLEATGIFKKLPQLRKINFSNNKITDIEEGAFEGASGVNEILLTSNRLENVQHKMFKGLESLKTLMLRSNRITCVGNDSFIGLSSVRLLSLYDNQITTVAPGAFDTLHSLSTLNLLANPFNCNCYLAWLGEWLRKKRIVTGNPRCQKPYFLKEIPIQDVAIQDFTCDDGNDDNSCSPLSRCPTECTCLDTVVRCSNKGLKVLPKGIPRDVTELYLDGNQFTLVPKELSNYKHLTLIDLSNNRISTLSNQSFSNMTQLLTLILSYNRLRCIPPRTFDGLKSLRLLSLHGNDISVVPEGAFNDLSALSHLAIGANPLYCDCNMQWLSDWVKSEYKEPGIARCAGPGEMADKLLLTTPSKKFTCQGPVDVNILAKCNPCLSNPCKNDGTCNSDPVDFYRCTCPYGFKGQDCDVPIHACISNPCKHGGTCHLKEGEEDGFWCICADGFEGENCEVNVDDCEDNDCENNSTCVDGINNYTCLCPPEYTGELCEEKLDFCAQDLNPCQHDSKCILTPKGFKCDCTPGYVGEHCDIDFDDCQDNKCKNGAHCTDAVNGYTCICPEGYSGLFCEFSPPMVLPRTSPCDNFDCQNGAQCIVRINEPICQCLPGYQGEKCEKLVSVNFINKESYLQIPSAKVRPQTNITLQIATDEDSGILLYKGDKDHIAVELYRGRVRASYDTGSHPASAIYSVETINDGNFHIVELLALDQSLSLSVDGGNPKIITNLSKQSTLNFDSPLYVGGMPGKSNVASLRQAPGQNGTSFHGCIRNLYINSELQDFQKVPMQTGILPGCEPCHKKVCAHGTCQPSSQAGFTCECQEGWMGPLCDQRTNDPCLGNKCVHGTCLPINAFSYSCKCLEGHGGVLCDEEEDLFNPCQAIKCKHGKCRLSGLGQPYCECSSGYTGDSCDREISCRGERIRDYYQKQQGYAACQTTKKVSRLECRGGCAGGQCCGPLRSKRRKYSFECTDGSSFVDEVEKVVKCGCTRCVS

SEQ ID NO: 9100 - protein, 794 aa, Homo sapiens [sequence omitted]

SEQ ID NO: 9101 - protein, 794 aa, Homo sapiens
MLTRNCLSLLLWVLFDGGLLTPLQPQPQQTLATEPRENVIHLPGQRSHFQRVKRGWVWNQFFVLEEYVGSEPQYVGKLHSDLDKGEGTVKYTLSGDGAGTVFTIDETTGDIHAIRSLDREEKPFYTLRAQAVDIETRKPLEPESEFIIKVQDINDNEPKFLDGPYVATVPEMSPVGAYVLQVKATDADDPTYGNSARVVYSILQGQPYFSIDPKTGVIRTALPNMDREVKEQYQVLIQAKDMGGQLGGLAGTTIVNITLTDVNDNPPRFPKSIFHLKVPESSPIGSAIGRIRAVDPDFGQNAEIEYNIVPGDGGNLFDIVTDEDTQEGVIKLKKPLDFETKKAYTFKVEASNLHLDHRFHSAGPFKDTATVKISVLDVDEPPVFSKPLYTMEVYEDTPVGTIIGAVTAQDLDVGSSAVRYFIDWKSDGDSYFTIDGNEGTIATNELLDRESTAQYNFSIIASKVSNPLLTSKVNILINVLDVNEFPPEISVPYETAVCENAKPGQIIQIVSAADRDLSPAGQQFSFRLSPEAAIKPNFTVRDFRNNTAGIETRRNGYSRRQQELYFLPVVIEDSSYPVQSSTNTMTIRVCRCDSDGTILSCNVEAIFLPVGLSTGALIAILLCIVILLAIVVLYVALRRQKKKDTLMTSKEDIRDNVIHYDDEGGGEEDTQAFDIGALRNPKVIEENKIRRDIKPDSLCLPRQRPPMEDNTDIRDFIHQRLQENDVDPTAPPYDSLATYAYEGSGSVAESLSSIDSLTTEADQDYDYLTDWGPRFKVLADMFGEEESYNPDKVT

SEQ ID NO: 9102 - protein, 1028 aa, Homo sapiens
MRAARALLPLLLQACWTAAQDEPETPRAVAFQDCPVDLFFVLDTSESVALRLKPYGALVDKVKSFTKRFIDNLRDRYYRCDRNLVWNAGALHYSDEVEIIQGLTRMPGGRDALKSSVDAVKYFGKGTYTDCAIKKGLEQLLVGGSHLKENKYLIVVTDGHPLEGYKEPCGGLEDAVNEAKHLGVKVFSVAITPDHLEPRLSIIATDHTYRRNFTAADWGQSRDAEEAISQTIDTIVDMIKNNVEQVCCSFECQPARGPPGLRGDPGFEGERGKPGLPGEKGEAGDPGRPGDLGPVGYQGMKGEKGSRGEKGSRGPKGYKGEKGKRGIDGVDGVKGEMGYPGLPGCKGSPGFDGIQGPPGPKGDPGAFGLKGEKGEPGADGEAGRPGARGPSGDEGPAGEPGPPGEKGEAGDEGNPGPDGAPGERGGPGERGPRGTPGPRGPRGDPGEAGPQGDQGREGPVGVPGDPGEAGPIGPKGYRGDEGPPGSEGARGAPGPAGPPGDPGLMGERGEDGPAGNGTEGFPGFPGYPGNRGAPGINGTKGYPGLKGDEGEAGDPGDDNNDIAPRGVKGAKGYRGPEGPQGPPGHQGPPGPDECEILDIIMKMCSCCECKCGPIDLLFVLDSSESIGLQNFEIAKDFVVKVIDRLSRDELVKFEPGQSYAGVVQYSHSQMQEHVSLRSPSIRNVQELKEAIKSLQWMAGGTFTGEALQYTRDQLLPPSPNNRIALVITDGRSDTQRDTTPLNVLCSPGIQVVSVGIKDVFDFIPGSDQLNVISCQGLAPSQGRPGLSLVKENYAELLEDAFLKNVTAQICIDKKCPDYTCPITFSSPADITILLDGSASVGSHNFDTTKRFAKRLAERFLTAGRTDPAHDVRVAVVQYSGTGQQRPERASLQFLQNYTALASAVDAMDFINDATDVNDALGYVTRFYREASSGAAKKRLLLFSDGNSQGATPAAIEKAVQEAQRAGIEIFVVVVGRQVNEPHIRVLVTGKTAEYDVPYGESHLFRVPSYQALLRGVFHQTVSRKVALG

SEQ ID NO: 9103 - protein, 188 aa, Homo sapiens
MEARFTRGKSALLERALARPRTEVSLSAFALLFSELVQHCQSRVFSVAELQSRLAALGRQVGARVLDALVAREKGARRETKVLGALLFVKGAVWKALFGKEADKLEQANDDARTFYIIEREPLINTYISVPKENSTLNCASFTAGIVEAVLTHSGFPAKVTAHWHKGTTLMIKFEEAVIARDRALEGR

SEQ ID NO: 9104 - protein, 1241 aa, Homo sapiens
MIMFPLFGKISLGILIFVLIEGDFPSLTAQTYLSIEEIQEPKSAVSFLLPEESTDLSLATKKKQPLDRRETERQWLIRRRRSILFPNGVKICPDESVAEAVANHVKYFKVRVCQEAVWEAFRTFWDRLPGREEYHYWMNLCEDGVTSIFEMGTNFSESVEHRSLIMKKLTYAKETVSSSELSSPVPVGDTSTLGDTTLSVPHPEVDAYEGASESSLERPEESISNEIENVIEEATKPAGEQIAEFSIHLLGKQYREELQDSSSFHHQHLEEEFISEVENAFTGLPGYKEIRVLEFRSPKENDSGVDVYYAVTFNGEAISNTTWDLISLHSNKVENHGLVELDDKPTVVYTISNFRDYIAETLQQNFLLGNSSLNPDPDSLQLINVRGVLRHQTEDLVWNTQSSSLQATPSSILDNTFQAAWPSADESITSSIPPLDFSSGPPSATGRELWSESPLGDLVSTHKLAFPSKMGLSSSPEVLEVSSLTLHSVTPAVLQTGLPVASEERTSGSHLVEDGLANVEESEDFLSIDSLPSSSFTQPVPKETIPSMEDSDVSLTSSPYLTSSIPFGLDSLTSKVKDQLKVSPFLPDASMEKELIFDGGLGSGSGQKVDLITWPWSETSSEKSAEPLSKPWLEDDDSLLPAEIEDKKLVLVDKMDSTDQISKHSKYEHDDRSTHFPEEEPLSGPAVPIFADTAAESASLTLPKHISEVPGVDDCSVTKAPLILTSVAISASTDKSDQADAILREDMEQITESSNYEWFDSEVSMVKPDMQTLWTILPESERVWTRTSSLEKLSRDILASTPQSADRLWLSVTQSTKLPPTTISTLLEDEVIMGVQDISLELDRIGTDYYQPEQVQEQNGKVGSYVEMSTSVHSTEMVSVAWPTEGGDDLSYTQTSGALVVFFSLRVTNMMFSEDLFNKNSLEYKALEQRFLELLVPYLQSNLTGFQNLEILNFRNGSIVVNSRMKFANSVPPNVNNAVYMILEDFCTTAYNTMNLAIDKYSLDVESGDEANPCKFQACNEFSECLVNPWSGEAKCRCFPGYLSVEERPCQSLCDLQPDFCLNDGKCDIMPGHGAICRCRVGENWWYRGKHCEEFVSEPVIIGITIASVVGLLVIFSAIIYFFIRTLQAHHDRSERESPFSGSSRQPDSLSSIENAVKYNPVYESHRAGCEKYEGPYPQHPFYSSASGDVIGGLSREEIRQMYESSELSREEIQERMRVLELYANDPEFAAFVREQQVEEV

SEQ ID NO: 9105 - protein, 590 aa, Homo sapiens
MTLTLSVLICLGLSVGPRTCVQAGTLPKPTLWAEPASVIARGKPVTLWCQGPLETEEYRLDKEGLPWARKRQNPLEPGAKAKFHIPSTVYDSAGRYRCYYETPAGWSEPSDPLELVATGFYAEPTLLALPSPVVASGGNVTLQCDTLDGLLTFVLVEEEQKLPRTLYSQKLPKGPSQALFPVGPVTPSCRWRFRCYYYYRKNPQVWSNPSDLLEILVPGVSRKPSLLIPQGSVVARGGSLTLQCRSDVGYDIFVLYKEGEHDLVQGSGQQPQAGLSQANFTLGPVSRSHGGQYRCYGAHNLSPRWSAPSDPLDILIAGLIPDIPALSVQPGPKVASGENVTLLCQSWHQIDTFFLTKEGAAHPPLCLKSKYQSYRHQAEFSMSPVTSAQGGTYRCYSAIRSYPYLLSSPSYPQELVVSGPSGDPSLSPTGSTPTPGPEDQPLTPTGLDPQSGLGRHLGVVTGVSVAFVLLLFLLLFLLLRHRHQSKHRTSAHFYRPAGAAGPEPKDQGLQKRASPVADIQEEILNAAVKDTQPKDGVEMDARAAASEAPQDVTYAQLHSLTLRREATEPPPSQEREPPAEPSIYAPLAIH

SEQ ID NO: 9106 - protein, 491 aa, Homo sapiens
MTLTLSVLICLGLSVGPRTCVQAGTLPKPTLWAEPASVIARGKPVTLWCQGPLETEEYRLDKEGLPWARKRQNPLEPGAKAKFHIPSTVYDSAGRYRCYYETPAGWSEPSDPLELVATGVSRKPSLLIPQGSVVARGGSLTLQCRSDVGYDIFVLYKEGEHDLVQGSGQQPQAGLSQANFTLGPVSRSHGGQYRCYGAHNLSPRWSAPSDPLDILIAGLIPDIPALSVQPGPKVASGENVTLLCQSWHQIDTFFLTKEGAAHPPLCLKSKYQSYRHQAEFSMSPVTSAQGGTYRCYSAIRSYPYLLSSPSYPQELVVSGPSGDPSLSPTGSTPTPAGPEDQPLTPTGLDPQSGLGRHLGVVTGVSVAFVLLLFLLLFLLLRHRHQSKHRTSAHFYRPAGAAGPEPKDQGLQKRASPVADIQEEILNAAVKDTQPKDGVEMDARAAASEAPQDVTYAQLHSLTLRREATEPPPSQEREPPAEPSIYAPLAIH

SEQ ID NO: 9107 - protein, 382 aa, Homo sapiens
GMGMSWDPASDSILGTLPKPTLWAEPASVIARGKPVTLWCQGPLETEEYRLDKEGLPWARKRQNPLEPGAKAKFHIPSTVYDSAGRYRCYYETPAGWSEPSDPLELVATGVSRKPSLLIPQGSVVARGGSLTLQCRSDVGYDIFVLYKEGEHDLVQGSGQQPQAGLSQANFTLGPVSRSHGGQYRCYGAHNLSPRWSAPSDPLDILIAGLIPDIPALSVQPGPKVASGENVTLLCQSWHQIDTFFLTKEGAAHPPLCLKSKYQSYRHQAEFSMSPVTSAQGGTYRCYSAIRSYPYLLSSPSYPQELVVSGEGPDPVLSKLKGSAQALPPGELWAGMESRCGGEGLRGAQPEGDSPLRGEEDNGGSPGMPTLGPISWDANGER

SEQ ID NO: 9108 - protein, 1477 aa, Homo sapiens
MRHGVAWALLVAAALGLGARGVRGAVALADFYPFGAERGDAVTPKQDDGGSGLRPLSVPFPFFGAEHSGLYSGGWPLRLRLSKQDSQWDSWGQGLMTAGSAQLKEQARVPVLSPWLPECDPRPSPYGSPGNEMHLVNNNGIISFLKEVSQFTPVAFPIAKDRCVVAAFWADVDNRRAGDVYYREATDPAMLRRATEDVRHYFPELLDFNATWVFVATWYRVTFFGGSSSSPVNTFQTVLITDGKLSFTIFNYESIVWTTGTHASSGGNATGLGGIAAQAGFNAGDGQRYFSIPGSRTADMAEVETTTNVGVPGRWAFRIDDAQVRVGGCGHTTSVCLALRPCLNGGKCIDDCVTGNPSYTCSCLSGFTGRRCHLDVNECASQPCQNGGTCTHGINSFRCQCPAGFGGPTCETAQSPCDTKECQHGGQCQVENGSAVCVCQAGYTGAACEMDVDDCSPDPCLNGGSCVDLVGNYTCLCAEPFKGLRCETGDHPVPDACLSAPCHNGGTCVDADQGYVCECPEGFMGLDCRERVPDDCECRNGGRCLGANTTLCQCPLGFFGLLCEFEITAMPCNMNTQCPDGGYCMEHGGSYLCVCHTDHNASHSLPSPCDSDPCFNGGSCDAHDDSYTCECPRGFHGKHCEKARPHLCSSGPCRNGGTCKEAGGEYHCSCPYRFTGRHCEIGKPDSCASGPCHNGGTCFHYIGKYKCDCPPGFSGRHCEIAPSPCFRSPCVNGGTCEDRDTDFFCHCQAGYMGRRCQAEVDCGPPEEVKHATLRFNGTRLGAVALYACDRGYSLSAPSRIRVCQPHGVWSEPPQCLEIDECRSQPCLHGGSCQDRVAGYLCLCSTGYEGAHCELERDECRAHPCRNGGSCRNLPGAYVCRCPAGFVGVHCETEVDACDSSPCQHGGRCESGGGAYLCVCPESFFGYHCETVSDPCFSSPCGGRGYCLASNGSHSCTCKVGYTGEDCAKELFPPTALKMERVEESGVSISWNPPNGPAARQMLDGYAVTYVSSDGSYRRTDFVDRTRSSHQLQALAAGRAYNISVFSVKRNSNNKNDISRPAVLLARTRPRPVEGFEVTNVTASTISVQWALHRIRHATVSGVRVSIRHPEALRDQATDVDRSVDRFTFRALLPGKRYTIQLTTLSGLRGEEHPTESLATAPTHVWTRPLPPANLTAARVTATSAHVVWDAPTPGSLLEAYVINVTTSQSTKSRYVPNGKLASYTVRDLLPGRRYQLSVIAVQSTELGPQHSEPAHLYIITSPRDGADRRWHQGGHHPRVLKNRPPPARLPELRLLNDHSAPETPTQPPRFSELVDGRGRVSARFGGSPSKAATVRSQPTASAQLENMEEAPKRVSLALQLPEHGSKDIGNVPGNCSENPCQNGGTCVPGADAHSCDCGPGFKGRRCELACIKVSRPCTRLFSETKAFPVWEGGVCHHVYKRVYRVHQDICFKESCESTSLKKTPNRKQSKSQTLEKS

SEQ ID NO: 9109 - protein, 424 aa, Homo sapiens
MQRLQVVLGHLRGPADSGWMPQAAPCLSGAPQASAADVVVVHGRRTAICRAGRGGFKDTTPDELLSAVMTAVLKDVNLRPEQLGDICVGNVLQPGAGAIMARIAQFLSDIPETVPLSTVNRQCSSGLQAVASIAGGIRNGSYDIGMACGVESMSLADRGNPGNITSRLMEKEKARDCLIPMGITSENVAERFGISREKQDTFALASQQKAARAQSKGCFQAEIVPVTTTVHDDKGTKRSITVTQDEGIRPSTTMEGLAKLKPAFKKDGSTTAGNSSQVSDGAAAILLARRSKAEELGLPILGVLRSYAVVGVPPDIMGIGPAYAIPVALQKAGLTVSDVDIFEINEAFASQAAYCVEKLRLPPEKVNPLGGAVALGHPLGCTGARQVITLLNELKRRGKRAYGVVSMCIGTGMGAAAVFEYPGN

SEQ ID NO: 9110 - protein, 719 aa, Homo sapiens
MEKILFYLFLIGIAVKAQICPKRCVCQILSPNLATLCAKKGLLFVPPNIDRRTVELRLADNFVTNIKRKDFANMTSLVDLTLSRNTISFITPHAFADLRNLRALHLNSNRLTKITNDMFSGLSNLHHLILNNNQLTLISSTAFDDVFALEELDLSYNNLETIPWDAVEKMVSLHTLSLDHNMIDNIPKGTFSHLHKMTRLDVTSNKLQKLPPDPLFQRAQVLATSGIISPSTFALSFGGNPLHCNCELLWLRRLSREDDLETCASPPLLTGRYFWSIPEEEFLCEPPLITRHTHEMRVLEGQRATLRCKARGDPEPAIHWISPEGKLISNATRSLVYDNGTLDILITTVKDTGAFTCIASNPAGEATQIVDLHIIKLPHLLNSTNHIHEPDPGSSDISTSTKSGSNTSSSNGDTKLSQDKIVVAEATSSTALLKFNFQRNIPGIRMFQIQYNGTYDDTLVYRMIPPTSKTFLVNNLAAGTMYDLCVLAIYDDGITSLTATRVVGCIQFTTEQDYVRCHFMQSQFLGGTMIIIIGGIIVASVLVFIIILMIRYKVCNNNGQHKVTKVSNVYSQTNGAQIQGCSVTLPQSVSKQAVGHEENAQCCKATSDNVIQSSETCSSQDSSTTTSALPPSWTSSTSVSQKQKRKTGTKPSTEPQNEAVTNVESQNTNRNNSTALQLASRPPDSVTEGPTSKRAHIKPNALLTNVDQIVQETQRLELI

SEQ ID NO: 9111 - protein, 236 aa, Homo sapiens
MTAEFLSLLCLGLCLGYEDEKKNEKPPKPSLHAWPSSVVEAESNVTLKCQAHSQNVTFVLRKVNDSGYKQEQSSAENEAEFPFTDLKPKDAGRYFCAYKTTASHEWSESSEHLQLVVTDKHDELEAPSMKTDTRTIFVAIFSCISILLLFLSVFIIYRCSQHGSSSEESTKRTSHSKLPEQEAAEADLSNMERVSLSTADPQGVTYAELSTSALSEAASDTTQEPPGSHEYAALKV

SEQ ID NO: 9112 - protein, 236 aa, Homo sapiens
MTAEFLSLLCLGLCLGYEDEKKNEKPPKPSLHAWPSSVVEAESNVTLKCQAHSQNVTFVLRKVNDSGYKQEQSSAENEAEFPFTDLKPKDAGRYFCAYKTTASHEWSESSEHLQLVVTDKHDELEAPSMKTDTRTIFVAIFSCISILLLFLSVFIIYRCSQHSSSSEESTKRTSHSKLPEQEAAEADLSNMERVSLSTADPQGVTYAELSTSALSEAASDTTQEPPGSHEYAALKV

SEQ ID NO: 9113 - protein, 978 aa, Homo sapiens
MLLWVILLVLDSFSLSSSARTPRPIIFLQPPWTTVFQGERVTLTCKGFRFYSPQKTKWYHRYLGKEILRETPDNILEVQESGEYRCQAQGSPLSSPVHLDFSSASLILQAPLSVFEGDSVVLRCRAKAEVTLNNTIYKNDNVLAFLNKRTDFHIPHACLKDNGAYRCTGYKESCCPVSSNTVKIQVQEPFTRPVLRASSFQPISGNPVTLTCETQLSLERSDVPLRFRFFRDDQTLGLGWSLSPNFQITAMWSKDSGFYWCKAATMPYSVISDSPRSWIQVQIPASHPVLTLSPEKALNFEGTKVTLHCETQEDSLRTLYRFYHEGVPLRHKSVRCERGASISFSLTTENSGNYYCTADNGLGAKPSKAVSLSVTVPVSHPVLNLSSPEDLIFEGAKVTLHCEAQRGSLPILYQFHHEGAALERRSANSAGGVAISFSLTAEHSGNYYCTADNGFGPQRSKAVSLSVTVPVSHPVLTLSSAEALTFEGATVTLHCEVQRGSPQILYQFYHEDMPLWSSSTPSVGRVSFSFSLTEGHSGNYYCTADNGFGPQRSEVVSLFVTVPVSRPILTLRVPRAQAVVGDLLELHCEAPRGSPPILYWFYHEDVTLGSSSAPSGGEASFNLSLTAEHSGNYSCEANNGLVAQHSDTISLSVIVPVSRPILTFRAPRAQAVVGDLLELHCEALRGSSPILYWFYHEDVTLGKISAPSGGGASFNLSLTTEHSGIYSCEADNGLEAQRSEMVTLKVAVPVSRPVLTLRAPGTHAAVGDLLELHCEALRGSPLILYRFFHEDVTLGNRSSPSGGASLNLSLTAEHSGNYSCEADNGLGAQRSETVTLYITGLTANRSGPFATGVAGGLLSIAGLAAGALLLYCWLSRKAGRKPASDPARSPSDSDSQEPTYHNVPAWEELQPVYTNANPRGENVVYSEVRIIQEKKKHAVASDPRHLRNKGSPIIYSEVKVASTPVSGSLFLASSAPHR

SEQ ID NO: 9114 - protein, 400 aa, Homo sapiens
MGRLASRPLLLALLSLALCRGRVVRVPTATLVRVVGTELVIPCNVSDYDGPSEQNFDWSFSSLGSSFVELASTWEVGFPAQLYQERLQRGEILLRRTANDAVELHIKNVQPSDQGHYKCSTPSTDATVQGNYEDTVQVKVLADSLHVGPSARPPPSLSLREGEPFELRCTAASASPLHTHLALLWEVHRGPARRSVLALTHEGRFHPGLGYEQRYHSGDVRLDTVGSDAYRLSVSRALSADQGSYRCIVSEWIAEQGNWQEIQEKAVEVATVVIQPTVLRAAVPKNVSVAEGKELDLTCNITTDRADDVRPEVTWSFSRMPDSTLPGSRVLARLDRDSLVHSSPHVALSHVDARSYHLLVRDVSKENSGYYYCHVSLWAPGHNRSWHKVAEAVSSPAGVG

SEQ ID NO: 9115 - protein, 111 aa, Homo sapiens
MVPVLLSLLHLLGPAIPQETQDGHYSLTYLYTGLSRPGKGTHRLQGTVFLNGRAFFHYNSEDRKPEPLGPWRHVEGVEDWEKQSQVQKAREDIFMETLNNIMEYYNDSNGQ

SEQ ID NO: 9116 - protein, 2489 aa, Homo sapiens
MGASSPRSPEPVGPPAPGLPFCCGGSLLAVVVLLALPVAWGQCNAPEWLPFARPTNLTDEFEFPIGTYLNYECRPGYSGRPFSIICLKNSVWTGAKDRCRRKSCRNPPDPVNGMVHVIKGIQFGSQIKYSCTKGYRLIGSSSATCIISGDTVIWDNETPICDRIPCGLPPTITNGDFISTNRENFHYGSVVTYRCNPGSGGRKVFELVGEPSIYCTSNDDQVGIWSGPAPQCIIPNKCTPPNVENGILVSDNRSLFSLNEVVEFRCQPGFVMKGPRRVKCQALNKWEPELPSCSRVCQPPPDVLHAERTQRDKDNFSPGQEVFYSCEPGYDLRGAASMRCTPQGDWSPAAPTCEVKSCDDFMGQLLNGRVLFPVNLQLGAKVDFVCDEGFQLKGSSASYCVLAGMESLWNSSVPVCEQIFCPSPPVIPNGRHTGKPLEVFPFGKAVNYTCDPHPDRGTSFDLIGESTIRCTSDPQGNGVWSSPAPRCGILGHCQAPDHFLFAKLKTQTNASDFPIGTSLKYECRPEYYGRPFSITCLDNLVWSSPKDVCKRKSCKTPPDPVNGMVHVITDIQVGSRINYSCTTGHRLIGHSSAECILSGNAAHWSTKPPICQRIPCGLPPTIANGDFISTNRENFHYGSVVTYRCNPGSGGRKVFELVGEPSIYCTSNDDQVGIWSGPAPQCIIPNKCTPPNVENGILVSDNRSLFSLNEVVEFRCQPGFVMKGPRRVKCQALNKWEPELPSCSRVCQPPPDVLHAERTQRDKDNFSPGQEVFYSCEPGYDLRGAASMRCTPQGDWSPAAPTCEVKSCDDFMGQLLNGRVLFPVNLQLGAKVDFVCDEGFQLKGSSASYCVLAGMESLWNSSVPVCEQIFCPSPPVIPNGRHTGKPLEVFPFGKTVNYTCDPHPDRGTSFDLIGESTIRCTSDPQGNGVWSSPAPRCGILGHCQAPDHFLFAKLKTQTNASDFPIGTSLKYECRPEYYGRPFSITCLDNLVWSSPKDVCKRKSCKTPPDPVNGMVHVITDIQVGSRINYSCTTGHRLIGHSSAECILSGNAAHWSTKPPICQRIPCGLPPTIANGDFISTNRENFHYGSVVTYRCNPGSGGRKVFELVGEPSIYCTSNDDQVGIWSGPAPQCIIPNKCTPPNVENGILVSDNRSLFSLNEVVEFRCQPGFVMKGPRRVKCQALNKWEPELPSCSRVCQPPPDVLHAERTQRDKDNFSPGQEVFYSCEPGYDLRGAASMRCTPQGDWSPAAPTCEVKSCDDFMGQLLNGRVLFPVNLQLGAKVDFVCDEGFQLKGSSASYCVLAGMESLWNSSVPVCEQIFCPSPPVIPNGRHTGKPLEVFPFGKAVNYTCDPHPDRGTSFDLIGESTIRCTSDPQGNGVWSSPAPRCGILGHCQAPDHFLFAKLKTQTNASDFPIGTSLKYECRPEYYGRPFSITCLDNLVWSSPKDVCKRKSCKTPPDPVNGMVHVITDIQVGSRINYSCTTGHRLIGHSSAECILSGNTAHWSTKPPICQRIPCGLPPTIANGDFISTNRENFHYGSVVTYRCNLGSRGRKVFELVGEPSIYCTSNDDQVGIWSGPAPQCIIPNKCTPPNVENGILVSDNRSLFSLNEVVEFRCQPGFVMKGPRRVKCQALNKWEPELPSCSRVCQPPPEILHGEHTPSHQDNFSPGQEVFYSCEPGYDLRGAASLHCTPQGDWSPEAPRCAVKSCDDFLGQLPHGRVLFPLNLQLGAKVSFVCDEGFRLKGSSVSHCVLVGMRSLWNNSVPVCEHIFCPNPPAILNGRHTGTPSGDIPYGKEISYTCDPHPDRGMTFNLIGESTIRCTSDPHGNGVWSSPAPRCELSVRAGHCKTPEQFPFASPTIPINDFEFPVGTSLNYECRPGYFGKMFSISCLENLVWSSVEDNCRRKSCGPPPEPFNGMVHINTDTQFGSTVNYSCNEGFRLIGSPSTTCLVSGNNVTWDKKAPICEIISCEPPPTISNGDFYSNNRTSFHNGTVVTYQCHTGPDGEQLFELVGERSIYCTSKDDQVGVWSSPPPRCISTNKCTAPEVENAIRVPGNRSFFSLTEIVRFRCQPGFVMVGSHTVQCQTNGRWGPKLPHCSRVCQPPPEILHGEHTLSHQDNFSPGQEVFYSCEPSYDLRGAASLHCTPQGDWSPEAPRCTVKSCDDFLGQLPHGRVLLPLNLQLGAKVSFVCDEGFRLKGRSASHCVLAGMKALWNSSVPVCEQIFCPNPPAILNGRHTGTPFGDIPYGKEISYACDTHPDRGMTFNLIGESSIRCTSDRQGNGVWSSPAPRCELSVPAACPDPPKIQNGHYIGGHVSLYLPGMTISYICDPGYLLVGKGFIFCTDQGIWSQLDHYCKEVNCSFPLFMNGISKELEMKKVYHYGDYVTLKCEDGYTLEGSPWSQCQADDRWDPPLAKCTSRAHDALIVGTLSGTIFFILLIIFLSWIILKHRKGNNAHENPKEVAIHLHSQGGSSVHPRTLQTNEENSRVLP

SEQ ID NO: 9117 - protein, 2039 aa, Homo sapiens
MGASSPRSPEPVGPPAPGLPFCCGGSLLAVVVLLALPVAWGQCNAPEWLPFARPTNLTDEFEFPIGTYLNYECRPGYSGRPFSIICLKNSVWTGAKDRCRRKSCRNPPDPVNGMVHVIKGIQFGSQIKYSCTKGYRLIGSSSATCIISGDTVIWDNETPICDRIPCGLPPTITNGDFISTNRENFHYGSVVTYRCNPGSGGRKVFELVGEPSIYCTSNDDQVGIWSGPAPQCIIPNKCTPPNVENGILVSDNRSLFSLNEVVEFRCQPGFVMKGPRRVKCQALNKWEPELPSCSRVCQPPPDVLHAERTQRDKDNFSPGQEVFYSCEPGYDLRGAASMRCTPQGDWSPAAPTCEVKSCDDFMGQLLNGRVLFPVNLQLGAKVDFVCDEGFQLKGSSASYCVLAGMESLWNSSVPVCEQIFCPSPPVIPNGRHTGKPLEVFPFGKAVNYTCDPHPDRGTSFDLIGESTIRCTSDPQGNGVWSSPAPRCGILGHCQAPDHFLFAKLKTQTNASDFPIGTSLKYECRPEYYGRPFSITCLDNLVWSSPKDVCKRKSCKTPPDPVNGMVHVITDIQVGSRINYSCTTGHRLIGHSSAECILSGNAAHWSTKPPICQRIPCGLPPTIANGDFISTNRENFHYGSVVTYRCNPGSGGRKVFELVGEPSIYCTSNDDQVGIWSGPAPQCIIPNKCTPPNVENGILVSDNRSLFSLNEVVEFRCQPGFVMKGPRRVKCQALNKWEPELPSCSRVCQPPPDVLHAERTQRDKDNFSPGQEVFYSCEPGYDLRGAASMRCTPQGDWSPAAPTCEVKSCDDFMGQLLNGRVLFPVNLQLGAKVDFVCDEGFQLKGSSASYCVLAGMESLWNSSVPVCEQIFCPSPPVIPNGRHTGKPLEVFPFGKAVNYTCDPHPDRGTSFDLIGESTIRCTSDPQGNGVWSSPAPRCGILGHCQAPDHFLFAKLKTQTNASDFPIGTSLKYECRPEYYGRPFSITCLDNLVWSSPKDVCKRKSCKTPPDPVNGMVHVITDIQVGSRINYSCTTGHRLIGHSSAECILSGNTAHWSTKPPICQRIPCGLPPTIANGDFISTNRENFHYGSVVTYRCNLGSRGRKVFELVGEPSIYCTSNDDQVGIWSGPAPQCIIPNKCTPPNVENGILVSDNRSLFSLNEVVEFRCQPGFVMKGPRRVKCQALNKWEPELPSCSRVCQPPPEILHGEHTPSHQDNFSPGQEVFYSCEPGYDLRGAASLHCTPQGDWSPEAPRCAVKSCDDFLGQLPHGRVLFPLNLQLGAKVSFVCDEGFRLKGSSVSHCVLVGMRSLWNNSVPVCEHIFCPNPPAILNGRHTGTPSGDIPYGKEISYTCDPHPDRGMTFNLIGESTIRCTSDPHGNGVWSSPAPRCELSVRAGHCKTPEQFPFASPTIPINDFEFPVGTSLNYECRPGYFGKMFSISCLENLVWSSVEDNCRRKSCGPPPEPFNGMVHINTDTQFGSTVNYSCNEGFRLIGSPSTTCLVSGNNVTWDKKAPICEIISCEPPPTISNGDFYSNNRTSFHNGTVVTYQCHTGPDGEQLFELVGERSIYCTSKDDQVGVWSSPPPRCISTNKCTAPEVENAIRVPGNRSFFSLTEIIRFRCQPGFVMVGSHTVQCQTNGRWGPKLPHCSRVCQPPPEILHGEHTLSHQDNFSPGQEVFYSCEPSYDLRGAASLHCTPQGDWSPEAPRCTVKSCDDFLGQLPHGRVLLPLNLQLGAKVSFVCDEGFRLKGRSASHCVLAGMKALWNSSVPVCEQIFCPNPPAILNGRHTGTPFGDIPYGKEISYACDTHPDRGMTFNLIGESSIRCTSDPQGNGVWSSPAPRCELSVPAACPHPPKIQNGHYIGGHVSLYLPGMTISYTCDPGYLLVGKGFIFCTDQGIWSQLDHYCKEVNCSFPLFMNGISKELEMKKVYHYGDYVTLKCEDGYTLEGSPWSQCQADDRWDPPLAKCTSRAHDALIVGTLSGTIFFILLIIFLSWIILKHRKGNNAHENPKEVAIHLHSQGGSSVHPRTLQTNEENSRVLP

SEQ ID NO: 9118 - protein, 504 aa, Homo sapiens
AGSRSAAGNRPLGSSPGPPVVPRPRGVRLAAVWVEVSMSQGVRRAGAGQGVAAAVQLLVTLSFLRSVVEAQVTGVLDDCLCDIDSIDNFNTYKIFPKIKKLQERDYFRYYKVNLKRPCPFWAEDGHCSIKDCHVEPCPESKIPVGIKAGHSNKYLKMANNTKELEVCEQANKLGAINSTLSNQSKEAFIDWARYDDSRDHFCELDDERSPAAQYVDLLLNPERYTGYKGTSAWRVWNSIYEENCFKPRSVYRPLNPLAPSRGEDDGESFYTWLEGLCLEKRVFYKLISGLHASINLHLCANYLLEETWGKPSWGPNIKEFKHRFDPVETKGEGPRRLKNLYFLYLIELRALSKVAPYFERSIVDLYTGNAEEDADTKTLLLNIFQDTKSFPMHFDEKSMFAGDKKGAKSLKEEFRLHFKNISRIMDCVGCDKCRLWGKLQTQGLGTALKILFSEKEIQKLPENSPSKGFQLTRQEIVALLNAFGRLSTSIRDLQNFKVLLQHSR

SEQ ID NO: 9119 - protein, 467 aa, Homo sapiens
MSQGVRRAGAGQGVAAAVQLLVTLSFLRSVVEAQVTGVLDDCLCDIDSIDNFNTYKIFPKIKKLQERDYFRYYKVNLKRPCPFWAEDGHCSIKDCHVEPCPESKIPVGIKAGHSNKYLKMANNTKELEVCEQANKLGAINSTLSNQSKEAFIDWARYDDSRDHFCELDDERSPAAQYVDLLLNPERYTGYKGTSAWRVWNSIYEENCFKPRSVYRPLNPLAPSRGEDDGESFYTWLEGLCLEKRVFYKLISGLHASINLHLCANYLLEETWGKPSWGPNIKEFKHRFDPVETKGEGPRRLKNLYFLYLIELRALSKVAPYFERSIVDLYTGNAEEDADTKTLLLNIFQDTKSFPMHFDEKSMFAGDKKGAKSLKEEFRLHFKNISRIMDCVGCDKCRLWGKLQTQGLGTALKILFSEKEIQKLPENSPSKGFQLTRQEIVALLNAFGRLSTSIRDLQNFKVLLQHSR

SEQ ID NO: 9120 - protein, 986 aa, Homo sapiens
MGPPLPLLLLLLLLLPPRVLPAAPSSVPRGRQLPGRLGCLLEEGLCGASEACVNDGVFGRCQKVPAMDFYRYEVSPVALQRLRVALQKLSGTGFTWQDDYTQYVMDQELADLPKTYLRRPEASSPARPSKHSVGSERRYSREGGAALANALRRHLPFLEALSQAPASDVLARTHTAQDRPPAEGDDRFSESILTYVAHTSALTYPPGPRTQLREDLLPRTLGQLQPDELSPKVDSGVDRHHLMAALSAYAAQRPPAPPGEGSLEPQYLLRAPSRMPRPLLAPAAPQKWPSPLGDSEDPSSTGDGARIHTLLKDLQRQPAEVRGLSGLELDGMAELMAGLMQGVDHGVARGSPGRAALGESGEQADGPKATLRGDSFPDDGVQDDDDRLYQEVHRLSATLGGLLQDHGSRLLPGALPFARPLDMERKKSEHPESSLSSEEETAGVENVKSQTYSKDLLGQQPHSEPGAAAFGELQNQMPGPSKEEQSLPAGAQEALSDGLQLEVQPSEEEARGYIVTDREVLGPAVTFKVSANVQNVTTEDVEKATVDNKDKLEETSGLKILQTGVGSKSKLKFLPPQAEQEDSTKFIALTLVSLACILGVLLASGLIYCLRHSSQHRLKEKLSGLGGDPGADATAAYQELCRQRMATRPPDRPEGPHTSRISSVSSQFSDGPIPSPSARSSASSWSEEPVQSNMDISTGHMILSYMEDHLKNKNRLEKEWEALCAYQAEPNSSFVAQREENVPKNRSLAVLTYDHSRVLLKAENSHSHSDYINASPIMDHDPRNPAYIATQGPLPATVADFWQMVWESGCVVIVMLTPLAENGVRQCYHYWPDEGSNLYHIYEVNLVSEHIWCEDFLVRSFYLKNLQTNETRTVTQFHFLSWYDRGVPSSSRSLLDFRRKVNKCYRGRSCPIIVHCSDGAGRSGTYVLIDMVLNKMAKGAKEIDIAATLEHLRDQRPGMVQTKEQFEFALTAVAEEVNAILKALPQ

SEQ ID NO: 9121 - protein, 1015 aa, Homo sapiens
MGPPLPLLLLLLLLLPPRVLPAAPSSVPRGRQLPGRLGCLLEEGLCGASEACVNDGVFGRCQKVPAMDFYRYEVSPVALQRLRVALQKLSGTGFTWQDDYTQYVMDQELADLPKTYLRRPEASSPARPSKHSVGSERRYSREGGAALANALRRHLPFLEALSQAPASDVLARTHTAQDRPPAEGDDRFSESILTYVAHTSALTYPPGPRTQLREDLLPRTLGQLQPDELSPKVDSGVDRHHLMAALSAYAAQRPPAPPGEGSLEPQYLLRAPSRMPRPLLAPAAPQKWPSPLGDSEDPSSTGDGARIHTLLKDLQRQPAEVRGLSGLELDGMAELMAGLMQGVDHGVARGSPGRAALGESGEQADGPKATLRGDSFPDDGVQDDDDRLYQEVHRLSATLGGLLQDHGSRLLPGALPFARPLDMERKKSEHPESSLSSEEETAGVENVKSQTYSKDLLGQQPHSEPGAAAFGELQNQMPGPSKEEQSLPAGAQEALSDGLQLEVQPSEEEARGYIVTDRDPLRPEEGRRLVEDVARLLQVPSSAFADVEVLGPAVTFKVSANVQNVTTEDVEKATVDNKDKLEETSGLKILQTGVGSKSKLKFLPPQAEQEDSTKFIALTLVSLACILGVLLASGLIYCLRHSSQHRLKEKLSGLGGDPGADATAAYQELCRQRMATRPPDRPEGPHTSRISSVSSQFSDGPIPSPSARSSASSWSEEPVQSNMDISTGHMILSYMEDHLKNKNRLEKEWEALCAYQAEPNSSFVAQREENVPKNRSLAVLTYDHSRVLLKAENSHSHSDYINASPIMDHDPRNPAYIATQGPLPATVADFWQMVWESGCVVIVMLTPLAENGVRQCYHYWPDEGSNLYHIYEVNLVSEHIWCEDFLVRSFYLKNLQTNETRTVTQFHFLSWYDRGVPSSSRSLLDFRRKVNKCYRGRSCPIIVHCSDGAGRSGTYVLIDMVLNKMAKGAKEIDIAATLEHLRDQRPGMVQTKEQFEFALTAVAEEVNAILKALPQ

SEQ ID NO: 9122 - protein, 1042 aa, Homo sapiens
NDSQMAVESEYSLLRTEASFPTMKMFCVSHTLPRVEVMFVSGPQTRERTEPVDPRWQCLVQMWAGCLLEEGLCGASEACVNDGVFGRCQKVPAMDFYRYEVSPVALQRLRVALQKLSGTGFTWQDDYTQYVMDQELADLPKTYLRRPEASSPARPSKHSVGSERRYSREGGAALANALRRHLPFLEALSQAPASDVLARTHTAQDRPPAEGDDRFSESILTYVAHTSALTYPPGPRTQLHEDLLPRTLGQLQPDELSPKVDSGVDRHHLMAALSAYAAQRPPAPPGEGSLEPQYLLRAPSRMPRPLLAPAAPQKWPSPLGDSEDPSSTGDGARIHTLLKDLQRQPAEVRGLSGLELDGMAELMAGLMQGVDHGVARGSPGRAALGESGEQADGPKATLRGDSFPDDGVQDDDDRLYQEVHRLSATLGGLLQDHGSRLLPGALPFARPLDMERKKSEHPESSLSSEEETAGVENVKSQTYSKDLLGQQPHSEPGAAAFGELQNQMPGPSKEEQSLPAGAQEALSDGLQLEVQPSEEEARGYIVTDRDPLRPEEGRRLVEDVARLLQVPSSAFADVEVLGPAVTFKVSANVQNVTTEDVEKATVDNKDKLEETSGLKILQTGVGSKSKLKFLPPQAEQEDSTKFIALTLVSLACILGVLLASGLIYCLRHSSQHRLKEKLSGLGGDPGADATAAYQELCRQRMATRPPDRPEGPHTSRISSVSSQFSDGPIPSPSARSSASSWSEEPVQSNMDISTGHMILSYMEDHLKNKNRLEKEWEALCAYQAEPNSSFVAQREENVPKNRSLAVLTYDHSRVLLKAENSHSHSDYINASPIMDHDPRNPAYIATQGPLPATVADFWQMVWESGCVVIVMLTPLAENGVRQCYHYWPDEGSNLYHIYEVNLVSEHIWCEDFLVRSFYLKNLQTNETRTVTQFHFLSWYDRGVPSSSRSLLDFRRKVNKCYRGRSCPIIVHCSDGAGRSGTYVLIDMVLNKMAKGAKEIDIAATLEHLRDQRPGMVQTKEQFEFALTAVAEEVNAILKALPQ

SEQ ID NO: 9123 - protein, 450 aa, Homo sapiens [sequence omitted]

SEQ ID NO: 9124 - protein, 1038 aa, Homo sapiens
MTSSLQRPWRVPWLPWTILLVSTAAASQNQERLCAFKDPYQQDLGIGESRISHENGTILCSKGSTCYGLWEKSKGDINLVKQGCWSHIGDPQECHYEECVVTTTPPSIQNGTYRFCCCSTDLCNVNFTENFPPPDTTPLSPPHSFNRDETIIIALASVSVLAVLIVALCFGYRMLTGDRKQGLHSMNMMEAAASEPSLDLDNLKLLELIGRGRYGAVYKGSLDERPVAVKVFSFANRQNFINEKNIYRVPLMEHDNIARFIVGDERVTADGRMEYLLVMEYYPNGSLCKYLSLHTSDWVSSCRLAHSVTRGLAYLHTELPRGDHYKPAISHRDLNSRNVLVKNDGTCVISDFGLSMRLTGNRLVRPGEEDNAAISEVGTIRYMAPEVLEGAVNLRDCESALKQVDMYALGLIYWEIFMRCTDLFPGESVPEYQMAFQTEVGNHPTFEDMQVLVSREKQRPKFPEAWKENSLAVRSLKETIEDCWDQDAEARLTAQCAEERMAELMMIWERNKSVSPTVNPMSTAMQNERNLSHNRRVPKIGPYPDYSSSSYIEDSIHHTDSIVKNISSEHSMSSTPLTIGEKNRNSINYERQQAQARIPSPETSVTSLSTNTTTTNTTGLTPSTGMTTISEMPYPDETNLHTTNVAQSIGPTPVCLQLTEEDLETNKLDPKEVDKNLKESSDENLMEHSLKQFSGPDPLSSTSSSLLYPLIKLAVEATGQQDFTQTANGQACLIPDVLPTQIYPLPKQQNLPKRPTSLPLNTKNSTKEPRLKFGSKHKSNLKQVETGVAKMNTINAAEPHVVTVTMNGVAGRNHSVNSHAATTQYANGTVLSGQTTNIVTHRAQEMLQNQFIGEDTRLNINSSPDEHEPLLRREQQAGHDEGVLDRLVDRRERPLEGGRTNSNNNNSNPCSEQDVLAQGVPSTAADPGPSKPRRAQRPNSLDLSATNVLDGSSIQIGESTQDGKSGSGEKIKKRVKTPYSLKRWRPSTWVISTESLDCEVNNNGSNRAVHSKSSTAVYLAEGGTATTMVSKDIGMNCL

SEQ ID NO: 9125 - protein, 1822 aa, Homo sapiens [sequence omitted]

SEQ ID NO: 9126 - protein, 1805 aa, Homo sapiens
MAGPRPSPWARLLLAALISVSLSGTLANRCKKAPVKSCTECVRVDKDCAYCTDEMFRDRRCNTQAELLAAGCQRESIVVMESSFQITEETQIDTTLRRSQMSPQGLRVRLRPGEERHFELEVFEPLESPVDLYILMDFSNSMSDDLDNLKKMGQNLARVLSQLTSDYTIGFGKFVDKVSVPQTDMRPEKLKEPWPNSDPPFSFKNVISLTEDVDEFRNKLQGERISGNLDAPEGGFDAILQTAVCTRDIGWRPDSTHLLVFSTESAFHYEADGANVLAGIMSRNDERCHLDTTGTYTQYRTQDYPSVPTLVRLLAKHNIIPIFAVTNYSYSYYEKLHTYFPVSSLGVLQEDSSNIVELLEEAFNRIRSNLDIRALDSPRGLRTEVTSKMFQKTRTGSFHIRRGEVGIYQVQLRALEHVDGTHVCQLPEDQKGNIHLKPSFSDGLKMDAGIICDVCTCELQKEVRSARCSFNGDFVCGQCVCSEGWSGQTCNCSTGSLSDIQPCLREGEDKPCSGRGECQCGHCVCYGEGRYEGQFCEYDNFQCPRTSGFLCNDRGRCSMGQCVCEPGWTGPSCDCPLSNATCIDSNGGICNGRGHCECGRCHCHQQSLYTDTICEINYSAIHPGLCEDLRSCVQCQAWGTGEKKGRTCEECNFKVKMVDELKRAEEVVVRCSFRDEDDDCTYSYTMEGDGAPGPNSTVLVHKKKDCPPGSFWWLIPLLLLLLPLLALLLLLCWKYCACCKACLALLPCCNRGHMVGFKEDHYMLRENLMASDHLDTPMLRSGNLKGRDVVRWKVTNNMQRPGFATHAASINPTELVPYGLSLRLARLCTENLLKPDTRECAQLRQEVEENLNEVYRQISGVHKLQQTKFRQQPNAGKKQDHTIVDTVLMAPRSAKPALLKLTEKQVEQRAFHDLKVAPGYYTLTADQDARGMVEFQEGVELVDVRVPLFIRPEDDDEKQLLVEAIDVPAGTATLGRRLVNITIIKEQARDVVSFEQPEFSVSRGDQVARIPVIRRVLDGGKSQVSYRTQDGTAQGNRDYIPVEGELLFQPGEAWKELQVKLLELQEVDSLLRGRQVRRFHVQLSNPKFGAHLGQPHSTTIIIRDPDELDRSFTSQMLSSQPPPHGDLGAPQNPNAKAAGSRKIHFNWLPPSGKPMGYRVKYWIQGDSESEAHLLDSKVPSVELTNLYPYCDYEMKVCAYGAQGEGPYSSLVSCRTHQEVPSEPGRLAFNVVSSTVTQLSWAEPAETNGEITAYEVCYGLVNDDNRPIGPMKKVLVDNPKNRMLLIENLRESQPYRYTVKARNGAGWGPEREAIINLATQPKRPMSIPIIPDIPIVDAQSGEDYDSFLMYSDDVLRSPSGSQRPSVSDDTEHLVNGRMDFAFPGSTNSLHRMTTTSAAAYGTHLSPHVPHRVLSTSSTLTRDYNSLTRSEHSHSTTLPRDYSTLTSVSSHGLPPIWEHGRSRLPLSWALGSRSRAQMKGFPPSRGPRDSIILAGRPAAPSWGPDSRLTAGVPDTPTRLVFSALGPTSLRVSWQEPRCERPLQGYSVEYQLLNGGELHRLNIPNPAQTSVVVEDLLPNHSYVFRVRAQSQEGWGREREGVITIESQVHPQSPLCPLPGSAFTLSTPSAPGPLVFTALSPDSLQLSWERPRRPNGDIVGYLVTCEMAQGGGPATAFRVDGDSPESRLTVPGLSENVPYKFKVQARTTEGFGPEREGIITIESQDGGPFPQLGSRAGLFQHPLQSEYSSITTTHTSATEPFLVDGPTLGAQHLEAGGSLTRHVTQEFVSRTLTTSGTLSTHMDQQFFQT

SEQ ID NO: 9127 - protein, 1752 aa, Homo sapiens
MAGPRPSPWARLLLAALISVSLSGTLANRCKKAPVKSCTECVRVDKDCAYCTDEMFRDRRCNTQAELLAAGCQRESIVVMESSFQITEETQIDTTLRRSQMSPQGLRVRLRPGEERHFELEVFEPLESPVDLYILMDFSNSMSDDLDNLKKMGQNLARVLSQLTSDYTIGFGKFVDKVSVPQTDMRPEKLKEPWPNSDPPFSFKNVISLTEDVDEFRNKLQGERISGNLDAPEGGFDAILQTAVCTRDIGWRPDSTHLLVFSTESAFHYEADGANVLAGIMSRNDERCHLDTTGTYTQYRTQDYPSVPTLVRLLAKHNIIPIFAVTNYSYSYYEKLHTYFPVSSLGVLQEDSSNIVELLEEAFNRIRSNLDIRALDSPRGLRTEVTSKMFQKTRTGSFHIRRGEVGIYQVQLRALEHVDGTHVCQLPEDQKGNIHLKPSFSDGLKMDAGIICDVCTCELQKEVRSARCSFNGDFVCGQCVCSEGWSGQTCNCSTGSLSDIQPCLREGEDKPCSGRGECQCGHCVCYGEGRYEGQFCEYDNFQCPRTSGFLCNDRGRCSMGQCVCEPGWTGPSCDCPLSNATCIDSNGGICNGRGHCECGRCHCHQQSLYTDTICEINYSAIHPGLCEDLRSCVQCQAWGTGEKKGRTCEECNFKVKMVDELKRAEEVVVRCSFRDEDDDCTYSYTMEGDGAPGPNSTVLVHKKKDCPPGSFWWLIPLLLLLLPLLALLLLLCWKYCACCKACLALLPCCNRGHMVGFKEDHYMLRENLMASDHLDTPMLRSGNLKGRDVVRWKVTNNMQRPGFATHAASINPTELVPYGLSLRLARLCTENLLKPDTRECAQLRQEVEENLNEVYRQISGVHKLQQTKFRQQPNAGKKQDHTIVDTVLMAPRSAKPALLKLTEKQVEQRAFHDLKVAPGYYTLTADQDARGMVEFQEGVELVDVRVPLFIRPEDDDEKQLLVEAIDVPAGTATLGRRLVNITIIKEQARDVVSFEQPEFSVSRGDQVARIPVIRRVLDGGKSQVSYRTQDGTAQGNRDYIPVEGELLFQPGEAWKELQVKLLELQEVDSLLRGRQVRRFHVQLSNPKFGAHLGQPHSTTIIIRDPDELDRSFTSQMLSSQPPPHGDLGAPQNPNAKAAGSRKIHFNWLPPSGKPMGYRVKYWIQGDSESEAHLLDSKVPSVELTNLYPYCDYEMKVCAYGAQGEGPYSSLVSCRTHQEVPSEPGRLAFNVVSSTVTQLSWAEPAETNGEITAYEVCYGLVNDDNRPIGPMKKVLVDNPKNRMLLIENLRESQPYRYTVKARNGAGWGPEREAIINLATQPKRPMSIPIIPDIPIVDAQSGEDYDSFLMYSDDVLRSPSGSQRPSVSDDTEHLVNGRMDFAFPGSTNSLHRMTTTSAAAYGTHLSPHVPHRVLSTSSTLTRDYNSLTRSEHSHSTTLPRDYSTLTSVSSHDSRLTAGVPDTPTRLVFSALGPTSLRVSWQEPRCERPLQGYSVEYQLLNGGELHRLNIPNPAQTSVVVEDLLPNHSYVFRVRAQSQEGWGREREGVITIESQVHPQSPLCPLPGSAFTLSTPSAPGPLVFTALSPDSLQLSWERPRRPNGDIVGYLVTCEMAQGGGPATAFRVDGDSPESRLTVPGLSENVPYKFKVQARTTEGFGPEREGIITIESQDGGPFPQLGSRAGLFQHPLQSEYSSITTTHTSATEPFLVDGPTLGAQHLEAGGSLTRHVTQEFVSRTLTTSGTLSTHMDQQFFQT

SEQ ID NO: 9128 - protein, 964 aa, Homo sapiens
MAGPRPSPWARLLLAALISVSLSGTLANRCKKAPVKSCTECVRVDKDCAYCTDEMFRDRRCNTQAELLAAGCQRESIVVMESSFQITEETQIDTTLRRSQMSPQGLRVRLRPGEERHFELEVFEPLESPVDLYILMDFSNSMSDDLDNLKKMGQNLARVLSQLTSDYTIGFGKFVDKVSVPQTDMRPEKLKEPWPNSDPPFSFKNVISLTEDVDEFRNKLQGERISGNLDAPEGGFDAILQTAVCTRDIGWRPDSTHLLVFSTESAFHYEADGANVLAGIMSRNDERCHLDTTGTYTQYRTQDYPSVPTLVRLLAKHNIIPIFAVTNYSYSYYEKLHTYFPVSSLGVLQEDSSNIVELLEEAFNRIRSNLDIRALDSPRGLRTEVTSKMFQKTRTGSFHIRRGEVGIYQVQLRALEHVDGTHVCQLPEDQKGNIHLKPSFSDGLKMDAGIICDVCTCELQKEVRSARCSFNGDFVCGQCVCSEGWSGQTCNCSTGSLSDIQPCLREGEDKPCSGRGECQCGHCVCYGEGRYEGQFCEYDNFQCPRTSGFLCNDRGRCSMGQCVCEPGWTGPSCDCPLSNATCIDSNGGICNGRGHCECGRCHCHQQSLYTDTICEINYSAIHPGLCEDLRSCVQCQAWGTGEKKGRTCEECNFKVKMVDELKRAEEVVVRCSFRDEDDDCTYSYTMEGDGAPGPNSTVLVHKKKDCPPGSFWWLIPLLLLLLPLLALLLLLCWKYCACCKACLALLPCCNRGHMVGFKEDHYMLRENLMASDHLDTPMLRSGNLKGRDVVRWKVTNNMQRPGFATHAASINPTELVPYGLSLRLARLCTENLLKPDTRECAQLRQEVEENVRTQELGLAGDVAERGLQADLRCTQAPADQVPAAAQCREKARPHHCGHSADGAPLGQAGPAEAYREAGGTEGLPRPQGGPRLLHPHCRPGRPGHGGVPGGRGAGGRTGAPLYPA

SEQ ID NO: 9129 - protein, 1745 aa, Homo sapiens
MAGPRPSPWARLLLAALISVSLSGTLANRCKKAPVKSCTECVRVDKDCAYCTDEMFRDRRCNTQAELLAAGCQRESIVVMESSFQITEETQIDTTLRRSQMSPQGLRVRLRPGEERHFELEVFEPLESPVDLYILMDFSNSMSDDLDNLKKMGQNLARVLSQLTSDYTIGFGKFVDKVSVPQTDMRPEKLKEPWPNSDPPFSFKNVISLTEDVDEFRNKLQGERISGNLDAPEGGFDAILQTAVCTRDIGWRPDSTHLLVFSTESAFHYEADGANVLAGIMSRNDERCHLDTTGTYTQYRTQDYPSVPTLVRLLAKHNIIPIFAVTNYSYSYYEKLHTYFPVSSLGVLQEDSSNIVELLEEAFNRIRSNLDIRALDSPRGLRTEVTSKMFQKTRTGSFHIRRGEVGIYQVQLRALEHVDGTHVCQLPEDQKGNIHLKPSFSDGLKMDAGIICDVCTCELQKEVRSARCSFNGDFVCGQCVCSEGWSGQTCNCSTGSLSDIQPCLREGEDKPCSGRGECQCGHCVCYGEGRYEGQFCEYDNFQCPRTSGFLCNDRGRCSMGQCVCEPGWTGPSCDCPLSNATCIDSNGGICNGRGHCECGRCHCHQQSLYTDTICEINYSAIHPGLCEDLRSCVQCQAWGTGEKKGRTCEECNFKVKMVDELKRAEEVVVRCSFRDEDDDCTYSYTMEGDGAPGPNSTVLVHKKKDCPPGSFWWLIPLLLLLLPLLALLLLLCWKYCACCKACLALLPCCNRGHMVGFKEDHYMLRENLMASDHLDTPMLRSGNLKGRDVVRWKVTNNMQRPGFATHAASINPTELVPYGLSLRLARLCTENLLKPDTRECAQLRQEVEENLNEVYRQISGVHKLQQTKFRQQPNAGKKQDHTIVDTVLMAPRSAKPALLKLTEKQVEQRAFHDLKVAPGYYTLTADQDARGMVEFQEGVELVDVRVPLFIRPEDDDEKQLLVEAIDVPAGTATLGRRLVNITIIKEQARDVVSFEQPEFSVSRGDQVARIPVIRRVLDGGKSQVSYRTQDGTAQGNRDYIPVEGELLFQPGEAWKELQVKLLELQEVDSLLRGRQVRRFHVQLSNPKFGAHLGQPHSTTIIIRDPDELDRSFTSQMLSSQPPPHGDLGAPQNPNAKAAGSRKIHFNWLPPSGKPMGYRVKYWIQGDSESEAHLLDSKVPSVELTNLYPYCDYEMKVCAYGAQGEGPYSSLVSCRTHQEVPSEPGRLAFNVVSSTVTQLSWAEPAETNGEITAYEVCYGLVNDDNRPIGPMKKVLVDNPKNRMLLIENLRESQPYRYTVKARNGAGWGPEREAIINLATQPKRPMSIPIIPDIPIVDAQSGEDYDSFLMYSDDVLRSPSGSQRPSVSDDTEHLVNGRMDFAFPGSTNSLHRMTTTSAAAYGTHLSPHVPHRVLSTSSTLTRDYNSLTRSEHSHSTTLPRDYSTLTSVSSHDSRLTAGVPDTPTRLVFSALGPTSLRVSWQEPRCERPLQGYSVEYQLLNGGELHRLNIPNPAQTSVVVEDLLPNHSYVFRVRAQSQEGWGREREGVITIESQVHPQSPLCPLPGSAFTLSTPSAPGPLVFTALSPDSLQLSWERPRRPNGDIVGYLVTWPATAFRVDGDSPESRLTVPGLSENVPYKFKVQARTTEGFGPEREGIITIESQDGGPFPQLGSRAGLFQHPLQSEYSSITTTHTSATEPFLVDGPTLGAQHLEAGGSLTRHVTQEFVSRTLTTSGTLSTHMDQQFFQT

SEQ ID NO: 9130 - protein, 484 aa, Homo sapiens [sequence omitted]

SEQ ID NO: 9131 - protein, 775 aa, Homo sapiens
MASAGHIITLLLWGYLLELWTGGHTADTTHPRLRLSHKELLNLNRTSIFHSPFGFLDLHTMLLDEYQERLFVGGRDLVYSLSLERISDGYKEIHWPSTALKMEECIMKGKDAGECANYVRVLHHYNRTHLLTCGTGAFDPVCAFIRVGYHLEDPLFHLESPRSERGRGRCPFDPSSSFISTLIGSELFAGLYSDYWSRDAAIFRSMGRLAHIRTEHDDERLLKEPKFVGSYMIPDNEDRDDNKVYFFFTEKALEAENNAHAIYTRVGRLCVNDVGGQRILVNKWSTFLKARLVCSVPGMNGIDTYFDELEDVFLLPTRDHKNPVIFGLFNTTSNIFRGHAICVYHMSSIRAAFNGPYAHKEGPEYHWSVYEGKVPYPRPGSCASKVNGGRYGTTKDYPDDAIRFARSHPLMYQAIKPAHKKPILVKTDGKYNLKQIAVDRVEAEDGQYDVLFIGTDNGIVLKVITIYNQEMESMEEVILEELQIFKDPVPIISMEISSKRQQLYIGSASAVAQVRFHHCDMYGSACADCCLARDPYCAWDGISCSRYYPTGTHAKRRFRRQDVRHGNAAQQCFGQQFVGDALDKTEEHLAYGIENNSTLLECTPRSLQAKVIWFVQKGRETRKEEVKTDDRVVKMDLGLLFLRLHKSDAGTYFCQTVEHSFVHTVRKITLEVVEEEKVEDMFNKDDEEDRHHRMPCPAQSSISQGAKPWYKEFLQLIGYSNFQRVEEYCEKVWCTDRKRKKLKMSPSKWKYANPQEKKLRSKPEHYRLPRHTLDS

SEQ ID NO: 9132 - protein, 282 aa, Homo sapiens
MSGSSLPSALALSLLLVSGSLLPGPGAAQNEPRIVTSEEVIIRDSPVLPVTLQCNLTSSSHTLTYSYWTKNGVELSATRKNASNMEYRINKPRAEDSGEYHCVYHFVSAPKANATIEVKAAPDITGHKRSENKNEGQDATMYCKSVGYPHPDWIWRKKENGMPMDIVNTSGRFFIINKENYTELNIVNLQITEDPGEYECNATNAIGSASVVTVLRVRSHLAPLWPFLGILAEIIILVVIIVVYEKRKRPDEVPDDDEPAGPMKTNSTNNHKDKNLRQRNTN

SEQ ID NO: 9133 - protein, 398 aa, Homo sapiens
MSGSSLPSALALSLLLVSGSLLPGPGAAQNAGFVKSPMSETKLTGDAFELYCDVVGSPTPEIQWWYAEVNRAESFRQLWDGARKRRVTVNTAYGSNGVSVLRITRLTLEDSGTYECRASNDPKRNDLRQNPSITWIRAQATISVLQKPRIVTSEEVIIRDSPVLPVTLQCNLTSSSHTLTYSYWTKNGVELSATRKNASNMEYRINKPRAEDSGEYHCVYHFVSAPKANATIEVKAAPDITGHKRSENKNEGQDATMYCKSVGYPHPDWIWRKKENGMPMDIVNTSGRFFIINKENYTELNIVNLQITEDPGEYECNATNAIGSASVVTVLRVRSHLAPLWPFLGILAEIIILVVIIVVYEKRKRPDEVPDDDEPAGPMKTNSTNNHKDKNLRQRNTN

SEQ ID NO: 9134 - protein, 315 aa, Homo sapiens
MREAFEQEAKQINKPRLMVTAAVAAGISNIQSGYEIPQLSQYLDYIHVMTYDLHGSWEGYTGENSPLYKYPTDTGSNAYLNVDYVMNYWKDNGAPAEKLIVGFPTYGHNFILSNPSNTGIGAPTSGAGPAGPYAKESGIWAYYEICTFLKNGATQGWDAPQEVPYAYQGNVWVGYDNIKSFDIKAQWLKHNKFGGAMVWAIDLDDFTGTFCNQGKFPLISTLKKALGLQSASCTAPAQPIEPITAAPSGSGNGSGSSSSGGSSGGSGFCAVRANGLYPVANNRNAFWHCVNGVTYQQNCQAGLVFDTSCDCCNWA

SEQ ID NO: 9135 - protein, 476 aa, Homo sapiens [sequence omitted]

SEQ ID NO: 9136 - protein, 368 aa, Homo sapiens
MVSTPENRQTFITSVIKFLRQYEFDGLDFDWEYPGSRGSPPQDKHLFTVLVQEMREAFEQEAKQINKPRLMVTAAVAAGISNIQSGYEIPQLSQYLDYIHVMTYDLHGSWEGYTGENSPLYKYPTDTGSNAYLNVDYVMNYWKDNGAPAEKLIVGFPTYGHNFILSNPSNTGIGAPTSGAGPAGPYAKESGIWAYYEICTFLKNGATQGWDAPQEVPYAYQGNVWVGYDNIKSFDIKAQWLKHNKFGGAMVWAIDLDDFTGTFCNQGKFPLISTLKKALGLQSASCTAPAQPIEPITAAPSGSGNGSGSSSSGGSSGGSGFCAVRANGLYPVANNRNAFWHCVNGVTYQQNCQAGLVFDTSCDCCNWA

SEQ ID NO: 9137 - protein, 534 aa, Homo sapiens
MATGLQVPLPQLATGLLLLLSVQPWAESGKVLVVPTDGSHWLSMREALRDLHARGHQVVVLTLEVNMYIKEENFFTLTTYAISWTQDEFDRLLLGHTQSFFETEHLLMKFSRRMAIMNNMSLIIHRSCVELLHNEALIRHLHATSFDVVLTDPFHLCAAVLAKYLSIPAVFFLRNIPCDLDFKGTQCPNPSSYIPRLLTTNSDHMTFLQRVKNMLYPLALSYLCHAVSAPYASLASELFQREVSVVDLVSHASVWLFRGDFVMDYPRPIMPNMVFIGGINCANGKPLSQEFEAYINASGEHGIVVFSLGSMVSEIPEKKAMAIADALGKIPQTVLWRYTGTRPSNLANNTILVKWLPQNDLLGHPMTRAFITHAGSHGVYESICNGVPMVMMPLFGDQMDNAKRMETKGAGVTLNVLEMTSEDLENALKAVINDKSYKENIMRLSSLHKDRPVEPLDLAVFWVEFVMRHKGAPHLRPAAHDLTWYQYHSLDVIGFLLAVVLTVAFITFKCCAYGYRKCLGKKGRVKKAHKSKTH

SEQ ID NO: 9138 - protein, 218 aa, Homo sapiens
NASLLIQNVTQEDTGSYTLHIIKRGDGTGGVTGRFTFTLYLETPKPSISSSNFNPREATEAVILTCDPETPDASYLWWMNGQSLPMTHSLQLSETNRTLYLFGVTNYTAGPYECEIRNPVSASRSDPVTLNLLHGPDLPRIYPSFTYYHSGQNLYLSCFADSNPPAQYSWTINGKFQLSGQKLSIPQITTKHSGLYACSVRNSATGKESSKSVTVRVS

SEQ ID NO: 9139 - protein, 419 aa, Homo sapiens
MGPLSAPPCTQHITWKGLLLTASLLNFWNPPTTAQVTIEAQPPKVSEGKDVLLLVHNLPQNLTGYIWYKGQIRDLYHYVTSYVVDGQIIKYGPAYSGRETVYSNASLLIQNVTQEDTGSYTLHIIKRGDGTGGVTGRFTFTLYLETPKPSISSSNFNPREATEAVILTCDPETPDASYLWWMNGQSLPMTHSLQLSETNRTLYLFGVTNYTAGPYECEIRNPVSASRSDPVTLNLLPKLPKPYITINNLNPRENKDVSTFTCEPKSENYTYIWWLNGQSLPVSPRVKRRIENRILILPSVTRNETGPYQCEIRDRYGGIRSDPVTLNVLYGPDLPRIYPSFTYYHSGQNLYLSCFADSNPPAQYSWTINGKFQLSGQKLSIPQITTKHSGLYACSVRNSATGKESSKSVTVRVSDWTLP

SEQ ID NO: 9140 - protein, 1230 aa, Homo sapiens [sequence omitted]

SEQ ID NO: 9141 - protein, 1230 aa, Homo sapiens [sequence omitted]

SEQ ID NO: 9142 - protein, 694 aa, Homo sapiens
MEWGYLLEVTSLLAALALLQRSSGAAAASAKELACQEITVPLCKGIGYNYTYMPNQFNHDTQDEAGLEVHQFWPLVEIQCSPDLKFFLCSMYTPICLEDYKKPLPPCRSVCERAKAGCAPLMRQYGFAWPDRMRCDRLPEQGNPDTLCMDYNRTDLTTAAPSPPRRLPPPPPGEQPPSGSGHGRPPGARPPHRGGGRGGGGGDAAAPPARGGGGGGKARPPGGGAAPCEPGCQCRAPMVSVSSERHPLYNRVKTGQIANCALPCHNPFFSQDERAFTVFWIGLWSVLCFVSTFATVSTFLIDMERFKYPERPIIFLSACYLFVSVGYLVRLVAGHEKVACSGGAPGAGGAGGAGGAAAGAGAAGAGAGGPGGRGEYEELGAVEQHVRYETTGPALCTVVFLLVYFFGMASSIWWVILSLTWFLAAGMKWGNEAIAGYSQYFHLAAWLVPSVKSIAVLALSSVDGDPVAGICYVGNQSLDNLRGFVLAPLVIYLFIGTMFLLAGFVSLFRIRSVIKQQDGPTKTHKLEKLMIRLGLFTVLYTVPAAVVVACLFYEQHNRPRWEATHNCPCLRDLQPDQARRPDYAVFMLKYFMCLVVGITSGVWVWSGKTLESWRSLCTRCCWASKGAAVGGGAGATAAGGGGGPGGGGGGGPGGGGGPGGGGGSLYSDVSTGLTWRSGTASSVSYPKQMPLSQV

SEQ ID NO: 9143 - protein, 484 aa, Homo sapiens
MACRGGAGNGHRASATLSRVSPGSLYTCRTRTHNICMVSDFFYPNMGGVESHIYQLSQCLIERGHKVIIVTHAYGNRKGIRYLTSGLKVYYLPLKVMYNQSTATTLFHSLPLLRYIFVRERVTIIHSHSSFSAMAHDALFHAKTMGLQTVFTDHSLFGFADVSSVLTNKLLTVSLCDTNHIICVSYTSKENTVLRAALNPEIVSVIPNAVDPTDFTPDPFRRHDSITIVVVSRLVYRKGIDLLSGIIPELCQKYPDLNFIIGGEGPKRIILEEVRERYQLHDRVRLLGALEHKDVRNVLVQGHIFLNTSLTEAFCMAIVEAASCGLQVVSTRVGGIPEVLPENLIILCEPSVKSLCEGLEKAIFQLKSGTLPAPENIHNIVKTFYTWRNVAERTEKVYDRVSVEAVLPMDKRLDRLISHCGPVTGYIFALLAVFNFLFLIFLRWMTPDSIIDVAIDATGPRGAWTNNYSHSKRGGENNEISETR

SEQ ID NO: 9144 - protein, 578 aa, Homo sapiens
MAVSWRSWLANEGVKHLCLFIWLSMNVLLFWKTFLLYNQGPEYHYLHQMLGLGLCLSRASASVLNLNCSLILLPMCRTLLAYLRGSQKVPSRRTRRLLDKSRTFHITCGVTICIFSGVHVAAHLVNALNFSVNYSEDFVELNAARYRDEDPRKLLFTTVPGLTGVCMVVVLFLMITASTYAIRVSNYDIFWYTHNLFFVFYMLLTLHVSGGLLKYQTNLDTHPPGCISLNRTSSQNISLPEYFSEHFHEPFPEGFSKPAEFTQHKFVKICMEEPRFQANFPQTWLWISGPLCLYCAERLYRYIRSNKPVTIISVISHPSDVMEIRMVKENFKARPGQYITLHCPSVSALENHPFTLTMCPTETKATFGVHLKIVGDWTERFRDLLLPPSSQDSEILPFIQSRNYPKLYIDGPFGSPFEESLNYEVSLCVAGGIGVTPFASILNTLLDDWKPYKLRRLYFIWVCRDIQSFRWFADLLCMLHNKFWQENRPDYVNIQLYLSQTDGIQKIIGEKYHALNSRLFIGRPRWKLLFDEIAKYNRGKTVGVFCCGPNSLSKTLHKLSNQNNSYGTRFEYNKESFS

SEQ ID NO: 9145 - protein, 538 aa, Homo sapiens
MAVSWRSWLANEGVKHLCLFIWLSMNVLLFWKTFLLYNQGPEYHYLHQMLGLGLCLSRASASVLNLNCSLILLPMCRTLLAYLRGSQKVPSRRTRRLLDKSRTFHITCGVTICIFSGVHVAAHLVNALNFSVNYSEDFVELNAARYRDEDPRKLLFTTVPGLTGVCMVVVLFLMITASTYAIRVSNYDIFWYTHNLFFVFYMLLTLHVSGGLLKYQTNLDTHPPGCISLNRTSSQNISLPEYFSEHFHEPFPEGFSKPAEFTQHKFVKICMEEPRFQANFPQTWLWISGPLCLYCAERLYRYIRSNKPVTIISVISHPSDVMEIRMVKENFKARPGQYITLHCPSVSALENHPFTLTMCPTETKATFGVHLKIVGDWTERFRDLLLPPSSQDSEILPFIQSRNYPKDDWKPYKLRRLYFIWVCRDIQSFRWFADLLCMLHNKFWQENRPDYVNIQLYLSQTDGIQKIIGEKYHALNSRLFIGRPRWKLLFDEIAKYNRGKTVGVFCCGPNSLSKTLHKLSNQNNSYGTRFEYNKESFS

SEQ ID NO: 9146 - protein, 365 aa, Homo sapiens
MNITNCTTEASMAIRPKTITEKMLICMTLVVITTLTTLLNLAVIMAIGTTKKLHQPANYLICSLAVTDLLVAVLVMPLSIIYIVMDRWKLGYFLCEVWLSVDMTCCTCSILHLCVIALDRYWAITNAIEYARKRTAKRAALMILTVWTISIFISMPPLFWRSHRRLSPPPSQCTIQHDHVIYTIYSTLGAFYIPLTLILILYYRIYHAAKSLYQKRGSSRHLSNRSTDSQNSFASCKLTQTFCVSDFSTSDPTTEFEKFHASIRIPPFDNDLDHPGERQQISSTRERKAARILGLILGAFILSWLPFFIKELIVGLSIYTVSSEVADFLTWLGYVNSLINPLLYTSFNEDFKLAFKKLIRCREHT

SEQ ID NO: 9147 - protein, 762 aa, Homo sapiens
MASNERDAISWYQKKIGAYDQQIWEKSIEQTQIKGLKNKPKKMGHIKPDLIDVDLIRGSTFAKAKPEIPWTSLTRKGLVRVVFFPLFSNWWIQVTSLRIFVWLLLLYFMQVIAIVLYLMMPIVNISEVLGPLCLMLLMGTVHCQIVSTQITRPSGNNGNRRRRKLRKTVNGDGSRENGNNSSDKVRGIETLESVPIIGGFWETIFGNRIKRVKLISNKGTETDNDPSCVHPIIKRRQCRPEIRMCQTREKPKFSDGEKCRREAFRRLGNGVSDDLSSEEDGEARTQMILLRRSVEGASSDNGCEVKNRKSILSRHLNSQVKKTTTRWCHIVRDSDSLAESEFESAAFSQGSRSGVSGGSRSLNMSRRDSESTRHDSETEDMLWDDLLHGPECRSSVTSDSEGAHVNTLHSGTKRDPKEDVFQQNHLFWLQNSSPSSDRVSAIIWEGNECKKMDMSVLEISGIIMSRVNAYQQGVGYQMLGNVVTIGLAFFPFLHRLFREKSLDQLKSISAEEILTLFGGAPPVTPIIVWSIINFFERLCLTWMFFFMMCVAERTYKQRFLFAKLFSHITSARKARKYEIPHFRLKKVENIKIWLSLRSYLKRRGPQRSVDVVVSSVFLLTLSIAFICCAQVLQGHKTSLNDAYNWEFLIWETALLLFLLRLASLGSETNKKYSNVSILLTEQINLYLKMEKKPNKKEQLTLVNNVLKLSTKLLKELDTPFRLYGLTMNPLIYNITRVVILSAVSGVISDLLGFNIRLWKIKS

SEQ ID NO: 9148 - protein, 1215 aa, Homo sapiens
MGAMAYPLLLCLLLAQLGLGAVGASRDPQGRPDSPRERTPKGKPHAQQPGRASASDSSAPWSRSTDGTILAQKLAEEVPMDVASYLYTGDSHQLKRANCSGRYELAGLPGKWPALASAHPSLHRALDTLTHATNFLNVMLQSNKSREQNLQDDLDWYQALVWSLLEGEPSISRAAITFSTDSLSAPAPQVFLQATREESRILLQDLSSSAPHLANATLETEWFHGLRRKWRPHLHRRGPNQGPRGLGHSWRRKDGLGGDKSHFKWSPPYLECENGSYKPGWLVTLSSAIYGLQPNLVPEFRGVMKVDINLQKVDIDQCSSDGWFSGTHKCHLNNSECMPIKGLGFVLGAYECICKAGFYHPGVLPVNNFRRRGPDQHISGSTKDVSEEAYVCLPCREGCPFCADDSPCFVQEDKYLRLAIISFQALCMLLDFVSMLVVYHFRKAKSIRASGLILLETILFGSLLLYFPVVILYFEPSTFRCILLRWARLLGFATVYGTVTLKLHRVLKVFLSRTAQRIPYMTGGRVMRMLAVILLVVFWFLIGWTSSVCQNLEKQISLIGQGKTSDHLIFNMCLIDRWDYMTAVAEFLFLLWGVYLCYAVRTVPSAFHEPRYMAVAVHNELIISAIFHTIRFVLASRLQSDWMLMLYFAHTHLTVTVTIGLLLIPKFSHSSNNPRDDIATEAYEDELDMGRSGSYLNSSINSAWSEHSLDPEDIRDELKKLYAQLEIYKRKKMITNNPHLQKKRCSKKGLGRSIMRRITEIPETVSRQCSKEDKEGADHGTAKGTALIRKNPPESSGNTGKSKEETLKNRVFSLKKSHSTYDHVRDQTEESSSLPTESQEEETTENSTLESLSGKKLTQKLKEDSEAESTESVPLVCKSASAHNLSSEKKTGHPRTSMLQKSLSVIASAKEKTLGLAGKTQTAGVEERTKSQKPLPKDKETNRNHSNSDNTETKDPAPQNSNPAEEPRKPQKSGIMKQQRVNPTTANSDLNPGTTQMKDNFDIGEVCPWEVYDLTPGPVPSESKVQKHVSIVASEMEKNPTFSLKEKSHHKPKAAEVCQQSNQKRIDKAEVCLWESQGQSILEDEKLLISKTPVLPERAKEENGGQPRAANVCAGQSEELPPKAVASKTENENLNQIGHQEKKTSSSEENVRGSYNSSNNFQQPLTSRAEVCPWEFETPAQPNAGRSVALPASSALSANKIAGPRKEEIWDSFKV

SEQ ID NO: 9149 - protein, 816 aa, Homo sapiens
MSRPQGLLWLPLLFTPVCVMLNSNVLLWLTALAIKFTLIDSQAQYPVVNTNYGKIRGLRTPLPNEILGPVEQYLGVPYASPPTGERRFQPPEPPSSWTGIRNTTQFAAVCPQHLDERSLLHDMLPIWFTANLDTLMTYVQDQNEDCLYLNIYVPTEDDIHDQNSKKPVMVYIHGGSYMEGTGNMIDGSILASYGNVIVITINYRLGILGFLSTGDQAAKGNYGLLDQIQALRWIEENVGAFGGDPKRVTIFGSGAGASCVSLLTLSHYSEGLFQKAIIQSGTALSSWAVNYQPAKYTRILADKVGCNMLDTTDMVECLRNKNYKELIQQTITPATYHIAFGPVIDGDVIPDDPQILMEQGEFLNYDIMLGVNQGEGLKFVDGIVDNEDGVTPNDFDFSVSNFVDNLYGYPEGKDTLRETIKFMYTDWADKENPETRRKTLVALFTDHQWVAPAVATADLHAQYGSPTYFYAFYHHCQSEMKPSWADSAHGDEVPYVFGIPMIGPTELFSCNFSKNDVMLSAVVMTYWTNFAKTGDPNQPVPQDTKFIHTKPNRFEEVAWSKYNPKDQLYLHIGLKPRVRDHYRATKVAFWLELVPHLHNLNEIFQYVSTTTKVPPPDMTSFPYGTRRSPAKIWPTTKRPAITPANNPKHSKDPHKTGPEDTTVLIETKRDYSTELSVTIAVGASLLFLNILAFAALYYKKDKRRHETHRRPSPQRNTTNDIAHIQNEEIMSLQMKQLEHDHECESLQAHDTLRLTCPPDYTLTLRRSPDDIPLMTPNTITMIPNTLTGMQPLHTFNTFSGGQNSTNLPHGHSTTRV

SEQ ID NO: 9150 - protein, 617 aa, Homo sapiens [sequence omitted]

SEQ ID NO: 9151 - protein, 362 aa, Homo sapiens
MDLHLFDYAEPGNFSDISWPCNSSDCIVVDTVMCPNMPNKSVLLYTLSFIYIFIFVIGMIANSVVVWVNIQAKTTGYDTHCYILNLAIADLWVVLTIPVWVVSLVQHNQWPMGELTCKVTHLIFSINLFSGIFFLTCMSVDRYLSITYFTNTPSSRKKMVRRVVCILVWLLAFCVSLPDTYYLKTVTSASNNETYCRSFYPEHSIKEWLIGMELVSVVLGFAVPFSIIAVFYFLLARAISASSDQEKHSSRKIIFSYVVVFLVCWLPYHVAVLLDIFSILHYIPFTCRLEHALFTALHVTQCLSLVHCCVNPVLYSFINRNYRYELMKAFIFKYSAKTGLTKLIDASRVSETEYSALEQNAK

SEQ ID NO: 9152 - protein, 362 aa, Homo sapiens
MDLHLFDYSEPGNFSDISWPCNSSDCIVVDTVMCPNMPNKSVLLYTLSFIYIFIFVIGMIANSVVVWVNIQAKTTGYDTHCYILNLAIADLWVVLTIPVWVVSLVQHNQWPMGELTCKVTHLIFSINLFGSIFFLTCMSVDRYLSITYFTNTPSSRKKMVRRVVCILVWLLAFCVSLPDTYYLKTVTSASNNETYCRSFYPEHSIKEWLIGMELVSVVLGFAVPFSIVAVFYFLLARAISASSDQEKHSSRKIIFSYVVVFLVCWLPYHVAVLLDIFSILHYIPFTCRLEHALFTALHVTQCLSLVHCCVNPVLYSFINRNYRYELMKAFIFKYSAKTGLTKLIDASRVSETEYSALEQSTK

SEQ ID NO: 9153 - protein, 208 aa, Homo sapiens
MGLGARGAWAALLLGTLQVLALLGAAHESAAMAASANIENSGLPHNSSANSTETLQHVPSDHTNETSNSTVKPPTSVASDSSNTTVTTMKPTAASNTTTPGMVSTNMTSTTLKSTPKTTSVSQNTSQISTSTMTVTHNSSVTSAASSVTITTTMHSEAKKGSKFDTGSFVGGIVLTLGVLSILYIGCKMYYSRRGIRYRTIDEHDAII

SEQ ID NO: 9154 - protein, 262 aa, Homo sapiens
PPSPAPPPRLRTRRPLQAPLLRPIWSFGGQAAGGETCAAEGEAEPAPAAQRSRSRRRHLGWEPTRLPHPALGTMGLGARGAWAALLLGTLQVLALLGAAHESAAMAETLQHVPSDHTNETSNSTVKPPTSVASDSSNTTVTTMKPTAASNTTTPGMVSTNMTSTTLKSTPKTTSVSQNTSQISTSTMTVTHNSSVTSAASSVTITTTMHSEAKKGSKFDTGSFVGGIVLTLGVLSILYIGCKMYYSRRGIRYRTIDEHDAII

SEQ ID NO: 9155 - protein, 208 aa, Homo sapiens [sequence omitted]

SEQ ID NO: 9156 - protein, 2799 aa, Homo sapiens
MDDNSRYWMAFSYITNNALLGREDIDLGLAGDHQQLILYRLGKTFSIRHHLASFQWHTICLIWDGVKGKLELFLNKERILEVTDQPHNLTPHGTLFLGHFLKNESSEVKSMMRSFPGSLYYFQLWDHILENEEFMKCLDGNIVSWEEDVWLVNKIIPTVDRTLRCVPENMTIQEKSTTVSQQIDMTTPSQITGVKPQNTAHSSTLLSQSIPIFATDYTTISYSNTTSPPLETMTAQKILKTLVDETATFAVDVLSTSSAISLPTQSISIDNTTNSMKKTKSPSSESTKTTKMVEAMATEIFQPPTPSNFLSTSRFTKNSVVSTTSAIKSQSAVTKTTSLFSTIESTSMSTTPCLKQKSTNTGALPISTAGQEFIESTAAGTVPWFTVEKTSPASTHVGTASSFPPEPVLISTAAPVDSVFPRNQTAFPLATTDMKIAFTVHSLTLPTRLIETTPAPRTAETELTSTNFQDVSLPRVEDAMSTSMSKETSSKTFSFLTSFSFTGTESVQTVIDAEATRTALTPEITLASTVAETMLSSTITGRVYTQNTPTADGHLLTLMSTRSASTSKAPESGPTSTTDEAAHLFSSNETIWTSRPDQALLASMNTTTILTFVPNENFTSAFHENTTYTEYLSATTNITPLKASPEGKGTTANDATTARYTTAVSKLTSPWFANFSIVSGTTSITNMPEFKLTTLLLKTIPMSTKPANELPLTPRETVVPSVDIISTLACIQPNFSTEESASETTQTEINGAIVFGGTTTPVPKSATTQRLNATVTRKEATSHYLMRKSTIAAVAEVSPFSTMLEVTDESAQRVTASVTVSSFPDIEKLSTPLDNKTATTEVRESWLLTKLVKTTPRSSYNEMTEMFNFNHTYVAHWTSETSEGISAGSPTSGSTHIFGEPLGASTTRISETSFSTTPTDRTATSLSDGILPPQPTAAHSSATPVPVTHMFSLPVNGSSVVAEETEVTMSEPSTLARAFSTSVLSDVSNLSSTTMTTALVPPLDQTASTTIVIVPTHGDLIRTTSEATVISVRKTSMAVPSLTETPFHSLRLSTPVTAKAETTLFSTSVDTVTPSTHTLVCSKPPPDNIPPASSTHVISTTSTPEATQPISQVEETSTYALSFPYTFSGGGVVASLATGTTETSVVDETTPSHISANKLTTSVNSHISSSATYRVHTPVSIQLVTSTSVLSSDKDQMTISLGKTPRTMEVTEMSPSKNSFISYSRGTPSLEMTDTGFPETTKISSHQTHSPSEIPLGTPSDGNLASSPTSGSTQITPTLTSSNTVGVHIPEMSTSLGKTALPSQALTITTFLCPEKESTSALPAYTPRTVEMIVNSTYVTHSVSYGQDTSFVDTTTSSSTRISNPMDINTTFSHLHSLRTQPEVTSVASFISESTQTFPESLSLSTAGLYNDGFTVLSDRITTAFSVPNVPTMLPRESSMATSTPIYQMSSLPVNVTAFTSKKVSDTPPIVITKSSKTMHPGCLKSPCTATSGPMSEMSSIPVNNSAFTPATVSSDTSTRVGLFSTLLSSVTPRTTMTMQTSTLDVTPVIYAGATSKNKMVSSAFTTEMIEAPSRITPTTFLSPTEPTLPFVKTVPTTIMAGIVTPFVGTTAFSPLSSKSTGAISSIPKTTFSPFLSATQQSSQADEATTLGILSGITNRSLSTVNSGTGVALTDTYSRITVPENMLSPTHADSLHTSFNIQVSPSLTSFKSASGPTKNVKTTTNCFSSNTRKMTSLLEKTSLTNYATSLNTPVSYPPWTPSSATLPSLTSFVYSPHSTEAEISTPKTSPPPTSQMVEFPVLGTRMTSSNTQPLLMTSWNIPTAEGSQFPISTTINVPTSNEMETETLHLVPGPLSTFTASQTGLVSKDVMAMSSIPMSGILPNHGLSENPSLSTSLRAITSTLADVKHTFEKMTTSVTPGTTLPSILSGATSGSVISKSPILTWLLSSLPSGSPPATVSNAPHVMTSSTVEVSKSTFLTSDMISAHPFTNLTTLPSATMSTILTRTIPTPTLGGITTGFPTSLPMSINVTDDIVYISTHPEASSRTTITANPRTVSHPSSFSRKTMSPSTTDHTLSVGAMPLPSSTITSSWNRIPTASSPSTLIIPKPTLDSLLNIMTTTSTVPGASFPLISTGVTYPFTATVSSPISSFFETTWLDSTPSFLSTEASTSPTATKSTEPGNCKADETASKYKGTYKWLLTNPTETAQTRCIKNEDGNATRFSISINTGKSQWEKPKFKQCKLLQELPDKIVDLANITISDENAEDVAEHILNLINESPALGKEETKIIVSKISDISQCDEISMNLTHVMLQIINVVLEKQNNSASDLHEISNEILRIIERTGHKMEFSGQIANLTVAGLALAVLRGDHTFDGMAFSIHSYEEGTDPETKNVTKALTTYVVSASISDDMFIQNLADPVVITLQHIGGNQNYGQVHCAFWDFENNGLGGWNSSGCKVKETNVNYTICQCDHLTHFGVLMDLSRSTVDSVNEQILALITYTGCGISSIFLGVAVVTYIAFKLRKDYPAKILINLCTALLMLNLVFLINSWLSSFQKVGVCITAAVALHYFLLVSFTWMGLEAVHMYLALVKVFNIYIPNYILKFCLVGWGIPAIMVAITVSVKKDLYGTLSPTTPCWIKDDSIFYISVVAYFCLIFLMNLSMFCTVLVQLNSVKSQIQKTRRKMILHDLKGTMSLTFLLGLTWGFAFFAWGPMRNFFLYLFAIFNTLQDGSSRCQIKVGYKQEGLKKIFEHKLLTPSLKSTATSSTFKSLGSAQGTPSEISFPNAPELSALHVVASEPTTG

SEQ ID NO: 9157 - protein, 902 aa, Homo sapiens
MRIISRQIVLLFSGFWGLAMGAFPSSVQIGGLFIRNTDQEYTAFRLAIFLHNTAPNASEAPFNLVPHVDNIETANSFAVTNAFCSQYSRGVFAIFGLYDKRSVHTLTSFCSALHISLITPSFPTEGESQFVLQLRPSLRGALLSLLDHYEWNCFVFLYDTDRGYSILQAIMEKAGQNGWHVSAICVENFNDVSYRQLLEELDRRQEKKFVIDCEIERLQNILEQIVSVGKHVKGYHYIIANLGFKDISLERFIHGGANVTGFQLVDFNTPMVTKLMDRWKKLDQREYPGSETPPKYTSALTYDGVLVMAETFRSLRRQKIDISRRGKSGDCLANPAAPWGQGIDMERTLKQVRIQGLTGNVQFDHYGRRVNYTMDVFELKSTGPRKVGYWNDMDKLVLIQDVPTLGNDTAAIENRTVVVTTIMESPYVMYKKNHEMFEGNDKYEGYCVDLASEIAKHIGIKYKIAIVPDGKYGARDADTKIWNGMVGELVYGKAEIAIAPLTITLVREEVIDFSKPFMSLGISIMIKKPQKSKPGVFSFLDPLAYEIWMCIVFAYIGVSVVLFLVSRFSPYEWHTEEPEDGKEGPSDQPPNEFGIFNSLWFSLGAFMQQGCDISPRSLSGRIVGGVWWFFTLIIISSYTANLAAFLTVERMVSPIESAEDLAKQTEIAYGTLDSGSTKEFFRRSKIAVYEKMWTYMRSAEPSVFTRTTAEGVARVRKSKGKFAFLLESTMNDNIEQRKPCDTMKVGGNLDSKGYGVATPKGSSLRTPVNLAVLKLSEAGVLDKLKNKWWYDKGECGPKDSGSKDKTSALSLSNVAGVFYILVGGLGLAMLVALIEFCYKSRAEAKRMKLTFSEAIRNKARLSITGSVGENGRVLTPDCPKAVHTGTAIRQSSGLAVIASDLP

SEQ ID NO: 9158 - protein, 614 aa, Homo sapiens
MVGNLFVIVFVSYFGSKLHRPKLIGIGCFLMGTGSILMALPHFFMGYYRYSKETNIDPSENSTSNLPNCLINQMLSLNRTPSEIIERGCVKESGSHMWIYVFMGNMLRGIGETPIVPLGISYIDDFAKEGHSSLYLGTVNVMGMTGLVFAFMLGSLFAKMYVDIGYVDLSTIRITPKDSRWVGAWWLGFLVSGIVSIISSIPFFFLPLNPNKPQKERKVSLFLHVLKTNDKRNQIANLTNRRKYITKNVTGFFQSLKSILTNPLYVIFVIFTLLHMSSYIASLTYIIKMVEQQYGWSASKTNFLLGVLALPAVAIGMFSGGYIIKKFKLSLVGLAKLAFCSATVHLLSQVLYFFLICESKSVAGLTLTYDGNSPVRSHVDVPLSYCNSECNCDESQWEPVCGNNGITYLSPCLAGCKSSSGNKEPIVFYNCSCVEVIGLQNKNYSAHLGECPRDDACTRKSYVYFVIQVLDAFLCAVGLTSYSVLVIRIVQPELKALAIGFHSMIMRSLGGILVPIYFGALIDTTCMKWSTNSCGARGACRIYNSTYLGRAFFGLKVALIFPVLVLLTVFIFVVRKKSHGKDTKVLENERQVMDEANLEFLNDSEHFVPSAEEQ

SEQ ID NO: 9159 - protein, 318 aa, Homo sapiens
MDKINQTFVREFILLGLSGYPKLEIIFFALILVMYVVILIGNGVLIIASILDSRLHMPMYFFLGNLSFLDICYTTSSIPSTLVSLISKKRNISFSGCAVQMFFGFAMGSTECFLLGMMAFDRYVAICNPLRYPIIMNKVVYVLLTSVSWLSGGINSTVQTSLAMRWPFCGNNIINHFLCEILAVLKLACSDISVNIVTLAVSNIAFLVLPLLVIFFSYMFILYTILRTNSATGRHKAFSTCSAHLTVVIIFYGTIFFMYAKPKSQDLLGKDNLQATEGLVSMFYGVVTPMLNPIIYSLRNKDVKAAIKYLLSRKAINQ

SEQ ID NO: 9160 - protein, 378 aa, Homo sapiens
MRMLVSGRRVKKWQLIIQLFATCFLASLMFFWEPIDNHIVSHMKSYSYRYLINSYDFVNDTLSLKHTSAGPRYQYLINHKEKCQAQDVLLLLFVKTAPENYDRRSGIRRTWGNENYVRSQLNANIKTLFALGTPNPLEGEELQRKLAWEDQRYNDIIQQDFVDSFYNLTLKLLMQFSWANTYCPHAKFLMTADDDIFIHMPNLIEYLQSLEQIGVQDFWIGRVHRGAPPIRDKSSKYYVSYEMYQWPAYPDYTAGAAYVISGDVAAKVYEASQTLNSSLYIDDVFMGLCANKIGIVPQDHVFFSGEGKTPYHPCIYEKMMTSHGHLEDLQDLWKNATDPKVKTISKGFFGQIYCRLMKIILLCKISYVDTYPCRAAFI

SEQ ID NO: 9161 - protein, 1337 aa, Homo sapiens
MDLLSGTYIFAVLLACVVFHSGAQEKNYTIREEMPENVLIGDLLKDLNLSLIPNKSLTTAMQFKLVYKTGDVPLIRIEEDTGEIFTTGARIDREKLCAGIPRDEHCFYEVEVAILPDEIFRLVKIRFLIEDINDNAPLFPATVINISIPENSAINSKYTLPAAVDPDVGINGVQNYELIKSQNIFGLDVIETPEGDKMPQLIVQKELDREEKDTYVMKVKVEDGGFPQRSSTAILQVSVTDTNDNHPVFKETEIEVSIPENAPVGTSVTQLHATDADIGENAKIHFSFSNLVSNIARRLFHLNATTGLITIKEPLDREETPNHKLLVLASDGGLMPARAMVLVNVTDVNDNVPSIDIRYIVNPVNDTVVLSENIPLNTKIALITVTDKDADHNGRVTCFTDHEIPFRLRPVFSNQFLLETAAYLDYESTKEYAIKLLAADAGKPPLNQSAMLFIKVKDENDNAPVFTQSFVTVSIPENNSPGIQLTKVSAMDADSGPNAKINYLLGPDAPPEFSLDCRTGMLTVVKKLDREKEDKYLFTILAKDNGVPPLTSNVTVFVSIIDQNDNSPVFTHNEYNFYVPENLPRHGTVGLITVTDPDYGDNSAVTLSILDENDDFTIDSQTGVIRPNISFDREKQESYTFYVKAEDGGRVSRSSSAKVTINVVDVNDNKPVFIVPPSNCSYELVLPSTNPGTVVFQVIAVDNDTGMNAEVRYSIVGGNTRDLFAIDQETGNITLMEKCDVTDLGLHRVLVKANDLGQPDSLFSVVIVNLFVNESVTNATLINELVRKSTEAPVTPNTEIADVSSPTSDYVKILVAAVAGTITVVVVIFITAVVRCRQAPHLKAAQKNKQNSEWATPNPENRQMIMMKKKKKKKKHSPKNLLLNFVTIEETKADDVDSDGNRVTLDLPIDLEEQTMGKYNWVTTPTTFKPDSPDLARHYKSASPQPAFQIQPETPLNSKHHIIQELPLDNTFVACDSISKCSSSSSDPYSVSDCGYPVTTFEVPVSVHTRPPMKEVVRSCTPMKESTTMEIWIHPQPQSQRRVTFHLPEGSQESSSDGGLGDHDAGSLTSTSHGLPLGYPQEEYFDRATPSNRTEGDGNSDPESTFIPGLKKAAEITVQPTVEEASDNCTQECLIYGHSDACWMPASLDHSSSSQAQASALCHSPPLSQASTQHHSPRVTQTIALCHSPPVTQTIALCHSPPPIQVSALHHSPPLVQATALHHSPPSAQASALCYSPPLAQAAAISHSSPLPQVIALHRSQAQSSVSLQQGWVQGADGLCSVDQGVQGSATSQFYTMSERLHPSDDSIKVIPLTTFTPRQQARPSRGDSPIMEEHPL

SEQ ID NO: 9162 - protein, 1347 aa, Homo sapiens
MDLLSGTYIFAVLLACVVFHSGAQEKNYTIREEMPENVLIGDLLKDLNLSLIPNKSLTTAMQFKLVYKTGDVPLIRIEEDTGEIFTTGARIDREKLCAGIPRDEHCFYEVEVAILPDEIFRLVKIRFLIEDINDNAPLFPATVINISIPENSAINSKYTLPAAVDPDVGINGVQNYELIKSQNIFGLDVIETPEGDKMPQLIVQKELDREEKDTYVMKVKVEDGGFPQRSSTAILQVSVTDTNDNHPVFKETEIEVSIPENAPVGTSVTQLHATDADIGENAKIHFSFSNLVSNIARRLFHLNATTGLITIKEPLDREETPNHKLLVLASDGGLMPARAMVLVNVTDVNDNVPSIDIRYIVNPVNDTVVLSENIPLNTKIALITVTDKDADHNGRVTCFTDHEIPFRLRPVFSNQFLLETAAYLDYESTKEYAIKLLAADAGKPPLNQSAMLFIKVKDENDNAPVFTQSFVTVSIPENNSPGIQLTKVSAMDADSGPNAKINYLLGPDAPPEFSLDCRTGMLTVVKKLDREKEDKYLFTILAKDNGVPPLTSNVTVFVSIIDQNDNSPVFTHNEYNFYVPENLPRHGTVGLITVTDPDYGDNSAVTLSILDENDDFTIDSQTGVIRPNISFDREKQESYTFYVKAEDGGRVSRSSSAKVTINVVDVNDNKPVFIVPPSNCSYELVLPSTNPGTVVFQVIAVDNDTGMNAEVRYSIVGGNTRDLFAIDQETGNITLMEKCDVTDLGLHRVLVKANDLGQPDSLFSVVIVNLFVNESVTNATLINELVRKSTEAPVTPNTEIADVSSPTSDYVKILVAAVAGTITVVVVIFITAVVRCRQAPHLKAAQKNKQNSEWATPNPENRQMIMMKKKKKKKKHSPKNLLLNFVTIEETKADDVDSDGNRVTLDLPIDLEEQTMGKYNWVTTPTTFKPDSPDLARHYKSASPQPAFQIQPETPLNSKHHIIQELPLDNTFVACDSISKCSSSSSDPYSVSDCGYPVTTFEVPVSVHTRPPMKEVVRSCTPMKESTTMEIWIHPQPQRKSEGKVAGKSQRRVTFHLPEGSQESSSDGGLGDHDAGSLTSTSHGLPLGYPQEEYFDRATPSNRTEGDGNSDPESTFIPGLKKAAEITVQPTVEEASDNCTQECLIYGHSDACWMPASLDHSSSSQAQASALCHSPPLSQASTQHHSPRVTQTIALCHSPPVTQTIALCHSPPPIQVSALHHSPPLVQATALHHSPPSAQASALCYSPPLAQAAAISHSSPLPQVIALHRSQAQSSVSLQQGWVQGADGLCSVDQGVQGSATSQFYTMSERLHPSDDSIKVIPLTTFTPRQQARPSRGDSPIMEEHPL

SEQ ID NO: 9163 - protein, 1021 aa, Homo sapiens
MDLLSGTYIFAVLLACVVFHSGAQEKNYTIREEMPENVLIGDLLKDLNLSLIPNKSLTTAMQFKLVYKTGDVPLIRIEEDTGEIFTTGARIDREKLCAGIPRDEHCFYEVEVAILPDEIFRLVKIRFLIEDINDNAPLFPATVINISIPENSAINSKYTLPAAVDPDVGINGVQNYELIKSQNIFGLDVIETPEGDKMPQLIVQKELDREEKDTYVMKVKVEDGGFPQRSSTAILQVSVTDTNDNHPVFKETEIEVSIPENAPVGTSVTQLHATDADIGENAKIHFSFSNLVSNIARRLFHLNATTGLITIKEPLDREETPNHKLLVLASDGGLMPARAMVLVNVTDVNDNVPSIDIRYIVNPVNDTVVLSENIPLNTKIALITVTDKDADHNGRVTCFTDHEIPFRLRPVFSNQFLLETAAYLDYESTKEYAIKLLAADAGKPPLNQSAMLFIKVKDENDNAPVFTQSFVTVSIPENNSPGIQLTKVSAMDADSGPNAKINYLLGPDAPPEFSLDCRTGMLTVVKKLDREKEDKYLFTILAKDNGVPPLTSNVTVFVSIIDQNDNSPVFTHNEYNFYVPENLPRHGTVGLITVTDPDYGDNSAVTLSILDENDDFTIDSQTGVIRPNISFDREKQESYTFYVKAEDGGRVSRSSSAKVTINVVDVNDNKPVFIVPPSNCSYELVLPSTNPGTVVFQVIAVDNDTGMNAEVRYSIVGGNTRDLFAIDQETGNITLMEKCDVTDLGLHRVLVKANDLGQPDSLFSVVIVNLFVNESVTNATLINELVRKSTEAPVTPNTEIADVSSPTSDYVKILVAAVAGTITVVVVIFITAVVRCRQAPHLKAAQKNKQNSEWATPNPENRQMIMMKKKKKKKKHSPKNLLLNFVTIEETKADDVDSDGNRVTLDLPIDLEEQTMGKYNWVTTPTTFKPDSPDLARHYKSASPQPAFQIQPETPLNSKHHIIQELPLDNTFVACDSISKCSSSSSDPYSVSDCGYPVTTFEVPVSVHTRPVGIQVSNTTF

SEQ ID NO: 9164 - protein, 1037 aa, Homo sapiens
MTVGFNSDISSVVRVNTTNCHKCLLSGTYIFAVLLVCVVFHSGAQEKNYTIREEIPENVLIGNLLKDLNLSLIPNKSLTTTMQFKLVYKTGDVPLIRIEEDTGEIFTTGARIDREKLCAGIPRDEHCFYEVEVAILPDEIFRLVKIRFLIEDINDNAPLFPATVINISIPENSAINSKYTLPAAVDPDVGINGVQNYELIKSQNIFGLDVIETPEGDKMPQLIVQKELDREEKDTYVMKVKVEDGGFPQRSSTAILQVSVTDTNDNHPVFKETEIEVSIPENAPVGTSVTQLHATDADIGENAKIHFSFSNLVSNIARRLFHLNATTGLITIKEPLDREETPNHKLLVLASDGGLMPARAMVLVNVTDVNDNVPSIDIRYIVNPVNDTVVLSENIPLNTKIALITVTDKDADHNGRVTCFTDHEIPFRLRPVFSNQFLLENAAYLDYESTKEYAIKLLAADAGKPPLNQSAMLFIKVKDENDNAPVFTQSFVTVSIPENNSPGIQLMKVSATDADSGPNAEINYLLGPDAPPEFSLDRRTGMLTVVKKLDREKEDKYLFTILAKDNGVPPLTSNVTVFVSIIDQNDNSPVFTHNEYKFYVPENLPRHGTVGLITVTDPDYGDNSAVTLSILDENDDFTIDSQTGVIRPNISFDREKQESYTFYVKAEDGGRVSRSSSAKVTINVVDVNDNKPVFIVPPYNYSYELVLPSTNPGTVVFQVIAVDNDTGMNAEVRYSIVGGNTRDLFAIDQETGNITLMEKCDVTDLGLHRVLVKANDLGQPDSLFSVVIVNLFVNESVTNATLINELVRKSIEAPVTPNTEIADVSSPTSDYVKILVAAVAGTITVVVVIFITAVVRCRQAPHLKAAQKNMQNSEWATPNPENRQMIMMKKKKKKKKHSPKNLLLNVVTIEETKADDVDSDGNRVTLDLPIDLEEQTMGKYNWVTTPTTFKPDSPDLARHYKSASPQPAFQIQPETPLNLKHHIIQELPLDNTFVACDSISNCSSSSSDPYSVSDCGYPVTTFEVPVSVHTRPTDSRT

SEQ ID NO: 9165 - protein, 1340 aa, Homo sapiens
MFRVGFLIISSSSSLSPLLLVSVVRVNTTNCHKCLLSGTYIFAVLLVCVVFHSGAQEKNYTIREEIPENVLIGNLLKDLNLSLIPNKSLTTTMQFKLVYKTGDVPLIRIEEDTGEIFTTGARIDREKLCAGIPRDEHCFYEVEVAILPDEIFRLVKIRFLIEDINDNAPLFPATVINISIPENSAINSKYTLPAAVDPDVGINGVQNYELIKSQNIFGLDVIETPEGDKMPQLIVQKELDREEKDTYVMKVKVEDGGFPQRSSTAILQVSVTDTNDNHPVFKETEIEVSIPENAPVGTSVTQLHATDADIGENAKIHFSFSNLVSNIARRLFHLNATTGLITIKEPLDREETPNHKLLVLASDGGLMPARAMVLVNVTDVNDNVPSIDIRYIVNPVNDTVVLSENIPLNTKIALITVTDKDADHNGRVTCFTDHEIPFRLRPVFSNQFLLENAAYLDYESTKEYAIKLLAADAGKPPLNQSAMLFIKVKDENDNAPVFTQSFVTVSIPENNSPGIQLMKVSATDADSGPNAEINYLLGPDAPPEFSLDRRTGMLTVVKKLDREKEDKYLFTILAKDNGVPPLTSNVTVFVSIIDQNDNSPVFTHNEYKFYVPENLPRHGTVGLITVTDPDYGDNSAVTLSILDENDDFTIDSQTGVIRPNISFDREKQESYTFYVKAEDGGRVSRSSSAKVTINVVDVNDNKPVFIVPPYNYSYELVLPSTNPGTVVFQVIAVDNDTGMNAEVRYSIVGGNTRDLFAIDQETGNITLMEKCDVTDLGLHRVLVKANDLGQPDSLFSVVIVNLFVNESVTNATLINELVRKSIEAPVTPNTEIADVSSPTSDYVKILVAAVAGTITVVVVIFITAVVRCRQAPHLKAAQKNMQNSEWATPNPENRQMIMMKKKKKKKKHSPKNLLLNVVTIEETKADDVDSDGNRVTLDLPIDLEEQTMGKYNWVTTPTTFKPDSPDLARHYKSASPQPAFQIQPETPLNLKHHIIQELPLDNTFVACDSISNCSSSSSDPYSVSDCGYPVTTFEVPVSVHTRPSQRRVTFHLPEGSQESSSDGGLGDHDAGSLTSTSHGLPLGYPQEEYFDRATPSNRTEGDGNSDPESTFIPGLKKEITVQPTVEEASDNCTQECLIYGHSDACWMPASLDHSSSSQAQASALCHSPPLSQASTQHHSPPVTQTIVLCHSPPVTQTIALCHSPPPIQVSALHHSPPLVQGTALHHSPPSAQASALCYSPPLAQAAAISHSSSLPQVIALHRSQAQSSVSLQQGWVQGANGLCSVDQGVQGSATSQFYTMSERLHPSDDSIKVIPLTTFAPRQQARPSRGDSPIMETHPL

SEQ ID NO: 9166 - protein, 1048 aa, Homo sapiens
MFRVGFLIISSSSSLSPLLLVSVVRVNTTNCHKCLLSGTYIFAVLLVCVVFHSGAQEKNYTIREEIPENVLIGNLLKDLNLSLIPNKSLTTTMQFKLVYKTGDVPLIRIEEDTGEIFTTGARIDREKLCAGIPRDEHCFYEVEVAILPDEIFRLVKIRFLIEDINDNAPLFPATVINISIPENSAINSKYTLPAAVDPDVGINGVQNYELIKSQNIFGLDVIETPEGDKMPQLIVQKELDREEKDTYVMKVKVEDGGFPQRSSTAILQVSVTDTNDNHPVFKETEIEVSIPENAPVGTSVTQLHATDADIGENAKIHFSFSNLVSNIARRLFHLNATTGLITIKEPLDREETPNHKLLVLASDGGLMPARAMVLVNVTDVNDNVPSIDIRYIVNPVNDTVVLSENIPLNTKIALITVTDKDADHNGRVTCFTDHEIPFRLRPVFSNQFLLENAAYLDYESTKEYAIKLLAADAGKPPLNQSAMLFIKVKDENDNAPVFTQSFVTVSIPENNSPGIQLMKVSATDADSGPNAEINYLLGPDAPPEFSLDRRTGMLTVVKKLDREKEDKYLFTILAKDNGVPPLTSNVTVFVSIIDQNDNSPVFTHNEYKFYVPENLPRHGTVGLITVTDPDYGDNSAVTLSILDENDDFTIDSQTGVIRPNISFDREKQESYTFYVKAEDGGRVSRSSSAKVTINVVDVNDNKPVFIVPPYNYSYELVLPSTNPGTVVFQVIAVDNDTGMNAEVRYSIVGGNTRDLFAIDQETGNITLMEKCDVTDLGLHRVLVKANDLGQPDSLFSVVIVNLFVNESVTNATLINELVRKSIEAPVTPNTEIADVSSPTSDYVKILVAAVAGTITVVVVIFITAVVRCRQAPHLKAAQKNMQNSEWATPNPENRQMIMMKKKKKKKKHSPKNLLLNVVTIEETKADDVDSDGNRVTLDLPIDLEEQTMGKYNWVTTPTTFKPDSPDLARHYKSASPQPAFQIQPETPLNLKHHIIQELPLDNTFVACDSISNCSSSSSDPYSVSDCGYPVTTFEVPVSVHTRPTDSRT

SEQ ID NO: 9167 - protein, 1025 aa, Homo sapiens
MDLLSGTYIFAVLLACVVFHSGAQEKNYTIREEMPENVLIGDLLKDLNLSLIPNKSLTTAMQFKLVYKTGDVPLIRIEEDTGEIFTTGARIDREKLCAGIPRDEHCFYEVEVAILPDEIFRLVKIRFLIEDINDNAPLFPATVINISIPENSAINSKYTLPAAVDPDVGINGVQNYELIKSQNIFGLDVIETPEGDKMPQLIVQKELDREEKDTYVMKVKVEDGGFPQRSSTAILQVSVTDTNDNHPVFKETEIEVSIPENAPVGTSVTQLHATDADIGENAKIHFSFSNLVSNIARRLFHLNATTGLITIKEPLDREETPNHKLLVLASDGGLMPARAMVLVNVTDVNDNVPSIDIRYIVNPVNDTVVLSENIPLNTKIALITVTDKDADHNGRVTCFTDHEIPFRLRPVFSNQFLLETAAYLDYESTKEYAIKLLAADAGKPPLNQSAMLFIKVKDENDNAPVFTQSFVTVSIPENNSPGIQLTKVSAMDADSGPNAKINYLLGPDAPPEFSLDCRTGMLTVVKKLDREKEDKYLFTILAKDNGVPPLTSNVTVFVSIIDQNDNSPVFTHNEYNFYVPENLPRHGTVGLITVTDPDYGDNSAVTLSILDENDDFTIDSQTGVIRPNISFDREKQESYTFYVKAEDGGRVSRSSSAKVTINVVDVNDNKPVFIVPPSNCSYELVLPSTNPGTVVFQVIAVDNDTGMNAEVRYSIVGGNTRDLFAIDQETGNITLMEKCDVTDLGLHRVLVKANDLGQPDSLFSVVIVNLFVNESVTNATLINELVRKSTEAPVTPNTEIADVSSPTSDYVKILVAAVAGTITVVVVIFITAVVRCRQAPHLKAAQKNKQNSEWATPNPENRQMIMMKKKKKKKKHSPKNLLLNFVTIEETKADDVDSDGNRVTLDLPIDLEEQTMGKYNWVTTPTTFKPDSPDLARHYKSASPQPAFQIQPETPLNSKHHIIQELPLDNTFVACDSISKCSSSSSDPYSVSDCGYPVTTFEVPVSVHTRPTDSRTSTIEICSEI

SEQ ID NO: 9168 - protein, 641 aa, Homo sapiens
MLLGASLVGVLLFSKLVLKLPWTQVGFSLLFLYLGSGGWRFIRVFIKTIRRDIFGGLVLLKVKAKVRQCLQERRTVPILFASTVRRHPDKTALIFEGTDTHWTFRQLDEYSSSVANFLQARGLASGDVAAIFMENRNEFVGLWLGMAKLGVEAALINTNLRRDALLHCLTTSRARALVFGSEMASAICEVHASPDPSLSLFCSGSWEPGAVPPSTEHLDPLLKDAPKHLPSCPDKGFTDKLFYIYTSGTTGLPKAAIVVHSRYYRMAALVYYGFRMRPNDIVYDCLPLYHSAGNIVGIGQCLLHGMTVVIRKKFSASRFWDDCIKYNCTIVQYIGELCRYLLNQPPREAENQHQVRMALGNASGSPSGPTFPAASTYPRWLSSTGPECNCSLGNFDSQVGACGFNSRILSFVYPIRLVRVNEDTMELIRGPDGVCIPCQPGEPGQLVGRIIQKDPLRRFDGYLNQGANNKKIAKDVFKKGDQAYLTGDVLVMDELGYLYFRDRTGDTFRWKGENVSTTEVEGTLSRLLDMADVAVYGVEVPGTEGRAGMAAVASPTGNCDLERFAQVLEKELPLYARPIFLRLLPELHKTGTYKFQKTELRKEAFDPAIVKTRCSIYIEKGRYVPLDQEAYSRIQAGEEKL

SEQ ID NO: 9169 - protein, 360 aa, Homo sapiens
  VARIANT 127, 175: Xaa = Any Amino Acid
MPAHLLQDDISSSYTTTTTTITAPPSRVPQNGGDKLETTPLYLEEDIRPDIKDDIYNLTYKDKEGPSPKVEYVWRNIILMSLLHLGALYGITLIPTCNLYTWLWGVFYYFISALGITAGAHPLWSHXSYKARLSLWLFLIIANTMAFQNDVYEWARDHRAHHKFSETHADPHNSXRGFFFSHVGWLLVRKHPTVKEKGSTLDLSDLEAEKLVMFQRRYYKPGLLLMCFILPTLVPWCFWGETFQNSVFVATFLRYAVVLNATWLVNSAAHLFRYRPYDKNISLRENILVSLGAVGEGFHNYHHSFPYDYSASEYRWHINFTTFFIDCMAAFGLAYDQKKVSKAAILARIKRTGEGNYKSG

SEQ ID NO: 9170 - protein, 244 aa, Homo sapiens
MGALGLEGRGGRLQGRGSLLLAVAGATSLVTLLLAVPITVLAVLALVPQDQGGLVTETADPGAQAQQGLGFQKLPEEEPETDLSPGLPAAHLIGAPLKGQGLGWETTKEQAFLTSGTQFSDAEGLALPQDGLYYLYCLVGYRGRAPPGGGDPQGRSVTLRSSLYRAGGAYGPGTPELLLEGAETVTPVLDPARRQGYGPLWYTSVGFGGLVQLRRGERVYVNISHPDMVDFARGKTFFGAVMVG

SEQ ID NO: 9171 - protein, 469 aa, Homo sapiens
MARGLGAPHWVAVGLLTWATLGLLVAGLGGHDDLHDDLQEDFHGHSHRHSHEDFHHGHSHAHGHGHTHESIWHGHTHDHDHGHSHEDLHHGHSHGYSHESLYHRGHGHDHEHSHGGYGESGAPGIKQDLDAVTLWAYALGATVLISAAPFFVLFLIPVESNSPRHRSLLQILLSFASGGLLGDAFLHLIPHALEPHSHHTLEQPGHGHSHSGQGPILSVGLWVLSGIVAFLVVEKFVRHVKGGHGHSHGHGHAHSHTRGSHGHGRQERSTKEKQSSEEEEKETRGVQKRRGGSTVPKDGPVRPQNAEEEKRGLDLRVSGYLNLAADLAHNFTDGLAIGASFRGGRGLGILTTMTVLLHEVPHEVGDFAILVQSGCSKKQAMRLQLLTAVGALAGTACALLTEGGAVGSEIAGGAGPGWVLPFTAGGFIYVATVSVLPELLREASPLQSLLEVLGLLGGVIMMVLIAHLE

SEQ ID NO: 9172 - protein, 428 aa, Homo sapiens
MARGLGAPHWVAVGLLTWATLGLLVAGLGGHDDLHDDLQEDFHGHSHRHSHEDFHHGHSHAHGHGHTHESIWHGHTHDHDHGHSHEDLHHGHSHGYSHESLYHRGHGHDHEHSHGGYGESGAPGIKQDLDAVTLWAYALGATVLISAAPFFVLFLIPVESNSPRHRSLLQILLSFASGGLLGDAFLHLIPHALEPHSHHTLEQPGHGHSHSGQGPILSVGLWVLSGIVAFLVVEKFVRHVKGGHGHSHGHGHAHSHTRGSHGHGRQERSTKEKQSSEEEEKETRGVQKRRGGSTVPKDGPVRPQNAEEEKRGLDLRVSGYLNLAADLAHNFTDGLAIGASFRGGRGLGILTTMTVLLHEVPHEVGDFAILVQSGCSKKQAMRLQLLTAVGALAGTVPFSLKEEQWAVKLQVVQVLAGSCHLLQVALST

SEQ ID NO: 9173 - protein, 380 aa, Homo sapiens
MEEGGDFDNYYGADNQSECEYTDWKSSGALIPAIYMLVFLLGTTGNGLVLWTVFRSSREKRRSADIFIASLAVADLTFVVTLPLWATYTYRDYDWPFGTFFCKLSSYLIFVNMYASVFCLTGLSFDRYLAIVRPVANARLRLRVSGAVATAVLWVLAALLAMPVMVLRTTGDLENTTKVQCYMDYSMVATVSSEWAWEVGLGVSSTTVGFVVPFTIMLTCYFFIAQTIAGHFRKERIEGLRKRRRLLSIIVVLVVTFALCWMPYHLVKTLYMLGSLLHWPCDFDLFLMNIFPYCTCISYVNSCLNPFLYAFFDPRFRQACTSMLCCGQSRCAGTSHSSSGEKSASYSSGHSQGPGPNMGKGGEQMHEKSIPYSQETLVVD

SEQ ID NO: 9174 - protein, 803 aa, Homo sapiens
MIPVTEFRQFSEQQPAFRVLKPWWDVFTDYLSVAMLMIGVFGCTLQVMQDKIICLPKRVQPAQNHSSLSNVSQAVASTTPLPPPKPSPANPITVEMKGLKTDLDLQQYSFINQMCYERALHWYAKYFPYLVLIHTLVFMLCSNFWFKFPGSSSKIEHFISILGKCFDSPWTTRALSEVSGEDSEEKDNRKNNMNRSNTIQSGPEGSLVNSQSLKSIPEKFVVDKSTAGALDKKEGEQAKALFEKVKKFRLHVEEGDILYAMYVRQTVLKVIKFLIIIAYNSALVSKVQFTVDCNVDIQDMTGYKNFSCNHTMAHLFSKLSFCYLCFVSIYGLTCLYTLYWLFYRSLREYSFEYVRQETGIDDIPDVKNDFAFMLHMIDQYDPLYSKRFAVFLSEVSENKLKQLNLNNEWTPDKLRQKLQTNAHNRLELPLIMLSGLPDTVFEITELQSLKLEIIKNVMIPATIAQLDNLQELSLHQCSVKIHSAALSFLKENLKVLSVKFDDMRELPPWMYGLRNLEELYLVGSLSHDISRNVTLESLRDLKSLKILSIKSNVSKIPQAVVDVSSHLQKMCIHNDGTKLVMLNNLKKMTNLTELELVHCDLERIPHAVFSLLSLQELDLKENNLKSIEEIVSFQHLRKLTVLKLWHNSITYIPEHIKKLTSLERLSFSHNKIEVLPSHLFLCNKIRYLDLSYNDIRFIPPEIGVLQSLQYFSITCNKVESLPDELYFCKKLKTLKIGKNSLSVLSPKIGNLLFLSYLDVKGNHFEILPPELGDCRALKRAGLVVEDALFETLPSDVREQMKTE

SEQ ID NO: 9175 - protein, 704 aa, Homo sapiens
MAFLSRTSPVAAASFQSRQEARGSILLQSCQLPPQWLSTEAWTGEWKQPHGGALTSRSPGPVAPQRPCHLKGWQHRPTQHNAACKQGQAAAQTPPRPGPPSAPPPPPKEGHQEGLVELPASFRELLTFFCTNATIHGAIRLVCSRGNRLKTTSWGLLSLGALVALCWQLGLLFERHWHRPVLMAVSVHSERKLLPLVTLCDGNPRRPSPVLRHLELLDEFARENIDSLYNVNLSKGRAALSATVPRHEPPFHLDREIRLQRLSHSGSRVRVGFRLCNSTGGDCFYRGYTSGVAAVQDWYHFHYVDILALLPAAWEDSHGSQDGHFVLSCSYDGLDCQARQFRTFHHPTYGSCYTVDGVWTAQRPGITHGVGLVLRVEQQPHLPLLSTLAGIRVMVHGRNHTPFLGHHSFSVRPGTEATISIREDEVHRLGSPYGHCTAGGEGVEVELLHNTSYTRQACLVSCFQQLMVETCSCGYYLHPLPAGAEYCSSARHPAWGHCFYRLYQDLETHRLPCTSRCPRPCRESAFKLSTGTSRWPSAKSAGWTLATLGEQGLPHQSHRQRSSLAKINIVYQELNYRSVEEAPVYSVPQLLSAMGSLYSLWFGASVLSLLELLELLLDASALTLVLGGRRLRRAWFSWPRASPASGASSIKPEASQMPPPAGGTSDDPEPSGPHLPRVMLPGVLAGVSAEESWAGPQPLETLDT

SEQ ID NO: 9176 - protein, 638 aa, Homo sapiens
MAEHRSMDGRMEAATRGGSHLQAAAQTPPRPGPPSAPPPPPKEGHQEGLVELPASFRELLTFFCTNATIHGAIRLVCSRGNRLKTTSWGLLSLGALVALCWQLGLLFERHWHRPVLMAVSVHSERKLLPLVTLCDGNPRRPSPVLRHLELLDEFARENIDSLYNVNLSKGRAALSATVPRHEPPFHLDREIRLQRLSHSGSRVRVGFRLCNSTGGDCFYRGYTSGVAAVQDWYHFHYVDILALLPAAWEDSHGSQDGHFVLSCSYDGLDCQARQFRTFHHPTYGSCYTVDGVWTAQRPGITHGVGLVLRVEQQPHLPLLSTLAGIRVMVHGRNHTPFLGHHSFSVRPGTEATISIREDEVHRLGSPYGHCTAGGEGVEVELLHNTSYTRQACLVSCFQQLMVETCSCGYYLHPLPAGAEYCSSARHPAWGHCFYRLYQDLETHRLPCTSRCPRPCRESAFKLSTGTSRWPSAKSAGWTLATLGEQGLPHQSHRQRSSLAKINIVYQELNYRSVEEAPVYSVPQLLSAMGSLYSLWFGASVLSLLELLELLLDASALTLVLGGRRLRRAWFSWPRASPASGASSIKPEASQMPPPAGGTSDDPEPSGPHLPRVMLPGVLAGVSAEESWAGPQPLETLDT

SEQ ID NO: 9177 - protein, 315 aa, Homo sapiens
MFSPNHTIVTEFILLGLTDDPVLEKILFGVFLAIYLITLAGNLCMILLIRTNSHLQTPMYFFLGHLSFVDICYSSNVTPNMLHNFLSEQKTISYAGCFTQCLLFIALVITEFYILASMALDRYVAICSPLHYSSRMSKNICVCLVTIPYMYGFLSGFSQSLLTFHLSFCGSLEINHFYCADPPLIMLACSDTRVKKMAMFVVAGFNLSSSLFIILLSYLFIFAAIFRIRSAEGRHKAFSTCASHLTIVTLFYGTLFCMYVRPPSEKSVEESKITAVFYTFLSPMLNPLIYSLRNTDVILAMQQMIRGKSFHKIAV

SEQ ID NO: 9178 - protein, 745 aa, Homo sapiens
  VARIANT 231, 554: Xaa = Any Amino Acid
MGLGPAWVTQPCLVTDSQPDAELLSSRAPCLGRRCCWSPGRGGVGGSGTTEPGDAALPCPGRVAQAPPRRLLLLLPLLLGRGLRVTAEASASSSGAAVENSSAMEELVTEKEAEESHRPDSVSLLTFILLLTLAILTIWLFKYCRVHFLHETGLAMICGLIVGVILRYGTPGTRGRDKLLNCTQEDQAFSTLVVDVSGKFFEYTLKREISPGKINSVKQNDMLGKVTFDPXVFFNILLPPVIFHAGYSLKRHFFRNLGSLLLGDCCFVLPYWKSQSVGIFLGIFSGCFTMGAVTGVVTALVTKFTKLDCFPLLETALFFLMSWSTFLLAEACGFTGVVAVLFCGITQAHYTFNNLSVESRSRSKQLFEAENFIFSCMILALFTFQKHVFSPVFIIGAFVAVFLGRAAHIYPLSFFLSLGRRHKIGWNFQHTMMFSGLRGAMAFALAICDTASYARQMTFPTTPFIVFFTIWIIGGGTTPMLSWLNIRVSIKEPSKEDHNEHHRQYFRVGVDPDQDPPPNNDSFQVLQGDSPDSARGNWTKQESTWIFRRCLLAXCLTSPQVYDNQEPLREGNSDFILTEGDLTLTYGDSTVTANGFSGSHTASTSLEGSWRMKSSSEEVLEQDVGMGNQKVSSQASPTLQKPPVQQTSNGPSQLLQHIASRTSWLMSERSRAQTEPQATASGKKRGQGAREEMSSKEIVPITAPVSVQQQIKLIRKPKQSAENRTQLSKKLSYTVAMTFNQSSNR

SEQ ID NO: 9179 - protein, 696 aa, Homo sapiens
MKFAEHLSAHITPEWRKQYIQYEAFKDMLYSAQDQAPSVEVTDEDTVKRYFAKFEEKFFQTCEKELAKINTFYSEKLAEAQRRFATLQNELQSSLDAQKESTGVTTLRQRRKPVFHLSHEERVQHRNIKDLKLAFSEFYLSLILLQNYQNLNFTGFRKILKKHDKILETSRGADWRVAHVEVAPFYTCKKINQLISETEAVVTNELEDGDRQKAMKRLRVPPLGAAQPAPAWTTFRVGLFCGIFIVLNITLVLAAVFKLETDRSIWPLIRIYRGGFLLIEFLFLLGINTYGWRQAGVNHVLIFELNPRSNLSHQHLFEIAGFLGILWCLSLLACFFAPISVIPTYVYPLALYGFMVFFLINPTKTFYYKSRFWLLKLLFRVFTAPFHKVGFADFWLADQLNSLSVILMDLEYMICFYSLELKWDESKGLLPNNSEESGICHKYTYGVRAIVQCIPAWLRFIQCLRRYRDTKRAFPHLVNAGKYSTTFFMVAFAALYSTHKERGHSDTMVFFYLWIVFYIISSCYTLIWDLKMDWGLFDKNAGENTFLREEIVYPQKAYYYCAIIEDVILRFAWTIQISITSTTLLPHSGDIIATVFAPLEVFRRFVWNFFRLENEHLNNCGEFRAVRDISVAPLNADDQTLLEQMMDQDDGVRNRQKNRSWKYNQSISLRRPRLASQSKARDTKVLIEDTDDEANT

SEQ ID NO: 9180 - protein, 696 aa, Homo sapiens
MKFAEHLSAHITPEWRKQYIQYEAFKDMLYSAQDQAPSVEVTDEDTVKRYFAKFEEKFFQTCEKELAKINTFYSEKLAEAQRRFATLQNELQSSLDAQKESTGVTTLRQRRKPVFHLSHEERVQHRNIKDLKLAFSEFYLSLILLQNYQNLNFTGFRKILKKHDKILETSRGADWRVAHVEVAPFYTCKKINQLISETEAVVTNELEDGDRQKAMKRLRVPPLGAAQPAPAWTTFRVGLFCGIFIVLNITLVLAAVFKLETDRSIWPLIRIYRGGFLLIEFLFLLGINTYGWRQAGVNHVLIFELNPRSNLSHQHLFEIAGFLGILWCLSLLACFFAPISVIPTYVYPLALYGFMVFFLINPTKTFYYKSRFWLLKLLFRVFTAPFHKVGFADFWLADQLNSLSVILMDLEYMICFYSLELKWDESKGLLPNNSEESGICHKYTYGVRAIVQCIPAWLRFIQCLRRYRDTKRAFPHLVNAGKYSTTFFMVTFAALYSTHKERGHSDTMVFFYLWIVFYIISSCYTLIWDLKMDWGLFDKNAGENTFLREEIVYPQKAYYYCAIIEDVILRFAWTIQISITSTTLLPHSGDIIATVFAPLEVFRRFVWNFFRLENEHLNNCGEFRAVRDISVAPLNADDQTLLEQMMDQDDGVRNRQKNRSWKYNQSISLRRPRLASQSKARDTKVLIEDTDDEANT

SEQ ID NO: 9181 - protein, 631 aa, Homo sapiens
MKFAEHLSAHITPEWRKQYIQYEAFKDMLYSAQDQAPSVEVTDEDTVKRYFAKFEEKFFQTCEKELAKINTFYSEKLAEAQRRFATLQNELQSSLDAQKESTGVTTLRQRRKPVFHLSHEERVQHRNIKDLKLAFSEFYLSLILLQNYQNLNFTGFRKILKKHDKILETSRGADWRVAHVEVAPFYTCKKINQLISETEAVVTNELEDGDRQKAMKRLRVPPLGAAQPAPAWTTFRVGLFCGIFIVLNITLVLAAVFKLETDRSIWPLIRIYRGGFLLIEFLFLLGINTYGWRQAGVNHVLIFELNPRSNLSHQHLFEIAGFLGILWCLSLLACFFAPISVIPTYVYPLALYGFMVFFLINPTKTFYYKSRFWLLKLLFRVFTAPFHKVGFADFWLADQLNSLSVILMDLEYMICFYSLELKWDESKGLLPNNSEERGHSDTMVFFYLWIVFYIISSCYTLIWDLKMDWGLFDKNAGENTFLREEIVYPQKAYYYCAIIEDVILRFAWTIQISITSTTLLPHSGDIIATVFAPLEVFRRFVWNFFRLENEHLNNCGEFRAVRDISVAPLNADDQTLLEQMMDQDDGVRNRQKNRSWKYNQSISLRRPRLASQSKARDTKVLIEDTDDEANT

SEQ ID NO: 9182 - protein, 400 aa, Homo sapiens
PGVAAEWALSFRVVMAGYEYVSPEQLAGFDKYKYSAVDTNPLSLYVMHPFWNTIVKVFPTWLAPNLITFSGFLLVVFNFLLMAYFDPDFYASAPGHKHVPDWVWIVVGILNFVAYTLDGVDGKQARRTNSSTPLGELFDHGLDSWSCVYFVVTVYSIFGRGSTGVSVFVLYLLLWVVLFSFILSHWEKYNTGILFLPWGYDISQVTISFVYIVTAVVGVEAWYEPFLFNFLYRDLFTAMIIGCALCVTLPMSLLNFFRSYKNNTLKLNSVYEAMVPLFSPCLLFILSTAWILWSPSDILELHPRVFYFMVGTAFANSTCQLIVCQMSSTRCPTLNWLLVPLFLVVLVVNLGVASYVESILLYTLTTAFTLAHIHYGVRVVKQLSSHFQIYPFSLRKPNSD

SEQ ID NO: 9183 - protein, 363 aa, Homo sapiens
MGPGEALLAGLLVMVLAVALLSNALVLLCCAYSAELRTRASGVLLVNLSLGHLLLAALDMPFTLLGVMRGRTPSAPGACQVIGFLDTFLASNAALSVAALSADQWLAVGFPLRYAGRLRPRYAGLLLGCAWGQSLAFSGAALGCSWLGYSSAFASCSLRLPPEPERPRFAAFTATLHAVGFVLPLAVLCLTSLQVHRVARRHCQRMDTVTMKALAVLADLHPSVRHGCLIQQKRRRHRATRKIGIAIATFLICFAPYVMTRLAELVPFVTVNAQWGILSKCLTYSKAVADPFTYSLLRRPFRQVLAGMVHRLLKRTPRPASTHDSSLDVAGMVHQLLKRTPRPASTHNGSVDTENDSCLQQTH

SEQ ID NO: 9184 - protein, 5058 aa, Homo sapiens
  VARIANT 283, 2674: Xaa = Any Amino Acid
MGHAGCQFKALLWKNWLCRLRNPVLFLAEFFWPCILFVILTVLRFQEPPRYRDICYLQPRDLPSCGVIPFVQSLLCNTGSRCRNFSYEGSMEHHFRLSRFQTAADPKKVNNLAFLKEIQDLAEEIHGMMDKAKNLKRLWVERSNTPDSSYGSSFFTMDLNKTEEVILKLESLHQQPHIWDFLLLLPRLHTSHDHVEDGMDVAVNLLQTILNSLISLEDLDWLPLNQTFSQVSELVLNVTISTLTFLQQHGVAVTEPVYHLSMQNIVWDPQKVQYDLKSQFGFXDLHTEQILNSSAELKEIPTDTSLEKMVCSVLSSTSEDEAEKWGHVGGCHPKWSEAKNYLVHAVSWLRVYQQVFVQWQQGSLLQKTLTGMGHSLEALRNQFEEESKPWKVVEALHTALLLLNDSLSADGPKDNHTFPKILQHLWKLQSLLQNLPQWPALKRFLQLDGALRNAIAQNLHFVQEVLICLETSANDFKWFELNQLKLEKDVFFWELKQMLAKNAVCPNGRFSEKEVFLPPGNSSIWGGLQGLLCYCNSSETSVLNKLLGSVEDADRILQEVITWHKNMSVLIPEEYLDWQELEMQLSEASLSCTRLFLLLGADPSPENDVFSSDCKHQLVSTVIFHTLEKTQFFLEQAYYWKAFKKFIRKTCEVAQYVNMQESFQNRLLAFPEESPCFEENMDWKMISDNYFQFLNNLLKSPTASISRALNFTKHLLMMEKKLHTLEDEQMNFLLSFVEFFEKLLLPNLFDSSIVPSFHSLPSLTEDILNISSLWTNHLKSLKRDPSATDAQKLLEFGNEVIWKMQTLGSHWIRKEPKNLLRFIELILFEINPKLLELWAYGISKGKRAKLENFFTLLNFSVPENEILSTSFNFSQLFHSDWPKSPAMNIDFVRLSEAIITSLHEFGFLEQEQISEALNTVYAIRNASDLFSALSEPQKQEVDKILTHIHLNVFQDKDSALLLQIYSSFYRYIYELLNIQSRGSSLTFLTQISKHILDIIKQFNFQNISKAFAFLFKTAEVLGGISNVSYCQQLLSIFNFLELQAQSFMSTEGQELEVIHTTLTGLKQLLIIDEDFRISLFQYMSQFFNSSVEDLLDNKCLISDNKHISSVNYSTSEESSFVFPLAQIFSNLSANVSVFNKFMSIHCTVSWLQMWTEIWETISQLFKFDMNVFTSLHHGFTQLLDELEDDVKVSKSCQGILPTHNVARLILNLFKNVTQANDFHNWEDFLDLRDFLVALGNALVSVKKLNLEQVEKSLFTMEAALHQLKTFPFNESTSREFLNSLLEVFIEFSSTSEYIVRNLDSINDFLSNNLTNYGEKFENIITELREAIVFLRNVSHDRDLFSCADIFQNVTECILEDGFLYVNTSQRMLRILDTLNSTFSSENTISSLKGCIVWLDVINHLYLLSNSSFSQGRLQNILGNFRDIENKMNSILKIVTWVLNIKKPLCSSNGSHINCVNIYLKDVTDFLNIVLTTVFEKEKKPKFEILLALLNDSTKQVRMSINNLTTDFDFASQSNWRYFTELILRPIEMSDEIPNQFQNIWLHLITLGKEFQKLVKGIYFNILENNSSSKTENLLNIFATSPKEKDVNSVGNSIYHLASYLAFSLSHDLQNSPKIIISPEIMKATGLGIQLIRDVFNSLMPVVHHTSPQNAGYMQALKKVTSVMRTLKKADIDLLVDQLEQVSVNLMDFFKNISSVGTGNLVVNLLVGLMEKFADSSHSWNVNHLLQLSRLFPKDVVDAVIDVYYVLPHAVRLLQGVPGKNITEGLKDVYSFTLLHGITISNITKEDFAIVIKILLDTIELVSDKPDIISEALACFPVVWCWNHTNSGFRQNSKIDPCNVHGLMSSSFYGKVASILDHFHLSPQGEDSPCSNESSRMEITRKVVCIIHELVDWNSILLELSEVFHVNISLVKTVQKFWHKILPFVPPSINQTRDSISELCPSGSIKQVALQIIEKLKNVNFTKVTSGENILDKLSSLNKILNINEDTETSVQNIISSNLERTVQLISEDWSLEKSTHNLLSLFMMLQNANVTGSSLEALSSFIEKSETPYNFEELWPKFQQIMKDLTQDFRIRHLLSEMNKGIKSINSMALQKITLQFAHFLEILDSPSLKTLEIIEDFLLVTKNWLQEYANEDYSRMIETLFIPVTNESSTEDIALLAKAIATFWGSLKNISRAGNFDVAFLTHLLNQEQLTNFSVVQLLFENILINLINNLAGNSQEAAWNLNDTDLQIMNFINLILNHMQSETSRKTVLSLRSIVDFTEQFLKTFFSLFLKEDSENKISLLLKYFHKDVIAEMSFVPKDKILEILKLDQFLTLMIQDRLMNIFSSLKETIYHLMKSSFILDNGEFYFDTHQGLKFMQDLFNALLRETSMKNKTENNIDFFTVVSQLFFHVNKSEDLFKLNQDLGSALHLVRECSTEMARLLDTILHSPNKDFYALYPTLQEVILANLTDLLFFINNSFPLRNRATLEITKRLVGAISRASEESHVLKPLLEMSGTLVMLLNDSADLRDLATSMDSIVKLLKLVKKVSGKMSTVFKTHFISNTKDSVKFFDTLYSIMQQSVQNLVKEIATLKKIDHFTFEKINDLLVPFLDLAFEMIGVEPYISSNSDIFSMSPSILSYMNQSKDFSDILEEIAEFLTSVKMNLEDMRSLAVAFNNETQTFSMDSVNLXEEILGCLVPINNITNQMDFLYPNPISTHSGPQDIKWEIIHEVILFLDKILSQNSTEIGSFLKMVICLTLEALWKNLKKDNWNVSNVLMTFTQHPNNLLKTIETVLEASSGIKSDYEGDLNKSLYFDTPLSQNITHHQLEKAIHNVLSRIALWRKGLRFNNSEWITSTRTLFQPLFEIFIKATTGKNVTSEKEERTEKEMIDFPYSFKPFFCLEKYLGGLFVLTKYWQQIPLTDQSVVEICEVFQQTVKPSEAMEMLQKVKMMVVRVLTIVAENPSWTKDILCATLSCKQNGIRHLILSAIQGVTLAQDHFQEIEKIWSSPNQLNCESLSKNLSSTLESFKSSLENATGQDCTSQPRLETVQQHLYMLAKSLEETWSSGNPIMTFLSNFTVTEDVKIKDLMKNITKLTEELRSSIQISNETIHSILEANISHSKVLFSALTVALSGKCDQEILHLLLTFPKGEKSWIAAEELCSLPGSKVYSLIVLLSRNLDVRAFIYKTLMPSEANGLLNSLLDIVSSLSALLAKAQHVFEYLPEFLHTFKITALLETLDFQQVSQNVQARSSAFGSFQFVMKMVCKDQASFLSDSNMFINLPRVKELLEDDKEKFNIPEDSTPFCLKLYQEILQLPNGALVWTFLKPILHGKILYTPNTPEINKVIQKANYTFYIVDKLKTLSETLLEMSSLFQRSGSGQMFNQLQEALRNKFVRNFVENQLHIDVDKLTEKLQTYGGLLDEMFNHAGAGRFRFLGSILVNLSSCVALNRFQALQSVDILETKAHELLQQNSFLASIIFSNSLFDKNFRSESVKLPPHVSYTIRTNVLYSVRTDVVKNPSWKFHPQNLPADGFKYNYVFAPLQDMIERAIILVQTGQEALEPAAQTQAAPYPCHTSDLFLNNVGFFFPLIMMLTWMVSVASMVRKLVYEQEIQIEEYMRMMGVHPVIHFLAWFLENMAVLTISSATLAIVLKTSGIFAHSNTFIVFLFLLDFGMSVVMLSYLLSAFFSQANTAALCTSLVYMISFLPYIVLLVLHNQLSFVNQTFLCLLSTTAFGQGVFFITFLEGQETGIQWNNMYQALEQGGMTFGWVCWMILFDSSLYFLCGWYLSNLIPGTFGLRKPWYFPFTASYWKSVGFLVEKRQYFLSSSLFFFNENFDNKGSSLQNREGELEGSAPGVTLVSVTKEYEGHKAVVQDLSLTFYRDQITALLGTNGAGKTTIISMLTGLHPPTSGTIIINGKNLQTDLSRVRMELGVCPQQDILLDNLTVREHLLLFASIKAPQWTKKELHQQVNQTLQDVDLTQHQHKQTRALSGGLKRKLSLGIAFMGMSRTVVLDEPTSGVDPCSRHSLWDILLKYREGRTIIFTTHHLDEAEALSDRVAVLQHGRLRCCGPPFCLKEAYGQGLRLTLTRQPSVLEAHDLKDMACVTSLIKIYIPQAFLKDSSGSELTYTIPKDTDKACLKGLFQALDENLHQLHLTGYGISDTTLEEVFLMLLQDSNKKSHIALGTESELQNHRPTGHLSGYCGSLARPATVQGVQLLRAQVAAILARRLRRTLRAGKSTLADLLLPVLFVALAMGLFMVRPLATEYPPLRLTPGHYQRAETYFFSSGGDNLDLTRVLLRKFRDQDLPCADLNPRQKNSSCWRTDPFSHPEFQDSCGCLKCPNRSASAPYLTNHLGHTLLNLSGFNMEEYLLAPSEKPRLGGWSFGLKIPSEAGGANGNISKPPTLAKVWYNQKGFHSLPSYLNHLNNLILWQHLPPTVDWRQYGITLYSHPYGGALLNEDKILESIRQCGVALCIVLGFSILSASIGSSVVRDRVIGAKRLQHISGLGYRMYWFTNFLYDMLFYLVSVCLCVAVIVAFQLTAFTFRKNLAATALLLSLFGYATLPWMYLMSRIFSSSDVAFISYVSLNFIFGLCTMPITIMPRLLAIISKAKNLQNIYDVLKWVFTIFPQFCLGQGLVELCYNQIKYDLTHNFGIDSYVSPFEMNFLGWIFVQLASQGTVLLLLRVLLHWDLLRWPRGHSTLQGTVKSSKDTDVEKEEKRVFEGRTNGDILVLYNLSKHYRRFFQNIIAVQDISLGIPKGECFGLLGVNGAGKSTTFKMLNGEVSLTSGHAIIRTPMGDAVDLSSAGTAGVLIGYCPQQDALDELLTGWEHLYYYCSLRGIPRQCIPEVAGDLIRRLHLEAHADKPVATYSGGTKRKLSTALALVGKPDILLLDEPSSGMDPCSKRYLWQTIMKEVREGCAAVLTSHSMEECEALCTRLAIMVNGSFKCLGSPQHIKNRFGDGYTVKVWLCKEANQHCTVSDHLKLYFPGIQFKGQHLNLLEYHVPKRWGCLADLFKVIENNKTFLNIKHYSINQTTLEQVFINFASEQQQTLQSTLDPSTDSHHTHHLPI

SEQ ID NO: 9185 - protein, 906 aa, Homo sapiens [sequence omitted]

SEQ ID NO: 9186 - protein, 885 aa, Homo sapiens
MSTMRLLTLALLFSCSVARAACDPKIVNIGAVLSTRKHEQMFREAVNQANKRHGSWKIQLNATSVTHKPNAIQMALSVCEDLISSQVYAILVSHPPTPNDHFTPTPVSYTAGFYRIPVLGLTTRMSIYSDKSIHLSFLRTVPPYSHQSSVWFEMMRVYSWNHIILLVSDDHEGRAAQKRLETLLEERESKAEKVLQFDPGTKNVTALLMEAKELEARVIILSASEDDAATVYRAAAMLNMTGSGYVWLVGEREISGNALRYAPDGILGLQLINGKNESAHISDAVGVVAQAVHELLEKENITDPPRGCVGNTNIWKTGPLFKRVLMSSKYADGVTGRVEFNEDGDRKFANYSIMNLQNRKLVQVGIYNGTHVIPNDRKIIWPGGETEKPRGYQMSTRLKIVTIHQEPFVYVKPTLSDGTCKEEFTVNGDPVKKVICTGPNDTSPGSPRHTVPQCCYGFCIDLLIKLARTMNFTYEVHLVADGKFGTQERVNNSNKKEWNGMMGELLSGQADMIVAPLTINNERAQYIEFSKPFKYQGLTILVKKEIPRSTLDSFMQPFQSTLWLLVGLSVHVVAVMLYLLDRFSPFGRFKVNSEEEEEDALTLSSAMWFSWGVLLNSGIGEGAPRSFSARILGMVWAGFAMIIVASYTANLAAFLVLDRPEERITGINDPRLRNPSDKFIYATVKQSSVDIYFRRQVELSTMYRHMEKHNYESAAEAIQAVRDNKLHAFIWDSAVLEFEASQKCDLVTTGELFFRSGFGIGMRKDSPWKQNVSLSILKSHENGFMEDLDKTWVRYQECDSRSNAPATLTFENMAGVFMLVAGGIVAGIFLIFIEIAYKRHKDARRKQMQLAFAAVNVWRKNLQQYHPTDITGPLNLSDPSVSTVV

SEQ ID NO: 9187 - protein, 901 aa, Homo sapiens
MSTMRLLTLALLFSCSVARAACDPKIVNIGAVLSTRKHEQMFREAVNQANKRHGSWKIQLNATSVTHKPNAIQMALSVCEDLISSQVYAILVSHPPTPNDHFTPTPVSYTAGFYRIPVLGLTTRMSIYSDKSIHLSFLRTVPPYSHQSSVWFEMMRVYSWNHIILLVSDDHEGRAAQKRLETLLEERESKAEKVLQFDPGTKNVTALLMEAKELEARVIILSASEDDAATVYRAAAMLNMTGSGYVWLVGEREISGNALRYAPDGILGLQLINGKNESAHISDAVGVVAQAVHELLEKENITDPPRGCVGNTNIWKTGPLFKRVLMSSKYADGVTGRVEFNEDGDRKFANYSIMNLQNRKLVQVGIYNGTHVIPNDRKIIWPGGETEKPRGYQMSTRLKIVTIHQEPFVYVKPTLSDGTCKEEFTVNGDPVKKVICTGPNDTSPGSPRHTVPQCCYGFCIDLLIKLARTMNFTYEVHLVADGKFGTQERVNNSNKKEWNGMMGELLSGQADMIVAPLTINNERAQYIEFSKPFKYQGLTILVKKEIPRSTLDSFMQPFQSTLWLLVGLSVHVVAVMLYLLDRFSPFGRFKVNSEEEEEDALTLSSAMWFSWGVLLNSGIGEGAPRSFSARILGMVWAGFAMIIVASYTANLAAFLVLDRPEERITGINDPRLRNPSDKFIYATVKQSSVDIYFRRQVELSTMYRHMEKHNYESAAEAIQAVRDNKLHAFIWDSAVLEFEASQKCDLVTTGELFFRSGFGIGMRKDSPWKQNVSLSILKSHENGFMEDLDKTWVRYQECDSRSNAPATLTFENMAGVFMLVAGGIVAGIFLIFIEIAYKRHKDARRKQMQLAFAAVNVWRKNLQSTGGGRGALQNQKDTVLPRRAIEREEGQLQLCSRHRES

SEQ ID NO: 9188 - protein, 938 aa, Homo sapiens
MSTMRLLTLALLFSCSVARAACDPKIVNIGAVLSTRKHEQMFREAVNQANKRHGSWKIQLNATSVTHKPNAIQMALSVCEDLISSQVYAILVSHPPTPNDHFTPTPVSYTAGFYRIPVLGLTTRMSIYSDKSIHLSFLRTVPPYSHQSSVWFEMMRVYSWNHIILLVSDDHEGRAAQKRLETLLEERESKAEKVLQFDPGTKNVTALLMEAKELEARVIILSASEDDAATVYRAAAMLNMTGSGYVWLVGEREISGNALRYAPDGILGLQLINGKNESAHISDAVGVVAQAVHELLEKENITDPPRGCVGNTNIWKTGPLFKRVLMSSKYADGVTGRVEFNEDGDRKFANYSIMNLQNRKLVQVGIYNGTHVIPNDRKIIWPGGETEKPRGYQMSTRLKIVTIHQEPFVYVKPTLSDGTCKEEFTVNGDPVKKVICTGPNDTSPGSPRHTVPQCCYGFCIDLLIKLARTMNFTYEVHLVADGKFGTQERVNNSNKKEWNGMMGELLSGQADMIVAPLTINNERAQYIEFSKPFKYQGLTILVKKEIPRSTLDSFMQPFQSTLWLLVGLSVHVVAVMLYLLDRFSPFGRFKVNSEEEEEDALTLSSAMWFSWGVLLNSGIGEGAPRSFSARILGMVWAGFAMIIVASYTANLAAFLVLDRPEERITGINDPRLRNPSDKFIYATVKQSSVDIYFRRQVELSTMYRHMEKHNYESAAEAIQAVRDNKLHAFIWDSAVLEFEASQKCDLVTTGELFFRSGFGIGMRKDSPWKQNVSLSILKSHENGFMEDLDKTWVRYQECDSRSNAPATLTFENMAGVFMLVAGGIVAGIFLIFIEIAYKRHKDARRKQMQLAFAAVNVWRKNLQDRKSGRAEPDPKKKATFRAITSTLASSFKRRRSSKDTSTGGGRGALQNQKDTVLPRRAIEREEGQLQLCSRHRES

SEQ ID NO: 9189 - protein, 345 aa, Homo sapiens
STGGKRRRKLRKAAHLEVHREGDGSSTTGNTQEGAVQNHGTSTSHSVGTVFRDLWHAAFFLSGSKKAKNSIDKSTETDNGYVSLDGKKTVKSGEDGIQNHEPQCETIRPEETAWNTGTLRNGPSKDTQRTITNVSDEVSSEEGPETGYSLRRHVDRTSEGVLRNRKSHHYKKHYPNEDAPKSGTSCSSRCSSSRQDSESARPESETEDVLWEDLLHCAECHSSCTSETDVENHQINPCVKKEYRDDPFHQVNSHIPGIGYQIFGNAVSLILGLTPFVFRLSQATDLEQLTAHSASELYVIAFGSNEDVIVLSMVIISFVVRVSLVWIFFFLLCVAERTYKQVGIM

SEQ ID NO: 9190 - protein, 356 aa, Homo sapiens [sequence omitted]

SEQ ID NO: 9191 - protein, 785 aa, Homo sapiens
MAPKVTDAIVWYQKKEFLSVATTAPGPQQVLPGYCQCSLKDQGLFIQCLIGAYDQQIWEKSVEQREIKFIKLGLRNKPKKTAHVKPDLIDVDLVRGSAFAKAKPESPWTSLTRKGIVRVVFFPFFFRWWLQVTSKVIFFWLLVLYLLQVAAIVLFCSTSSPHSIPLTEVIGPIWLMLLLGTVHCQIVSTRTPKPPLSTGGKRRRKLRKAAHLEVHREGDGSSTTDNTQEGAVQNHGTSTSHSVGTVFRDLWHAAFFLSGSKKAKNSIDKSTETDNGYVSLDGKKTVKSGEDGIQNHEPQCETIRPEETAWNTGTLRNGPSKDTQRTITNVSDEVSSEEGPETGYSLRRHVDRTSEGVLRNRKSHHYKKHYPNEDAPKSGTSCSSRCSSSRQDSESARPESETEDVLWEDLLHCAECHSSCTSETDVENHQINPCVKKEYRDDPFHQSHLPWLHSSHPGLEKISAIVWEGNDCKKADMSVLEISGMIMNRVNSHIPGIGYQIFGNAVSLILGLTPFVFRLSQATDLEQLTAHSASELYVIAFGSNEDVIVLSMVIISFVVRVSLVWIFFFLLCVAERTYKQRLLFAKLFGHLTSARRARKSEVPHFRLKKVQNIKMWLSLRSYLKRRGPQRSVDVIVSSAFLLTISVVFICCAQLLHVHEIFLDCHYNWELVIWCISLTLFLLRFVTLGSETSKKYSNTSILLTEQINLYLKMEKKPNKKEELTLVNNVLKLATKLLKELDSPFRLYGLTMNPLLYNITQVVILSAVSGVISDLLGFNLKLWKIKS

SEQ ID NO: 9192 - protein, 588 aa, Homo sapiens
GLRNKPKKTAHVKPDLIDVDLVRGSAFAKAKPESPWTSLTRKGIVRVVFFPFFFRWWLQVTSKVIFFWLLVLYLLQVAAIVLFCSTSSPHSIPLTEVIGPIWLMLLLGTVHCQIVSTRTPKPPLSTGGKRRRKLRKAAHLEVHREGDGSSTTDNTQEGAVQNHGTSTSHSVGTVFRDLWHAAFFLSGSKKAKNSIDKSTETDNGYVSLDGKKTVKSGEDGIQNHEPQCETIRPEETAWNTGTLRNGPSKDTQRTITNVSDEVSSEEGPETGYSLRRHVDRTSEGVLRNRKSHHYKKHYPNEDAPKSGTSCSSRCSSSRQDSESARPESETEDVLWEDLLHCAECHSSCTSETDVENHQINPCVKKEYRDDPFHQSHLPWLHSSHPGLEKISAIVWEGNDCKKADMSVLEISGMIMNRVNSHIPGIGYQIFGNAVSLILGLTPFVFRLSQATDLEQLTAHSASELYVIAFGSNEDVIVLSMVIISFVVRVSLVWIFFFLLCVAERTYKQINLYLKMEKKPNKKEELTLVNNVLKLATKLLKELDSPFRLYGLTMNPLLYNITQVVILSAVSGVISDLLGFNLKLWKIKS

SEQ ID NO: 9193 - protein, 695 aa, Homo sapiens
MASKVTDAIVWYQKKIGAYDQQIWEKSVEQREIKGLRNKPKKTAHVKPDLIDVDLVRGSAFAKAKPESPWTSLTRKGIVRVVFFPFFFRWWLQVTSKVIFFWLLVLYLLQVAAIVLFCSTSSPHSIPLTEVIGPIWLMLLLGTVHCQIVSTRTPKPPLSTGGKRRRKLRKAAHLEVHREGDGSSTTDNTQEGAVQNHGTSTSHSVGTVFRDLWHAAFFLSGSKKAKNSIDKSTETDNGYVSLDGKKTVKSGEDGIQNHEPQCETIRPEETAWNTGTLRNGPSKDTQRTITNVSDEVSSEEGPETGYSLRRHVDRTSEGVLRNRKSHHYKKHYPNEDAPKSGTSCSSRCSSSRQDSESARPESETEDVLWEDLLHCAECHSSCTSETDVENHQINPCVKKEYRDDPFHQSHLPWLHSSHPGLEKISAIVWEGNDCKKADMSVLEISGMIMNRVNSHIPGIGYQIFGNAVSLILGLTPFVFRLSQATDLEQLTAHSASELYVIAFGSNEDVIVLSMVIISFVVRVSLVWIFFFLLCVAERTYKQRLLFAKLFGHLTSARRARKSEVPHFRLKKVQNIKMWLSLRSYLKRRGPQRSVDVIVSSAFLLTISVVFICCAQINLYLKMEKKPNKKEELTLVNNVLKLATKLLKELDSPFRLYGLTMNPLLYNITQVVILSAVSGVISDLLGFNLKLWKIKS

SEQ ID NO: 9194 - protein, 227 aa, Homo sapiens
MSQSNRELVVDFLSYKLSQKGYSWSQFSDVEENRTEAPEGTESEMETPSAINGNPSWHLADSPAVNGATGHSSSLDAREVIPMAAVKQALREAGDEFELRYRRAFSDLTSQLHITPGTAYQSFEQVVNELFRDGVNWGRIVAFFSFGGALCVESVDKEMQVLVSRIAAWMATYLNDHLEPWIQENGGWVRTKPLVCPFSLASGQRSPTALLLYLFLLCWVIVGDVDS

SEQ ID NO: 9195 - protein, 233 aa, Homo sapiens
MSQSNRELVVDFLSYKLSQKGYSWSQFSDVEENRTEAPEGTESEMETPSAINGNPSWHLADSPAVNGATGHSSSLDAREVIPMAAVKQALREAGDEFELRYRRAFSDLTSQLHITPGTAYQSFEQVVNELFRDGVNWGRIVAFFSFGGALCVESVDKEMQVLVSRIAAWMATYLNDHLEPWIQENGGWDTFVELYGNNAAAESRKGQERFNRWFLTGMTVAGVVLLGSLFSRK

SEQ ID NO: 9196 - protein, 170 aa, Homo sapiens
MSQSNRELVVDFLSYKLSQKGYSWSQFSDVEENRTEAPEGTESEMETPSAINGNPSWHLADSPAVNGATGHSSSLDAREVIPMAAVKQALREAGDEFELRYRRAFSDLTSQLHITPGTAYQSFEQDTFVELYGNNAAAESRKGQERFNRWFLTGMTVAGVVLLGSLFSRK

SEQ ID NO: 9197 - protein, 428 aa, Homo sapiens
MDVVDSLLVNGSNITPPCELGLENETLFCLDQPRPSKEWQPAVQILLYSLIFLLSVLGNTLVITVLIRNKRMRTVTNIFLLSLAVSDLMLCLFCMPFNLIPNLLKDFIFGSAVCKTTTYFMGTSVSVSTFNLVAISLERYGAICKPLQSRVWQTKSHALKVIAATWCLSFTIMTPYPIYSNLVPFTKNNNQTANMCRFLLPNDVMQQSWHTFLLLILFLIPGIVMMVAYGLISLELYQGIKFEASQKKSAKERKPSTTSSGKYEDSDGCYLQKTRPPRKLELRQLSTGSSSRANRIRSNSSAANLMAKKRVIRMLIVIVVLFFLCWMPIFSANAWRAYDTASAERRLSGTPISFILLLSYTSSCVNPIIYCFMNKRFRLGFMATFPCCPNPGPPGARGEVGEEEEGGTTGASLSRFSYSHMSASVPPQ

SEQ ID NO: 9198 - protein, 581 aa, Homo sapiens [sequence omitted]

SEQ ID NO: 9199 - protein, 581 aa, Homo sapiens
MPAPRAREQPRVPGERQPLLPRGARGPRRWRRAAGAAVLLVEMLERAAFFGVTANLVLYLNSTNFNWTGEQATRAALVFLGASYLLAPVGGWLADVYLGRYRAVALSLLLYLAASGLLPATAFPDGRSSFCGEMPASPLGPACPSAGCPRSSPSPYCAPVLYAGLLLLGLAASSVRSNLTSFGADQVMDLGRDATRRFFNWFYWSINLGAVLSLLVVAFIQQNISFLLGYSIPVGCVGLAFFIFLFATPVFITKPPMGSQVSSMLKLALQNCCPQLWQRHSARDRQCARVLADERSPQPGASPQEDIANFQVLVKILPVMVTLVPYWMVYFQMQSTYVLQGLHLHIPNIFPANPANISVALRAQGSSYTIPEAWLLLANVVVVLILVPLKDRLIDPLLLRCKLLPSALQKMALGMFFGFTSVIVAGVLEMERLHYIHHNETVSQQIGEVLYNAAPLSIWWQIPQYLLIGISEIFASIPGLEFAYSEAPRSMQGAIMGIFFCLSGVGSLLGSSLVALLSLPGGWLHCPKDFGNINNCRMDLYFFLLAGIQAVTALLFVWIAGRYERASQGPASHSRFSRDRG

SEQ ID NO: 9200 - protein, 575 aa, Homo sapiens [sequence omitted]

SEQ ID NO: 9201 - protein, 468 aa, Homo sapiens
ELRQLRRRWFHHFMSDSQGPPALGPEAARPAIHSRGTYIGCFSDDGHERTLKGAVFYDLRKMTVSHCQDACAERSYVYAGLEAGAECYCGNRLPAVSVGLEECNHECKGEKGSVCGAVDRLSVYRVDELQPGSRKRRTATYRGCFRLPENITHAFPSSLIQANVTVGTCSGFCSQKEFPLAILRGWECYCAYPTPRFNLRDAMDSSVCGQDPEAQRLAEYCEVYQTPVQDTRCTDRRFLPNKSKVFVALSSFPGAGNTWARHLIEHATGFYTGSYYFDGTLYNKGFKGEKDHWRSRRTICVKTHESGRREIEMFDSAILLIRNPYRSLVAEFNRKCAGHLGYAADRNWKSKEWPDFVNSYASWWSSHVLDWLKYGKRLLVVHYEELRRSLVPTLREMVAFLNVSVSEERLLCVENNKEGSFRRRGRRSHDPEPFTPEMKDLINGYIRTVDQALRDHNWTGLPREYVPR

SEQ ID NO: 9202 - protein, 389 aa, Homo sapiens
MEDSPTMVRVDSPTMVRGENQVSPCQGRRCFPKALGYVTGDMKELANQLKDKPVVLQFIDWILRGISQVVFVNNPVSGILILVGLLVQNPWWALTGWLGTVVSTLMALLLSQDRSLIASGLYGYNATLVGVLMAVFSDKGDYFWWLLLPVCAMSMTCPIFSSALNSMLSKWDLPVFTLPFNMALSMYLSATGHYNPFFPAKLVIPITTAPNISWSDLSALELLKSIPVGVGQIYGCDNPWTGGIFLGAILLSSPLMCLHAAIGSLLGIAAGLSLSAPFEDIYFGLWGFNSSLACIAMGGMFMALTWQTHLLALGCALFTAYLGVGMANFMAEVGLPACTWPFCLATLLFLIMTTKNSNIYKMPLSKVTYPEENRIFYLQAKKRMVESPL

SEQ ID NO: 9203 - protein, 4302 aa, Homo sapiens [sequence omitted]

SEQ ID NO: 9204 - protein, 4303 aa, Homo sapiens [sequence omitted]

SEQ ID NO: 9205 - protein, 3638 aa, Homo sapiens [sequence omitted]

SEQ ID NO: 9206 - protein, 435 aa, Homo sapiens [sequence omitted]

SEQ ID NO: 9207 - protein, 335 aa, Homo sapiens [sequence omitted]

SEQ ID NO: 9208 - protein, 524 aa, Homo sapiens
MSLLSLPWLGLRPVAMSPWLLLLLVVGSWLLARILAWTYAFYNNCRRLQCFPQPPKRNWFWGHLGLITPTEEGLKDSTQMSATYSQGFTVWLGPIIPFIVLCHPDTIRSITNASAAIAPKDNLFIRFLKPWLGEGILLSGGDKWSRHRRMLTPAFHFNILKSYITIFNKSANIMLDKWQHLASEGSSRLDMFEHISLMTLDSLQKCIFSFDSHCQERPSEYIATILELSALVEKRSQHILQHMDFLYYLSHDGRRFHRACRLVHDFTDAVIRERRRTLPTQGIDDFFKDKAKSKTLDFIDVLLLSKDEDGKALSDEDIRAEADTFMFGGHDTTASGLSWVLYNLARHPEYQERCRQEVQELLKDRDPKEIEWDDLAQLPFLTMCVKESLRLHPPAPFISRCCTQDIVLPDGRVIPKGITCLIDIIGVHHNPTVWPDPEVYDPFRFDPENSKGRSPLAFIPFSAGPRNCIGQAFAMAEMKVVLALMLLHFRFLPDHTEPRRKLELIMRAEGGLWLRVEPLNVGLQ

SEQ ID NO: 9209 - protein, 259 aa, Homo sapiens
MARIPKTLKFVVVIVAVLLPVLAYSATTARQEEVPQQTVAPQQQRHSFKGEECPAGSHRSEHTGACNPCTEGVDYTNASNNEPSCFPCTVCKSDQKHKSSCTMTRDTVCQCKEGTFRNENSPEMCRKCSRCPSGEVQVSNCTSWDDIQCVEEFGANATVETPAAEETMNTSPGTPAPAAEETMNTSPGTPAPAAEETMTTSPGTPAPAAEETMTTSPGTPAPAAEETMTTSPGTPASSHYLSCTIVGIIVLIVLLIVFV

SEQ ID NO: 9210 - protein, 442 aa, Homo sapiens
MDVKERRPYCSLTKSRREKERRYTNSSADNEECRVPTQKSYSSSETLKAFDHDSSRLLYGNRVKDLVHREADEFTRQGQNFTLRQLGVCEPATRRGLAFCAEMGLPHRGYSISAGSDADTENEAVMSPEHAMRLWGRGVKSGRSSCLSSRSNSALTLTDTEHENKSDSENEQPASNQGQSTLQPLPPSHKQHSAQHHPSITSLNRNSLTNRRNQSPAPPAALPAELQTTPESVQLQDSWVLGSNVPLESRHFLFKTGTGTTPLFSTATPGYTMASGSVYSPPTRPLPRNTLSRSAFKFKKSSKYCSWKCTALCAVGVSVLLAILLSYFIAMHLFGLNWQLQQTENDTFENGKVNSDTMPTNTVSLPSGDNGKLGGFTQENNTIDSGELDIGRRAIQEIPPGIFWRSQLFIDQPQFLKFNISLQKDALIGVYGRKKLPPSHTQ

SEQ ID NO: 9211 - protein, 530 aa, Homo sapiens
MSRSPQRALPPGALPRLLQAAPAAAPRALLPQWPRRPGRRWPASPLGMKVFRRKALVLCAGYALLLVLTMLNLLDYKWHKEPLQQCNPDGPLGAAAGAAGGSWGRPGPPPAGPPRAHARLDLRTPYRPPAAAVGAAPAAAAGMAGVAAPPGNGTRGTGGVGDKRQLVYVFTTWRSGSSFFGELFNQNPEVFFLYEPVWHVWQKLYPGDAVSLQGAARDMLSALYRCDLSVFQLYSPAGSGGRNLTTLGIFGAATNKVVCSSPLCPAYRKEVVGLVDDRVCKKCPPQRLARFEEECRKYRTLVIKGVRVFDVAVLAPLLRDPALDLKVIHLVRDPRAVASSRIRSRHGLIRESLQVVRSRDPRAHRMPFLEAAGHKLGAKKEGVGGPADYHALGAMEVICNSMAKTLQTALQPPDWLQGHYLVVRYEDLVGDPVKTLRRVYDFVGLLVSPEMEQFALNMTSGSGSSSKPFVVSARNATQAANAWRTALTFQQIKQVEEFCYQPMAVLGYERVNSPEEVKDLSKTLLRKPRL

SEQ ID NO: 9212 - protein, 2505 aa, Homo sapiens
MARFGDEMPARYGGGGSGAAAGVVVGSGGGRGAGGSRQGGQPGAQRMYKQSMAQRARTMALYNPIPVRQNCLTVNRSLFLFSEDNVVRKYAKKITEWPPFEYMILATIIANCIVLALEQHLPDDDKTPMSERLDDTEPYFIGIFCFEAGIKIIALGFAFHKGSYLRNGWNVMDFVVVLTGILATVGTEFDLRTLRAVRVLRPLKLVSGIPSLQVVLKSIMKAMIPLLQIGLLLFFAILIFAIIGLEFYMGKFHTTCFEEGTDDIQGESPAPCGTEEPARTCPNGTKCQPYWEGPNNGITQFDNILFAVLTVFQCITMEGWTDLLYNSNDASGNTWNWLYFIPLIIIGSFFMLNLVLGVLSGEFAKERERVENRRAFLKLRRQQQIERELNGYMEWISKAEEVILAEDETDGEQRHPFDGALRRTTIKKSKTDLLNPEEAEDQLADIASVGSPFARASIKSAKLENSTFFHKKERRMRFYIRRMVKTQAFYWTVLSLVALNTLCVAIVHYNQPEWLSDFLYYAEFIFLGLFMSEMFIKMYGLGTRPYFHSSFNCFDCGVIIGSIFEVIWAVIKPGTSFGISVLRALRLLRIFKVTKYWASLRNLVVSLLNSMKSIISLLFLLFLFIVVFALLGMQLFGGQFNFDEGTPPTNFDTFPAAIMTVFQILTGEDWNEVMYDGIKSQGGVQGGMVFSIYFIVLTLFGNYTLLNVFLAIAVDNLANAQELTKDEQEEEEAANQKLALQKAKEVAEVSPLSAANMSIAVKEQQKNQKPAKSVWEQRTSEMRKQNLLASREALYNEMDPDERWKAAYTRHLRPDMKTHLDRPLVVDPQENRNNNTNKSRAAEPTVDQRLGQQRAEDFLRKQARYHDRARDPSGSAGLDARRPWAGSQEAELSREGPYGRESDHHAREGSLEQPGFWEGEAERGKAGDPHRRHVHRQGGSRESRSGSPRTGADGEHRRHRAHRRPGEEGPEDKAERRARHREGSRPARGGEGEGEGPDGGERRRRHRHGAPATYEGDARREDKERRHRRRKENQGSGVPVSGPNLSTTRPIQQDLGRQDPPLAEDIDNMKNNKLATAESAAPHGSLGHAGLPQSPAKMGNSTDPGPMLAIPAMATNPQNAASRRTPNNPGNPSNPGPPKTPENSLIVTNPSGTQTNSAKTARKPDHTTVDIPPACPPPLNHTVVQVNKNANPDPLPKKEEEKKEEEEDDRGEDGPKPMPPYSSMFILSTTNPLRRLCHYILNLRYFEMCILMVIAMSSIALAAEDPVQPNAPRNNVLRYFDYVFTGVFTFEMVIKMIDLGLVLHQGAYFRDLWNILDFIVVSGALVAFAFTGNSKGKDINTIKSLRVLRVLRPLKTIKRLPKLKAVFDCVVNSLKNVFNILIVYMLFMFIFAVVAVQLFKGKFFHCTDESKEFEKDCRGKYLLYEKNEVKARDREWKKYEFHYDNVLWALLTLFTVSTGEGWPQVLKHSVDATFENQGPSPGYRMEMSIFYVVYFVVFPFFFVNIFVALIIITFQEQGDKMMEEYSLEKNERACIDFAISAKPLTRHMPQNKQSFQYRMWQFVVSPPFEYTIMAMIALNTIVLMMKFYGASVAYENALRVFNIVFTSLFSLECVLKVMAFGILNYFRDAWNIFDFVTVLGSITDILVTEFGNNFINLSFLRLFRAARLIKLLRQGYTIRILLWTFVQSFKALPYVCLLIAMLFFIYAIIGMQVFGNIGIDVEDEDSDEDEFQITEHNNFRTFFQALMLLFRSATGEAWHNIMLSCLSGKPCDKNSGILTRECGNEFAYFYFVSFIFLCSFLMLNLFVAVIMDNFEYLTRDSSILGPHHLDEYVRVWAEYDPAAWGRMPYLDMYQMLRHMSPPLGLGKKCPARVAYKRLLRMDLPVADDNTVHFNSTLMALIRTALDIKIAKGGADKQQMDAELRKEMMAIWPNLSQKTLDLLVTPHKSTDLTVGKIYAAMMIMEYYRQSKAKKLQAMREEQDRTPLMFQRMEPPSPTQEGGPGQNALPSTQLDPGGALMAHESGLKESPSWVTQRAQEMFQKTGTWSPEQGPPTDMPNSQPNSQSVEMREMGRDGYSDSEHYLPMEGQGRAASMPRLPAENQRRRGRPRGNNLSTISDTSPMKRSASVLGPKARRLDDYSLERVPPEENQRHHQRRRDRSHRASERSLGRYTDVDTGLGTDLSMTTQSGDLPSKERDQERGRPKDRKHRQHHHHHHHHHHPPPPDKDRYAQERPDHGRARARDQRWSRSPSEGREHMAHRQGSSSVSGSPAPSTSGTSTPRRGRRQLPQTPSTPRPHVSYSPVIRKAGGSGPPQQQQQQQQQQQAVARPGRAATSGPRRYPGPTAEPLAGDRPPTGGHSSGRSPRMERRVPGPARSESPRACRHGGARWPASGPHVSEGPPGPRHHGYYRGSDYDEADGPGSGGGEEAMAGAYDAPPPVRHASSGATGRSPRTPRASGPACASPSRHGRRLPNGYYPAHGLARPRGPGSRKGLHEPYSESDDDWC

SEQ ID NO: 9213 - protein, 2261 aa, Homo sapiens
MARFGDEMPARYGGGGSGAAAGVVVGSGGGRGAGGSRQGGQPGAQRMYKQSMAQRARTMALYNPIPVRQNCLTVNRSLFLFSEDNVVRKYAKKITEWPPFEYMILATIIANCIVLALEQHLPDDDKTPMSERLDDTEPYFIGIFCFEAGIKIIALGFAFHKGSYLRNGWNVMDFVVVLTGILATVGTEFDLRTLRAVRVLRPLKLVSGIPSLQVVLKSIMKAMIPLLQIGLLLFFAILIFAIIGLEFYMGKFHTTCFEEGTDDIQGESPAPCGTEEPARTCPNGTKCQPYWEGPNNGITQFDNILFAVLTVFQCITMEGWTDLLYNSNDASGNTWNWLYFIPLIIIGSFFMLNLVLGVLSGEFAKERERVENRRAFLKLRRQQQIERELNGYMEWISKAEEVILAEDETDGEQRHPFDGALRRTTIKKSKTDLLNPEEAEDQLADIASVGSPFARASIKSAKLENSTFFHKKERRMRFYIRRMVKTQAFYWTVLSLVALNTLCVAIVHYNQPEWLSDFLYYAEFIFLGLFMSEMFIKMYGLGTRPYFHSSFNCFDCGVIIGSIFEVIWAVIKPGTSFGISVLRALRLLRIFKVTKYWASLRNLVVSLLNSMKSIISLLFLLFLFIVVFALLGMQLFGGQFNFDEGTPPTNFDTFPAAIMTVFQILTGEDWNEVMYDGIKSQGGVQGGMVFSIYFIVLTLFGNYTLLNVFLAIAVDNLANAQELTKDEQEEEEAANQKLALQKAKEVAEVSPLSAANMSIAVKEQQKNQKPAKSVWEQRTSEMRKQNLLASREALYNEMDPDERWKAAYTRHLRPDMKTHLDRPLVVDPQENRNNNTNKSRAAEPTVDQRLGQQRAEDFLRKQARYHDRARDPSGSAGLDARRPWAGSQEAELSREGPYGRESDHHAREGSLEQPGFWEGEAERGKAGDPHRRHVHRQGGSRESRSGSPRTGADGEHRRHRAHRRPGEEGPEDKAERRARHREGSRPARGGEGEGEGPDGGERRRRHRHGAPATYEGDARREDKERRHRRRKENQGSGVPVSGPNLSTTRPIQQDLGRQDPPLAEDIDNMKNNKLATAESAAPHGSLGHAGLPQSPAKMGNSTDPGPMLAIPAMATNPQNAASRRTPNNPGNPSNPGPPKTPENSLIVTNPSGTQTNSAKTARKPDHTTVDIPPACPPPLNHTVVQVNKNANPDPLPKKEEEKKEEEEDDRGEDGPKPMPPYSSMFILSTTNPLRRLCHYILNLRYFEMCILMVIAMSSIALAAEDPVQPNAPRNNVLRYFDYVFTGVFTFEMVIKMIDLGLVLHQGAYFRDLWNILDFIVVSGALVAFAFTGNSKGKDINTIKSLRVLRVLRPLKTIKRLPKLKAVFDCVVNSLKNVFNILIVYMLFMFIFAVVAVQLFKGKFFHCTDESKEFEKDCRGKYLLYEKNEVKARDREWKKYEFHYDNVLWALLTLFTVSTGEGWPQVLKHSVDATFENQGPSPGYRMEMSIFYVVYFVVFPFFFVNIFVALIIITFQEQGDKMMEEYSLEKNERACIDFAISAKPLTRHMPQNKQSFQYRMWQFVVSPPFEYTIMAMIALNTIVLMMKFYGASVAYENALRVFNIVFTSLFSLECVLKVMAFGILNYFRDAWNIFDFVTVLGSITDILVTEFGNNFINLSFLRLFRAARLIKLLRQGYTIRILLWTFVQSFKALPYVCLLIAMLFFIYAIIGMQVFGNIGIDVEDEDSDEDEFQITEHNNFRTFFQALMLLFRSATGEAWHNIMLSCLSGKPCDKNSGILTRECGNEFAYFYFVSFIFLCSFLMLNLFVAVIMDNFEYLTRDSSILGPHHLDEYVRVWAEYDPAACGRIHYKDMYSLLRVISPPLGLGKKCPHRVACKRLLRMDLPVADDNTVHFNSTLMALIRTALDIKIAKGGADKQQMDAELRKEMMAIWPNLSQKTLDLLVTPHKSTDLTVGKIYAAMMIMEYYRQSKAKKLQAMREEQDRTPLMFQRMEPPSPTQEGGPGQNALPSTQLDPGGALMAHESGLKESPSWVTQRAQEMFQKTGTWSPEQGPPTDMPNSQPNSQSVEMREMGRDGYSDSEHYLPMEGQGRAASMPRLPAENQRRRGRPRGNNLSTISDTSPMKRSASVLGPKARRLDDYSLERVPPEENQRHHQRRRDRSHRASERSLGRYTDVDTGLGTDLSMTTQSGDLPSKERDQERGRPKDRKHRQHHHHHHHHHHPPPPDKDRYAQERPDHGRARARDQRWSRSPSEGREHMAHRQ

SEQ ID NO: 9214 - protein, 2505 aa, Homo sapiens
MARFGDEMPARYGGGGSGAAAGVVVGSGGGRGAGGSRQGGQPGAQRMYKQSMAQRARTMALYNPIPVRQNCLTVNRSLFLFSEDNVVRKYAKKITEWPPFEYMILATIIANCIVLALEQHLPDDDKTPMSERLDDTEPYFIGIFCFEAGIKIIALGFAFHKGSYLRNGWNVMDFVVVLTGILATVGTEFDLRTLRAVRVLRPLKLVSGIPSLQVVLKSIMKAMIPLLQIGLLLFFAILIFAIIGLEFYMGKFHTTCFEEGTDDIQGESPAPCGTEEPARTCPNGTKCQPYWEGPNNGITQFDNILFAVLTVFQCITMEGWTDLLYNSNDASGNTWNWLYFIPLIIIGSFFMLNLVLGVLSGEFAKERERVENRRAFLKLRRQQQIERELNGYMEWISKAEEVILAEDETDGEQRHPFDGALRRTTIKKSKTDLLNPEEAEDQLADIASVGSPFARASIKSAKLENSTFFHKKERRMRFYIRRMVKTQAFYWTVLSLVALNTLCVAIVHYNQPEWLSDFLYYAEFIFLGLFMSEMFIKMYGLGTRPYFHSSFNCFDCGVIIGSIFEVIWAVIKPGTSFGISVLRALRLLRIFKVTKYWASLRNLVVSLLNSMKSIISLLFLLFLFIVVFALLGMQLFGGQFNFDEGTPPTNFDTFPAAIMTVFQILTGEDWNEVMYDGIKSQGGVQGGMVFSIYFIVLTLFGNYTLLNVFLAIAVDNLANAQELTKDEQEEEEAANQKLALQKAKEVAEVSPLSAANMSIAVKEQQKNQKPAKSVWEQRTSEMRKQNLLASREALYNEMDPDERWKAAYTRHLRPDMKTHLDRPLVVDPQENRNNNTNKSRAAEPTVDQRLGQQRAEDFLRKQARYHDRARDPSGSAGLDARRPWAGSQEAELSREGPYGRESDHHAREGSLEQPGFWEGEAERGKAGDPHRRHVHRQGGSRESRSGSPRTGADGEHRRHRAHRRPGEEGPEDKAERRARHREGSRPARGGEGEGEGPDGGERRRRHRHGAPATYEGDARREDKERRHRRRKENQGSGVPVSGPNLSTTRPIQQDLGRQDPPLAEDIDNMKNNKLATAESAAPHGSLGHAGLPQSPAKMGNSTDPGPMLAIPAMATNPQNAASRRTPNNPGNPSNPGPPKTPENSLIVTNPSGTQTNSAKTARKPDHTTVDIPPACPPPLNHTVVQVNKNANPDPLPKKEEEKKEEEEDDRGEDGPKPMPPYSSMFILSTTNPLRRLCHYILNLRYFEMCILMVIAMSSIALAAEDPVQPNAPRNNVLRYFDYVFTGVFTFEMVIKMIDLGLVLHQGAYFRDLWNILDFIVVSGALVAFAFTGNSKGKDINTIKSLRVLRVLRPLKTIKRLPKLKAVFDCVVNSLKNVFNILIVYMLFMFIFAVVAVQLFKGKFFHCTDESKEFEKDCRGKYLLYEKNEVKARDREWKKYEFHYDNVLWALLTLFTVSTGEGWPQVLKHSVDATFENQGPSPGYRMEMSIFYVVYFVVFPFFFVNIFVALIIITFQEQGDKMMEEYSLEKNERACIDFAISAKPLTRHMPQNKQSFQYRMWQFVVSPPFEYTIMAMIALNTIVLMMKFYGASVAYENALRVFNIVFTSLFSLECVLKVMAFGILNYFRDAWNIFDFVTVLGSITDILVTEFGNNFINLSFLRLFRAARLIKLLRQGYTIRILLWTFVQSFKALPYVCLLIAMLFFIYAIIGMQVFGNIGIDVEDEDSDEDEFQITEHNNFRTFFQALMLLFRSATGEAWHNIMLSCLSGKPCDKNSGILTRECGNEFAYFYFVSFIFLCSFLMLNLFVAVIMDNFEYLTRDSSILGPHHLDEYVRVWAEYDPAACGRIHYKDMYSLLRVISPPLGLGKKCPHRVACKRLLRMDLPVADDNTVHFNSTLMALIRTALDIKIAKGGADKQQMDAELRKEMMAIWPNLSQKTLDLLVTPHKSTDLTVGKIYAAMMIMEYYRQSKAKKLQAMREEQDRTPLMFQRMEPPSPTQEGGPGQNALPSTQLDPGGALMAHESGLKESPSWVTQRAQEMFQKTGTWSPEQGPPTDMPNSQPNSQSVEMREMGRDGYSDSEHYLPMEGQGRAASMPRLPAENQRRRGRPRGNNLSTISDTSPMKRSASVLGPKARRLDDYSLERVPPEENQRHHQRRRDRSHRASERSLGRYTDVDTGLGTDLSMTTQSGDLPSKERDQERGRPKDRKHRQHHHHHHHHHHPPPPDKDRYAQERPDHGRARARDQRWSRSPSEGREHMAHRQGSSSVSGSPAPSTSGTSTPRRGRRQLPQTPSTPRPHVSYSPVIRKAGGSGPPQQQQQQQQQQQAVARPGRAATSGPRRYPGPTAEPLAGDRPPTGGHSSGRSPRMERRVPGPARSESPRACRHGGARWPASGPHVSEGPPGPRHHGYYRGSDYDEADGPGSGGGEEAMAGAYDAPPPVRHASSGATGRSPRTPRASGPACASPSRHGRRLPNGYYPAHGLARPRGPGSRKGLHEPYSESDDDWC

SEQ ID NO: 9215 - protein, 2507 aa, Homo sapiens [sequence omitted]

SEQ ID NO: 9216 - protein, 1951 aa, Homo sapiens
MAQALLVPPGPESFRLFTRESLAAIEKRAAEEKAKKPKKEQDNDDENKPKPNSDLEAGKNLPFIYGDIPPEMVSEPLEDLDPYYINKKTFIVMNKGKAIFRFSATSALYILTPLNPVRKIAIKILVHSLFSMLIMCTILTNCVFMTLSNPPDWTKNVEYTFTGIYTFESLIKILARGFCLEDFTFLRDPWNWLDFSVIVMAYVTEFVSLGNVSALRTFRVLRALKTISVIPGLKTIVGALIQSVKKLSDVMILTVFCLSVFALIGLQLFMGNLRNKCLQWPPSDSAFETNTTSYFNGTMDSNGTFVNVTMSTFNWKDYIGDDSHFYVLDGQKDPLLCGNGSDAGQCPEGYICVKAGRNPNYGYTSFDTFSWAFLSLFRLMTQDYWENLYQLTLRAAGKTYMIFFVLVIFLGSFYLVNLILAVVAMAYEEQNQATLEEAEQKEAEFQQMLEQLKKQQEEAQAVAAASAASRDFSGIGGLGELLESSSEASKLSSKSAKEWRNRRKKRRQREHLEGNNKGERDSFPKSESEDSVKRSSFLFSMDGNRLTSDKKFCSPHQSLLSIRGSLFSPRRNSKTSIFSFRGRAKDVGSENDFADDEHSTFEDSESRRDSLFVPHRHGERRNSNGTTTETEVRKRRLSSYQISMEMLEDSSGRQRAVSIASILTNTMEELEESRQKCPPCWYRFANVFLIWDCCDAWLKVKHLVNLIVMDPFVDLAITICIVLNTLFMAMEHYPMTEQFSSVLTVGNLVFTGIFTAEMVLKIIAMDPYYYFQEGWNIFDGIIVSLSLMELGLSNVEGLSVLRSFRLLRVFKLAKSWPTLNMLIKIIGNSVGALGNLTLVLAIIVFIFAVVGMQLFGKSYKECVCKINDDCTLPRWHMNDFFHSFLIVFRVLCGEWIETMWDCMEVAGQTMCLIVFMLVMVIGNLVVLNLFLALLLSSFSSDNLAATDDDNEMNNLQIAVGRMQKGIDYVKNKMRECFQKAFFRKPKVIEIHEGNKIDSCMSNNTGIEISKELNYLRDGNGTTSGVGTGSSVEKYVIDENDYMSFINNPSLTVTVPIAVGESDFENLNTEEFSSESELEESKEKLNATSSSEGSTVDVVLPREGEQAETEPEEDLKPEACFTEGCIKKFPFCQVSTEEGKGKIWWNLRKTCYSIVEHNWFETFIVFMILLSSGALAFEDIYIEQRKTIKTMLEYADKVFTYIFILEMLLKWVAYGFQTYFTNAWCWLDFLIVDVSLVSLVANALGYSELGAIKSLRTLRALRPLRALSRFEGMRVVVNALVGAIPSIMNVLLVCLIFWLIFSIMGVNLFAGKFYHCVNMTTGNMFDISDVNNLSDCQALGKQARWKNVKVNFDNVGAGYLALLQVATFKGWMDIMYAAVDSRDVKLQPVYEENLYMYLYFVIFIIFGSFFTLNLFIGVIIDNFNQQKKKFGGQDIFMTEEQKKYYNAMKKLGSKKPQKPIPRPANKFQGMVFDFVTRQVFDISIMILICLNMVTMMVETDDQGKYMTLVLSRINLVFIVLFTGEFVLKLVSLRHYYFTIGWNIFDFVVVILSIVGMFLAEMIEKYFVSPTLFRVIRLARIGRILRLIKGAKGIRTLLFALMMSLPALFNIGLLLFLVMFIYAIFGMSNFAYVKKEAGIDDMFNFETFGNSMICLFQITTSAGWDGLLAPILNSAPPDCDPDTIHPGSSVKGDCGNPSVGIFFFVSYIIISFLVVVNMYIAVILENFSVATEESAEPLSEDDFEMFYEVWEKFDPDATQFIEFSKLSDFAAALDPPLLIAKPNKVQLIAMDLPMVSGDRIHCLDILFAFTKRVLGESGEMDALRIQMEDRFMASNPSKVSYEPITTTLKRKQEEVSAAIIQRNFRCYLLKQRLKNISSNYNKEAIKGRIDLPIKQDMIIDKLNGNSTPEKTDGSSSTTSPPSYDSVTKPDKEKFEKDKPEKESKGKEVRENQK

SEQ ID NO: 9217 - protein, 424 aa, Homo sapiens
MLARKSIIPEEYVLARIAAENLRKPRIRDRLPKARFIAKSGACNLAHKNIREQGRFLQDIFTTLVDLKWRHTLVIFTMSFLCSWLLFAIMWWLVAFAHGDIYAYMEKSGMEKSGLESTVCVTNVRSFTSAFLFSIEVQVTIGFGGRMMTEECPLAITVLILQNIVGLIINAVMLGCIFMKTAQAHRRAETLIFSRHAVIAVRNGKLCFMFRVGDLRKSMIISASVRIQVVKKTTTPEGEVVPIHQLDIPVDNPIESNNIFLVAPLIICHVIDKRSPLYDISATDLANQDLEVIVILEGVVETTGITTQARTSYIAEEIQWGHRFVSIVTEEEGVYSVDYSKFGNTVKVAAPRCSARELDEKPSILIQTLQKSELSHQNSLRKRNSMRRNNSMRRNNSIRRNNSSLMVPKVQFMTPEGNQNTSES

SEQ ID NO: 9218 - protein, 311 aa, Homo sapiens
MRRNCTLVTEFILLGLTSRRELQILLFTLFLAIYMVTVAGNLGMIVLIQANAWLHMPMYFFLSHLSFVDLCFSSNVTPKMLEIFLSEKKSISYPACLVQCYLFIALVHVEIYILAVMAFDRYMAICNPLLYGSRMSKSVCSFLITVPYVYGALTGLMETMWTYNLAFCGPNEINHFYCADPPLIKLACSDTYNKELSMFIVAGWNLSFSLFIICISYLYIFPAILKIRSTEGRQKAFSTCGSHLTAVTIFYATLFFMYLRPPSKESVEQGKMVAVFYTTVIPMLNLIIYSLRNKNVKEALIKELSMKIYFS

SEQ ID NO: 9219 - protein, 461 aa, Homo sapiens
MKILFVEPAIFLSAFAMTLTGPLTTQYVYRRIWEETGNYTFSSDSNISECEKNKSSPIFAFQEEVQKKVSRFNLQMDISGLIPGLVSTFILLSISDHYGRKFPMILSSVGALATSVWLCLLCYFAFPFQLLIASTFIGAFCGNYTTFWGACFAYIVDQCKEHKQKTIRIAIIDFLLGLVTGLTGLSSGYFIRELGFEWSFLIIAVSLAVNLIYILFFLGDPVKECSSQNVTMSCSEGFKNLFYRTYMLFKNASGKRRFLLCLLLFTVITYFFVVIGIAPIFILYELDSPLCWNEVFIGYGSALGSASFLTSFLGIWLFSYCMEDIHMAFIGIFTTMTGMAMTAFASTTLMMFLARVPFLFTIVPFSVLRSMLSKVVRSTEQGTLFACIAFLETLGGVTAVSTFNGIYSATVAWYPGFTFLLSAGLLLLPAISLCVVKCTSWNEGSYELLIQEESSEDASDR

SEQ ID NO: 9220 - protein, 386 aa, Homo sapiens
MNEPTENRLGCSRTPEPDIRLRKGHQLDGTRRGDNDSHQGDLEPILEASVLSSHHKKSSEEHEYSDEAPQEDEGFMGMSPLLQAHHAMEKMEEFVCKVWEGRWRVIPHDVLPDWLKDNDFLLHGHRPPMPSFRACFKSIFRIHTETGNIWTHLLGCVFFLCLGIFYMFRPNISFVAPLQEKVVFGLFFLGAILCLSFSWLFHTVYCHSEGVSRLFSKLDYSGIALLIMGSFVPWLYYSFYCNPQPCFIYLIVICVLGIAAIIVSQWDMFATPQYRGVRAGVFLGLGLSGIIPTLHYVISEGFLKAATIGQIGWLMLMASLYITGAALYAARIPERFFPGKCDIWFHSHQLFHIFVVAGAFVHFHGVSNLQEFRFMIGGGCSEEDAL

SEQ ID NO: 9221 - protein, 2044 aa, Homo sapiens
MLRVIVESASNIPKTKFGKPDPIVSVIFKDEKKKTKKVDNELNPVWNEILEFDLRGIPLDFSSSLGIIVKDFETIGQNKLIGTATVALKDLTGDQSRSLPYKLISLLNEKGQDTGATIDLVIGYDPPSAPHPNDLSGPSVPGMGGDGEEDEGDEDRLDNAVRGPGPKGPVGTVSEAQLARRLTKVKNSRRMLSNKPQDFQIRVRVIEGRQLSGNNIRPVVKVHVCGQTHRTRIKRGNNPFFDELFFYNVNMTPSELMDEIISIRVYNSHSLRADCLMGEFKIDVGFVYDEPGHAVMRKWLLLNDPEDTSSGSKGYMKVSMFVLGTGDEPPPERRDRDNDSDDVESNLLLPAGIALRWVTFLLKIYRAEDIPQMDDAFSQTVKEIFGGNADKKNLVDPFVEVSFAGKKVCTNIIEKNANPEWNQVVNLQIKFPSVCEKIKLTIYDWDRLTKNDVVGTTYLHLSKIAASGGEVEVNTGETEVGFVPTFGPCYLNLYGSPREYTGFPDPYDELNTGKGEGVAYRGRILVELATFLEKTPPDKKLEPISNDDLLVVEKYQRRRKYSLSAVFHSATMLQDVGEAIQFEVSIGNYGNKFDTTCKPLASTTQYSRAVFDGNYYYYLPWAHTKPVVTLTSYWEDISHRLDAVNTLLAMAERLQTNIEALKSGIQGKIPANQLAELWLKLIDEVIEDTRYTLPLTEGKANVTVLDTQIRKLRSRSLSQIHEAAVRMRSEATDVKSTLAEIEDWLDKLMQLTEEPQNSMPDIIIWMIRGEKRLAYARIPAHQVLYSTSGENASGKYCGKTQTIFLKYPQEKNNGPKVPVELRVNIWLGLSAVEKKFNSFAEGTFTVFAEMYENQALMFGKWGTSGLVGRHKFSDVTGKIKLKREFFLPPKGWEWEGEWIVDPERSLLTEADAGHTEFTDEVYQNESRYPGGDWKPAEDTYTDANGDKAASPSELTCPPGWEWEDDAWSYDINRAVDEKGWEYGITIPPDHKPKSWVAAEKMYHTHRRRRLVRKRKKDLTQTASSTARAMEELQDQEGWEYASLIGWKFHWKQRSSDTFRRRRWRRKMAPSETHGAAAIFKLEGALGADTTEDGDEKSLEKQKHSATTVFGANTPIVSCNFDRVYIYHLRCYVYQARNLLALDKDSFSDPYAHICFLHRSKTTEIIHSTLNPTWDQTIIFDEVEIYGEPQTVLQNPPKVIMELFDNDQVGKDEFLGRSIFSPVVKLNSEMDITPKLLWHPVMNGDKACGDVLVTAELILRGKDGSNLPILPPQRAPNLYMVPQGIRPVVQLTAIEILAWGLRNMKNFQMASITSPSLVVECGGERVESVVIKNLKKTPNFPSSVLFMKVFLPKEELYMPPLVIKVIDHRQFGRKPVVGQCTIERLDRFRCDPYAGKEDIVPQLKASLLSAPPCRDIVIEMEDTKPLLASKEEEIVDWWSKFYASSGEHEKCGQYIQKGYSKLKIYNCELENVAEFEGLTDFSDTFKLYRGKSDENEDPSVVGEFKGSFRIYPLPDDPSVPAPPRQFRELPDSVPQECTVRIYIVRGLELQPQDNNGLCDPYIKITLGKKVIEDRDHYIPNTLNPVFGRMYELSCYLPQEKDLKISVYDYDTFTRDEKVGETIIDLENRFLSRFGSHCGIPEEYCVSGVNTWRDQLRPTQLLQNVARFKGFPQPILSEDGSRIRYGGRDYSLDEFEANKILHQHLGAPEERLALHILRTQGLVPEHVETRTLHSTFQPNISQGKLQMWVDVFPKSLGPPGPPFNITPRKAKKYYLRVIIWNTKDVILDEKSITGEEMSDIYVKGWIPGNEENKQKTDVHYRSLDGEGNFNWRFVFPFDYLPAEQLCIVAKKEHFWSIDQTEFRIPPRLIIQIWDNDKFSLDDYLGFLELDLRHTIIPAKSPEKCRLDMIPDLKAMNPLKAKTASLFEQKSMKGWWPCYAEKDGARVMAGKVEMTLEILNEKEADERPAGKGRDEPNMNPKLDLPNRPETSFLWFTNPCKTMKFIVWRRFKWVIIGLLFLLILLLFVAVLLYSLPNYLSMKIVKPNV

SEQ ID NO: 9222 - protein, 1577 aa, Homo sapiens
MLRVIVESASNIPKTKFGKPDPIVSVIFKDEKKKTKKVDNELNPVWNEILEFDLRGIPLDFSSSLGIIVKDFETIGQNKLIGTATVALKDLTGDQSRSLPYKLISLLNEKGQDTGATIDLVIGYDPPSAPHPNDLSGPSVPGMGGDGEEDEGDEDRLDNAVRGPGPKGPVGTVSEAQLARRLTKVKNSRRMLSNKPQDFQIRVRVIEGRQLSGNNIRPVVKVHVCGQTHRTRIKRGNNPFFDELFFYNVNMTPSELMDEIISIRVYNSHSLRADCLMGEFKIDVGFVYDEPGHAVMRKWLLLNDPEDTSSGSKGYMKVSMFVLGTGDEPPPERRDRDNDSDDVESNLLLPAGIALRWVTFLLKIYRAEDIPQMDDAFSQTVKEIFGGNADKKNLVDPFVEVSFAGKKVCTNIIEKNANPEWNQVVNLQIKFPSVCEKIKLTIYDWDRLTKNDVVGTTYLHLSKIAASGGEVEDFSSSGTGAASYTVNTGETEVGFVPTFGPCYLNLYGSPREYTGFPDPYDELNTGKGEGVAYRGRILVELATFLEKTPPDKKLEPISNDDLLVVEKYQRRRKYSLSAVFHSATMLQDVGEAIQFEVSIGNYGNKFDTTCKPLASTTQYSRAVFDGNYYYYLPWAHTKPVVTLTSYWEDISHRLDAVNTLLAMAERLQTNIEALKSGIQGKIPANQLAELWLKLIDEVIEDTRYTLPLTEGKANVTVLDTQIRKLRSRSLSQIHEAAVRMRSEATDVKSTLAEIEDWLDKLMQLTEEPQNSMPDIIIWMIRGEKRLAYARIPAHQVLYSTSGENASGKYCGKTQTIFLKYPQEKNNGPKVPVELRVNIWLGLSAVEKKFNSFAEGTFTVFAEMYENQALMFGKWGTSGLVGRHKFSDVTGKIKLKREFFLPPKGWEWEGEWIVDPERSLLTEADAGHTEFTDEVYQNESRYPGGDWKPAEDTYTDANGDKAASPSELTCPPGWEWEDDAWSYDINRAVDEKGWEYGITIPPDHKPKSWVAAEKMYHTHRRRRLVRKRKKDLTQTASSTARAMEELQDQEGWEYASLIGWKFHWKQRSSDTFRRRRWRRKMAPSETHGAAAIFKLEGALGADTTEDGDEKSLEKQKHSATTVFGANTPIVSCNFDRVYIYHLRCYVYQARNLLALDKDSFSDPYAHICFLHRSKTTEIIHSTLNPTWDQTIIFDEVEIYGEPQTVLQNPPKVIMELFDNDQVGKDEFEANKILHQHLGAPEERLALHILRTQGLVPEHVETRTLHSTFQPNISQGKLQMWVDVFPKSLGPPGPPFNITPRKAKKYYLRVIIWNTKDVILDEKSITGEEMSDIYVKGWIPGNEENKQKTDVHYRSLDGEGNFNWRFVFPFDYLPAEQLCIVAKKEHFWSIDQTEFRIPPRLIIQIWDNDKFSLDDYLGFLELDLRHTIIPAKSPEKCRLDMIPDLKAMNPLKAKTASLFEQKSMKGWWPCYAEKDGARVMAGKVEMTLEILNEKEADERPAGKGRDEPNMNPKLDLPNRPETSFLWFTNPCKTMKFIVWRRFKWVIIGLLFLLILLLFVAVLLYSLPNYLSMKIVKPNV

SEQ ID NO: 9223 - protein, 2019 aa, Homo sapiens
MRPPKEGSGSNICCSAIFAVLQPPLVISRQTRSGMDLQQTPTDLQLKDLTGDQSRSLPYKLISLLNEKGQDTGATIDLVIGYDPPSAPHPNDLSGPSVPGMGGDGEEDEGDEDRLDNAVRGPGPKGPVGTVSEAQLARRLTKVKNSRRMLSNKPQDFQIRVRVIEGRQLSGNNIRPVVKVHVCGQTHRTRIKRGNNPFFDELFFYNVNMTPSELMDEIISIRVYNSHSLRADCLMGEFKIDVGFVYDEPGHAVMRKWLLLNDPEDTSSGSKGYMKVSMFVLGTGDEPPPERRDRDNDSDDVESNLLLPAGIALRWVTFLLKIYRAEDIPQMDDAFSQTVKEIFGGNADKKNLVDPFVEVSFAGKKVCTNIIEKNANPEWNQVVNLQIKFPSVCEKIKLTIYDWDRLTKNDVVGTTYLHLSKIAASGGEVEDFSSSGTGAASYTVNTGETEVGFVPTFGPCYLNLYGSPREYTGFPDPYDELNTGKGEGVAYRGRILVELATFLEKTPPDKKLEPISNDDLLVVEKYQRRRKYSLSAVFHSATMLQDVGEAIQFEVSIGNYGNKFDTTCKPLASTTQYSRAVFDGNYYYYLPWAHTKPVVTLTSYWEDISHRLDAVNTLLAMAERLQTNIEALKSGIQGKIPANQLAELWLKLIDEVIEDTRYTLPLTEGKANVTVLDTQIRKLRSRSLSQIHEAAVRMRSEATDVKSTLAEIEDWLDKLMQLTEEPQNSMPDIIIWMIRGEKRLAYARIPAHQVLYSTSGENASGKYCGKTQTIFLKYPQEKNNGPKVPVELRVNIWLGLSAVEKKFNSFAEGTFTVFAEMYENQALMFGKWGTSGLVGRHKFSDVTGKIKLKREFFLPPKGWEWEGEWIVDPERSLLTEADAGHTEFTDEVYQNESRYPGGDWKPAEDTYTDANGDKAASPSELTCPPGWEWEDDAWSYDINRAVDEKGWEYGITIPPDHKPKSWVAAEKMYHTHRRRRLVRKRKKDLTQTASSTARAMEELQDQEGWEYASLIGWKFHWKQRSSDTFRRRRWRRKMAPSETHGAAAIFKLEGALGADTTEDGDEKSLEKQKHSATTVFGANTPIVSCNFDRVYIYHLRCYVYQARNLLALDKDSFSDPYAHICFLHRSKTTEIIHSTLNPTWDQTIIFDEVEIYGEPQTVLQNPPKVIMELFDNDQVGKDEFLGRSIFSPVVKLNSEMDITPKLLWHPVMNGDKACGDVLVTAELILRGKDGSNLPILPPQRAPNLYMVPQGIRPVVQLTAIEILAWGLRNMKNFQMASITSPSLVVECGGERVESVVIKNLKKTPNFPSSVLFMKVFLPKEELYMPPLVIKVIDHRQFGRKPVVGQCTIERLDRFRCDPYAGKEDIVPQLKASLLSAPPCRDIVIEMEDTKPLLASKLTEKEEEIVDWWSKFYASSGEHEKCGQYIQKGYSKLKIYNCELENVAEFEGLTDFSDTFKLYRGKSDENEDPSVVGEFKGSFRIYPLPDDPSVPAPPRQFRELPDSVPQECTVRIYIVRGLELQPQDNNGLCDPYIKITLGKKVIEDRDHYIPNTLNPVFGRMYELSCYLPQEKDLKISVYDYDTFTRDEKVGETIIDLENRFLSRFGSHCGIPEEYCVSGVNTWRDQLRPTQLLQNVARFKGFPQPILSEDGSRIRYGGRDYSLDEFEANKILHQHLGAPEERLALHILRTQGLVPEHVETRTLHSTFQPNISQGKLQMWVDVFPKSLGPPGPPFNITPRKAKKYYLRVIIWNTKDVILDEKSITGEEMSDIYVKGWIPGNEENKQKTDVHYRSLDGEGNFNWRFVFPFDYLPAEQLCIVAKKEHFWSIDQTEFRIPPRLIIQIWDNDKFSLDDYLGFLELDLRHTIIPAKSPEKCRLDMIPDLKAMNPLKAKTASLFEQKSMKGWWPCYAEKDGARVMAGKVEMTLEILNEKEADERPAGKGRDEPNMNPKLDLPNRPETSFLWFTNPCKTMKFIVWRRFKWVIIGLLFLLILLLFVAVLLYSLPNYLSMKIVKPNV

SEQ ID NO: 9224 - protein, 2061 aa, Homo sapiens
MLRVIVESASNIPKTKFGKPDPIVSVIFKDEKKKTKKVDNELNPVWNEILEFDLRGIPLDFSSSLGIIVKDFETIGQNKLIGTATVALKDLTGDQSRSLPYKLISLLNEKGQDTGATIDLVIGYDPPSAPHPNDLSGPSVPGMGGDGEEDEGDEDRLDNAVRGPGPKGPVGTVSEAQLARRLTKVKNSRRMLSNKPQDFQIRVRVIEGRQLSGNNIRPVVKVHVCGQTHRTRIKRGNNPFFDELFFYNVNMTPSELMDEIISIRVYNSHSLRADCLMGEFKIDVGFVYDEPGHAVMRKWLLLNDPEDTSSGSKGYMKVSMFVLGTGDEPPPERRDRDNDSDDVESNLLLPAGIALRWVTFLLKIYRAEDIPQMDDAFSQTVKEIFGGNADKKNLVDPFVEVSFAGKKVCTNIIEKNANPEWNQVVNLQIKFPSVCEKIKLTIYDWDRLTKNDVVGTTYLHLSKIAASGGEVEDFSSSGTGAASYTVNTGETEVGFVPTFGPCYLNLYGSPREYTGFPDPYDELNTGKGEGVAYRGRILVELATFLEKTPPDKKLEPISNDDLLVVEKYQRRRKYSLSAVFHSATMLQDVGEAIQFEVSIGNYGNKFDTTCKPLASTTQYSRAVFDGNYYYYLPWAHTKPVVTLTSYWEDISHRLDAVNTLLAMAERLQTNIEALKSGIQGKIPANQLAELWLKLIDEVIEDTRYTLPLTEGKANVTVLDTQIRKLRSRSLSQIHEAAVRMRSEATDVKSTLAEIEDWLDKLMQLTEEPQNSMPDIIIWMIRGEKRLAYARIPAHQVLYSTSGENASGKYCGKTQTIFLKYPQEKNNGPKVPVELRVNIWLGLSAVEKKFNSFAEGTFTVFAEMYENQALMFGKWGTSGLVGRHKFSDVTGKIKLKREFFLPPKGWEWEGEWIVDPERSLLTEADAGHTEFTDEVYQNESRYPGGDWKPAEDTYTDANGDKAASPSELTCPPGWEWEDDAWSYDINRAVDEKGWEYGITIPPDHKPKSWVAAEKMYHTHRRRRLVRKRKKDLTQTASSTARAMEELQDQEGWEYASLIGWKFHWKQRSSDTFRRRRWRRKMAPSETHGAAAIFKLEGALGADTTEDGDEKSLEKQKHSATTVFGANTPIVSCNFDRVYIYHLRCYVYQARNLLALDKDSFSDPYAHICFLHRSKTTEIIHSTLNPTWDQTIIFDEVEIYGEPQTVLQNPPKVIMELFDNDQVGKDEFLGRSIFSPVVKLNSEMDITPKLLWHPVMNGDKACGDVLVTAELILRGKDGSNLPILPPQRAPNLYMVPQGIRPVVQLTAIEILAWGLRNMKNFQMASITSPSLVVECGGERVESVVIKNLKKTPNFPSSVLFMKVFLPKEELYMPPLVIKVIDHRQFGRKPVVGQCTIERLDRFRCDPYAGKEDIVPQLKASLLSAPPCRDIVIEMEDTKPLLASKLTEKEEEIVDWWSKFYASSGEHEKCGQYIQKGYSKLKIYNCELENVAEFEGLTDFSDTFKLYRGKSDENEDPSVVGEFKGSFRIYPLPDDPSVPAPPRQFRELPDSVPQECTVRIYIVRGLELQPQDNNGLCDPYIKITLGKKVIEDRDHYIPNTLNPVFGRMYELSCYLPQEKDLKISVYDYDTFTRDEKVGETIIDLENRFLSRFGSHCGIPEEYCVSGVNTWRDQLRPTQLLQNVARFKGFPQPILSEDGSRIRYGGRDYSLDEFEANKILHQHLGAPEERLALHILRTQGLVPEHVETRTLHSTFQPNISQGKLQMWVDVFPKSLGPPGPPFNITPRKAKKYYLRVIIWNTKDVILDEKSITGEEMSDIYVKGWIPGNEENKQKTDVHYRSLDGEGNFNWRFVFPFDYLPAEQLCIVAKKEHFWSIDQTEFRIPPRLIIQIWDNDKFSLDDYLGFLELDLRHTIIPAKSPEKCRLDMIPDLKAMNPLKAKTASLFEQKSMKGWWPCYAEKDGARVMAGKVEMTLEILNEKEADERPAGKGRDEPNMNPKLDLPNRPETSFLWFTNPCKTMKFIVWRRFKWVIIGLLFLLILLLFVAVLLYSLPNYLSMKIVKPNV

SEQ ID NO: 9225 - protein, 706 aa, Homo sapiens
MEENPTLESEAWGSSRGWLAPREARGGPSLSSVLNELPSAATLRYRDPGVLPWGALEEEEEDGGRSRKAFTEVTQTELQDPHPSRELPWPMQARRAHRQRNASRDQVVYGSGTKTDRWARLLRRSKEKTKEGLRSLQPWAWTLKRIGGQFGAGTESYFSLLRFLLLLNVLASVLMACMTLLPTWLGGAPPGPPGPDISSPCGSYNPHSQGLVTFATQLFNLLSGEGYLEWSPLFYGFYPPRPRLAVTYLCWAFAVGLICLLLILHRSVSGLKQTLLAESEALTSYSHRVFSAWDFGLCGDVHVRLRQRIILYELKVELEETVVRRQAAVRTLGQQARVWLVRVLLNLLVVALLGAAFYGVYWATGCTVELQEMPLVQELPLLKLGVNYLPSIFIAGVNFVLPPVFKLIAPLEGYTRSRQIVFILLRTVFLRLASLVVLLFSLWNQITCGGDSEAEDCKTCGYNYKQLPCWETVLGQEMYKLLLFDLLTVLAVALLIQFPRKLLCGLCPGALGRLAGTQEFQVPDEVLGLIYAQTVVWVGSFFCPLLPLLNTVKFLLLFYLKKLTLFSTCSPAARTFRASAANFFFPLVLLLGLAISSVPLLYSIFLIPPSKLCGPFRGQSSIWAQIPESISSLPETTQNFLFFLGTQAFAVPLLLISSILMAYTVALANSYGRLISELKRQRQTEAQNKVFLARRAVALTSTKPAL

SEQ ID NO: 9226 - protein, 647 aa, Homo sapiens
MSESRRRGRGRGKKHPEGRKREREPDPGEKATRPKLKKMKSQTGQVGEKQSLKCEAAAGNPQPSYRWFKDGKELNRSRDIRIKYGNGRKNSRLQFNKVKVEDAGEYVCEAENILGKDTVRGRLYVNSVSTTLSSWSGHARKCNETAKSYCVNGGVCYYIEGINQLSCKCPNGFFGQRCLEKLPLRLYMPDPKQKAEELYQKRVLTITGICVALLVVGIVCVVAYCKTKKQRKQMHNHLRQNMCPAHQNRSLANGPSHPRLDPEEIQMADYISKNVPATDHVIRRETETTFSGSHSCSPSHHCSTATPTSSHRHESHTWSLERSESLTSDSQSGIMLSSVGTSKCNSPACVEARARRAAAYNLEERRRATAPPYHDSVDSLRDSPHSERYVSALTTPARLSPVDFHYSLATQVPTFEITSPNSAHAVSLPPAAPISYRLAEQQPLLRHPAPPGPGPGPGPGPGPGADMQRSYDSYYYPAAGPGPRRGTCALGGSLGSLPASPFRIPEDDEYETTQECAPPPPPRPRARGASRRTSAGPRRWRRSRLNGLAAQRARAARDSLSLSSGSGGGSASASDDDADDADGALAAESTPFLGLRGAHDALRSDSPPLCPAADSRTYYSLDSHSTRASSRHSRGPPPRAKQDSAPL

SEQ ID NO: 9227 - protein, 617 aa, Homo sapiens
MKSQTGQVGEKQSLKCEAAAGNPQPSYRWFKDGKELNRSRDIRIKYGNGRKNSRLQFNKVKVEDAGEYVCEAENILGKDTVRGRLYVNSVSTTLSSWSGHARKCNETAKSYCVNGGVCYYIEGINQLSCKCPNGFFGQRCLEKLPLRLYMPDPKQKHLGFELKEAEELYQKRVLTITGICVALLVVGIVCVVAYCKTKKQRKQMHNHLRQNMCPAHQNRSLANGPSHPRLDPEEIQMADYISKNVPATDHVIRRETETTFSGSHSCSPSHHCSTATPTSSHRHESHTWSLERSESLTSDSQSGIMLSSVGTSKCNSPACVEARARRAAAYNLEERRRATAPPYHDSVDSLRDSPHSERYVSALTTPARLSPVDFHYSLATQVPTFEITSPNSAHAVSLPPAAPISYRLAEQQPLLRHPAPPGPGPGPGPGPGPGADMQRSYDSYYYPAAGPGPRRGTCALGGSLGSLPASPFRIPEDDEYETTQECAPPPPPRPRARGASRRTSAGPRRWRRSRLNGLAAQRARAARDSLSLSSGSGGGSASASDDDADDADGALAAESTPFLGLRGAHDALRSDSPPLCPAADSRTYYSLDSHSTRASSRHSRGPPPRAKQDSAPL

SEQ ID NO: 9228 - protein, 1624 aa, Homo sapiens
MSKRRMSVGQQTWALLCKNCLKKWRMKRQTLLEWLFSFLLVLFLYLFFSNLHQVHDTPQMSSMDLGRVDSFNDTNYVIAFAPESKTTQEIMNKVASAPFLKGRTIMGWPDEKSMDELDLNYSIDAVRVIFTDTFSYHLKFSWGHRIPMMKEHRDHSAHCQAVNEKMKCEGSEFWEKGFVAFQAAINAAIIEIATNHSVMEQLMSVTGVHMKILPFVAQGGVATDFFIFFCIISFSTFIYYVSVNVTQERQYITSLMTMMGLRESAFWLSWGLMYAGFILIMATLMALIVKSAQIVVLTGFVMVFTLFLLYGLSLITLAFLMSVLIKKPFLTGLVVFLLIVFWGILGFPALYTRLPAFLEWTLCLLSPFAFTVGMAQLIHLDYDVNSNAHLDSSQNPYLIIATLFMLVFDTLLYLVLTLYFDKILPAEYGHRCSPLFFLKSCFWFQHGRANHVVLENETDSDPTPNDCFEPVSPEFCGKEAIRIKNLKKEYAGKCERVEALKGVVFDIYEGQITALLGHSGAGKTTLLNILSGLSVPTSGSVTVYNHTLSRMADIENISKFTGFCPQSNVQFGFLTVKENLRLFAKIKGILPHEVEKEVQRVVQELEMENIQDILAQNLSGGQNRKLTFGIAILGDPQVLLLDEPTAGLDPLSRHRIWNLLKEGKSDRVILFSTQFIDEADILADRKVFISNGKLKCAGSSLFLKKKWGIGYHLSLHLNERCDPESITSLVKQHISDAKLTAQSEEKLVYILPLERTNKFPELYRDLDRCSNQGIEDYGVSITTLNEVFLKLEGKSTIDESDIGIWGQLQTDGAKDIGSLVELEQVLSSFHETRKTISGVALWRQQVCAIAKVRFLKLKKERKSLWTILLLFGISFIPQLLEHLFYESYQKSYPWELSPNTYFLSPGQQPQDPLTHLLVINKTGSTIDNFLHSLRRQNIAIEVDAFGTRNGTDDPSYNGAIIVSGDEKDHRFSIACNTKRLNCFPVLLDVISNGLLGIFNSSEHIQTDRSTFFEEHMDYEYGYRSNTFFWIPMAASFTPYIAMSSIGDYKKKAHSQLRISGLYPSAYWFGQALVDVSLYFLILLLMQIMDYIFSPEEIIFIIQNLLIQILCSIGYVSSLVFLTYVISFIFRNGRKNSGIWSFFFLIVVIFSIVATDLNEYGFLGLFFGTMLIPPFTLIGSLFIFSEISPDSMDYLGASESEIVYLALLIPYLHFLIFLFILRCLEMNCRKKLMRKDPVFRISPRSNAIFPNPEEPEGEEEDIQMERMRTVNAMAVRDFDETPVIIASCLRKEYAGKKKNCFSKRKKKIATRNVSFCVKKGEVIGLLGHNGAGKSTTIKMITGDTKPTAGQVILKGSGGGEPLGFLGYCPQENALWPNLTVRQHLEVYAAVKGLRKGDAMIAITRLVDALKLQDQLKAPVKTLSEGIKRKLCFVLSILGNPSVVLLDEPSTGMDPEGQQQMWQVIRATFRNTERGALLTTHYMAEAEAVCDRVAIMVSGRLRCIGSIQHLKSKFGKDYLLEMKLKNLAQMEPLHAEILRLFPQAAQQERFSSLMVYKLPVEDVRPLSQAFFKLEIVKQSFDLEEYSLSQSTLEQVFLELSKEQELGDLEEDFDPSVKWKLLLQEEP

SEQ ID NO: 9229 - protein, 1435 aa, Homo sapiens
MSKRRMSVGQQTWALLCKNCLKKWRMKRQTLLEWLFSFLLVLFLYLFFSNLHQVHDTPQMSSMDLGRVDSFNDTNYVIAFAPESKTTQEIMNKVASAPFLKGRTIMGWPDEKSMDELDLNYSIDAVRVIFTDTFSYHLKFSWGHRIPMMKEHRDHSAHCQAVNEKMKCEGSEFWEKGFVAFQAAINAAIIEIATNHSVMEQLMSVTGVHMKILPFVAQGGVATDFFIFFCIISFSTFIYYVSVNVTQERQYITSLMTMMGLRESAFWLSWGLMYAGFILIMATLMALIVKSAQIVVLTGFVMVFTLFLLYGLSLITLAFLMSVLIKKPFLTGLVVFLLIVFWGILGFPALYTRLPAFLEWTLCLLSPFAFTVGMAQLIHLDYDVNSNAHLDSSQNPYLIIATLFMLVFDTLLYLVLTLYFDKILPAEYGHRCSPLFFLKSCFWFQHGRANHVVLENETDSDPTPNDCFEPVSPEFCGKEAIRIKNLKKEYAGKCERVEALKGVVFDIYEGQITALLGHSGAGKTTLLNILSGLSVPTSGSVTVYNHTLSRMADIENISKFTGFCPQSNVQFGFLTVKENLRLFAKIKGILPHEVEKEVQRVVQELEMENIQDILAQNLSGGQNRKLTFGIAILGDPQVLLLDEPTAGLDPLSRHRIWNLLKEGKSDRVILFSTQFIDEADILADRKVFISNGKLKCAGSSLFLKKKWGIGYHLSLHLNERCDPESITSLVKQHISDAKLTAQSEEKLVYILPLERTNKFPELYRDLDRCSNQGIEDYGVSITTLNEVFLKLEGKSTIDESDIGIWGQLQTDGAKDIGSLVELEQVLSSFHETRKTISGVALWRQQVCAIAKVRFLKLKKERKSLWTILLLFGISFIPQLLEHLFYESYQKSYPWELSPNTYFLSPGQQPQDPLTHLLVINKTGSTIDNFLHSLRRQNIAIEVDAFGTRNGTDDPSYNGAIIVSGDEKDHRFSIACNTKRLNCFPVLLDVISNGLLGIFNSSEHIQTDRSTFFEEHMDYEYGYRSNTFFWIPMAASFTPYIAMSSIGDYKKKAHSQLRISGLYPSAYWFGQALVDVSLYFLILLLMQIMDYIFSPEEIIFIIQNLLIQILCSIGYVSSLVFLTYVISFIFRNGRKNSGIWSFFFLIVVIFSIVATDLNEYGFLGLFFGTMLIPPFTLIGSLFIFSEISPDSMDYLGASESEIVYLALLIPYLHFLIFLFILRCLEMNCRKKLMRKDPVFRISPRSNAIFPNPEEPEGEEEDIQMERMRTVNAMAVRDFDETPVIIASCLRKEYAGKKKNCFSKRKKKIATRNVSFCVKKGEVIGLLGHNGAGKSTTIKMITGDTKPTAGQVILKGSGGGEPLGFLGYCPQENALWPNLTVRQHLEVYAAVKGLRKGDAMIAITRLVDALKLQDQLKAPVKTLSEGIKRKAGDSGHL

SEQ ID NO: 9230 - protein, 1238 aa, Homo sapiens
MDALCGSGELGSKFWDSNLSVHTENPDLTPCFQNSLLAWVPCIYLWVALPCYLLYLRHHCRGYIILSHLSKLKMVLGVLLWCVSWADLFYSFHGLVHGRAPAPVFFVTPLVVGVTMLLATLLIQYERLQGVQSSGVLIIFWFLCVVCAIVPFRSKILLAKAEGEISDPFRFTTFYIHFALVLSALILACFREKPPFFSAKNVDPNPYPETSAGFLSRLFFWWFTKMAIYGYRHPLEEKDLWSLKEEDRSQMVVQQLLEAWRKQEKQTARHKASAAPGKNASGEDEVLLGARPRPRKPSFLKALLATFGSSFLISACFKLIQDLLSFINPQLLSILIRFISNPMAPSWWGFLVAGLMFLCSMMQSLILQHYYHYIFVTGVKFRTGIMGVIYRKALVITNSVKRASTVGEIVNLMSVDAQRFMDLAPFLNLLWSAPLQIILAIYFLWQNLGPSVLAGVAFMVLLIPLNGAVAVKMRAFQVKQMKLKDSRIKLMSEILNGIKVLKLYAWEPSFLKQVEGIRQGELQLLRTAAYLHTTTTFTWMCSPFLVTLITLWVYVYVDPNNVLDAEKAFVSVSLFNILRLPLNMLPQLISNLTQASVSLKRIQQFLSQEELDPQSVERKTISPGYAITIHSGTFTWAQDLPPTLHSLDIQVPKGALVAVVGPVGCGKSSLVSALLGEMEKLEGKVHMKGSVAYVPQQAWIQNCTLQENVLFGKALNPKRYQQTLEACALLADLEMLPGGDQTEIGEKGINLSGGQRQRVSLARAVYSDADIFLLDDPLSAVDSHVAKHIFDHVIGPEGVLAGKTRVLVTHGISFLPQTDFIIVLADGQVSEMGPYPALLQRNGSFANFLCNYAPDEDQGHLEDSWTALEGAEDKEALLIEDTLSNHTDLTDNDPVTYVVQKQFMRQLSALSSDGEGQGRPVPRRHLGPSEKVQVTEAKADGALTQEEKAAIGTVELSVFWDYAKAVGLCTTLAICLLYVGQSAAAIGANVWLSAWTNDAMADSRQNNTSLRLGVYAALGILQGFLVMLAAMAMAAGGIQAARVLHQALLHNKIRSPQSFFDTTPSGRILNCFSKDIYVVDEVLAPVILMLLNSFFNAISTLVVIMASTPLFTVVILPLAVLYTLVQRFYAATSRQLKRLESVSRSPIYSHFSETVTGASVIRAYNRSRDFEIISDTKVDANQRSCYPYIISNRSEAASLAPCSSRNSQQALWCSGSLSLLSPKQKTGPALPLPHFLLI

SEQ ID NO: 9231 - protein, 1527 aa, Homo sapiens
MDALCGSGELGSKFWDSNLSVHTENPDLTPCFQNSLLAWVPCIYLWVALPCYLLYLRHHCRGYIILSHLSKLKMVLGVLLWCVSWADLFYSFHGLVHGRAPAPVFFVTPLVVGVTMLLATLLIQYERLQGVQSSGVLIIFWFLCVVCAIVPFRSKILLAKAEGEISDPFRFTTFYIHFALVLSALILACFREKPPFFSAKNVDPNPYPETSAGFLSRLFFWWFTKMAIYGYRHPLEEKDLWSLKEEDRSQMVVQQLLEAWRKQEKQTARHKASAAPGKNASGEDEVLLGARPRPRKPSFLKALLATFGSSFLISACFKLIQDLLSFINPQLLSILIRFISNPMAPSWWGFLVAGLMFLCSMMQSLILQHYYHYIFVTGVKFRTGIMGVIYRKALVITNSVKRASTVGEIVNLMSVDAQRFMDLAPFLNLLWSAPLQIILAIYFLWQNLGPSVLAGVAFMVLLIPLNGAVAVKMRAFQVKQMKLKDSRIKLMSEILNGIKVLKLYAWEPSFLKQVEGIRQGELQLLRTAAYLHTTTTFTWMCSPFLVTLITLWVYVYVDPNNVLDAEKAFVSVSLFNILRLPLNMLPQLISNLTQASVSLKRIQQFLSQEELDPQSVERKTISPGYAITIHSGTFTWAQDLPPTLHSLDIQVPKGALVAVVGPVGCGKSSLVSALLGEMEKLEGKVHMKGSVAYVPQQAWIQNCTLQENVLFGKALNPKRYQQTLEACALLADLEMLPGGDQTEIGEKGINLSGGQRQRVSLARAVYSDADIFLLDDPLSAVDSHVAKHIFDHVIGPEGVLAGKTRVLVTHGISFLPQTDFIIVLADGQVSEMGPYPALLQRNGSFANFLCNYAPDEDQGHLEDSWTALEGAEDKEALLIEDTLSNHTDLTDNDPVTYVVQKQFMRQLSALSSDGEGQGRPVPRRHLGPSEKVQVTEAKADGALTQEEKAAIGTVELSVFWDYAKAVGLCTTLAICLLYVGQSAAAIGANVWLSAWTNDAMADSRQNNTSLRLGVYAALGILQGFLVMLAAMAMAAGGIQAARVLHQALLHNKIRSPQSFFDTTPSGRILNCFSKDIYVVDEVLAPVILMLLNSFFNAISTLVVIMASTPLFTVVILPLAVLYTLVQRFYAATSRQLKRLESVSRSPIYSHFSETVTGASVIRAYNRSRDFEIISDTKVDANQRSCYPYIISNRWLSIGVEFVGNCVVLFAALFAVIGRSSLNPGLVGLSVSYSLQVTFALNWMIRMMSDLESNIVAVERVKEYSKTETEAPWVVEGSRPPEGWPPRGEVEFRNYSVRYRPGLDLVLRDLSLHVHGGEKVGIVGRTGAGKSSMTLCLFRILEAAKGEIRIDGLNVADIGLHDLRSQLTIIPQDPILFSGTLRMNLDPFGSYSEEDIWWALELSHLHTFVSSQPAGLDFQCSEGGENLSVGQRQLVCLARALLRKSRILVLDEATAAIDLETDNLIQATIRTQFDTCTVLTIAHRLNTIMDYTRVLVLDKGVVAEFDSPANLIAARGIFYGMARDAGLA

SEQ ID NO: 9232 - protein, 924 aa, Homo sapiens [sequence omitted]

SEQ ID NO: 9233 - protein, 915 aa, Homo sapiens
MVQLRKLLRVLTLMKFPCCVLEVLLCALAAAARGQEMYAPHSIRIEGDVTLGGLFPVHAKGPSGVPCGDIKRENGIHRLEAMLYALDQINSDPNLLPNVTLGARILDTCSRDTYALEQSLTFVQALIQKDTSDVRCTNGEPPVFVKPEKVVGVIGASGSSVSIMVANILRLFQIPQISYASTAPELSDDRRYDFFSRVVPPDSFQAQAMVDIVKALGWNYVSTLASEGSYGEKGVESFTQISKEAGGLCIAQSVRIPQERKDRTIDFDRIIKQLLDTPNSRAVVIFANDEDIKQILAAAKRADQVGHFLWVGSDSWGSKINPLHQHEDIAEGAITIQPKRATVEGFDAYFTSRTLENNRRNVWFAEYWEENFNCKLTISGSKKEDTDRKCTGQERIGKDSNYEQEGKVQFVIDAVYAMAHALHHMNKDLCADYRGVCPEMEQAGGKKLLKYIRNVNFNGSAGTPVMFNKNGDAPGRYDIFQYQTTNTSNPGYRLIGQWTDELQLNIEDMQWGKGVREIPASVCTLPCKPGQRKKTQKGTPCCWTCEPCDGYQYQFDEMTCQHCPYDQRPNENRTGCQDIPIIKLEWHSPWAVIPVFLAMLGIIATIFVMATFIRYNDTPIVRASGRELSYVLLTGIFLCYIITFLMIAKPDVAVCSFRRVFLGLGMCISYAALLTKTNRIYRIFEQGKKSVTAPRLISPTSQLAITSSLISVQLLGVFIWFGVDPPNIIIDYDEHKTMNPEQARGVLKCDITDLQIICSLGYSILLMVTCTVYAIKTRGVPENFNEAKPIGFTMYTTCIVWLAFIPIFFGTAQSAEKLYIQTTTLTISMNLSASVALGMLYMPKVYIIIFHPELNVQKRKRSFKAVVTAATMSSRLSHKPSDRPNGEAKTELCENVDPNSPAAKKKYVSYNNLVI

SEQ ID NO: 9234 - protein, 922 aa, Homo sapiens
MVQLRKLLRVLTLMKFPCCVLEVLLCALAAAARGQEMYAPHSIRIEGDVTLGGLFPVHAKGPSGVPCGDIKRENGIHRLEAMLYALDQINSDPNLLPNVTLGARILDTCSRDTYALEQSLTFVQALIQKDTSDVRCTNGEPPVFVKPEKVVGVIGASGSSVSIMVANILRLFQIPQISYASTAPELSDDRRYDFFSRVVPPDSFQAQAMVDIVKALGWNYVSTLASEGSYGEKGVESFTQISKEAGGLCIAQSVRIPQERKDRTIDFDRIIKQLLDTPNSRAVVIFANDEDIKQILAAAKRADQVGHFLWVGSDSWGSKINPLHQHEDIAEGAITIQPKRATVEGFDAYFTSRTLENNRRNVWFAEYWEENFNCKLTISGSKKEDTDRKCTGQERIGKDSNYEQEGKVQFVIDAVYAMAHALHHMNKDLCADYRGVCPEMEQAGGKKLLKYIRNVNFNGSAGTPVMFNKNGDAPGRYDIFQYQTTNTSNPGYRLIGQWTDELQLNIEDMQWGKGVREIPASVCTLPCKPGQRKKTQKGTPCCWTCEPCDGYQYQFDEMTCQHCPYDQRPNENRTGCQDIPIIKLEWHSPWAVIPVFLAMLGIIATIFVMATFIRYNDTPIVRASGRELSYVLLTGIFLCYIITFLMIAKPDVAVCSFRRVFLGLGMCISYAALLTKTNRIYRIFEQGKKSVTAPRLISPTSQLAITSSLISVQLLGVFIWFGVDPPNIIIDYDEHKTMNPEQARGVLKCDITDLQIICSLGYSILLMVTCTVYAIKTRGVPENFNEAKPIGFTMYTTCIVWLAFIPIFFGTAQSAEKLYIQTTTLTISMNLSASVALGMLYMPKVYIIIFHPELNVQKRKRSFKAVVTAATMSSRLSHKPSDRPNGEAKTELCENVDPNNCIPPVRKSVQKSVTWYTIPPTV

SEQ ID NO: 9235 - protein, 584 aa, Homo sapiens
MNSPGGRGKKKGSGGASNPVPPRPPPPCLAPAPPAAGPAPPPESPHKRNLYYFSYPLFVGFALLRLVAFHLGLLFVWLCQRFSRALMAAKRSSGAAPAPASASAPAPVPGGEAERVRVFHKQAFEYISIALRIDEDEKAGQKEQAVEWYKKGIEELEKGIAVIVTGQGEQCERARRLQAKMMTNLVMAKDRLQLLESGAVPKRKDPLTHTSNSLPRSKTVMKTGSAGLSGHHRAPSYSGLSMVSGVKQGSGPAPTTHKGTPKTNRTNKPSTPTTATRKKKDLKNFRNVDSNLANLIMNEIVDNGTAVKFDDIAGQDLAKQALQEIVILPSLRPELFTGLRAPARGLLLFGPPGNGKTMLAKAVAAESNATFFNISAASLTSKYVGEGEKLVRALFAVARELQPSIIFIDEVDSLLCERREGEHDASRRLKTEFLIEFDGVQSAGDDRVLVMGATNRPQELDEAVLRRFIKRVYVSLPNEETRLLLLKNLLCKQGSPLTQKELAQLARMTDGYSGSDLTALAKDAALGPIRELKPEQVKNMSASEMRNIRLSDFTESLKKIKRSVSPQTLEAYIRWNKDFGDTTV

SEQ ID NO: 9236 - protein, 616 aa, Homo sapiens
MNSPGGRGKKKGSGGASNPVPPRPPPPCLAPAPPAAGPAPPPESPHKRNLYYFSYPLFVGFALLRLVAFHLGLLFVWLCQRFSRALMAAKRSSGAAPAPASASAPAPVPGGEAERVRVFHKQAFEYISIALRIDEDEKAGQKEQAVEWYKKGIEELEKGIAVIVTGQGEQCERARRLQAKMMTNLVMAKDRLQLLEKMQPVLPFSKSQTDVYNDSTNLACRNGHLQSESGAVPKRKDPLTHTSNSLPRSKTVMKTGSAGLSGHHRAPSYSGLSMVSGVKQGSGPAPTTHKGTPKTNRTNKPSTPTTATRKKKDLKNFRNVDSNLANLIMNEIVDNGTAVKFDDIAGQDLAKQALQEIVILPSLRPELFTGLRAPARGLLLFGPPGNGKTMLAKAVAAESNATFFNISAASLTSKYVGEGEKLVRALFAVARELQPSIIFIDEVDSLLCERREGEHDASRRLKTEFLIEFDGVQSAGDDRVLVMGATNRPQELDEAVLRRFIKRVYVSLPNEETRLLLLKNLLCKQGSPLTQKELAQLARMTDGYSGSDLTALAKDAALGPIRELKPEQVKNMSASEMRNIRLSDFTESLKKIKRSVSPQTLEAYIRWNKDFGDTTV

SEQ ID NO: 9237 - protein, 2000 aa, Homo sapiens
MAQALLVPPGPESFRLFTRESLAAIEKRAAEEKAKKPKKEQDNDDENKPKPNSDLEAGKNLPFIYGDIPPEMVSEPLEDLDPYYINKKTFIVMNKGKAIFRFSATSALYILTPLNPVRKIAIKILVHSLFSMLIMCTILTNCVFMTLSNPPDWTKNVEYTFTGIYTFESLIKILARGFCLEDFTFLRDPWNWLDFSVIVMAYVTEFVSLGNVSALRTFRVLRALKTISVIPGLKTIVGALIQSVKKLSDVMILTVFCLSVFALIGLQLFMGNLRNKCLQWPPSDSAFETNTTSYFNGTMDSNGTFVNVTMSTFNWKDYIGDDSHFYVLDGQKDPLLCGNGSDAGQCPEGYICVKAGRNPNYGYTSFDTFSWAFLSLFRLMTQDYWENLYQLTLRAAGKTYMIFFVLVIFLGSFYLVNLILAVVAMAYEEQNQATLEEAEQKEAEFQQMLEQLKKQQEEAQAVAAASAASRDFSGIGGLGELLESSSEASKLSSKSAKEWRNRRKKRRQREHLEGNNKGERDSFPKSESEDSVKRSSFLFSMDGNRLTSDKKFCSPHQSLLSIRGSLFSPRRNSKTSIFSFRGRAKDVGSENDFADDEHSTFEDSESRRDSLFVPHRHGERRNSNVSQASMSSRMVPGLPANGKMHSTVDCNGVVSLVGGPSALTSPTGQLPPEGTTTETEVRKRRLSSYQISMEMLEDSSGRQRAVSIASILTNTMEELEESRQKCPPCWYRFANVFLIWDCCDAWLKVKHLVNLIVMDPFVDLAITICIVLNTLFMAMEHYPMTEQFSSVLTVGNLVFTGIFTAEMVLKIIAMDPYYYFQEGWNIFDGIIVSLSLMELGLSNVEGLSVLRSFRLLRVFKLAKSWPTLNMLIKIIGNSVGALGNLTLVLAIIVFIFAVVGMQLFGKSYKECVCKINDDCTLPRWHMNDFFHSFLIVFRVLCGEWIETMWDCMEVAGQTMCLIVFMLVMVIGNLVVLNLFLALLLSSFSSDNLAATDDDNEMNNLQIAVGRMQKGIDYVKNKMRECFQKAFFRKPKVIEIHEGNKIDSCMSNNTGIEISKELNYLRDGNGTTSGVGTGSSVEKYVIDENDYMSFINNPSLTVTVPIAVGESDFENLNTEEFSSESELEESKEKLNATSSSEGSTVDVVLPREGEQAETEPEEDLKPEACFTEGCIKKFPFCQVSTEEGKGKIWWNLRKTCYSIVEHNWFETFIVFMILLSSGALAFEDIYIEQRKTIKTMLEYADKVFTYIFILEMLLKWVAYGFQTYFTNAWCWLDFLIVDVSLVSLVANALGYSELGAIKSLRTLRALRPLRALSRFEGMRVVVNALVGAIPSIMNVLLVCLIFWLIFSIMGVNLFAGKFYHCVNMTTGNMFDISDVNNLSDCQALGKQARWKNVKVNFDNVGAGYLALLQVATFKGWMDIMYAAVDSRDVKLQPVYEENLYMYLYFVIFIIFGSFFTLNLFIGVIIDNFNQQKKKFGGQDIFMTEEQKKYYNAMKKLGSKKPQKPIPRPANKFQGMVFDFVTRQVFDISIMILICLNMVTMMVETDDQGKYMTLVLSRINLVFIVLFTGEFVLKLVSLRHYYFTIGWNIFDFVVVILSIVGMFLAEMIEKYFVSPTLFRVIRLARIGRILRLIKGAKGIRTLLFALMMSLPALFNIGLLLFLVMFIYAIFGMSNFAYVKKEAGIDDMFNFETFGNSMICLFQITTSAGWDGLLAPILNSAPPDCDPDTIHPGSSVKGDCGNPSVGIFFFVSYIIISFLVVVNMYIAVILENFSVATEESAEPLSEDDFEMFYEVWEKFDPDATQFIEFSKLSDFAAALDPPLLIAKPNKVQLIAMDLPMVSGDRIHCLDILFAFTKRVLGESGEMDALRIQMEDRFMASNPSKVSYEPITTTLKRKQEEVSAAIIQRNFRCYLLKQRLKNISSNYNKEAIKGRIDLPIKQDMIIDKLNGNSTPEKTDGSSSTTSPPSYDSVTKPDKEKFEKDKPEKESKGKEVRENQK

SEQ ID NO: 9238 - protein, 2000 aa, Homo sapiens
MAQALLVPPGPESFRLFTRESLAAIEKRAAEEKAKKPKKEQDNDDENKPKPNSDLEAGKNLPFIYGDIPPEMVSEPLEDLDPYYINKKTFIVMNKGKAIFRFSATSALYILTPLNPVRKIAIKILVHSLFSMLIMCTILTNCVFMTLSNPPDWTKNVEYTFTGIYTFESLIKILARGFCLEDFTFLRDPWNWLDFSVIVMAYVTEFVDLGNVSALRTFRVLRALKTISVIPGLKTIVGALIQSVKKLSDVMILTVFCLSVFALIGLQLFMGNLRNKCLQWPPSDSAFETNTTSYFNGTMDSNGTFVNVTMSTFNWKDYIGDDSHFYVLDGQKDPLLCGNGSDAGQCPEGYICVKAGRNPNYGYTSFDTFSWAFLSLFRLMTQDYWENLYQLTLRAAGKTYMIFFVLVIFLGSFYLVNLILAVVAMAYEEQNQATLEEAEQKEAEFQQMLEQLKKQQEEAQAVAAASAASRDFSGIGGLGELLESSSEASKLSSKSAKEWRNRRKKRRQREHLEGNNKGERDSFPKSESEDSVKRSSFLFSMDGNRLTSDKKFCSPHQSLLSIRGSLFSPRRNSKTSIFSFRGRAKDVGSENDFADDEHSTFEDSESRRDSLFVPHRHGERRNSNVSQASMSSRMVPGLPANGKMHSTVDCNGVVSLVGGPSALTSPTGQLPPEGTTTETEVRKRRLSSYQISMEMLEDSSGRQRAVSIASILTNTMEELEESRQKCPPCWYRFANVFLIWDCCDAWLKVKHLVNLIVMDPFVDLAITICIVLNTLFMAMEHYPMTEQFSSVLTVGNLVFTGIFTAEMVLKIIAMDPYYYFQEGWNIFDGIIVSLSLMELGLSNVEGLSVLRSFRLLRVFKLAKSWPTLNMLIKIIGNSVGALGNLTLVLAIIVFIFAVVGMQLFGKSYKECVCKINDDCTLPRWHMNDFFHSFLIVFRVLCGEWIETMWDCMEVAGQTMCLIVFMLVMVIGNLVVLNLFLALLLSSFSSDNLAATDDDNEMNNLQIAVGRMQKGIDYVKNKMRECFQKAFFRKPKVIEIHEGNKIDSCMSNNTGIEISKELNYLRDGNGTTSGVGTGSSVEKYVIDENDYMSFINNPSLTVTVPIAVGESDFENLNTEEFSSESELEESKEKLNATSSSEGSTVDVVLPREGEQAETEPEEDLKPEACFTEGCIKKFPFCQVSTEEGKGKIWWNLRKTCYSIVEHNWFETFIVFMILLSSGALAFEDIYIEQRKTIKTMLEYADKVFTYIFILEMLLKWVAYGFQTYFTNAWCWLDFLIVDVSLVSLVANALGYSELGAIKSLRTLRALRPLRALSRFEGMRVVVNALVGAIPSIMNVLLVCLIFWLIFSIMGVNLFAGKFYHCVNMTTGNMFDISDVNNLSDCQALGKQARWKNVKVNFDNVGAGYLALLQVATFKGWMDIMYAAVDSRDVKLQPVYEENLYMYLYFVIFIIFGSFFTLNLFIGVIIDNFNQQKKKFGGQDIFMTEEQKKYYNAMKKLGSKKPQKPIPRPANKFQGMVFDFVTRQVFDISIMILICLNMVTMMVETDDQGKYMTLVLSRINLVFIVLFTGEFVLKLVSLRHYYFTIGWNIFDFVVVILSIVGMFLAEMIEKYFVSPTLFRVIRLARIGRILRLIKGAKGIRTLLFALMMSLPALFNIGLLLFLVMFIYAIFGMSNFAYVKKEAGIDDMFNFETFGNSMICLFQITTSAGWDGLLAPILNSAPPDCDPDTIHPGSSVKGDCGNPSVGIFFFVSYIIISFLVVVNMYIAVILENFSVATEESAEPLSEDDFEMFYEVWEKFDPDATQFIEFSKLSDFAAALDPPLLIAKPNKVQLIAMDLPMVSGDRIHCLDILFAFTKRVLGESGEMDALRIQMEDRFMASNPSKVSYEPITTTLKRKQEEVSAAIIQRNFRCYLLKQRLKNISSNYNKEAIKGRIDLPIKQDMIIDKLNGNSTPEKTDGSSSTTSPPSYDSVTKPDKEKFEKDKPEKESKGKEVRENQK

SEQ ID NO: 9239 - protein, 644 aa, Homo sapiens [sequence omitted]

SEQ ID NO: 9240 - protein, 603 aa, Homo sapiens [sequence omitted]

SEQ ID NO: 9241 - protein, 344 aa, Homo sapiens
MRPTLLWSLLLLLGVFAAAAAAPPDPLSQLPAPQHPKIRLYNAEQVLSWEPVALSNSTRPVVYQVQFKYTDSKWFTADIMSIGVNCTQITATECDFTAASPSAGFPMDFNVTLRLRAELGALHSAWVTMPWFQHYRNVTVGPPENIEVTPGEGSLIIRFSSPFDIADTSTAFFCYYVHYWEKGGIQQARASFFFVKGPFRSNSISLDNLKPSRVYCLQVQAQLLWNKSNIFRVGHLSNISCYETMADASTELQQVILISVGTFSLLSVLAGACFFLVLKYRGLIKYWFHTPPSIPLQIEEYLKDPTQPILEALDKDSSPKDDVWDSVSIISFPEKEQEDVLQTL

SEQ ID NO: 9242 - protein, 427 aa, Homo sapiens
MEWPARLCGLWALLLCAGGGGGGGGAAPTETQPPVTNLSVSVENLCTVIWTWNPPEGASSNCSLWYFSHFGDKQDKKIAPETRRSIEVPLNERICLQVGSQCSTNESEKPSILVEKCISPPEGDPESAVTELQCIWHNLSYMKCSWLPGRNTSPDTNYTLYYWHRSLEKIHQCENIFREGQYFGCSFDLTKVKDSSFEQHSVQIMVKDNAGKIKPSFNIVPLTSRVKPDPPHIKNLSFHNDDLYVQWENPQNFISRCLFYEVEVNNSQTETHNVFYVQEAKCENPEFERNVENTSCFMVPGVLPDTLNTVRIRVKTNKLCYEDDKLWSNWSQEMSIGKKRNSTLYITMLLIVPVIVAGAIIVLLLYLKRLKIIIFPPIPDPGKIFKEMFGDQNDDTLHWKKYDIYEKQTKEETDSVVLIENLKKASQ

SEQ ID NO: 9243 - protein, 668 aa, Homo sapiens
MHWYRRVPIRVSSSESDSSPALGPRSPQQDRQVWHTYGQSKGFRAPEAFKEVALELVTRHKLHSSCQLSEPRRRTRRSELSGGSAAAGAGAQEPTGPDQDGAVAAPRRTHALSGPSLGPAPPAPPAAPIRAGMMCLECASAAAGGAEEEEADAERRRRRRGAQRGAGGSGCCGARGAGGAGVSAAGDEVQTLSGSVRRAPTGPPGTPGTPGCAATAKGPGAQQPKPASLGRGRGAAAAILSLGNVLNYLDRYTVAGVLLDIQQHFGVKDRGAGLLQSVFICSFMVAAPIFGYLGDRFNRKVILSCGIFFWSAVTFSSSFIPQQYFWLLVLSRGLVGIGEASYSTIAPTIIGDLFTKNTRTLMLSVFYFAIPLGSGLGYITGSSVKQAAGDWHWALRVSPVLGMITGTLILILVPATKRGHADQLGDQLKARTSWLRDMKALIRNRSYVFSSLATSAVSFATGALGMWIPLYLHRAQVVQKTAETCNSPPCGAKDSLIFGAITCFTGFLGVVTGAGATRWCRLKTQRADPLVCAVGMLGSAIFICLIFVAAKSSIVGAYICIFVGETLLFSNWAITADILMYVVIPTRRATAVALQSFTSHLLGDAGSPYLIGFISDLIRQSTKDSPLWEFLSLGYALMLCPFVVVLGGMFFLATALFFVSDRARAEQQ

SEQ ID NO: 9244 - protein, 491 aa, Homo sapiens
MIATGGVITGLAALKRQDSARSQQHVNLSPSPATQEKKPIRRRPRADVVVVRGKIRLYSPSGFFLILGVLISIIGIAMAVLGYWPQKEHFIDAETTLSTNETQVIRNEGGVVVRFFEQHLHSDKMKMLGPFTMGIGIFIFICANAILHENRDKETKIIHMRDIYSTVIDIHTLRIKEQRQMNGMYTGLMGETEVKQNGSSCASRLAANTIASFSGFRSSFRMDSSVEEDELMLNEGKSSGHLMPPLLSDSSVSVFGLYPPPSKTTDDKTSGSKKCETKSIVSSSISAFTLPVIKLNNCVIDEPSIDNITEDADNLKSRSRNLSMDSLVVPLPNTSESFQPVSTVLPRNNSIGESLSSQYKSSMALGPGAGQLLSPGAARRQFGSNTSLHLLSSHSKSLDLDRGPSTLTVQAEQRKHPSWPRLDRNNSKGYMKLENKEDPMDRLLVPQVAIKKDFTNKEKLLMISRSHNNLSFEHDEFLSNNLKRGTSETRF

SEQ ID NO: 9245 - protein, 509 aa, Homo sapiens
REQGISWDIWLWRVKGQAMIATGGVITGLAALKRQDSARSQQHVNLSPSPATQEKKPIRRRPRADVVVVRGKIRLYSPSGFFLILGVLISIIGIAMAVLGYWPQKEHFIDAETTLSTNETQVIRNEGGVVVRFFEQHLHSDKMKMLGPFTMGIGIFIFICANAILHENRDKETKIIHMRDIYSTVIDIHTLRIKEQRQMNGMYTGLMGETEVKQNGSSCASRLAANTIASFSGFRSSFRMDSSVEEDELMLNEGKSSGHLMPPLLSDSSVSVFGLYPPPSKTTDDKTSGSKKCETKSIVSSSISAFTLPVIKLNNCVIDEPSIDNITEDADNLKSRSRNLSMDSLVVPLPNTSESFQPVSTVLPRNNSIGESLSSQYKSSMALGPGAGQLLSPGAARRQFGSNTSLHLLSSHSKSLDLDRGPSTLTVQAEQRKHPSWPRLDRNNSKGYMKLENKEDPMDRLLVPQVAIKKDFTNKEKLLMISRSHNNLSFEHDEFLSNNLKRGTSETRF

SEQ ID NO: 9246 - protein, 3014 aa, Homo sapiens
MAPPPPPVLPVLLLLAAAAALPAMGLRAAAWEPRVPGGTRAFALRPGCTYAVGAACTPRAPRELLDVGRDGRLAGRRRVSGAGRPLPLQVRLVARSAPTALSRRLRARTHLPGCGARARLCGTGARLCGALCFPVPGGCAAAQHSALAAPTTLPACRCPPRPRPRCPGRPICLPPGGSVRLRLLCALRRAAGAVRVGLALEAATAGTPSASPSPSPPLPPNLPEARAGPARRARRGTSGRGSLKFPMPNYQVALFENEPAGTLILQLHAHYTIEGEEERVSYYMEGLFDERSRGYFRIDSATGAVSTDSVLDRETKETHVLRVKAVDYSTPPRSATTYITVLVKDTNDHSPVFEQSEYRERVRENLEVGYEVLTIRASDRDSPINANLRYRVLGGAWDVFQLNESSGVVSTRAVLDREEAAEYQLLVEANDQGRNPGPLSATATVYIEVEDENDNYPQFSEQNYVVQVPEDVGLNTAVLRVQATDRDQGQNAAIHYSILSGNVAGQFYLHSLSGILDVINPLDFEDVQKYSLSIKAQDGGRPPLINSSGVVSVQVLDVNDNEPIFVSSPFQATVLENVPLGYPVVHIQAVDADSGENARLHYRLVDTASTFLGGGSAGPKNPAPTPDFPFQIHNSSGWITVCAELDREEVEHYSFGVEAVDHGSPPMSSSTSVSITVLDVNDNDPVFTQPTYELRLNEDAAVGSSVLTLQARDRDANSVITYQLTGGNTRNRFALSSQRGGGLITLALPLDYKQEQQYVLAVTASDGTRSHTAHVLINVTDANTHRPVFQSSHYTVSVSEDRPVGTSIATLSANDEDTGENARITYVIQDPVPQFRIDPDSGTMYTMMELDYENQVAYTLTIMAQDNGIPQKSDTTTLEILILDANDNAPQFLWDFYQGSIFEDAPPSTSILQVSATDRDSGPNGRLLYTFQGGDDGDGDFYIEPTSGVIRTQRRLDRENVAVYNLWALAVDRGSPTPLSASVEIQVTILDINDNAPMFEKDELELFVEENNPVGSVVAKIRANDPDEGPNAQIMYQIVEGDMRHFFQLDLLNGDLRAMVELDFEVRREYVLVVQATSAPLVSRATVHILLVDQNDNPPVLPDFQILFNNYVTNKSNSFPTGVIGCIPAHDPDVSDSLNYTFVQGNELRLLLLDPATGELQLSRDLDNNRPLEALMEVSVSDGIHSVTAFCTLRVTIITDDMLTNSITVRLENMSQEKFLSPLLALFVEGVAAVLSTTKDDVFVFNVQNDTDVSSNILNVTFSALLPGGVRGQFFPSEDLQEQIYLNRTLLTTISTQRVLPFDDNICLREPCENYMKCVSVLRFDSSAPFLSSTTVLFRPIHPINGLRCRCPPGFTGDYCETEIDLCYSDPCGANGRCRSREGGYTCECFEDFTGEHCEVDARSGRCANGVCKNGGTCVNLLIGGFHCVCPPGEYERPYCEVTTRSFPPQSFVTFRGLRQRFHFTISLTFATQERNGLLLYNGRFNEKHDFIALEIVDEQVQLTFSAGETTTTVAPKVPSGVSDGRWHSVQVQYYNKPNIGHLGLPHGPSGEKMAVVTVDDCDTTMAVRFGKDIGNYSCAAQGTQTGSKKSLDLTGPLLLGGVPNLPEDFPVHNRQFVGCMRNLSVDGKNVDMAGFIANNGTREGCAARRNFCDGRRCQNGGTCVNRWNMYLCECPLRFGGKNCEQAMPHPQLFSGESVVSWSDLNIIISVPWYLGLMFRTRKEDSVLMEATSGGPTSFRLQILNNYLQFEVSHGPSDVESVMLSGLRVTDGEWHHLLIELKNVKEDSEMKHLVTMTLDYGMDQNKADIGGMLPGLTVRSVVVGGASEDKVSVRRGFRGCMQGVRMGGTPTNVATLNMNNALKVRVKDGCDVDDPCTSSPCPPNSRCHDAWEDYSCVCDKGYLGINCVDACHLNPCENMGACVRSPGSPQGYVCECGPSHYGPYCENKLDLPCPRGWWGNPVCGPCHCAVSKGFDPDCNKTNGQCQCKENYYKLLAQDTCLPCDCFPHGSHSRTCDMATGQCACKPGVIGRQCNRCDNPFAEVTTLGCEVIYNGCPKAFEAGIWWPQTKFGQPAAVPCPKGSVGNAVRHCSGEKGWLPPELFNCTTISFVDLRAMNEKLSRNETQVDGARALQLVRALRSATQHTGTLFGNDVRTAYQLLGHVLQHESWQQGFDLAATQDADFHEDVIHSGSALLAPATRAAWEQIQRSEGGTAQLLRRLEGYFSNVARNVRRTYLRPFVIVTANMILAVDIFDKFNFTGARVPRFDTIHEEFPRELESSVSFPADFFRPPEEKEGPLLRPAGRRTTPQTTRPGPGTEREAPISRRRRHPDDAGQFAVALVIIYRTLGQLLPERYDPDRRSLRLPHRPIINTPMVSTLVYSEGAPLPRPLERPVLVEFALLEVEERTKPVCVFWNHSLAVGGTGGWSARGCELLSRNRTHVACQCSHTASFAVLMDISRRENGEVLPLKIVTYAAVSLSLAALLVAFVLLSLVRMLRSNLHSIHKHLAVALFLSQLVFVIGINQTENPFLCTVVAILLHYIYMSTFAWTLVESLHVYRMLTEVRNIDTGPMRFYYVVGWGIPAIVTGLAVGLDPQGYGNPDFCWLSLQDTLIWSFAGPIGAVIIINTVTSVLSAKVSCQRKHHYYGKKGIVSLLRTAFLLLLLISATWLLGLLAVNRDALSFHYLFAIFSGLQGPFVLLFHCVLNQEVRKHLKGVLGGRKLHLEDSATTRATLLTRSLNCNTTFGDGPDMLRTDLGESTASLDSIVRDEGIQKLGVSSGLVRGSHGEPDASLMPRSCKDPPGHDSDSDSELSLDEQSSSYASSHSSDSEDDGVGAEEKWDPARGAVHSTPKGDAVANHVPAGWPDQSLAESDSEDPSGKPRLKVETKVSVELHREEQGSHRGEYPPDQESGGAARLASSQPPEQRKGILKNKVTYPPPLTLTEQTLKGRLREKLADCEQSPTSSRTSSLGSGGPDCAITVKSPGREPGRDHLNGVAMNVRTGSAQADGSDSEKP

SEQ ID NO: 9247 - protein, 571 aa, Homo sapiens
MKDGSGRRPQPGPRGAGGRRLASRACARCRGPDAVRGVGARVYADAPAKLLLPPPAAWDLAVRLRGAEAASERQVYSVTMKLLLLHPAFQSCLLLTLLGLWRTTPEAHASSLGAPAISAASFLQDLIHRYGEGDSLTLQQLKALLNHLDVGVGRGNVTQHVQGHRNLSTCFSSGDLFTAHNFSEQSRIGSSELQEFCPTILQQLDSRACTSENQENEENEQTEEGRPSAVEVWGYGLLCVTVISLCSLLGASVVPFMKKTFYKRLLLYFIALAIGTLYSNALFQLIPEAFGFNPLEDYYVSKSAVVFGGFYLFFFTEKILKILLKQKNEHHHGHSHYASESLPSKKDQEEGVMEKLQNGDLDHMIPQHCSSELDGKAPMVDEKVIVGSLSVQDLQASQSACYWLKGVRYSDIGTLAWMITLSDGLHNFIDGLAIGASFTVSVFQGISTSVAILCEEFPHELGDFVILLNAGMSIQQALFFNFLSACCCYLGLAFGILAGSHFSANWIFALAGGMFLYISLADMFPEMNEVCQEDERKGSILIPFIIQNLGLLTGFTIMVVLTMYSGQIQIG

SEQ ID NO: 9248 - protein, 481 aa, Homo sapiens
MKLLLLHPAFQSCLLLTLLGLWRTTPEAHASSPGAPAISAASFLQDLIHRYGEGDSLTLQQLKALLNHLDVGVGRGNVTQHVQGHRNLSTCFSSGDLFTAHNFSEQSRIGSSELQEFCPTILQQLDSRACTSENQENEENEQTEEGRPSAVEVWGYGLLCVTVISLCSLLGASVVPFMKKTFYKRLLLYFIALAIGTLYSNALFQLIPEAFGFNPLEDYYVSKSAVVFGGFYLFFFTEKILKILLKQKNEHHHGHSHYASESLPSKKDQEEGVMEKLQNGDLDHMIPQHCSSELDGKAPMVDEKVIVGSLSVQDLQASQSACYWLKGVRYSDIGTLAWMITLSDGLHNFIDGLAIGASFTVSVFQGISTSVAILCEEFPHELGDFVILLNAGMSIQQALFFNFLSACCCYLGLAFGILAGSHFSANWIFALAGGMFLYISLADMMEFCSVAQAGVQWCHLSSLQPLPLGLKRLSCLSLPSN

SEQ ID NO: 9249 - protein, 320 aa, Homo sapiens
MDQSNYSSLHGFILLGFSNHPKMEMILSGVVAIFYLITLVGNTAIILASLLDSQLHTPMYFFLRNLSFLDLCFTTSIIPQMLVNLWGPDKTISYVGCIIQLYVYMWLGSVECLLLAVMSYDRFTAICKPLHYFVVMNPHLCLKMIIMIWSISLANSVVLCTLTLNLPTCGNNILDHFLCELPALVKIACVDTTTVEMSVFALGIIIVLTPLILILISYGYIAKAVLRTKSKASQRKAMNTCGSHLTVVSMFYGTIIYMYLQPGNRASKDQGKFLTLFYTVITPSLNPLIYTLRNKDMKDALKKLMRFHHKSTKIKRNCKS

SEQ ID NO: 9250 - protein, 1543 aa, Homo sapiens
  VARIANT 181: Xaa = Any Amino Acid
MNKMALASFMKGRTVIGTPDEETMDIELPKKYHEMVGVIFSDTFSYRLKFNWGYRIPVIKEHSEYTEHCWAMHGEIFCYLAKYWLKGFVAFQAAINAAIIEVTTNHSVMEELTSVIGINMKIPPFISKGEIMNEWFHFTCLVSFSSFIYFASLNVARERGKFKKLMTVMGLRESAFWLSWXLTYICFIFIMSIFMALVITSISIVFHTGFMVIFTLYSLYGLSLIALAFLMSVLIRKPMLAGLAGFLFTVFWGCLGFTVLYRQLPLSLGWVLSLLSPFAFTAGMAQVTHLDNYLSGVIFPDPSGDSYKMIATFFILAFDTLFYLIFTLYFERVLPDKDGHGDSPLFFLKSSFWSKHQNTHHEIFENEINPEHSSDDSFEPVSPEFHGKEAIRIRNVIKEYNGKTGKVEALQGIFFDIYEGQITAILGHNGAGKSTLLNILSGLSVSTEGSATIYNTQLSEITDMEEIRKNIGFCPQFNFQFDFLTVRENLRVFAKIKGIQPKEVEQEVKRIIMELDMQSIQDIIAKKLSGGQKRKLTLGIAILGDPQVLLLDEPTAGLDPFSRHRVWSLLKEHKVDRLILFSTQFMDEADILADRKVFLSNGKLKCAGSSLFLKRKWGIGYHLSLHRNEMCDTEKITSLIKQHIPDAKLTTESEEKLVYSLPLEKTNKFPDLYSDLDKCSDQGIRNYAVSVTSLNEVFLNLEGKSAIDEPDFDIGKQEKIHVTRNTGDESEMEQVLCSLPETRKAVSSAALWRRQIYAVATLRFLKLRRERRALLCLLLVLGIAFIPIILEKIMYKVTRETHCWEFSPSMYFLSLEQIPKTPLTSLLIVNNTGSNIEDLVHSLKCQDIVLEIDDFRNRNGSDDPSYNGAIIVSGDQKDYRFSVACNTKKLNCFPVLMGIVSNALMGIFNFTELIQTESTSFSRDDIVLDLGFIDGSIFLLLITNCVSPFIGMSSISDYKKNVQSQLWISGLWPSAYWCGQALVDIPLYFLILFSIHLIYYFIFLGFQLSWELMFVLVVCIIGCAVSLIFLTYVLSFIFRKWRKNNGFWSFGFFIILICVSTIMVSTQYEKLNLILCMIFIPSFTLLGYVMLLIQLDFMRNLDSLDNRINEVNKTILLTTLIPYLQSVIFLFVIRCLEMKYGNEIMNKDPVFRISPRSRETHPNPEEPEEEDEDVQAERVQAANALTAPNLEEEPVITASCLHKEYYETKKSCFSTRKKKIAIRNVSFCVKKGEVLGLLGHNGAGKSTSIKMITGCTKPTAGVVVLQGSRASVRQQHDNSLKFLGYCPQENSLWPKLTMKEHLELYAAVKGLGKEDAALSISRLVEALKLQEQLKAPVKTLSEGIKRKLCFVLSILGNPSVVLLDEPFTGMDPEGQQQMWQILQATVKNKERGTLLTTHYMSEAEAVCDRMAMMVSGTLRCIGSIQHLKNKFGRDYLLEIKMKEPTQVEALHTEILKLFPQAAWQERYSSLMAYKLPVEDVHPLSRAFFKLEAMKQTFNLEEYSLSQATLEQVFLELCKEQELGNVDDKIDTTVEWKLLPQEDP

SEQ ID NO: 9251 - protein, 1543 aa, Homo sapiens [sequence omitted]

SEQ ID NO: 9252 - protein, 1858 aa, Homo sapiens
MELVLKKSTGHSAAQVALTETAPGSQHSSPLHVTAPPSATTFDTAFFNQGKQTKSTADPSIFVATYVSVTSKEVAVNDDEMDNFLPDTHWTTPRMVSPIQYITVSPPGLPREALEPMLTPSLPMVSLQDEEVTSGWQNTTRQPAAYAESASHFHTFRSAFRTSEGIVPTPGRNLVLYPTDAYSHLSSRTLPEIVASLTEGVETTLFLSSRSLMPQPLGDGITIPLPSLGEVSQPPEEVWATSADRYTDVTTVLSQSLEETISPRTYPTVTASHAALAFSRTHSPLLSTPLAFASSASPTDVSSNPFLPSDSSKTSELHSNSALPGPVDNTHILSPVSSFRPYTWCAACTVPSPQQVLATSLMEKDVGSGDGAETLCMTVLEESSISLMSSVVADFSEFEEDPQVFNTLFPSRPIVPLSSRSMEISETSVGISAEVDMSSVTTTQVPPAHGRLSVPASLDPTAGSLSVAETQVTPSSVTTAFFSVITSILLDSSFSVIANKNTPSLAVRDPSVFTPYSLVPSVESSLFSDQERSSFSEHKPRGALDFASSFFSTPPLELSGSISSPSEAPASLSLMPSDLSPFTSQSFSPLVETFTLFDSSDLQSSQLSLPSSTNLEFSQLQPSSELPLNTIMLLPSRSEVSPWSSFPSDSLEFVEASTVSLTDSEAHFTSAFIETTSYLESSLISHESAVTALVPPGSESFDILTAGIQATSPLTTVHTTPILTESSLFSTLTPPDDQISALDGHVSVLASFSKAIPTGTVLITDAYLPSGSSFVSEATPFPLPTELTVVGPSLTPTEVPLNTSTEVSTTSTGAATGGPLDSTLMGDAASQSPPESSAAPPLPSLRPVTAFTLEATVDTPTLATAKPPYVCDITVPDAYLITTVLARRAVQEYIITAIKEVLRIHFNRAVELKVYELFTDFTFLVTSGPFVYTAISVINVLINSKLVRDQTPLILSVKPSFLVPESRFQVQTVLQFVPPSVDTGFCNFTQRIEKGLMTALFEVRKHHQGTYNLTVQILNITISSSRVTPRRGPVNIIFAVKSTQGFLNGSEVSELLRNLSVVEFSFYLGYPVLQIAEPFQYPQLNLSQLLKSSWVRTVLLGVMEKQLQNEVFQAEMERKLAQLLSEVSTRRRMWRRATVAAGNSVVQVVNVSRLEGDDNPVQLIYFVEDQDGERLSAVKSSDLINKMDLQRAAIILGYRIQGVIAQPVDRVKRPSPESQSNNLWVIVGVVIPVLVVMVIVVILYWKLCRTDKLDFQPDTVANIQQRQKLQIPSVKGFDFAKQHLGQHNKDDILIIHEPAPLPGPLKDHTTPSENGDVPSPKSKIPSKNVRHRGRVSPSDADSTVSEESSERDAGDKTPGAVNDGRSHRAPQSGPPLPSSGNEQHSSASIFEHVDRISRPPEASRRVPSKIQLIAMQPIPAPPVQRPSPADRVAESNKINKEIQTALRHKSEIEHHRNKIRLRAKRRGHYEFPVVDDLSSGDTKERHRVYRRAQMQIDKILDPTASVPSVFIEPRKSSRIKRSPKPRRKHQVNGCPADAEKDRLITTDSDGTYRRPPGVHNSAYIGCPSDPDLPADVQTPSSVELGRYPALPFPASQYIPPQPSIEEARQTMHSLLDDAFALVAPSSQPASTAGVGPGVPPGLPANSTPSQEERRATQWGSFYSPAQTANNPCSRYEDYGMTPPTGPLPRPGFGPGLLQSTELVPPDPQQPQASAEAPFAARGIYSEEMPSVARPRPVGGTTGSQIQHLTQVGIASRIGAQPVEIPPSRGSQYGGPGWPSYGEDEAGRREAVPRTSGREPSAPSGNLPHRGLQGPGLGYPTSSTEDLQPGHSSASLIKAIREELLRLSQKQSTVQNFHS

SEQ ID NO: 9253 - protein, 391 aa, Homo sapiens
MNASSRNVFDTLIRVLTESMFKHLRKWVVTRFFGHSRQRARLVSKDGRCNIEFGNVEAQSRFIFFVDIWTTVLDLKWRYKMTIFITAFLGSWFFFGLLWYAVAYIHKDLPEFHPSANHTPCVENINGLTSAFLFSLETQVTIGYGFRCVTEQCATAIFLLIFQSILGVIINSFMCGAILAKISRPKKRAKTITFSKNAVISKRGGKLCLLIRVANLRKSLLIGSHIYGKLLKTTVTPEGETIILDQININFVVDAGNENLFFISPLTIYHVIDHNSPFFHMAAETLLQQDFELVVFLDGTVESTSATCQVRTSYVPEEVLWGYRFAPIVSKTKEGKYRVDFHNFSKTVEVETPHCAMCLYNEKDVRARMKRGYDNPNFILSEVNETDDTKM

SEQ ID NO: 9254 - protein, 389 aa, Homo sapiens
MPTVYLCSEQIRVLTESMFKHLRKWVVTRFFGHSRQRARLVSKDGRCNIEFGNVEAQSRFIFFVDIWTTVLDLKWRYKMTIFITAFLGSWFFFGLLWYAVAYIHKDLPEFHPSANHTPCVENINGLTSAFLFSLETQVTIGYGFRCVTEQCATAIFLLIFQSILGVIINSFMCGAILAKISRPKKRAKTITFSKNAVISKRGGKLCLLIRVANLRKSLLIGSHIYGKLLKTTVTPEGETIILDQININFVVDAGNENLFFISPLTIYHVIDHNSPFFHMAAETLLQQDFELVVFLDGTVESTSATCQVRTSYVPEEVLWGYRFAPIVSKTKEGKYRVDFHNFSKTVEVETPHCAMCLYNEKDVRARMKRGYDNPNFILSEVNETDDTKM

SEQ ID NO: 9255 - protein, 372 aa, Homo sapiens
MFKHLRKWVVTRFFGHSRQRARLVSKDGRCNIEFGNVEAQSRFIFFVDIWTTVLDLKWRYKMTIFITAFLGSWFFFGLLWYAVAYIHKDLPEFHPSANHTPCVENINGLTSAFLFSLETQVTIGYGFRCVTEQCATAIFLLIFQSILGVIINSFMCGAILAKISRPKKRAKTITFSKNAVISKRGGKLCLLIRVANLRKSLLIGSHIYGKLLKTTVTPEGETIILDQININFVVDAGNENLFFISPLTIYHVIDHNSPFFHMAAETLLQQDFELVVFLDGTVESTSATCQVRTSYVPEEVLWGYRFAPIVSKTKEGKYRVDFHNFSKTVEVETPHCAMCLYNEKDVRARMKRGYDNPNFILSEVNETDDTKM

SEQ ID NO: 9256 - protein, 1079 aa, Homo sapiens
MEDEAVLDRGASFLKHVCDEEEVEGHHTIYIGVHVPKSYRRRRRHKRKTGHKEKKEKERISENYSDKSDIENADESSSSILKPLISPAAERIRFILGEEDDSPAPPQLFTELDELLAVDGQEMEWKETARWIKFEEKVEQGGERWSKPHVATLSLHSLFELRTCMEKGSIMLDREASSLPQLVEMIVDHQIETGLLKPELKDKVTYTLLRKHRHQTKKSNLRSLADIGKTVSSASRMFTNPDNGSPAMTHRNLTSSSLNDISDKPEKDQLKNKFMKKLPRDAEASNVLVGEVDFLDTPFIAFVRLQQAVMLGALTEVPVPTRFLFILLGPKGKAKSYHEIGRAIATLMSDEVFHDIAYKAKDRHDLIAGIDEFLDEVIVLPPGEWDPAIRIEPPKSLPSSDKRKNMYSGGENVQMNGDTPHDGGHGGGGHGDCEELQRTGRFCGGLIKDIKRKAPFFASDFYDALNIQALSAILFIYLATVTNAITFGGLLGDATDNMQGVLESFLGTAVSGAIFCLFAGQPLTILSSTGPVLVFERLLFNFSKDNNFDYLEFRLWIGLWSAFLCLILVATDASFLVQYFTRFTEEGFSSLISFIFIYDAFKKMIKLADYYPINSNFKVGYNTLFSCTCVPPDPANISISNDTTLAPEYLPTMSSTDMYHNTTFDWAFLSKKECSKYGGNLVGNNCNFVPDITLMSFILFLGTYTSSMALKKFKTSPYFPTTARKLISDFAIILSILIFCVIDALVGVDTPKLIVPSEFKPTSPNRGWFVPPFGENPWWVCLAAAIPALLVTILIFMDQQITAVIVNRKEHKLKKGAGYHLDLFWVAILMVICSLMALPWYVAATVISIAHIDSLKMETETSAPGEQPKFLGVREQRVTGTLVFILTGLSVFMAPILKFIPMPVLYGVFLYMGVASLNGVQFMDRLKLLLMPLKHQPDFIYLRHVPLRRVHLFTFLQVLCLALLWILKSTVAAIIFPVMILALVAVRKGMDYLFSQHDLSFLDDVIPEKDKKKKEDEKKKKKKKGSLDSDNDDSDCPYSEKVPSIKIPMDIMEQQPFLSDSKPSDRERSPTFLERHTSC

SEQ ID NO: 9257 - protein, 995 aa, Homo sapiens
MEDEAVLDRGASFLKHVCDEEEVEGHHTIYIGVHVPKSYRRRRRHKRKTGHKEKKEKERISENYSDKSDIENADESSSSILKPLISPAAERIRFILGEEDDSPAPPQLFTELDELLAVDGQEMEWKETARWIKFEEKVEQGGERWSKPHVATLSLHSLFELRTCMEKGSIMLDREASSLPQLVEMIVDHQIETGLLKPELKDKVTYTLLRKHRHQTKKSNLRSLADIGKTVSSASRMFTNPDNGSPAMTHRNLTSSSLNDISDKPEKDQLKNKFMKKLPRDAEASNVLVGEVDFLDTPFIAFVRLQQAVMLGALTEVPVPTRFLFILLGPKGKAKSYHEIGRAIATLMSDEVFHDIAYKAKDRHDLIAGIDEFLDEVIVLPPGEWDPAIRIEPPKSLPSSDKRKNMYSGGENVQMNGDTPHDGGHGGGGHGDCEELQRTGRFCGGLIKDIKRKAPFFASDFYDALNIQALSAILFIYLATVTNAITFGGLLGDATDNMQGVLESFLGTAVSGAIFCLFAGQPLTILSSTGPVLVFERLLFNFSKDNNFDYLEFRLWIGLWSAFLCLILVATDASFLVQYFTRFTEEGFSSLISFIFIYDAFKKMIKLADYYPINSNFKVGYNTLFSCTCVPPDPANISISNDTTLAPEYLPTMSSTDMYHNTTFDWAFLSKKECSKYGGNLVGNNCNFVPDITLMSFILFLGTYTSSMALKKFKTSPYFPTTARKLISDFAIILSILIFCVIDALVGVDTPKLIVPSEFKPTSPNRGWFVPPFGENPWWVCLAAAIPALLVTILIFMDQQITAVIVNRKEHKLKFIPMPVLYGVFLYMGVASLNGVQFMDRLKLLLMPLKHQPDFIYLRHVPLRRVHLFTFLQVLCLALLWILKSTVAAIIFPVMILALVAVRKGMDYLFSQHDLSFLDDVIPEKDKKKKEDEKKKKKKKGSLDSDNDDSDCPYSEKVPSIKIPMDIMEQQPFLSDSKPSDRERSPTFLERHTSC

SEQ ID NO: 9258 - protein, 1079 aa, Homo sapiens [sequence omitted]

SEQ ID NO: 9259 - protein, 670 aa, Homo sapiens
  VARIANT 2, 18: Xaa = Any Amino Acid
EXVEGHHTIYIGVHVPKXYRRRRRHKRKTGHKEKKEKERISENYSDKSDIENADESSSSILKPLISPAAERIRFILGEEDDSPAPPQLFTELDELLAVDGQEMEWKETARWIKFEEKVEQGGERWSKPHVATLSLHSLFELRTCMEKGSIMLDREASSLPQLVEMIVDHQIETGLLKPELKDKVTYTLLRKHRHQTKKSNLRSLADIGKTVSSASRMFTNPDNGSPAMTHRNLTSSSLNDISDKPEKDQLKNKFMKKLPRDAEASNVLVGEVDFLDTPFIAFVRLQQAVMLGALTEVPVPTRFLFILLGPKGKAKSYHEIGRAIATLMSDEVFHDIAYKAKDRHDLIAGIDEFLDEVIVLPPGEWDPAIRIEPPKSLPSSDKRKNMYSGGENVQMNGDTPHDGGHGGGGHGDCEELQRTGRFCGGLIKDIKRKAPFFASDFYDALNIQALSAILFIYLATVTNAITFGGLLGDATDNMQGVLESFLGTAVSGAIFCLFAGQPLTILSSTGPVLVFERLLFNFSKDNNFDYLEFRLWIGLWSAFLCLILVATDASFLVQYFTRFTEEGFSSLISFIFIYDAFKKMIKLADYYPINSNFKVGYNTLFSCTCVPPDPGEGITLCVYARFVFGGRCRLHACKFSTCCHGPQELVLFFSLKNSATEFDVSLPEVF

SEQ ID NO: 9260 - protein, 646 aa, Homo sapiens
MSTENVEGKPSNLGERGRARSSTFLRVVQPMFNHSIFTSAVSPAAERIRFILGEEDDSPAPPQLFTELDELLAVDGQEMEWKETARWIKFEEKVEQGGERWSKPHVATLSLHSLFELRTCMEKGSIMLDREASSLPQLVEMIVDHQIETGLLKPELKDKVTYTLLRKHRHQTKKSNLRSLADIGKTVSSASRMFTNPDNGSPAMTHRNLTSSSLNDISDKPEKDQLKNKFMKKLPRDAEASNVLVGEVDFLDTPFIAFVRLQQAVMLGALTEVPVPTRFLFILLGPKGKAKSYHEIGRAIATLMSDEVFHDIAYKAKDRHDLIAGIDEFLDEVIVLPPGEWDPAIRIEPPKSLPSSDKRKNMYSGGENVQMNGDTPHDGGHGGGGHGDCEELQRTGRFCGGLIKDIKRKAPFFASDFYDALNIQALSAILFIYLATVTNAITFGGLLGDATDNMQGVLESFLGTAVSGAIFCLFAGQPLTILSSTGPVLVFERLLFNFSKDNNFDYLEFRLWIGLWSAFLCLILVATDASFLVQYFTRFTEEGFSSLISFIFIYDAFKKMIKLADYYPINSNFKVGYNTLFSCTCVPPDPGEGITLCVYARFVFGGRCRLHACKFSTCCHGPQELVLFFSLKNSATEFDVSLPEVF

SEQ ID NO: 9261 - protein, 806 aa, Homo sapiens
MGAPACALALCVAVAIVAGASSESLGTEQRVVGRAAEVPGPEPGQQEQLVFGSGDAVELSCPPPGGGPMGPTVWVKDGTGLVPSERVLVGPQRLQVLNASHEDSGAYSCRQRLTQRVLCHFSVRVTDAPSSGDDEDGEDEAEDTGVDTGAPYWTRPERMDKKLLAVPAANTVRFRCPAAGNPTPSISWLKNGREFRGEHRIGGIKLRHQQWSLVMESVVPSDRGNYTCVVENKFGSIRQTYTLDVLERSPHRPILQAGLPANQTAVLGSDVEFHCKVYSDAQPHIQWLKHVEVNGSKVGPDGTPYVTVLKTAGANTTDKELEVLSLHNVTFEDAGEYTCLAGNSIGFSHHSAWLVVLPAEEELVEADEAGSVYAGILSYGVGFFLFILVVAAVTLCRLRSPPKKGLGSPTVHKISRFPLKRQVSLESNASMSSNTPLVRIARLSSGEGPTLANVSELELPADPKWELSRARLTLGKPLGEGCFGQVVMAEAIGIDKDRAAKPVTVAVKMLKDDATDKDLSDLVSEMEMMKMIGKHKNIINLLGACTQGGPLYVLVEYAAKGNLREFLRARRPPGLDYSFDTCKPPEEQLTFKDLVSCAYQVARGMEYLASQKCIHRDLAARNVLVTEDNVMKIADFGLARDVHNLDYYKKTTNGRLPVKWMAPEALFDRVYTHQSDVWSFGVLLWEIFTLGGSPYPGIPVEELFKLLKEGHRMDKPANCTHDLYMIMRECWHAAPSQRPTFKQLVEDLDRVLTVTSTDEYLDLSAPFEQYSPGGQDTPSSSSSGDDSVFAHDLLPPAPPSSGGSRT

SEQ ID NO: 9262 - protein, 694 aa, Homo sapiens
MGAPACALALCVAVAIVAGASSESLGTEQRVVGRAAEVPGPEPGQQEQLVFGSGDAVELSCPPPGGGPMGPTVWVKDGTGLVPSERVLVGPQRLQVLNASHEDSGAYSCRQRLTQRVLCHFSVRVTDAPSSGDDEDGEDEAEDTGVDTGAPYWTRPERMDKKLLAVPAANTVRFRCPAAGNPTPSISWLKNGREFRGEHRIGGIKLRHQQWSLVMESVVPSDRGNYTCVVENKFGSIRQTYTLDVLERSPHRPILQAGLPANQTAVLGSDVEFHCKVYSDAQPHIQWLKHVEVNGSKVGPDGTPYVTVLKVSLESNASMSSNTPLVRIARLSSGEGPTLANVSELELPADPKWELSRARLTLGKPLGEGCFGQVVMAEAIGIDKDRAAKPVTVAVKMLKDDATDKDLSDLVSEMEMMKMIGKHKNIINLLGACTQGGPLYVLVEYAAKGNLREFLRARRPPGLDYSFDTCKPPEEQLTFKDLVSCAYQVARGMEYLASQKCIHRDLAARNVLVTEDNVMKIADFGLARDVHNLDYYKKTTNGRLPVKWMAPEALFDRVYTHQSDVWSFGVLLWEIFTLGGSPYPGIPVEELFKLLKEGHRMDKPANCTHDLYMIMRECWHAAPSQRPTFKQLVEDLDRVLTVTSTDEYLDLSAPFEQYSPGGQDTPSSSSSGDDSVFAHDLLPPAPPSSGGSRT

SEQ ID NO: 9263 - protein, 808 aa, Homo sapiens
MGAPACALALCVAVAIVAGASSESLGTEQRVVGRAAEVPGPEPGQQEQLVFGSGDAVELSCPPPGGGPMGPTVWVKDGTGLVPSERVLVGPQRLQVLNASHEDSGAYSCRQRLTQRVLCHFSVRVTDAPSSGDDEDGEDEAEDTGVDTGAPYWTRPERMDKKLLAVPAANTVRFRCPAAGNPTPSISWLKNGREFRGEHRIGGIKLRHQQWSLVMESVVPSDRGNYTCVVENKFGSIRQTYTLDVLERSPHRPILQAGLPANQTAVLGSDVEFHCKVYSDAQPHIQWLKHVEVNGSKVGPDGTPYVTVLKSWISESVEADVRLRLANVSERDGGEYLCRATNFIGVAEKAFWLSVHGPRAAEEELVEADEAGSVYAGILSYGVGFFLFILVVAAVTLCRLRSPPKKGLGSPTVHKISRFPLKRQVSLESNASMSSNTPLVRIARLSSGEGPTLANVSELELPADPKWELSRARLTLGKPLGEGCFGQVVMAEAIGIDKDRAAKPVTVAVKMLKDDATDKDLSDLVSEMEMMKMIGKHKNIINLLGACTQGGPLYVLVEYAAKGNLREFLRARRPPGLDYSFDTCKPPEEQLTFKDLVSCAYQVARGMEYLASQKCIHRDLAARNVLVTEDNVMKIADFGLARDVHNLDYYKKTTNGRLPVKWMAPEALFDRVYTHQSDVWSFGVLLWEIFTLGGSPYPGIPVEELFKLLKEGHRMDKPANCTHDLYMIMRECWHAAPSQRPTFKQLVEDLDRVLTVTSTDEYLDLSAPFEQYSPGGQDTPSSSSSGDDSVFAHDLLPPAPPSSGGSRT

SEQ ID NO: 9264 - protein, 1536 aa, Homo sapiens
GWTSHLSNCGESNRPPKERSCFRVCDWHSDLFQWEVSDWHHCVLVPYARGEVKPRTAECVTAQHGLQHRMVRCIQKLNRTVVANEICEHFALQPPTEQACLIPCPRDCVVSEFLPWSNCSKGCGKKLQHRTRAVIAPPLFGGLQCPNLTESRACDAPISCPLGEEEYTFSLKVGPWSKCRLPHLKEINPSGRTVLDFNSDSNERVTFKHQSYKAHHHSKSWAIEIGYQTRQVSCTRSDGQNAMLSLCLQDSFPLTVQSCIMPKDCETSQWSSWSPCSKTCRSGSLLPGFRSRSRNVKHMAIGGGKECPELLEKEACIVEGELLQQCPRYSWRTSEWKECQVSLLLEQQDPHWHVTGPVCGGGIQTREVYCAQSVPAAAALRAKEVSRPVEKALCVGPAPLPSQLCNIPCSTDCIVSSWSAWGLCIHENCHEPQGKKGFRTRQRHVLMESTGPAGHCPHLVESVPCEDPMCYRWLASEGICFPDHGKCGLGHRILKAVCQNDRGEDVSGSLCPVPPPPERKSCEIPCRMDCVLSEWTEWSSCSQSCSNKNSDGKQTRSRTILALAGEGGKPCPPSQALQEHRLCNDHSCMQLHWETSPWGPCSEDTLVTALNATIGWNGEATCGVGIQTRRVFCVKSHVGQVMTKRCPDSTRPETVRPCFLPCKKDCIVTAFSEWTPCPRMCQAGNATVKQSRYRIIIQEAANGGQECPDTLYEERECEDVSLCPVYRWKPQKWSPCILVPESVWQGITGSSEACGKGLQTRAVSCISDDNRSAEMMECLKQTNGMPLLVQECTVPCREDCTFTAWSKFTPCSTNCEATKSRRRQLTGKSRKKEKCQDSDLYPLVETELCPCDEFISQPYGNWSDCILPEGRREPHRGLRVQADSKECGEGLRFRAVACSDKNGRPVDPSFCSSSGYIQEKCVIPCPFDCKLSDWSSWGSCSSSCGIGVRIRSKWLKEKPYNGGRPCPKLDLKNQAQVHEAVPCYSECNQYSWVVEHWSSCKINNELRSLRCGGGTQSRKIRCVNTADGEGGAVDSNLCNQDEIPPETQSCSLMCPNECVMSEWGLWSKCPQSCDPHTMQRRTRHLLRPSLNSRTCAEDSQVQPCLLNENCFQFQYNLTEWSTCQLSENAPCGQGVRTRLLSCVCSDGKPVSMDQCEQHNLEKPQRMSIPCLVECVVNCQLSGWTAWTECSQTCGHGGRMSRTRFIIMPTQGEGRPCPTELTQEKTCPVTPCYSWVLGNWSACKLEGGDCGEGVQIRSLSCMVHSGSISHAAGRVEDALCGEMPFQDSILKQLCSVPCPGDCHLTEWSEWSTCELTCIDGRSFETVGRQSRSRTFIIQSFENQDSCPQQVLETRPCTGGKCYHYTWKASLWNNNERTVWCQRSDGVNVTGGCSPQARPAAIRQCIPACRKPFSYCTQGGVCGCEKGYTEIMRSNGFLDYCMKVPGSEDKKADVKNLSGKNRPVNSKIHDIFKGWSLQPLDPDGRVKIWVYGVSGGAFLIMIFLIFTSYLVCKKPKPHQSTPPQQKPLTLAYDGDLDM

SEQ ID NO: 9265 - protein, 483 aa, Homo sapiens
MSVTKSTEGPQGAVAIKLDLMSPPESAKKLENKDSTFLDESPSESAGLKKTKGITVFQALIHLVKGNMGTGILGLPLAVKNAGILMGPLSLLVMGFIACHCMHILVKCAQRFCKRLNKPFMDYGDTVMHGLEANPNAWLQNHAHWGRHIVSFFLINTQLGFCCVYIVFLADNLKQVVEAVNSTTNNCYSNETVILTPTMDSRLYMLSFLPFLVLLVLIRNLRILTIFSMLANISMLVSLVIIIQYITQEIPDPSRLPLVASWKTYPLFFGTAIFSFESIGVVLPLENKMKNARHFPAILSLGMSIVTSLYIGMAALGYLRFGDDIKASISLNLPNCWLYQSVKLLYIAGILCTYALQFYVPAEIIIPFAISRVSTRWALPLDLSIRLVMVCLTCLLAILIPRLDLVIPLVGSVSGTALALIIPPLLEVTTFYSEGMSPLTIFKDALISILGFVGFVVGTYQALDELLKSEDSHPFSNSTTFVR

SEQ ID NO: 9266 - protein, 866 aa, Homo sapiens
MGSQTLQILRQGVWAALSGGWYYDPHQATFVNALHLYLWLFLLGLPFTLYMALPSTMIIVAVYCPVIAAVFIVLKMVNYRLHRALDAGEVVDRTANEFTDQRTKAEQGNCSTRRKDSNGPSDPGGGIEMSEFIREATPPVGCSSRNSYAGLDPSNQIGSGSSRLGTAATIKGDTDTAKTSDDISLSLGQSSSLCKEGSEEQDLAADRKLFRLVSNDSFISIQPSLSSCGQDLPRDFSDKVNLPSHNHHHHVDQSLSSACDTEVASLVPLHSHSYRKDHRPRGVPRTSSSAVAFPDTSLNDFPLYQQRRGLDPVSELESSKPLSGSKESLVENSGLSGEFQLAGDLKINTSQPPTKSGKSKPLKAEKSMDSLRSLSTRSSGSTESYCSGTDRDTNSTVSSYKSEQTSSTHIESILSEHEESPKAGTKSGRKKECCAGPEEKNSCASDKRTSSEKIAMEASTNSGVHEAKDPTPSDEMHNQRGLSTSASEEANKNPHANEFTSQGDRPPGNTAENKEEKSDKSAVSVDSKVRKDVGGKQKEGDVRPKSSSVIHRTASAHKSGRRRTGKKRASSFDSSRHRDYVCFRGVSGTKPHSAIFCHDEDSSDQSDLSRASSVQSAHQFSSDSSSSTTSHSCQSPEGRYSALKTKHTHKERGTDSEHTHKAHLVPEGTSKKRATRRTSSTNSAKTRARVLSLDSGTVACLNDSNRLMAPESIKPLTTSKSDLEAKEGEVLDELSLLGRASQLETVTRSRNSLPNQVAFPEGEEQDAVSGAAQASEEAVSFRRERSTFRRQAVRRRHNAGSNPTPPTLLIGSPLSLQDGQQGQQSTAQVKVQSRPPSQAAVLSASASLLVSSLLRCMRLVAVICHL

SEQ ID NO: 9267 - protein, 2269 aa, Homo sapiens
MGSQTLQILRQGVWAALSGGWYYDPHQATFVNALHLYLWLFLLGLPFTLYMALPSTMIIVAVYCPVIAAVFIVLKMVNYRLHRALDAGEVVDRTANEFTDQRTKAEQGNCSTRRKDSNGPSDPGGGIEMSEFIREATPPVGCSSRNSYAGLDPSNQIGSGSSRLGTAATIKGDTDTAKTSDDISLSLGQSSSLCKEGSEEQDLAADRKLFRLVSNDSFISIQPSLSSCGQDLPRDFSDKVNLPSHNHHHHVDQSLSSACDTEVASLVPLHSHSYRKDHRPRGVPRTSSSAVAFPDTSLNDFPLYQQRRGLDPVSELESSKPLSGSKESLVENSGLSGEFQLAGDLKINTSQPPTKSGKSKPLKAEKSMDSLRSLSTRSSGSTESYCSGTDRDTNSTVSSYKSEQTSSTHIESILSEHEESPKAGTKSGRKKECCAGPEEKNSCASDKRTSSEKIAMEASTNSGVHEAKDPTPSDEMHNQRGLSTSASEEANKNPHANEFTSQGDRPPGNTAENKEEKSDKSAVSVDSKVRKDVGGKQKEGDVRPKSSSVIHRTASAHKSGRRRTGKKRASSFDSSRHRDYVCFRGVSGTKPHSAIFCHDEDSSDQSDLSRASSVQSAHQFSSDSSSSTTSHSCQSPEGRYSALKTKHTHKERGTDSEHTHKAHLVPEGTSKKRATRRTSSTNSAKTRARVLSLDSGTVACLNDSNRLMAPESIKPLTTSKSDLEAKEGEVLDELSLLGRASQLETVTRSRNSLPNQVAFPEGEEQDAVSGAAQASEEAVSFRRERSTFRRQAVRRRHNAGSNPTPPTLLIGSPLSLQDGQQGQQSTAQVKVQSRPPSQAAVLSASASLLVRNGSVHLEASHDNASAVGGSSLHDELGKFSSTLYETGGCDMSLVNFEPAARRASNICDTDSHVSSSTSVRFYPHDVLSLPQIRLNRLLTIDTDLLEQQDIDLSPDLAATYGPTEEAAQKVKHYYRFWILPQLWIGINFDRLTLLALFDRNREILENVLAVILAILVAFLGSILLIQGFFRDIWVFQFCLVIASCQYSLLKSVQPDSSSPRHGHNRIIAYSRPVYFCICCGLIWLLDYGSRNLTATKFKLYGITFTNPLVFISARDLVIVFTLCFPIVFFIGLLPQVNTFVMYLCEQLDIHIFGGNATTSLLAALYSFICSIVAVALLYGLCYGALKDSWDGQHIPVLFSIFCGLLVAVSYHLSRQSSDPSVLFSLVQSKIFPKTEEKNPEDPLSEVKDPLPEKLRNSVSERLQSDLVVCIVIGVLYFAIHVSTVFTVLQPALKYVLYTLVGFVGFVTHYVLPQVRKQLPWHCFSHPLLKTLEYNQYEVRNAATMMWFEKLHVWLLFVEKNIIYPLIVLNELSSSAETIASPKKLNTELGALMITVAGLKLLRSSFSSPTYQYVTVIFTVLFFKFDYEAFSETMLLDLFFMSILFNKLWELLYKLQFVYTYIAPWQITWGSAFHAFAQPFAVPHSAMLFIQAAVSAFFSTPLNPFLGSAIFITSYVRPVKFWERDYNTKRVDHSNTRLASQLDRNPGTYCQQREVEAITEGVEEDEGFCCCEPGHIPHMLSFNAAFSQRWLAWEVIVTKYILEGYSITDNSAASMLQVFDLRKVLTTYYVKGIIYYVTTSSKLEEWLANETMQEGLRLCADRNYVDVDPTFNPNIDEDYDHRLAGISRESFCVIYLNWIEYCSSRRAKPVDVDKDSSLVTLCYGLCVLGRRALGTASHHMSSNLESFLYGLHALFKGDFRISSIRDEWIFADMELLRKVVVPGIRMSIKLHQDHFTSPDEYDDPTVLYEAIVSHEKNLVIAHEGDPAWRSAVLANSPSLLALRHVMDDGTNEYKIIMLNRRYLSFRVIKVNKECVRGLWAGQQQELVFLRNRNPERGSIQNAKQALRNMINSSCDQPIGYPIFVSPLTTSYSDSHEQLKDILGGPISLGNIRNFIVSTWHRLRKGCGAGCNSGGNIEDSDTGGGTSCTGNNATTANNPHSNVTQGSIGNPGQGSGTGLHPPVTSYPPTLGTSHSSHSVQSGLVRQSPARASVASQSSYCYSSRHSSLRMSTTGFVPCRRSSTSQISLRNLPSSIQSRLSMVNQMEPSGQSGLACVQHGLPSSSSSSQSIPACKHHTLVGFLATEGGQSSATDAQPGNTLSPANNSHSKKAEVIYRVQIVDPSQILEGINLSKRKELQWPDEGIRLKAGRNSWKDWSPQEGMEGHVIHRWVPCSRDPGTRSHIDKAVLLVQIDDKYVTVIETGVLELGAEV

SEQ ID NO: 9268 - protein, 2341 aa, Homo sapiens
MGSQTLQILRQGVWAALSGGWYYDPHQATFVNALHLYLWLFLLGLPFTLYMALPSTMIIVAVYCPVIAAVFIVLKMVNYRLHRALDAGEVVDRTANEFTDQRTKAEQGNCSTRRKDSNGPSDPGGGIEMSEFIREATPPVGCSSRNSYAGLDPSNQIGSGSSRLGTAATIKGDTDTAKTSDDISLSLGQSSSLCKEGSEEQDLAADRKLFRLVSNDSFISIQPSLSSCGQDLPRDFSDKVNLPSHNHHHHVDQSLSSACDTEVASLVPLHSHSYRKDHRPRGVPRTSSSAVAFPDTSLNDFPLYQQRRGLDPVSELESSKPLSGSKESLVENSGLSGEFQLAGDLKINTSQPPTKSGKSKPLKAEKSMDSLRSLSTRSSGSTESYCSGTDRDTNSTVSSYKSEQTSSTHIESILSEHEESPKAGTKSGRKKECCAGPEEKNSCASDKRTSSEKIAMEASTNSGVHEAKDPTPSDEMHNQRGLSTSASEEANKNPHANEFTSQGDRPPGNTAENKEEKSDKSAVSVDSKVRKDVGGKQKEGDVRPKSSSVIHRTASAHKSGRRRTGKKRASSFDSSRHRDYVCFRGVSGTKPHSAIFCHDEDSSDQSDLSRASSVQSAHQFSSDSSSSTTSHSCQSPEGRYSALKTKHTHKERGTDSEHTHKAHLVPEGTSKKRATRRTSSTNSAKTRARVLSLDSGTVACLNDSNRLMAPESIKPLTTSKSDLEAKEGEVLDELSLLGRASQLETVTRSRNSLPNQVAFPEGEEQDAVSGAAQASEEAVSFRRERSTFRRQAVRRRHNAGSNPTPPTLLIGSPLSLQDGQQGQQSTAQVKVQSRPPSQAAVLSASASLLVRNGSVHLEASHDNASAVGGSSLHDELGKFSSTLYETGGCDMSLVNFEPAARRASNICDTDSHVSSSTSVRFYPHDVLSLPQIRLNRLLTIDTDLLEQQDIDLSPDLAATYGPTEEAAQKVKHYYRFWILPQLWIGINFDRLTLLALFDRNREILENVLAVILAILVAFLGSILLIQGFFRDIWVFQFCLVIASCQYSLLKSVQPDSSSPRHGHNRIIAYSRPVYFCICCGLIWLLDYGSRNLTATKFKLYGITFTNPLVFISARDLVIVFTLCFPIVFFIGLLPQVNTFVMYLCEQLDIHIFGGNATTSLLAALYSFICSIVAVALLYGLCYGALKDSWDGQHIPVLFSIFCGLLVAVSYHLSRQSSDPSVLFSLVQSKIFPKTEEKNPEDPLSEVKDPLPEKLRNSVSERLQSDLVVCIVIGVLYFAIHVSTVFTVLQPALKYVLYTLVGFVGFVTHYVLPQVRKQLPWHCFSHPLLKTLEYNQYEVRNAATMMWFEKLHVWLLFVEKNIIYPLIVLNELSSSAETIASPKKLNTELGALMITVAGLKLLRSSFSSPTYQYVTVIFTVLFFKFDYEAFSETMLLDLFFMSILFNKLWELLYKLQFVYTYIAPWQITWGSAFHAFAQPFAVPHSAMLFIQAAVSAFFSTPLNPFLGSAIFITSYVRPVKFWERDYNTKRVDHSNTRLASQLDRNPGSDDNNLNSIFYEHLTRSLQHSLCGDLLLGRWGNYSTGDCFILASDYLNALVHLIEIGNGLVTFQLRGLEFRGTYCQQREVEAITEGVEEDEGFCCCEPGHIPHMLSFNAAFSQRWLAWEVIVTKYILEGYSITDNSAASMLQVFDLRKVLTTYYVKGIIYYVTTSSKLEEWLANETMQEGLRLCADRNYVDVDPTFNPNIDEDYDHRLAGISRESFCVIYLNWIEYCSSRRAKPVDVDKDSSLVTLCYGLCVLGRRALGTASHHMSSNLESFLYGLHALFKGDFRISSIRDEWIFADMELLRKVVVPGIRMSIKLHQDHFTSPDEYDDPTVLYEAIVSHEKNLVIAHEGDPAWRSAVLANSPSLLALRHVMDDGTNEYKIIMLNRRYLSFRVIKVNKECVRGLWAGQQQELVFLRNRNPERGSIQNAKQALRNMINSSCDQPIGYPIFVSPLTTSYSDSHEQLKDILGGPISLGNIRNFIVSTWHRLRKGCGAGCNSGGNIEDSDTGGGTSCTGNNATTANNPHSNVTQGSIGNPGQGSGTGLHPPVTSYPPTLGTSHSSHSVQSGLVRQSPARASVASQSSYCYSSRHSSLRMSTTGFVPCRRSSTSQISLRNLPSSIQSRLSMVNQMEPSGQSGLACVQHGLPSSSSSSQSIPACKHHTLVGFLATEGGQSSATDAQPGNTLSPANNSHSKKAEVIYRVQIVDPSQILEGINLSKRKELQWPDEGIRLKAGRNSWKDWSPQEGMEGHVIHRWVPCSRDPGTRSHIDKAVLLVQIDDKYVTVIETGVLELGAEV

SEQ ID NO: 9269 - protein, 474 aa, Homo sapiens
MWRVRKRGYFGIWSFPLIIAAVCAQSVNDPSNMSLVKETVDRLLKGYDIRLRPDFGGPPVAVGMNIDIASIDMVSEVNMDYTLTMYFQQAWRDKRLSYNVIPLNLTLDNRVADQLWVPDTYFLNDKKSFVHGVTVKNRMIRLHPDGTVLYGLRITTTAACMMDLRRYPLDEQNCTLEIESYGYTTDDIEFYWRGDDNAVTGVTKIELPQFSIVDYKLITKKVVFSTGSYPRLSLSFKLKRNIGYFILQTYMPSILITILSWVSFWINYDASAARVALGITTVLTMTTINTHLRETLPKIPYVKAIDMYLMGCFVFVFMALLEYALVNYIFFGRGPQRQKKAAEKAASANNEKMRLDVNKMDPHENILLSTLEIKNEMATSEAVMGLGDPRSTMLAYDASSIQYRKAGLPRHSFGRNALERHVAQKKSRLRRRASQLKITIPDLTDVNAIDRWSRIFFPVVFSFFNIVYWLYYVN

SEQ ID NO: 9270 - protein, 512 aa, Homo sapiens
MWRVRKRGYFGIWSFPLIIAAVCAQSVNDPSNMSLVKETVDRLLKGYDIRLRPDFGGPPVAVGMNIDIASIDMVSEVNMDYTLTMYFQQAWRDKRLSYNVIPLNLTLDNRVADQLWVPDTYFLNDKKSFVHGVTVKNRMIRLHPDGTVLYGLRITTTAACMMDLRRYPLDEQNCTLEIESYGYTTDDIEFYWRGDDNAVTGVTKIELPQFSIVDYKLITKKVVFSTGSYPRLSLSFKLKRNIGYFILQTYMPSILITILSWVSFWINYDASAARVALGITTVLTMTTINTHLRETLPKIPYVKAIDMYLMGCFVFVFMALLEYALVNYIFFGRGPQRQKKAAEKAASANNEKMRLDVNKIFYKDIKQNGTQYRSLWDPTGNLSPTRRTTNYDFSLYTMDPHENILLSTLEIKNEMATSEAVMGLGDPRSTMLAYDASSIQYRKAGLPRHSFGRNALERHVAQKKSRLRRRASQLKITIPDLTDVNAIDRWSRIFFPVVFSFFNIVYWLYYVN

SEQ ID NO: 9271 - protein, 210 aa, Homo sapiens
MEDSPLPDLRDIELKLGRKVPESLVRSLRGEEPVPRERDRDPCGGSGGGGGGGGGGGGCSSGSSYCSFPPSLSSSSSSSPTSGSPRGSHSSALERLETKLHLLRQEMVNLRATDVRLMRQLLVINESIESIKWMIEEKATITSRGSSLSSSLCSLLESQSTSYVAATTAYTMAVMGWMAFPWEVIWTRWRMMSQAIRPLQTWTNSVTAPS

SEQ ID NO: 9272 - protein, 231 aa, Homo sapiens [sequence omitted]

SEQ ID NO: 9273 - protein, 206 aa, Homo sapiens
MEDSPLPDLRDIELKLGRKVPESLVRSLRGEEPVPRERDRDPCGGSGGGGGGGGGCSSSSSYCSFPPSLSSSSSSSPTSGSPRGSHSSALERLETKLHLLRQEMVNLRATDVRLMRQLLVINESIESIKWMIEEKATITSRGSSLSGSLCSLLESQSTYVAATTAYTMAVMGWMAFPWEVIWTRWRMMSQAIRPLQTWTNSVTAPS

SEQ ID NO: 9274 - protein, 334 aa, Homo sapiens
MEPGPTAAQRRCSLPPWLPLGLLLWSGLALGALPFGSSPHRVFHDLLSEQQLLEVEDLSLSLLQGGGLGPLSLPPDLPDLDPECRELLLDFANSSAELTGCLVRSARPVRLCQTCYPLFQQVVSKMDNISRAAGNTSESQSCARSLLMADRMQIVVILSEFFNTTWQEANCANCLTNNSEELSNSTVYFLNLFNHTLTCFEHNLQGNAHSLLQTKNYSEVCKNCREAYKTLSSLYSEMQKMNELENKAEPGTHLCIDVEDAMNITRKLWSRTFNCSVPCSDTVPVIAVSVFILFLPVVFYLSSFLHSEQKKRKLILPKRLKSSTSFANIQENSN

SEQ ID NO: 9275 - protein, 334 aa, Homo sapiens [sequence omitted]

SEQ ID NO: 9276 - protein, 245 aa, Homo sapiens
MTLVILLVELGGSQARFPLFWRNFPITFACYAALLCLSASIIYPTTYLQFLSHGRSRDHAIAAIVFSGIACVAYATEVTWTRARPGEITDYMASELGLLKVLETFVACLIFVFINSPYVYHNRPALEWCVAVYALCFVLAALTVLLSLGHCTNMLPIRFPSFLLGLALLSVLLYATALVLWPLYQFNEKYGVQPWQTRDVSCSDRNPYLVCIWDRRLAVTNLTAVNLLAYVGDLVYSAHLVFVKV

SEQ ID NO: 9277 - protein, 969 aa, Homo sapiens
MVFSVRQCGHVGRTEEVLLTFKIFLVIICLHVVLVTSLEEDTDNSSLSPPPAKLSVVSFAPSSNGTPGKILKKFKPRFNVTLSLLPSNETEKTKITIVKTFNASGVKPQRNICNLSSICNDSAFFRGEIMFQYDKESTVPQNQHITNGTLTGVLSLSELKRSELNKTLQTLSETYFIMCATAEAQSTLNCTFTIKLNNTMNACAVIAALERVKIRPMEHCCCSVRIPCPSSPEELEKLQCDLQDPIVCLADHPRGPPFSSSQSIPVVPRATVLSQVPKATSFAEPPDYSPVTHNVPSPIGEIQPLSPQPSAPIASSPAIDMPPQSETISSPMPQTHVSGTPPPVKASFSSPTVSAPANVNTTSAPPVQTDIVNTSSISDLENQVLQMEKALSLGSLEPNLAGEMINQVSRLLHSPPDMLAPLAQRLLKVVDDIGLQLNFSNTTISLTSPSLALAVIRVNASSFNTTTFVAQDPANLQVSLETQAPENSIGTITLPSSLMNNLPAHDMELASRVQFNFFETPALFQDPSLENLSLISYVISSSVANLTVRNLTRNVTVTLKHINPSQDELTVRCVFWDLGRNGGRGGWSDNGCSVKDRRLNETICTCSHLTSFGVLLDLSRTSVLPAQMMALTFITYIGCGLSSIFLSVTLVTYIAFEKIRRDYPSKILIQLCAALLLLNLVFLLDSWIALYKMQGLCISVAVFLHYFLLVSFTWMGLEAFHMYLALVKVFNTYIRKYILKFCIVGWGVPAVVVTIILTISPDNYGLGSYGKFPNGSPDDFCWINNNAVFYITVVGYFCVIFLLNVSMFIVVLVQLCRIKKKKQLGAQRKTSIQDLRSIAGLTFLLGITWGFAFFAWGPVNVTFMYLFAIFNTLQGFFIFIFYCVAKENVRKQWRRYLCCGKLRLAENSGNASTERNGVSFSVQNGDVCLHDFTGKQHMFNEKEDSCNGKGRMALRRTSKRGSLHFIEQM

SEQ ID NO: 9278 - protein, 3501 aa, Homo sapiens
MGIKSGFTFWNLVFLLTVSCVKGFIYTCGGTLKGLNGTIESPGFPYGYPNGANCTWVIIAEERNRIQIVFQSFALEEEYDYLSLYDGHPHPTNFRTRLTGFHLPPPVTSTKSVFSLRLTSDFAVSAHGFKVYYEELQSSSCGNPGVPPKGVLYGTRFDVGDKIRYSCVTGYILDGHPQLTCIANSVNTASWDFPVPICRAEDACGGTMRGSSGIISSPSFPNEYHNNADCTWTIVAEPGDTISLIFTDFQMEEKYDYLEIEGSEPPTIWLSGMNIPPPIISNKNWLRLHFVTDSNHRYRGFSAPYQVKKAIDFKSRGFKLFPGKDNSNKFSILNEGGIKTASNLCPDPGEPENGKRIGSDFSLGSTVQFSCDEDYVLQGAKSITCQRIAEVFAAWSDHRPVCKVKTCGSNLQGPSGTFTSPNFPFQYDSNAQCVWVITAVNTNKVIQINFEEFDLEIGYDTLTIGDGGEVGDPRTVLQVLTGSFVPDLIVSMSSQMWLHLQTDESVGSVGFKVNYKEIEKESCGDPGTPLYGIREGDGFSNRDVLRFECQFGFELIGEKSIVCQENNQWSANIPICIFPCLSNFTAPMGTVLSPDYPEGYGNNLNCIWTIISDPGSRIHLSFNDFDLESQFDFLAVKDGDSPESPILGTFTGAEVPSHLTSNSHILRLEFQADHSMSGRGFNITYNTFGHNECPDPGIPINARRFGDNFQLGSSISVICEEGFIKTQGTETITCILMDGKVMWSGLIPKCGAPCGGHFSAPSGVILSPGWPGYYKDSLNCEWVIEAEPGHSIKITFERFQTELNYDVLEVHDGPNLLSPLLGSYNGTQVPQFLFSSSNFIYLLFTTDNSRSNNGFKIHYESVTVNTYSCLDPGIPVHGRRYGHDFSIGSTVSFSCDSGYRLSHEEPLLCEKNHWWSHPLPTCDALCGGDVRGPSGTILSPGYPEFYPNSLNCTWTVDVTHGKGVQFNFHTFHLEDHHDYLLITENGSFTQPLARLTGSDLPPTINAGLYGNFRAQLRFISDFSISYEGFNITFSEYNLEPCEDPGIPQYGSRIGFNFGIGDTLTFSCSSGYRLEGTSEIICLGGGRRVWSAPLPRCVAECGASATNNEGILLSPNYPLNYENNHECIYSIQVQAGKGINISARTFHLAQGDVLKIYDGKDKTTHLLGAFTGASMRGLTLSSTSNQLWLEFNSDTEGTDEGFQLVYTSFELSHCEDPGIPQFGYKISDQGHFAGSTIIYGCNPGYTLHGSSLLKCMTGERRAWDYPLPSCIAECGGRFKGESSGRILSPGYPFPYDNNLRCMWMIEVDPGNIVSLQFLAFDTEASHDILRVWDGPPENDMLLKEISGSLIPEGIHSTLNIVTIQFDTDFYISKSGFAIQFSSSVATACRDPGVPMNGTRNGDGREPGDTVVFQCDPGYELQGEERITCIQVENRYFWQPSPPVCIAPCGGNLTGSSGFILSPNFPHPYPHSRDCDWTITVNADYVISLAFISFSIEPNYDFLYIYDGPDSNSPLIGSFQDSKLPERIESSSNTMHLAFRSDGSVSYTGFHLEYKAKLRESCFDPGNIMNGTRLGMDYKLGSTVTYYCDAGYVLQGYSTLTCIMGDDGRPGWNRALPSCHAPCGSRSTGSEGTVLSPNYPKNYSVGHNCVYSIAVPKEFVVFGQFVFFQTSLHDVVEVYDGPTQQSSLLSSLSGSHSGESLPLSSGNQITIRFTSVGPITAKGFHFVYQAVPRTSSTQCSSVPEPRFGRRIGNEFAVGSSVLFDCNPGYILHGSIAIRCETVPNSLAQWNDSLPTCIVPCGGILTKRKGTILSPGYPEPYDNNLNCVWKITVPEGAGIQVQVVSFATEHNWDSLDFYDGGDNNAPRLGSYSGTTIPHLLNSTSNNLYLNFQSDISVSAAGFHLEYTAIGLDSCPEPQTPSSGIKIGDRYMVGDVVSFQCDQGYSLQGHSHITCMPGPVRRWNYPIPICLAQCGGAMSDFSGVILSPGFPGNYPSSLDCTWTINLPIGFGVHLQFVNFSTETIHDYLEVRSGSSETSTVIGRLSGPQIPSSLFSTTHETSLYFHSDYSQNKQGFHIVYQAYQLQSCPDPRPFRNGFVIGNDFTVGQTISFECFPGYTLIGNSALTCLHGVSRNWNHPLPRCEALCGGNITAMNGTIYSPGYPDEYPNFQDCFWLVRVPPGNGIYINFTVLQTEPIYDFITVWDGPDQNSPQIGQFSGNTALESVYSTSNQILIKFHSDFTTSGFFVLSYHAYQLRVCQPPPPVPNAEILTEDDEFEIGDIIRYQCLPGFTLVGNAILTCRLGERLQMDGAPPVCQVLCPANELRLDSTGVILSPGYPDSYPNLQMCAWSISVEKGYNITMFVEFFQTEKEFDVLQVYDGPNIQSPVLISLSGDYSSAFNITSNGHEVFLQWSADHGNNKKGFRIRYIAFYCSTPESPPHGYIISQTGGQLNSVVRWACDRGFRLVGKSSAVCRKSSYGYHAWDAPVPACQAISCGIPKAPTNGGILTTDYLVGTRVTYFCNDGYRLSSKELTTAVCQSDGTWSNHNKTPRCVVISCGELPTPPNGNKIGTQTSYGSTAIFTCDLGFMLVGSAVRECLSSGLWSESETRCLAGHCGIPELIVNGQVIGENYGYRDTVVYQCNPGFRLIGSSVRICQQDHNWSGQLPSCVPVSCGHPGSPIYGRTSGNGFNFNDVVTFSCNIGYLMQGPTKAQCQANRQWSHPPPMCKVVNCSDPGIPANSKRESKIEHGNFTYGTVVFYDCNPGYFLFGSSVLICQPNGQWDKPLPECIMIDCGHPGVPPNAVLSGEKYTFGSTVHYSCTGKRSLLGQSSRTCQLNGHWSGSQPHCSGDATGTCGDPGTPGHGSRQESNFRTKSTVRYACDTGYILHGSEERTCLANGSWTGRQPECKAVQCGNPGTTANGKVFRIDGTTFSSSVIYSCMEGYILSGPSVRQCTANGTWSGTLPNCTIISCGDPGIPANGLRYGDDYVVGQNVSYMCQPGYTMELNGSRIRTCTINGTWSGVMPTCRAVTCPTPPQISNGRLEGTNFDWGFSISYICSPGYELSFPAVLTCVGNGTWSGEVPQCLPKFCGDPGIPAQGKREGKSFIYQSEVSFSCNFPFILVGSSTRICQADGTWSGSSPHCIEPTQTSCENPGVPRHGSQNNTFGFQVGSVVQFHCKKGHLLQGSTTRTCLPDLTWSGIQPECIPHSCKQPETPAHANVVGMDLPSHGYTLIYTCQPGFFLAGGTEHRVCRSDNTWTGKVPICEAGSKILVKDPRPALGTPSPKLSVPDDVFAQNYIWKGSYNFKGRKQPMTLTVTSFNASTGRVNATLSNSNMELLLSGVYKSQEARLMLRIYLIKVPAHASVKKMKEENWAMDGFVSAEPDGATYVFQGFIQGKDYGQFGLQRLGLNMSEGSNSSNQPHGTNSSSVAIAILVPFFALIFAGFGFYLYKQRTAPKTQYTGCSVHENNNGQAAFENPMYDTNAKSVEGKAVRFDPNLNTVCTMV

SEQ ID NO: 9279 - protein, 3707 aa, Homo sapiens
MKGIRKGESRAKESKPWEPGKRRCAKCGRLDFILMKKMGIKSGFTFWNLVFLLTVSCVKGFIYTCGGTLKGLNGTIESPGFPYGYPNGANCTWVIIAEERNRIQIVFQSFALEEEYDYLSLYDGHPHPTNFRTRLTGFHLPPPVTSTKSVFSLRLTSDFAVSAHGFKVYYEELQSSSCGNPGVPPKGVLYGTRFDVGDKIRYSCVTGYILDGHPQLTCIANSVNTASWDFPVPICRAEDACGGTMRGSSGIISSPSFPNEYHNNADCTWTIVAEPGDTISLIFTDFQMEEKYDYLEIEGSEPPTIWLSGMNIPPPIISNKNWLRLHFVTDSNHRYRGFSAPYQGSSTLTHTTSTGELEEHNRTTTGAIAVASTPADVTVSSVTAVTIHRLSEEQRVQVTSLRNSGLDPNTSKDGLSPHPADTQSTRRRPRHAEQIERTKELAVVTHRVKKAIDFKSRGFKLFPGKDNSNKFSILNEGGIKTASNLCPDPGEPENGKRIGSDFSLGSTVQFSCDEDYVLQGAKSITCQRIAEVFAAWSDHRPVCKVKTCGSNLQGPSGTFTSPNFPFQYDSNAQCVWVITAVNTNKVIQINFEEFDLEIGYDTLTIGDGGEVGDPRTVLQVLTGSFVPDLIVSMSSQMWLHLQTDESVGSVGFKVNYKEIEKESCGDPGTPLYGIREGDGFSNRDVLRFECQFGFELIGEKSIVCQENNQWSANIPICIFPCLSNFTAPMGTVLSPDYPEGYGNNLNCIWTIISDPGSRIHLSFNDFDLESQFDFLAVKDGDSPESPILGTFTGAEVPSHLTSNSHILRLEFQADHSMSGRGFNITYNTFGHNECPDPGIPINARRFGDNFQLGSSISVICEEGFIKTQGTETITCILMDGKVMWSGLIPKCGAPCGGHFSAPSGVILSPGWPGYYKDSLNCEWVIEAEPGHSIKITFERFQTELNYDVLEVHDGPNLLSPLLGSYNGTQVPQFLFSSSNFIYLLFTTDNSRSNNGFKIHYESVTVNTYSCLDPGIPVHGRRYGHDFSIGSTVSFSCDSGYRLSHEEPLLCEKNHWWSHPLPTCDALCGGDVRGPSGTILSPGYPEFYPNSLNCTWTVDVTHGKGVQFNFHTFHLEDHHDYLLITENGSFTQPLARLTGSDLPPTINAGLYGNFRAQLRFISDFSISYEGFNITFSEYNLEPCEDPGIPQYGSRIGFNFGIGDTLTFSCSSGYRLEGTSEIICLGGGRRVWSAPLPRCVAECGASATNNEGILLSPNYPLNYENNHECIYSIQVQAGKGINISARTFHLAQGDVLKIYDGKDKTTHLLGAFTGASMRGLTLSSTSNQLWLEFNSDTEGTDEGFQLVYTSFELSHCEDPGIPQFGYKISDQGHFAGSTIIYGCNPGYTLHGSSLLKCMTGERRAWDYPLPSCIAECGGRFKGESSGRILSPGYPFPYDNNLRCMWMIEVDPGNIVSLQFLAFDTEASHDILRVWDGPPENDMLLKEISGSLIPEGIHSTLNIVTIQFDTDFYISKSGFAIQFSSSVATACRDPGVPMNGTRNGDGREPGDTVVFQCDPGYELQGEERITCIQVENRYFWQPSPPVCIAPCGGNLTGSSGFILSPNFPHPYPHSRDCDWTITVNADYVISLAFISFSIEPNYDFLYIYDGPDSNSPLIGSFQDSKLPERIESSSNTMHLAFRSDGSVSYTGFHLEYKAKLRESCFDPGNIMNGTRLGMDYKLGSTVTYYCDAGYVLQGYSTLTCIMGDDGRPGWNRALPSCHAPCGSRSTGSEGTVLSPNYPKNYSVGHNCVYSIAVPKEFVVFGQFVFFQTSLHDVVEVYDGPTQQSSLLSSLSGSHSGESLPLSSGNQITIRFTSVGPITAKGFHFVYQAVPRTSSTQCSSVPEPRFGRRIGNEFAVGSSVLFDCNPGYILHGSIAIRCETVPNSLAQWNDSLPTCIVPCGGILTKRKGTILSPGYPEPYDNNLNCVWKITVPEGAGIQVQVVSFATEHNWDSLDFYDGGDNNAPRLGSYSGTTIPHLLNSTSNNLYLNFQSDISVSAAGFHLEYTAIGLDSCPEPQTPSSGIKIGDRYMVGDVVSFQCDQGYSLQGHSHITCMPGPVRRWNYPIPICLAQCGGAMSDFSGVILSPGFPGNYPSSLDCTWTINLPIGFGVHLQFVNFSTETIHDYLEVRSGSSETSTVIGRLSGPQIPSSLFSTTHETSLYFHSDYSQNKQGFHIVYQAYQLQSCPDPRPFRNGFVIGNDFTVGQTISFECFPGYTLIGNSALTCLHGVSRNWNHPLPRCEALCGGNITAMNGTIYSPGYPDEYPNFQDCFWLVRVPPGNGIYINFTVLQTEPIYDFITVWDGPDQNSPQIGQFSGNTALESVYSTSNQILIKFHSDFTTSGFFVLSYHAYQLRVCQPPPPVPNAEILTEDDEFEIGDIIRYQCLPGFTLVGNAILTCRLGERLQMDGAPPVCQVLCPANELRLDSTGVILSPGYPDSYPNLQMCAWSISVEKGYNITMFVEFFQTEKEFDVLQVYDGPNIQSPVLISLSGDYSSAFNITSNGHEVFLQWSADHGNNKKGFRIRYIAFYCSTPESPPHGYIISQTGGQLNSVVRWACDRGFRLVGKSSAVCRKSSYGYHAWDAPVPACQAISCGIPKAPTNGGILTTDYLVGTRVTYFCNDGYRLSSKELTTAVCQSDGTWSNHNKTPRCVVVTCPSINSFILEHGRWRIVNGSHYEYKTKVVFSCDPGYHGLGPASIECLPNGTWSWRNERPYCQIISCGELPTPPNGNKIGTQTSYGSTAIFTCDLGFMLVGSAVRECLSSGLWSESETRCLAGHCGIPELIVNGQVIGENYGYRDTVVYQCNPGFRLIGSSVRICQQDHNWSGQLPSCVPVSCGHPGSPIYGRTSGNGFNFNDVVTFSCNIGYLMQGPTKAQCQANRQWSHPPPMCKVVNCSDPGIPANSKRESKIEHGNFTYGTVVFYDCNPGYFLFGSSVLICQPNGQWDKPLPECIMIDCGHPGVPPNAVLSGEKYTFGSTVHYSCTGKRSLLGQSSRTCQLNGHWSGSQPHCSGDATGTCGDPGTPGHGSRQESNFRTKSTVRYACDTGYILHGSEERTCLANGSWTGRQPECKAVQCGNPGTTANGKVFRIDGTTFSSSVIYSCMEGYILSGPSVRQCTANGTWSGTLPNCTIISCGDPGIPANGLRYGDDYVVGQNVSYMCQPGYTMELNGSRIRTCTINGTWSGVMPTCRAVTCPTPPQISNGRLEGTNFDWGFSISYICSPGYELSFPAVLTCVGNGTWSGEVPQCLPKFCGDPGIPAQGKREGKSFIYQSEVSFSCNFPFILVGSSTRICQADGTWSGSSPHCIEPTQTSCENPGVPRHGSQNNTFGFQVGSVVQFHCKKGHLLQGSTTRTCLPDLTWSGIQPECIPHSCKQPETPAHANVVGMDLPSHGYTLIYTCQPGFFLAGGTEHRVCRSDNTWTGKVPICEAGSKILVKDPRPALGTPSPKLSVPDDVFAQNYIWKGSYNFKGRKQPMTLTVTSFNASTGRVNATLSNSNMELLLSGVYKSQEARLMLRIYLIKVPAHASVKKMKEENWAMDGFVSAEPDGATYVFQGFIQGKDYGQFGLQRLGLNMSEGSNSSNQPHGTNSSSVAIAILVPFFALIFAGFGFYLYKQRTAPKTQYTGCSVHENNNGQAAFENPMYDTNAKSVEGKAVRFDPNLNTVCTMV

SEQ ID NO: 9280 - protein, 3667 aa, Homo sapiens
MWSWFLCWKPVQLDRQTASGFIYTCGGTLKGLNGTIESPGFPYGYPNGANCTWVIIAEERNRIQIVFQSFALEEEYDYLSLYDGHPHPTNFRTRLTGFHLPPPVTSTKSVFSLRLTSDFAVSAHGFKVYYEELQSSSCGNPGVPPKGVLYGTRFDVGDKIRYSCVTGYILDGHPQLTCIANSVNTASWDFPVPICRAEDACGGTMRGSSGIISSPSFPNEYHNNADCTWTIVAEPGDTISLIFTDFQMEEKYDYLEIEGSEPPTIWLSGMNIPPPIISNKNWLRLHFVTDSNHRYRGFSAPYQGSSTLTHTTSTGELEEHNRTTTGAIAVASTPADVTVSSVTAVTIHRLSEEQRVQVTSLRNSGLDPNTSKDGLSPHPADTQSTRRRPRHAEQIERTKELAVVTHRVKKAIDFKSRGFKLFPGKDNSNKFSILNEGGIKTASNLCPDPGEPENGKRIGSDFSLGSTVQFSCDEDYVLQGAKSITCQRIAEVFAAWSDHRPVCKVKTCGSNLQGPSGTFTSPNFPFQYDSNAQCVWVITAVNTNKVIQINFEEFDLEIGYDTLTIGDGGEVGDPRTVLQVLTGSFVPDLIVSMSSQMWLHLQTDESVGSVGFKVNYKEIEKESCGDPGTPLYGIREGDGFSNRDVLRFECQFGFELIGEKSIVCQENNQWSANIPICIFPCLSNFTAPMGTVLSPDYPEGYGNNLNCIWTIISDPGSRIHLSFNDFDLESQFDFLAVKDGDSPESPILGTFTGAEVPSHLTSNSHILRLEFQADHSMSGRGFNITYNTFGHNECPDPGIPINARRFGDNFQLGSSISVICEEGFIKTQGTETITCILMDGKVMWSGLIPKCGAPCGGHFSAPSGVILSPGWPGYYKDSLNCEWVIEAEPGHSIKITFERFQTELNYDVLEVHDGPNLLSPLLGSYNGTQVPQFLFSSSNFIYLLFTTDNSRSNNGFKIHYESVTVNTYSCLDPGIPVHGRRYGHDFSIGSTVSFSCDSGYRLSHEEPLLCEKNHWWSHPLPTCDALCGGDVRGPSGTILSPGYPEFYPNSLNCTWTVDVTHGKGVQFNFHTFHLEDHHDYLLITENGSFTQPLARLTGSDLPPTINAGLYGNFRAQLRFISDFSISYEGFNITFSEYNLEPCEDPGIPQYGSRIGFNFGIGDTLTFSCSSGYRLEGTSEIICLGGGRRVWSAPLPRCVAECGASATNNEGILLSPNYPLNYENNHECIYSIQVQAGKGINISARTFHLAQGDVLKIYDGKDKTTHLLGAFTGASMRGLTLSSTSNQLWLEFNSDTEGTDEGFQLVYTSFELSHCEDPGIPQFGYKISDQGHFAGSTIIYGCNPGYTLHGSSLLKCMTGERRAWDYPLPSCIAECGGRFKGESSGRILSPGYPFPYDNNLRCMWMIEVDPGNIVSLQFLAFDTEASHDILRVWDGPPENDMLLKEISGSLIPEGIHSTLNIVTIQFDTDFYISKSGFAIQFSSSVATACRDPGVPMNGTRNGDGREPGDTVVFQCDPGYELQGEERITCIQVENRYFWQPSPPVCIAPCGGNLTGSSGFILSPNFPHPYPHSRDCDWTITVNADYVISLAFISFSIEPNYDFLYIYDGPDSNSPLIGSFQDSKLPERIESSSNTMHLAFRSDGSVSYTGFHLEYKAKLRESCFDPGNIMNGTRLGMDYKLGSTVTYYCDAGYVLQGYSTLTCIMGDDGRPGWNRALPSCHAPCGSRSTGSEGTVLSPNYPKNYSVGHNCVYSIAVPKEFVVFGQFVFFQTSLHDVVEVYDGPTQQSSLLSSLSGSHSGESLPLSSGNQITIRFTSVGPITAKGFHFVYQAVPRTSSTQCSSVPEPRFGRRIGNEFAVGSSVLFDCNPGYILHGSIAIRCETVPNSLAQWNDSLPTCIVPCGGILTKRKGTILSPGYPEPYDNNLNCVWKITVPEGAGIQVQVVSFATEHNWDSLDFYDGGDNNAPRLGSYSGTTIPHLLNSTSNNLYLNFQSDISVSAAGFHLEYTAIGLDSCPEPQTPSSGIKIGDRYMVGDVVSFQCDQGYSLQGHSHITCMPGPVRRWNYPIPICLAQCGGAMSDFSGVILSPGFPGNYPSSLDCTWTINLPIGFGVHLQFVNFSTETIHDYLEVRSGSSETSTVIGRLSGPQIPSSLFSTTHETSLYFHSDYSQNKQGFHIVYQAYQLQSCPDPRPFRNGFVIGNDFTVGQTISFECFPGYTLIGNSALTCLHGVSRNWNHPLPRCEALCGGNITAMNGTIYSPGYPDEYPNFQDCFWLVRVPPGNGIYINFTVLQTEPIYDFITVWDGPDQNSPQIGQFSGNTALESVYSTSNQILIKFHSDFTTSGFFVLSYHAYQLRVCQPPPPVPNAEILTEDDEFEIGDIIRYQCLPGFTLVGNAILTCRLGERLQMDGAPPVCQVLCPANELRLDSTGVILSPGYPDSYPNLQMCAWSISVEKGYNITMFVEFFQTEKEFDVLQVYDGPNIQSPVLISLSGDYSSAFNITSNGHEVFLQWSADHGNNKKGFRIRYIAFYCSTPESPPHGYIISQTGGQLNSVVRWACDRGFRLVGKSSAVCRKSSYGYHAWDAPVPACQAISCGIPKAPTNGGILTTDYLVGTRVTYFCNDGYRLSSKELTTAVCQSDGTWSNHNKTPRCVVVTCPSINSFILEHGRWRIVNGSHYEYKTKVVFSCDPGYHGLGPASIECLPNGTWSWRNERPYCQIISCGELPTPPNGNKIGTQTSYGSTAIFTCDLGFMLVGSAVRECLSSGLWSESETRCLAGHCGIPELIVNGQVIGENYGYRDTVVYQCNPGFRLIGSSVRICQQDHNWSGQLPSCVPVSCGHPGSPIYGRTSGNGFNFNDVVTFSCNIGYLMQGPTKAQCQANRQWSHPPPMCKVVNCSDPGIPANSKRESKIEHGNFTYGTVVFYDCNPGYFLFGSSVLICQPNGQWDKPLPECIMIDCGHPGVPPNAVLSGEKYTFGSTVHYSCTGKRSLLGQSSRTCQLNGHWSGSQPHCSGDATGTCGDPGTPGHGSRQESNFRTKSTVRYACDTGYILHGSEERTCLANGSWTGRQPECKAVQCGNPGTTANGKVFRIDGTTFSSSVIYSCMEGYILSGPSVRQCTANGTWSGTLPNCTIISCGDPGIPANGLRYGDDYVVGQNVSYMCQPGYTMELNGSRIRTCTINGTWSGVMPTCRAVTCPTPPQISNGRLEGTNFDWGFSISYICSPGYELSFPAVLTCVGNGTWSGEVPQCLPKFCGDPGIPAQGKREGKSFIYQSEVSFSCNFPFILVGSSTRICQADGTWSGSSPHCIEPTQTSCENPGVPRHGSQNNTFGFQVGSVVQFHCKKGHLLQGSTTRTCLPDLTWSGIQPECIPHSCKQPETPAHANVVGMDLPSHGYTLIYTCQPGFFLAGGTEHRVCRSDNTWTGKVPICEAGSKILVKDPRPALGTPSPKLSVPDDVFAQNYIWKGSYNFKGRKQPMTLTVTSFNASTGRVNATLSNSNMELLLSGVYKSQEARLMLRIYLIKVPAHASVKKMKEENWAMDGFVSAEPDGATYVFQGFIQGKDYGQFGLQRLGLNMSEGSNSSNQPHGTNSSSVAIAILVPFFALIFAGFGFYLYKQRTAPKTQYTGCSVHENNNGQAAFENPMYDTNAKSVEGKAVRFDPNLNTVCTMV

SEQ ID NO: 9281 - protein, 3600 aa, Homo sapiens
MGIKSGFTFWNLVFLLTVSCVKGFIYTCGGTLKGLNGTIESPGFPYGYPNGANCTWVIIAEERNRIQIVFQSFALEEEYDYLSLYDGHPHPTNFRTRLTGFHLPPPVTSTKSVFSLRLTSDFAVSAHGFKVYYEELQSSSCGNPGVPPKGVLYGTRFDVGDKIRYSCVTGYILDGHPQLTCIANSVNTASWDFPVPICRAEDACGGTMRGSSGIISSPSFPNEYHNNADCTWTIVAEPGDTISLIFTDFQMEEKYDYLEIEGSEPPTIWLSGMNIPPPIISNKNWLRLHFVTDSNHRYRGFSAPYQGSSTLTHTTSTGELEEHNRTTTGAIAVASTPADVTVSSVTAVTIHRLSEEQRVQVTSLRNSGLDPNTSKDGLSPHPADTQSTRRRPRHAEQIERTKELAVVTHRVKKAIDFKSRGFKLFPGKDNSNKFSILNEGGIKTASNLCPDPGEPENGKRIGSDFSLGSTVQFSCDEDYVLQGAKSITCQRIAEVFAAWSDHRPVCKVKTCGSNLQGPSGTFTSPNFPFQYDSNAQCVWVITAVNTNKVIQINFEEFDLEIGYDTLTIGDGGEVGDPRTVLQVLTGSFVPDLIVSMSSQMWLHLQTDESVGSVGFKVNYKEIEKESCGDPGTPLYGIREGDGFSNRDVLRFECQFGFELIGEKSIVCQENNQWSANIPICIFPCLSNFTAPMGTVLSPDYPEGYGNNLNCIWTIISDPGSRIHLSFNDFDLESQFDFLAVKDGDSPESPILGTFTGAEVPSHLTSNSHILRLEFQADHSMSGRGFNITYNTFGHNECPDPGIPINARRFGDNFQLGSSISVICEEGFIKTQGTETITCILMDGKVMWSGLIPKCGAPCGGHFSAPSGVILSPGWPGYYKDSLNCEWVIEAEPGHSIKITFERFQTELNYDVLEVHDGPNLLSPLLGSYNGTQVPQFLFSSSNFIYLLFTTDNSRSNNGFKIHYESVTVNTYSCLDPGIPVHGRRYGHDFSIGSTVSFSCDSGYRLSHEEPLLCEKNHWWSHPLPTCDALCGGDVRGPSGTILSPGYPEFYPNSLNCTWTVDVTHGKGVQFNFHTFHLEDHHDYLLITENGSFTQPLARLTGSDLPPTINAGLYGNFRAQLRFISDFSISYEGFNITFSEYNLEPCEDPGIPQYGSRIGFNFGIGDTLTFSCSSGYRLEGTSEIICLGGGRRVWSAPLPRCVAECGASATNNEGILLSPNYPLNYENNHECIYSIQVQAGKGINISARTFHLAQGDVLKIYDGKDKTTHLLGAFTGASMRGLTLSSTSNQLWLEFNSDTEGTDEGFQLVYTSFELSHCEDPGIPQFGYKISDQGHFAGSTIIYGCNPGYTLHGSSLLKCMTGERRAWDYPLPSCIAECGGRFKGESSGRILSPGYPFPYDNNLRCMWMIEVDPGNIVSLQFLAFDTEASHDILRVWDGPPENDMLLKEISGSLIPEGIHSTLNIVTIQFDTDFYISKSGFAIQFSSSVATACRDPGVPMNGTRNGDGREPGDTVVFQCDPGYELQGEERITCIQVENRYFWQPSPPVCIAPCGGNLTGSSGFILSPNFPHPYPHSRDCDWTITVNADYVISLAFISFSIEPNYDFLYIYDGPDSNSPLIGSFQDSKLPERIESSSNTMHLAFRSDGSVSYTGFHLEYKAKLRESCFDPGNIMNGTRLGMDYKLGSTVTYYCDAGYVLQGYSTLTCIMGDDGRPGWNRALPSCHAPCGSRSTGSEGTVLSPNYPKNYSVGHNCVYSIAVPKEFAVPRTSSTQCSSVPEPRFGRRIGNEFAVGSSVLFDCNPGYILHGSIAIRCETVPNSLAQWNDSLPTCIVPCGGILTKRKGTILSPGYPEPYDNNLNCVWKITVPEGAGIQVQVVSFATEHNWDSLDFYDGGDNNAPRLGSYSGTTIPHLLNSTSNNLYLNFQSDISVSAAGFHLEYTAIGLDSCPEPQTPSSGIKIGDRYMVGDVVSFQCDQGYSLQGHSHITCMPGPVRRWNYPIPICLAQCGGAMSDFSGVILSPGFPGNYPSSLDCTWTINLPIGFGVHLQFVNFSTETIHDYLEVRSGSSETSTVIGRLSGPQIPSSLFSTTHETSLYFHSDYSQNKQGFHIVYQAYQLQSCPDPRPFRNGFVIGNDFTVGQTISFECFPGYTLIGNSALTCLHGVSRNWNHPLPRCEALCGGNITAMNGTIYSPGYPDEYPNFQDCFWLVRVPPGNGIYINFTVLQTEPIYDFITVWDGPDQNSPQIGQFSGNTALESVYSTSNQILIKFHSDFTTSGFFVLSYHAYQLRVCQPPPPVPNAEILTEDDEFEIGDIIRYQCLPGFTLVGNAILTCRLGERLQMDGAPPVCQVLCPANELRLDSTGVILSPGYPDSYPNLQMCAWSISVEKGYNITMFVEFFQTEKEFDVLQVYDGPNIQSPVLISLSGDYSSAFNITSNGHEVFLQWSADHGNNKKGFRIRYIAFYCSTPESPPHGYIISQTGGQLNSVVRWACDRGFRLVGKSSAVCRKSSYGYHAWDAPVPACQAISCGIPKAPTNGGILTTDYLVGTRVTYFCNDGYRLSSKELTTAVCQSDGTWSNHNKTPRCVVVTCPSINSFILEHGRWRIVNGSHYEYKTKVVFSCDPGYHGLGPASIECLPNGTWSWRNERPYCQIISCGELPTPPNGNKIGTQTSYGSTAIFTCDLGFMLVGSAVRECLSSGLWSESETRCLAGHCGIPELIVNGQVIGENYGYRDTVVYQCNPGFRLIGSSVRICQQDHNWSGQLPSCVPVSCGHPGSPIYGRTSGNGFNFNDVVTFSCNIGYLMQGPTKAQCQANRQWSHPPPMCKVVNCSDPGIPANSKRESKIEHGNFTYGTVVFYDCNPGYFLFGSSVLICQPNGQWDKPLPECIMIDCGHPGVPPNAVLSGEKYTFGSTVHYSCTGKRSLLGQSSRTCQLNGHWSGSQPHCSGDATGTCGDPGTPGHGSRQESNFRTKSTVRYACDTGYILHGSEERTCLANGSWTGRQPECKAVQCGNPGTTANGKVFRIDGTTFSSSVIYSCMEGYILSGPSVRQCTANGTWSGTLPNCTIISCGDPGIPANGLRYGDDYVVGQNVSYMCQPGYTMELNGSRIRTCTINGTWSGVMPTCRAVTCPTPPQISNGRLEGTNFDWGFSISYICSPGYELSFPAVLTCVGNGTWSGEVPQCLPKFCGDPGIPAQGKREGKSFIYQSEVSFSCNFPFILVGSSTRICQADGTWSGSSPHCIEPTQTSCENPGVPRHGSQNNTFGFQVGSVVQFHCKKGHLLQGSTTRTCLPDLTWSGIQPECIPHSCKQPETPAHANVVGMDLPSHGYTLIYTCQPGFFLAGGTEHRVCRSDNTWTGKVPICEAGSKILVKDPRPALGTPSPKLSVPDDVFAQNYIWKGSYNFKGRKQPMTLTVTSFNASTGRVNATLSNSNMELLLSGVYKSQEARLMLRIYLIKVPAHASVKKMKEENWAMDGFVSAEPDGATYVFQGFIQGKDYGQFGLQRLGLNMSEGSNSSNQPHGTNSSSVAIAILVPFFALIFAGFGFYLYKQRTAPKTQYTGCSVHENNNGQAAFENPMYDTNAKSVEGKAVRFDPNLNTVCTMV

SEQ ID NO: 9282 - protein, 792 aa, Homo sapiens
LSGPRWRCRGGWARDAFTVSLWSCHPRPRDTQALLSATQAMDLRRRDYHMERPLLNQEHLEELGRWGSAPRTHQWRTWLQCSRARAYALLLQHLPVLVWLPRYPVRDWLLGDLLSGLSVAIMQLPQGLAYALLAGLPPVFGLYSSFYPVFIYFLFGTSRHISVGTFAVMSVMVGSVTESLAPQALNDSMINETARDAARVQVASTLSVLVGLFQVGLGLIHFGFVVTYLSEPLVRGYTTAAAVQVFVSQLKYVFGLHLSSHSGPLSLIYTVLEVCWKLPQSKVGTVVTAAVAGVVLVVVKLLNDKLQQQLPMPIPGELLTLIGATGISYGMGLKHRFEVDVVGNIPAGLVPPVAPNTQLFSKLVGSAFTIAVVGFAIAISLGKIFALRHGYRVDSNQELVALGLSNLIGGIFQCFPVSCSMSRSLVQESTGGNSQVAGAISSLFILLIIVKLGELFHDLPKAVLAAIIIVNLKGMLRQLSDMRSLWKANRADLLIWLVTFTATILLNLDLGLVVAVIFSLLLVVVRTQMPHYSVLGQVPDTDIYRDVAEYSEAKEVRGVKVFRSSATVYFANAEFYSDALKQRCGVDVDFLISQKKKLLKKQEQLKLKQLQKEEKLRKQAGPLLSGDPHLLPPAASPKGASVSINVNTSLEDMRSNNVEDCKMMQVSSGDKMEDATANGQEDSKAPDGSTLKALGLPQPDFHSLILDLGALSFVDTVCLKSLKNIFHDFREIEVEVYMAACHSPVVSQLEAGHFFDASITKKHLFASVHDAVTFALQHPRPVPDSPVSVTRL

SEQ ID NO: 9283 - protein, 773 aa, Homo sapiens
MGLADASGPRDTQALLSATQAMDLRRRDYHMERPLLNQEHLEELGRWGSAPRTHQWRTWLQCSRARAYALLLQHLPVLVWLPRYPVRDWLLGDLLSGLSVAIMQLPQGLAYALLAGLPPVFGLYSSFYPVFIYFLFGTSRHISVGTFAVMSVMVGSVTESLAPQALNDSMINETARDAARVQVASTLSVLVGLFQVGLGLIHFGFVVTYLSEPLVRGYTTAAAVQVFVSQLKYVFGLHLSSHSGPLSLIYTVLEVCWKLPQSKVGTVVTAAVAGVVLVVVKLLNDKLQQQLPMPIPGELLTLIGATGISYGMGLKHRFEVDVVGNIPAGLVPPVAPNTQLFSKLVGSAFTIAVVGFAIAISLGKIFALRHGYRVDSNQELVALGLSNLIGGIFQCFPVSCSMSRSLVQESTGGNSQVAGAISSLFILLIIVKLGELFHDLPKAVLAAIIIVNLKGMLRQLSDMRSLWKANRADLLIWLVTFTATILLNLDLGLVVAVIFSLLLVVVRTQMPHYSVLGQVPDTDIYRDVAEYSEAKEVRGVKVFRSSATVYFANAEFYSDALKQRCGVDVDFLISQKKKLLKKQEQLKLKQLQKEEKLRKQAGPLLSGDPHLLPPAASPKGASVSINVNTSLEDMRSNNVEDCKMMQVSSGDKMEDATANGQEDSKAPDGSTLKALGLPQPDFHSLILDLGALSFVDTVCLKSLKNIFHDFREIEVEVYMAACHSPVVSQLEAGHFFDASITKKHLFASVHDAVTFALQHPRPVPDSPVSVTRL

SEQ ID NO: 9284 - protein, 622 aa, Homo sapiens [sequence omitted]

SEQ ID NO: 9285 - protein, 1401 aa, Homo sapiens
MDGDSSSSSGGSGPAPGPGPEGEQRPEGEPLAPDGGSPDSTQTKAVPPEASPERSCSLHSCPLEDPSSSSGPPPTTSTLQPVGPSSPLAPAHFTYPRALQEYQGGSSLPGLGDRAALCSHGSSLSPSPAPSQRDGTWKPPAVQHHVVSVRQERAFQMPKSYSQLIAEWPVAVLMLCLAVIFLCTLAGLLGARLPDFSKPLLGFEPRDTDIGSKLVVWRALQALTGPRKLLFLSPDLELNSSSSHNTLRPAPRGSAQESAVRPRRMVEPLEDRRQENFFCGPPEKSYAKLVFMSTSSGSLWNLHAIHSMCRMEQDQIRSHTSFGALCQRTAANQCCPSWSLGNYLAVLSNRSSCLDTTQADAARTLALLRTCALYYHSGALVPSCLGPGQNKSPRCAQVPTKCSQSSAIYQLLHFLLDRDFLSPQTTDYQVPSLKYSLLFLPTPKGASLMDIYLDRLATPWGLADNYTSVTGMDLGLKQELLRHFLVQDTVYPLLALVAIFFGMALYLRSLFLTLMVLLGVLGSLLVAFFLYQVAFRMAYFPFVNLAALLLLSSVCANHTLIFFDLWRLSKSQLPSGGLAQRVGRTMHHFGYLLLVSGLTTSAAFYASYLSRLPAVRCLALFMGTAVLVHLALTLVWLPASAVLHERYLARGCARRARGRWEGSAPRRLLLALHRRLRGLRRAAAGTSRLLFQRLLPCGVIKFRYIWICWFAALAAGGAYIAGVSPRLRLPTLPPPGGQVFRPSHPFERFDAEYRQLFLFEQLPQGEGGHMPVVLVWGVLPVDTGDPLDPRSNSSLVRDPAFSASGPEAQRWLLALCHRARNQSFFDTLQEGWPTLCFVETLQRWMESPSCARLGPDLCCGHSDFPWAPQFFLHCLKMMALEQGPDGTQDLGLRFDAHGSLAALVLQFQTNFRNSPDYNQTQLFYNEVSHWLAAELGMAPPGLRRGWFTSRLELYSLQHSLSTEPAVVLGLALALAFATLLLGTWNVPLSLFSVAAVAGTVLLTVGLLVLLEWQLNTAEALFLSASVGLSVDFTVNYCISYHLCPHPDRLSRVAFSLRQTSCATAVGAAALFAAGVLMLPATVLLYRKLGIILMMVKCVSCGFASFFFQSLCCFFGPEKNCGQILWPCAHLPWDAGTGDPGGEKAGRPRPGSVGGMPGSCSEQYELQPLARRRSPSFDTSTATSKLSHRPSVLSEDLQLHDGPCCSRPPPAPASPRELLLDHQAVFSQCPALQTSSPYKQAGPSPKTRARQDSQGEEAEPLPASPEAPAHSPKAKAADPPDGFCSSASTLEGLSVSDETCLSTSEPSARVPDSVGVSPDDLDDTGQPVLERGQLNGKRDTLWLALRETVYDPSLPASHHSSLSWKGRGGPGDGSPVVLPNSQPDLPDVWLRRPSTHTSGYSS

SEQ ID NO: 9286 - protein, 652 aa, Homo sapiens
MAMDEYLWMVILGFIIAFILAFSVGANDVANSFGTAVGSGVVTLRQACILASIFETTGSVLLGAKVGETIRKGIIDVNLYNETVETLMAGEVSAMVGSAVWQLIASFLRLPISGTHCIVGSTIGFSLVAIGTKGVQWMELVKIVASWFISPLLSGFMSGLLFVLIRIFILKKEDPVPNGLRALPVFYAATIAINVFSIMYTGAPVLGLVLPMWAIALISFGVALLFAFFVWLFVCPWMRRKITGKLQKEGALSRVSDESLSKVQEAESPVFKELPGAKANDDSTIPLTGAAGETLGTSEGTSAGSHPRAAYGRALSMTHGSVKSPISNGTFGFDGHTRSDGHVYHTVHKDSGLYKDLLHKIHIDRGPEEKPAQESNYRLLRRNNSYTCYTAAICGLPVHATFRAADSSAPEDSEKLVGDTVSYSKKRLRYDSYSSYCNAVAEAEIEAEEGGVEMKLASELADPDQPREDPAEEEKEEKDAPEVHLLFHFLQVLTACFGSFAHGGNDVSNAIGPLVALWLIYKQGGVTQEAATPVWLLFYGGVGICTGLWVWGRRVIQTMGKDLTPITPSSGFTIELASAFTVVIASNIGLPVSTTHCKVGSVVAVGWIRSRKAVDWRLFRNIFVAWFVTVPVAGLFSAAVMALLMYGILPYV

SEQ ID NO: 9287 - protein, 622 aa, Homo sapiens [sequence omitted]

SEQ ID NO: 9288 - protein, 1107 aa, Homo sapiens [sequence omitted]

SEQ ID NO: 9289 - protein, 848 aa, Homo sapiens
MDEGTGLQPGAGEQLEAPATAEAVQERCEPETLRSKSLPVLSSASCRPSLSPTSGDANPAFGCVDSSGHQELKQGPNPLAPSPSAPSTSAGLGDCNHRVDLSKTFSVSSALAMLQERRCLYVVLTDSRCFLVCMCFLTFIQALMVSGYLSSVITTIERRYSLKSSESGLLVSCFDIGNLVVVVFVSYFGGRGRRPLWLAVGGLLIAFGAALFALPHFISPPYQIQELNASAPNDGLCQGGNSTATLEPPACPKDSGGNNHWVYLALFICAQILIGMGSTPIYTLGPTYLDDNVKKENSSLYLAIMYVMGALGPAVGYLLGGLLIGFYVDPRNPVHLDQNDPRFIGNWWSGFLLCAIAMFLVIFPMFTFPKKLPPRHKKKKKKKFSVDAVSDDDVLKEKSNNSEQADKKVSSMGFGKDVRDLPRAAVRILSNMTFLFVSLSYTAESAIVTAFITFIPKFIESQFGIPASNASIYTGVIIVPSAGVGIVLGGYIIKKLKLGARESAKLAMICSGVSLLCFSTLFIVGCESINLGGINIPYTTGPSLTMPHRNLTGSCNVNCGCKIHEYEPVCGSDGITYFNPCLAGCVNSGNLSTGIRNYTECTCVQSRQVITPPTVGQRSQLRVVIVKTYLNENGYAVSGKCKRTCNTLIPFLVFLFIVTFITACAQPSAIIVTLRSVEDEERPFALGMQFVLLRTLAYIPTPIYFGAVIDTTCMLWQQECGVQGSCWEYNVTSFRFVYFGLAAGLKFVGFIFIFLAWYSIKYKEDGLQRRRQREFPLSTVSERVGHPDNARTRSCPAFSTQGEFHEETGLQKGIQCAAQTYPGPFPEAISSSADPGLEESPAALEPPS

SEQ ID NO: 9290 - protein, 314 aa, Homo sapiens
MTRKNYTSLTEFVLLGLADTLELQIILFLFFLVIYTLTVLGNLGMILLIRIDSQLHTPMYFFLANLSFVDVCNSTTITPKMLADLLSEKKTISFAGCFLQMYFFISLATTECILFGLMAYDRYAAICRPLLYSLIMSRTVYLKMAAGAFAAGLLNFMVNTSHVSSLSFCDSNVIHHFFCDSPPLFKLSCSDTILKESISSILAGVNIVGTLLVILSSYSYVLFSIFSMHSGEGRHRAFSTCASHLTAIILFYATCIYTYLRPSSSYSLNQDKVASVFYTVVIPMLNPLIYSLRSKEVKKALANVISRKRTSSFL

SEQ ID NO: 9291 - protein, 520 aa, Homo sapiens
MGPQRRLSPAGAALLWGFLLQLTAAQEAILHASGNGTTKDYCMLYNPYWTALPSTLENATSISLMNLTSTPLCNLSDIPPVGIKSKAVVVPWGSCHFLEKARIAQKGGAEAMLVVNNSVLFPPSGNRSEFPDVKILIAFISYKDFRDMNQTLGDNITVKMYSPSWPNFDYTMVVIFVIAVFTVALGGYWSGLVELENLKAVTTEDREMRKKKEEYLTFSPLTVVIFVVICCVMMVLLYFFYKWLVYVMIAIFCIASAMSLYNCLAALIHKIPYGQCTIACRGKNMEVRLIFLSGLCIAVAVVWAVFRNEDRWAWILQDILGIAFCLNLIKTLKLPNFKSCVILLGLLLLYDVFFVFITPFITKNGESIMVELAAGPFGNNEKLPVVIRVPKLIYFSVMSVCLMPVSILGFGDIIVPGLLIAYCRRFDVQTGSSYIYYVSSTVAYAIGMILTFVVLVLMKKGQPALLYLVPCTLITASVVAWRRKEMKKFWKGNSYQMMDHLDCATNEENPVISGEQIVQQ

SEQ ID NO: 9292 - protein, 633 aa, Homo sapiens
MAHLKRLVKLHIKRHYHKKFWKLGAVIFFFIIVLVLMQREVSVQYSKEESRMERNMKNKNKMLDLMLEAVNNIKDAMPKMQIGAPVRQNIDAGERPCLQGYYTAAELKPVLDRPPQDSNAPGASGKAFKTTNLSVEEQKEKERGEAKHCFNAFASDRISLHRDLGPDTRPPECIEQKFKRCPPLPTTSVIIVFHNEAWSTLLRTVHSVLYSSPAILLKEIILVDDASVDEYLHDKLDEYVKQFSIVKIVRQRERKGLITARLLGATVATAETLTFLDAHCECFYGWLEPLLARIAENYTAVVSPDIASIDLNTFEFNKPSPYGSNHNRGNFDWSLSFGWESLPDHEKQRRKDETYPIKTPTFAGGLFSISKEYFEYIGSYDEEMEIWGGENIEMSFRVWQCGGQLEIMPCSVVGHVFRSKSPHSFPKGTQVIARNQVRLAEVWMDEYKEIFYRRNTDAAKIVKQKAFGDLSKRFEIKHRLRCKNFTWYLNNIYPEVYVPDLNPVISGYIKSVGQPLCLDVGENNQGGKPLIMYTCHGLGGNQYFEYSAQHEIRHNIQKELCLHAAQGLVQLKACTYKGHKTVVTGEQIWEIQKDQLLYNPFLKMCLSANGEHPSLVSCNPSDPLQKWILSQND

SEQ ID NO: 9293 - protein, 3487 aa, Homo sapiens
MRLISIAPGPRWQVQSHHPRSAGQNCTFQLHGPNGTVESPGFPYGYPNYANCTWTITAEEQHRIQLVFQSFALEEDFDVLSVFDGPPQPENLRTRLTGFQLPATIVSAATTLSLRLISDYAVSAQGFHATYEALPSHTCGNPGRLPNGIQQGSTFNLGDKVRYSCNLGFFLEGHAVLTCHAGSENSATWDFPLPSCRADDACGGTLRGQSGIISSPHFPSEYHNNADCTWTILAELGDTIALVFIDFQLEDGYDFLEVTGTEGSSLWFTGASLPAPVISSKNWLRLHFTSDGNHRQRGFSAQYQVKKQIELKSRGVKLMPSKDNSQKTSVLTQVGVSQGHNMCPDPGIPERGKRLGSDFRLGSSVQFTCNEGYDLQGSKRITCMKVSDMFAAWSDHRPVCRARMCDAHLRGPSGIITSPNFPIQYDNNAHCVWIITALNPSKVIKLAFEEFDLERGYDTLTVGDGGQDGDQKTVLYILTGTSVPDLIVSTNHQMWLLFQTDGSGSSLGFKASYEEIEQGSCGDPGIPAYGRREGSRFHHGDTLKFECQPAFELVGQKAITCQKNNQWSAKKPGCVFSCFFNFTSPSGVVLSPNYPEDYGNHLHCVWLILARPESRIHLAFNDIDVEPQFDFLVIKDGATAEAPVLGTFSGNQLPSSITSSGHVARLEFQTDHSTGKRGFNITFTTFRHNECPDPGVPVNGKRFGDSLQLGSSISFLCDEGFLGTQGSETITCVLKEGSVVWNSAVLRCEAPCGGHLTSPSGTILSPGWPGFYKDALSCAWVIEAQPGYPIKITFDRFKTEVNYDTLEVRDGRTYSAPLIGVYHGTQVPQFLISTSNYLYLLFSTDKSHSDIGFQLRYETITLQSDHCLDPGIPVNGQRHGNDFYVGALVTFSCDSGYTLSDGEPLECEPNFQWSRALPSCEALCGGFIQGSSGTILSPGFPDFYPNNLNCTWIIETSHGKGVFFTFHTFHLESGHDYLLITENGSFTQPLRQLTGSRLPAPISAGLYGNFTAQVRFISDFSMSYEGFNITFSEYDLEPCEEPEVPAYSIRKGLQFGVGDTLTFSCFPGYRLEGTARITCLGGRRRLWSSPLPRCVAECGNSVTGTQGTLLSPNFPVNYNNNHECIYSIQTQPGKGIQLKARAFELSEGDVLKVYDGNNNSARLLGVFSHSEMMGVTLNSTSSSLWLDFITDAENTSKGFELHFSSFELIKCEDPGTPKFGYKVHDEGHFAGSSVSFSCDPGYSLRGSEELLCLSGERRTWDRPLPTCVAECGGTVRGEVSGQVLSPGYPAPYEHNLNCIWTIEAEAGCTIGLHFLVFDTEEVHDVLRIWDGPVESGVLLKELSGPALPKDLHSTFNSVVLQFSTDFFTSKQGFAIQFSVSTATSCNDPGIPQNGSRSGDSWEAGDSTVFQCDPGYALQGSAEISCVKIENRFFWQPSPPTCIAPCGGDLTGPSGVILSPNYPEPYPPGKECDWKVTVSPDYVIALVFNIFNLEPGYDFLHIYDGRDSLSPLIGSFYGSQLPGRIESSSNSLFLAFRSDASVSNAGFVIDYTENPRESCFDPGSIKNGTRVGSDLKLGSSVTYYCHGGYEVEGTSTLSCILGPDGKPVWNNPRPVCTAPCGGQYVGSDGVVLSPNYPQNYTSGQICLYFVTVPKDYVVFGQFAFFHTALNDVVEVHDGHSQHSRLLSSLSGSHTGESLPLATSNQVLIKFSAKGLAPARGFHFVYQAVPRTSATQCSSVPEPRYGKRLGSDFSVGAIVRFECNSGYALQGSPEIECLPVPGALAQWNVSAPTCVVPCGGNLTERRGTILSPGFPEPYLNSLNCVWKIVVPEGAGIQIQVVSFVTEQNWDSLEVFDGADNTVTMLGSFSGTTVPALLNSTSNQLYLHFYSDISVSAAGFHLEYKTVGLSSCPEPAVPSNGVKTGERYLVNDVVSFQCEPGYALQGHAHISCMPGTVRRWNYPPPLCIAQCGGTVEEMEGVILSPGFPGNYPSNMDCSWKIALPVGFGAHIQFLNFSTEPNHDYIEIRNGPYETSRMMGRFSGSELPSSLLSTSHETTVYFHSDHSQNRPGFKLEYQDLTYSHQISSFLRGFDLSELERTNSTPPVAASYVWDLDPGCEAYELQECPDPEPFANGIVRGAGYNVGQSVTFECLPGYQLTGHPVLTCQHGTNRNWDHPLPKCEVPCGGNITSSNGTVYSPGFPSPYSSSQDCVWLITVPIGHGVRLNLSLLQTEPSGDFITIWDGPQQTAPRLGVFTRSMAKKTVQSSSNQVLLKFHRDAATGGIFAIAFSAYPLTKCPPPTILPNAEVVTENEEFNIGDIVRYRCLPGFTLVGNEILTCKLGTYLQFEGPPPICEVHCPTNELLTDSTGVILSQSYPGSYPQFQTCSWLVRVEPDYNISLTVEYFLSEKQYDEFEIFDGPSGQSPLLKALSGNYSAPLIVTSSSNSVYLRWSSDHAYNRKGFKIRYSAPYCSLPRAPLHGFILGQTSTQPGGSIHFGCNAGYRLVGHSMAICTRHPQGYHLWSEAIPLCQALSCGLPEAPKNGMVFGKEYTVGTKAMYSCSEGYHLQAGAEATAECLDTGLWSNRNVPPQCVPVTCPDVSSISVEHGRWRLIFETQYQFQAQLMLICDPGYYYTGQRVIRCQANGKWSLGDSTPTCRIISCGELPIPPNGHRIGTLSVYGATAIFSCNSGYTLVGSRVRECMANGLWSGSEVRCLAGHCGTPEPIVNGHINGENYSYRGSVVYQCNAGFRLIGMSVRICQQDHHWSGKTPFCVLVSCGHPGSPPHSQMSGDSYTVGAVVRYSCIGKRTLVGNSTRMCGLDGHWTGSLPHCSGTSVGVCGDPGIPAHGIRLGDSFDPGTVMRFSCEAGHVLRGSSERTCQANGSWSGSQPECGVISCGNPGTPSNARVVFSDGLVFSSSIVYECREGYYATGLLSRHCSVNGTWTGSDPECLVINCGDPGIPANGLRLGNDFRYNKTVTYQCVPGYMMESHRVSVLSCTKDRTWNGTKPVCKALMCKPPPLIPNGKVVGSDFMWGSSVTYACLEGYQLSLPAVFTCEGNGSWTGELPQCFPVFCGDPGVPSRGRREDRGFSYRSSVSFSCHPPLVLVGSPRRFCQSDGTWSGTQPSCIDPTLTTCADPGVPQFGIQNNSQGYQVGSTVLFRCQKGYLLQGSTTRTCLPNLTWSGTPPDCVPHHCRQPETPTHANVGALDLPSMGYTLIYSCQEGFSLKGGSEHRTCKADGSWTGKPPICLEVRPNGRPINTAREPPLTQALIPGDVFAKNSLWKGAYEYQGKKQPAMLRVTGFQVANSKVNATMIDHSGVELHLAGTYKKEDFHLLLQVYQITGPVEIFMNKFKDDHWALDGHVSSESSGATFIYQGSVKGQGFGQFGFQRLDLRLLESDPESIGRHFASNSSSVAAAILVPFIALIIAGFVLYLYKHRRRPKVPFNGYAGHENTNVRATFENPMYDRNIQPTDIMASEAEFTVSTVCTAV

SEQ ID NO: 9294 - protein, 385 aa, Homo sapiens
MWGRLLLWPLVLGFSLSGGTQTPSVYDESGSTGGGDDSTPSILPAPRGYPGQVCANDSDTLELPDSSRALLLGWVPTRLVPALYGLVLVVGLPANGLALWVLATQAPRLPSTMLLMNLATADLLLALALPPRIAYHLRGQRWPFGEAACRLATAALYGHMYGSVLLLAAVSLDRYLALVHPLRARALRGRRLALGLCMAAWLMAAALALPLTLQRQTFRLARSDRVLCHDALPLDAQASHWQPAFTCLALLGCFLPLLAMLLCYGATLHTLAASGRRYGHALRLTAVVLASAVAFFVPSNLLLLLHYSDPSPSAWGNLYGAYVPSLALSTLNSCVDPFIYYYVSAEFRDKVRAGLFQRSPGDTVASKASAEGGSRGMGTHSSLLQ

SEQ ID NO: 9295 - protein, 1010 aa, Homo sapiens
AEGRPAKPSKTAAREKTEGAVAAVGGGPSSFRCCYGCCHEARLGRTSLPRGVIMLTEASLSIWGWGSLGIVLFLITFGPFVIFYLTFYILCFVGGGLVVTLLFGKTNSEKYLEQCEHSFLPPTSPGVPKCLEEMKREARTIKIDRRLTGANIIDEPLQQVIQFSLRDYVQYWYYTLSDDESFLLEIRQTLQNALIQFATRSKEIDWQPYFTTRIVDDFGTHLRVFRKAQQKITEKDDQVKGTAEDLVDTFFEVEVEMEKEVCRDLVCTSPKDEEGFLRDLCEVLLYLLLPPGDFQNKIMRYFVREILARGILLPLINQLSDPDYINQYVIWMIRDSNCNYEAFMNIIKLSDNIGELEAVRDKAAEELQYLRSLDTAGDDINTIKNQINSLLFVKKVCDSRIQRLQSGKEINTVKLAANFGKLCTVPLDSILVDNVALQFFMDYMQQTGGQAHLFFWMTVEGYRVTAQQQLEVLLSRQRDGKHQTNQTKGLLRAAAVGIYEQYLSEKASPRVTVDDYLVAKLADTLNHEDPTPEIFDDIQRKVYELMLRDERFYPSFRQNALYVRMLAELDMLKDPSFRGSDDGDGESFNGSPTGSINLSLDDLSNVSSDDSVQLHAYISDTGVCNDHGKTYALYAITVHRRNLNSEEMWKTYRRYSDFHDFHMRITEQFESLSSILKLPGKKTFNNMDRDFLEKRKKDLNAYLQLLLAPEMMKASPALAHYVYDFLENKAYSKGKGDFARKMDTFVNPLRNSMRNVSNAVKSLPDSLAEGMTKMSDNMGKMSERLGQDIKQSFFKVPPLIPKTDSDPEHRRVSAQLDDNVDDNIPLRVMLLLMDEVFDLKERNQWLRRNIKNLLQQLIRATYGDTINRKIVDHVDWMTSPEQVADSVKRFRDAFWPNGILAEAVPCRDKSIRMRTRVAGKTKLLAIMPDELKHIIGAETTRKGILRVFEMFQHNQLNRRMVYVFLEGFLETLFPQYKFRELFNKLHSRSKQMQKYKQKLQTTQAPSLQKR

SEQ ID NO: 9296 - protein, 968 aa, Homo sapiens
MLTEASLSIWGWGSLGIVLFLITFGPFVIFYLTFYILCFVGGGLVVTLLFGKTNSEKYLEQCEHSFLPPTSPGVPKCLEEMKREARTIKIDRRLTGANIIDEPLQQVIQFSLRDYVQYWYYTLSDDESFLLEIRQTLQNALIQFATRSKEIDWQPYFTTRIVDDFGTHLRVFRKAQQKITEKDDQVKGTAEDLVDTFFEVEVEMEKEVCRDLVCTSPKDEEGFLRDLCEVLLYLLLPPGDFQNKIMRYFVREILARGILLPLINQLSDPDYINQYVIWMIRDSNCNYEAFMNIIKLSDNIGELEAVRDKAAEELQYLRSLDTAGDDINTIKNQINSLLFVKKVCDSRIQRLQSGKEINTVKLAANFGKLCTVPLDSILVDNVALQFFMDYMQQTGGQAHLFFWMTVEGYRVTAQQQLEVLLSRQRDGKHQTNQTKGLLRAAAVGIYEQYLSEKASPRVTVDDYLVAKLADTLNHEDPTPEIFDDIQRKVYELMLRDERFYPSFRQNALYVRMLAELDMLKDPSFRGSDDGDGESFNGSPTGSINLSLDDLSNVSSDDSVQLHAYISDTVYADYDPYAVAGVCNDHGKTYALYAITVHRRNLNSEEMWKTYRRYSDFHDFHMRITEQFESLSSILKLPGKKTFNNMDRDFLEKRKKDLNAYLQLLLAPEMMKASPALAHYVYDFLENKAYSKGKGDFARKMDTFVNPLRNSMRNVSNAVKSLPDSLAEGMTKMSDNMGKMSERLGQDIKQSFFKVPPLIPKTDSDPEHRRVSAQLDDNVDDNIPLRVMLLLMDEVFDLKERNQWLRRNIKNLLQQLIRATYGDTINRKIVDHVDWMTSPEQVADSVKRFRDAFWPNGILAEAVPCRDKSIRMRTRVAGKTKLLAIMPDELKHIIGAETTRKGILRVFEMFQHNQLNRRMVYVFLEGFLETLFPQYKFRELFNKLHSRSKQMQKYKQKLQTTQAPSLQKR

SEQ ID NO: 9297 - protein, 1294 aa, Homo sapiens
MASPPHQQLLHHHSTEVSCDSSGDSNSVRVKINPKQLSSNSHPKHCKYSISSSCSSSGDSGGVPRRVGGGGRLRRQKKLPQLFERASSRWWDPKFDSVNLEEACLERCFPQTQRRFRYALFYIGFACLLWSIYFAVHMRSRLIVMVAPALCFLLVCVGFFLFTFTKLYARHYAWTSLALTLLVFALTLAAQFQVLTPVSGRGDSSNLTATARPTDTCLSQVGSFSMCIEVLFLLYTVMHLPLYLSLCLGVAYSVLFETFGYHFRDEACFPSPGAGALHWELLSRGLLHGCIHAIGVHLFVMSQVRSRSTFLKVGQSIMHGKDLEVEKALKERMIHSVMPRIIADDLMKQGDEESENSVKRHATSSPKNRKKKSSIQKAPIAFRPFKMQQIEEVSILFADIVGFTKMSANKSAHALVGLLNDLFGRFDRLCEETKCEKISTLGDCYYCVAGCPEPRADHAYCCIEMGLGMIKAIEQFCQEKKEMVNMRVGVHTGTVLCGILGMRRFKFDVWSNDVNLANLMEQLGVAGKVHISEATAKYLDDRYEMEDGKVIERLGQSVVADQLKGLKTYLISGQRAKESRCSCAEALLSGFEVIDGSQVSSGPRGQGTASSGNVSDLAQTVKTFDNLKTCPSCGITFAPKSEAGAEGGAPQNGCQDEHKNSTKASGGPNPKTQNGLLSPPQEEKLTNSQTSLCEILQEKGRWAGVSLDQSALLPLRFKNIREKTDAHFVDVIKEDSLMKDYFFKPPINQFSLNFLDQELERSYRTSYQEEVIKNSPVKTFASPTFSSLLDVFLSTTVFLTLSTTCFLKYEAATVPPPPAALAVFSAALLLEVLSLAVSIRMVFFLEDVMACTKRLLEWIAGWLPRHCIGAILVSLPALAVYSHVTSEYETNIHFPVFTGSAALIAVVHYCNFCQLSSWMRSSLATVVGAGPLLLLYVSLCPDSSVLTSPLDAVQNFSSERNPCNSSVPRDLRRPASLIGQEVVLVFFLLLLLVWFLNREFEVSYRLHYHGDVEADLHRTKIQSMRDQADWLLRNIIPYHVAEQLKVSQTYSKNHDSGGVIFASIVNFSEFYEENYEGGKECYRVLNELIGDFDELLSKPDYSSIEKIKTIGATYMAASGLNTAQAQDGSHPQEHLQILFEFAKEMMRVVDDFNNNMLWFNFKLRVGFNHGPLTAGVIGTTKLLYDIWGDTVNIASRMDTTGVECRIQVSEESYRVLSKMGYDFDYRGTVNVKGKGQMKTYLYPKCTDHRVIPAPAVHLPRHPRPGGWQHRTVSHRRDCQPGAFCPVCGQDISGF

SEQ ID NO: 9298 - protein, 1353 aa, Homo sapiens
MASPPHQQLLHHHSTEVSCDSSGDSNSVRVKINPKQLSSNSHPKHCKYSISSSCSSSGDSGGVPRRVGGGGRLRRQKKLPQLFERASSRWWDPKFDSVNLEEACLERCFPQTQRRFRYALFYIGFACLLWSIYFAVHMRSRLIVMVAPALCFLLVCVGFFLFTFTKLYARHYAWTSLALTLLVFALTLAAQFQVLTPVSGRGDSSNLTATARPTDTCLSQVGSFSMCIEVLFLLYTVMHLPLYLSLCLGVAYSVLFETFGYHFRDEACFPSPGAGALHWELLSRGLLHGCIHAIGVHLFVMSQVRSRSTFLKVGQSIMHGKDLEVEKALKERMIHSVMPRIIADDLMKQGDEESENSVKRHATSSPKNRKKKSSIQKAPIAFRPFKMQQIEEVSILFADIVGFTKMSANKSAHALVGLLNDLFGRFDRLCEETKCEKISTLGDCYYCVAGCPEPRADHAYCCIEMGLGMIKAIEQFCQEKKEMVNMRVGVHTGTVLCGILGMRRFKFDVWSNDVNLANLMEQLGVAGKVHISEATAKYLDDRYEMEDGKVIERLGQSVVADQLKGLKTYLISGQRAKESRCSCAEALLSGFEVIDGSQVSSGPRGQGTASSGNVSDLAQTVKTFDNLKTCPSCGITFAPKSEAGAEGGAPQNGCQDEHKNSTKASGGPNPKTQNGLLSPPQEEKLTNSQTSLCEILQEKGRWAGVSLDQSALLPLRFKNIREKTDAHFVDVIKEDSLMKDYFFKPPINQFSLNFLDQELERSYRTSYQEEVIKNSPVKTFASPTFSSLLDVFLSTTVFLTLSTTCFLKYEAATVPPPPAALAVFSAALLLEVLSLAVSIRMVFFLEDVMACTKRLLEWIAGWLPRHCIGAILVSLPALAVYSHVTSEYETNIHFPVFTGSAALIAVVHYCNFCQLSSWMRSSLATVVGAGPLLLLYVSLCPDSSVLTSPLDAVQNFSSERNPCNSSVPRDLRRPASLIGQEVVLVFFLLLLLVWFLNREFEVSYRLHYHGDVEADLHRTKIQSMRDQADWLLRNIIPYHVAEQLKVSQTYSKNHDSGGVIFASIVNFSEFYEENYEGGKECYRVLNELIGDFDELLSKPDYSSIEKIKTIGATYMAASGLNTAQAQDGSHPQEHLQILFEFAKEMMRVVDDFNNNMLWFNFKLRVGFNHGPLTAGVIGTTKLLYDIWGDTVNIASRMDTTGVECRIQVSEESYRVLSKMGYDFDYRGTVNVKGKGQMKTYLYPKCTDHRVIPQHQLSISPDIRVQVDGSIGRSPTDEIANLVPSVQYVDKTSLGSDSSTQAKDAHLSPKRPWKEPVKAEERGRFGKAIEKDDCDETGIEEANELTKLNVSKSV

SEQ ID NO: 9299 - protein, 497 aa, Homo sapiens
MADPEVVVCSCSSHEEENRCNFNQQTSPSEELLLEDQMRRKLKFFFMNPCEKFWARGRKPWKLAIQILKIAMVTIQYLQLYNVSVGNHAYENKGTKQSAMAICQHFYKRGNIYPGNDTFDIDPEIETECFFVEPDEPFHIGTPAENKLNLTLDFHRLLTVELQFKLKAINLQTVRHQELPDCYDFTLTITFDNKAHSGRIKISLDNDISIRECKDWHVSGSIQKNTHYMMIFDAFVILTCLVSLILCIRSVIRGLQLQQEFVNFFLLHYKKEVSVSDQMEFVNGWYIMIIISDILTIIGSILKMEIQAKSLTSYDVCSILLGTSTMLVWLGVIRYLGFFAKYNLLILTLQAALPNVIRFCCCAAMIYLGYCFCGWIVLGPYHDKFRSLNMVSECLFSLINGDDMFATFAKMQQKSYLVWLFSRIYLYSFISLFIYMILSLFIALITDTYETIKQYQQDGFPETELRTFISECKDLPNSGKYRLEDDPPVSLFCCCKK

SEQ ID NO: 9300 - protein, 553 aa, Homo sapiens
MADPEVVVSSCSSHEEENRCNFNQQTSPSEELLLEDQMRRKLKFFFMNPCEKFWARGRKPWKLAIQILKIAMVTIQLVLFGLSNQMVVAFKEENTIAFKHLFLKGYMDRMDDTYAVYTQSDVYDQLIFAVNQYLQLYNVSVGNHAYENKGTKQSAMAICQHFYKRGNIYPGNDTFDIDPEIETECFFVEPDEPFHIGTPAENKLNLTLDFHRLLTVELQFKLKAINLQTVRHQELPDCYDFTLTITFDNKAHSGRIKISLDNDISIRECKDWHVSGSIQKNTHYMMIFDAFVILTCLVSLILCIRSVIRGLQLQQEFVNFFLLHYKKEVSVSDQMEFVNGWYIMIIISDILTIIGSILKMEIQAKSLTSYDVCSILLGTSTMLVWLGVIRYLGFFAKYNLLILTLQAALPNVIRFCCCAAMIYLGYCFCGWIVLGPYHDKFRSLNMVSECLFSLINGDDMFATFAKMQQKSYLVWLFSRIYLYSFISLFIYMILSLFIALITDTYETIKQYQQDGFPETELRTFISECKDLPNSGKYRLEDDPPVSLFCCCKK

SEQ ID NO: 9301 - protein, 899 aa, Homo sapiens
MLIFTFIECFLNISGPSRLCRGVSSTSVFLFPALNGYLFGNFPEPDMCVGESVSWHLFGMGNEIDIHSIYFYGNTFISRGHRTDVVNLFPATFLTTEMIAENPGKWMITCQVSDHLQAGMLGQYNVDNCKSDIFYPKMKGQQRRYFIAAEKILWDYAPQGYNKFSGLPLNASGSDSDLYFTQGDNRIGGKYWKVRYTEFVDATFTKRKRLSAEEAHLGILGPVIKAEVGDTLLVTFANKADKVYSILPHGVIYDKASDAAPNLDGFVKPGAHVKPGETFTYKWTVPESVSPTAGDPPCLTYLYFSAVDPIKDTSSGLVGPLLVCKKGVLNADGTQKGIDKEFYLLFTVFDENLSRYFDENIQKFIWHPFSIDKEDKEFVKSNRMHAVNGYMYGNQPGLNMCKRDRVSWHLIGLGTDTDMHGIVFQGNTIHLRGTHRDSLALFPHMATTAFMQPDHAGIFRVFCATMPHLSRGMGQIYEVSSCDNRDPSEQRYGMIRTFYIAAEEVEWDYAPNKNWEFEKQHVDARGERHGDIFMNRTENWIGSQYKKVVYREYTDGEFVEIKARPPREEHLELLGPMIHAEVGNTVLIIFKNKASRPYSISAQGVEEMDSGKQFQVPMTKPGEVKTYRWNIPKRSGPGPSDPNCIPWVYYSTVNFVKDTYSGLMGPLITCRKGVLNEKGRRSDVDYEFALLFLVFNENESWYLDDNIKKYLNKDPRDFKRTDDFEESNRMHAINGKIFGNLHGLIMNEDTMTNWYLLGIGSEVDIHTIHYHAESFLFKIDKSYREDVYDLFPGTFQTIELFADHPGTWLLHCHVSDHIHAGMETTYTVLRNIERPGKEQLYFFGKNLGPTGAKAALVILFIIGLLLLITTVILSLRLCSAMKQTDYQQVQSCALPTDAL

SEQ ID NO: 9302 - protein, 619 aa, Homo sapiens
IHLKNFASRPYSLHPHGVFYNKDSEGKYQSFITGVLSLFHKNDSRESWEVDDNLPGAHVKPGETFTYKWTVPESVSPTAGDPPCLTYLYFSAVDPIKDTSSGLVGPLLVCKKGVLNADGTQKGIDKEFYLLFTVFDENLSRYFDENIQKFIWHPFSIDKEDKEFVKSNRMHAVNGYMYGNQPGLNMCKRDRVSWHLIGLGTDTDMHGIVFQGNTIHLRGTHRDSLALFPHMATTAFMQPDHAGIFRVFCATMPHLSRGMGQIYEVSSCDNRDPSEQRYGMIRTFYIAAEEVEWDYAPNKNWEFEKQHVDARGERHGDIFMNRTENWIGSQYKKVVYREYTDGEFVEIKARPPREEHLELLGPMIHAEVGNTVLIIFKNKASRPYSISAQGVEEMDSGKQFQVPMTKPGEVKTYRWNIPKRSGPGPSDPNCIPWVYYSTVNFVKDTYSGLMGPLITCRKGVLNEKGRRSDVDYEFALLFLVFNENESWYLDDNIKKYLNKDPRDFKRTDDFEESNRMHAINGKIFGNLHGLIMNEDTMTNWYLLGIGSEVDIHTIHYHAESFLFKIDKSYREDVYDLFPGTFQTIELFADHPGTWLLHCHVSDHIHAGMETTYTVLRNIG

SEQ ID NO: 9303 - protein, 978 aa, Homo sapiens
MSTFVSSVKSSDSPTQHAVGFQKAFQLIRSTNNNTKFQANTDMVIIYLSAGITSKDSSEEDKKATLQVINEENSFLNNSVMILTYALMNDGVTGLKELAFLRDLAEQNSGKYGVPDRTALPVIKGSMMVLNQLSNLETTVGRFYTNLPNRMIDEAVFSLPFSDEMGDGLIMTVSKPCYFGNLLLGIVGVDVNLAYILEDVTYYQDSLASYTFLIDDKGYTLMHPSLTRPYLLSEPPLHTDIIHYENIPKFELVRQNILSLPLGSQIIAVPVNSSLSWHINKLRETGKEAYNVSYAWKMVQDTSFILCIVVIQPEIPVKQLKNLNTVPSSKLLYHRLDLLGQPSACLHFKQLATLESPTIMLSAGSFSSPYEHLSQPETKRMVEHYTAYLSDNTRLIANPGLKFSVRNEVMATSHVTDEWMTQMEMSSLNTYIVRRYIATPNGVLRIYPGSLMDKAFDPTRRQWYLHAVANPGLISLTGPYLDVGGAGYVVTISHTIHSSSTQLSSGHTVAVMGIDFTLRYFYKVLMDLLPVCNQDGGNKIRCFIMEDRGYLVAHPTLIDPKGHAPVEQQHITHKEPLVANDILNHPNFVKKNLCNSFSDRTVQRFYKFNTSLAGDLTNLVHGSHCSKYRLARIPGTNAFVGIVNETCDSLAFCACSMVDRLCLNCHRMEQNECECPCECPLEVNECTGNLTNAENRNPSCEVHLEPVTYTAIDPGLQDALHQCVNSRCSQRLESGDCFGVLDCEWCMVDSDGKTHLDKPYCAPQKECFGGIVGAKSPYVDDMGAIGDEVITLNMIKSAPVGPVAGGIMGCIMVLVLAVYAYRHQIHRRSHQHMSPLAAQEMSVRMSNLENDRDERDDDSHEDRGIISNTRFIAAVIERHAHSPERRRRYWGRSGTESDHGYSTMSPQEDSENPPCNNDPLSAGVDVGNHDEDLDLDTPPQTAALLSHKFHHYRSHHPTLHHSHHLQAAVTVHTVDAEC

SEQ ID NO: 9304 - protein, 1185 aa, Homo sapiens
KKIREKFNRYLDVVNRNKQVVEASYTAHLTSPLTAIQDCCTIPPSMMEFDGNFNTNVSRTISCDRLSTTVNSRAFNPGRDLNSVLADNLKSNPGIKWQYFSSEEGIFTVFPAHKFRCKGSYEHRSRPIYVSTVRPQSKHIVVILDHGASVTDTQLQIAKDAAQVILSAIDEHDKISVLTVADTVRTCSLDQCYKTFLSPATSETKRKMSTFVSSVKSSDSPTQHAVGFQKAFQLIRSTNNNTKFQANTDMVIIYLSAGITSKDSSEEDKKATLQVINEENSFLNNSVMILTYALMNDGVTGLKELAFLRDLAEQNSGKYGVPDRTALPVIKGSMMVLNQLSNLETTVGRFYTNLPNRMIDEAVFSLPFSDEMGDGLIMTVSKPCYFGNLLLGIVGVDVNLAYILEDVTYYQDSLASYTFLIDDKGYTLMHPSLTRPYLLSEPPLHTDIIHYENIPKFELVRQNILSLPLGSQIIAVPVNSSLSWHINKLRETGKEAYNVSYAWKMVQDTSFILCIVVIQPEIPVKQLKNLNTVPSSKLLYHRLDLLGQPSACLHFKQLATLESPTIMLSAGSFSSPYEHLSQPETKRMVEHYTAYLSDNTRLIANPGLKFSVRNEVMATSHVTDEWMTQMEMSSLNTYIVRRYIATPNGVLRIYPGSLMDKAFDPTRRQWYLHAVANPGLISLTGPYLDVGGAGYVVTISHTIHSSSTQLSSGHTVAVMGIDFTLRYFYKVLMDLLPVCNQDGGNKIRCFIMEDRGYLVAHPTLIDPKGHAPVEQQHITHKEPLVANDILNHPNFVKKNLCNSFSDRTVQRFYKFNTSLAGDLTNLVHGSHCSKYRLARIPGTNAFVGIVNETCDSLAFCACSMVDRLCLNCHRMEQNECECPCECPLEVNECTGNLTNAENRNPSCEVHQEPVTYTAIDPGLQDALHQCVNSRCSQRLESGDCFGVLDCEWCMVDSDGKTHLDKPYCAPQKECFGGIVGAKSPYVDDMGAIGDEVITLNMIKSAPVGPVAGGIMGCIMVLVLAVYAYRHQIHRRSHQHMSPLAAQEMSVRMSNLENDRDERDDDSHEDRGIISNTRFIAAVIERHAHSPERRRRYWGRSGTESDHGYSTMSPQEDSENPPCNNDPLSAGVDVGNHDEDLDLDTPPQTAALLSHKFHHYRSHHPTLHHSHHLQAAVTVHTVDAEC

SEQ ID NO: 9305 - protein, 608 aa, Homo sapiens
GASRKWEKRRPKAGWRAGGSRYLPSSLSRCGLLGRWRGRGWARRYGIFERCKELVEAGYDVRQPDKENVSLLHWAAINNRLDLVRFYISKGAVVDQLGGDLNSTPLHWAIRQGHLPMVILLLQHGADPTLIDGEGFSSIHLAVLFQHMPIIAYLISKGQSVNMTDVNGQTPLMLSAHKVIGPEPTGFLLKFNPSLNVVDKIHQNTPLHWAVAAGNVNAVDKLLEAGSSLDIQNVKGETPLDMALQNKNQLIIHMLKTEAKMRANQKFRLWRWLQKCELFLLLMLSVITMWAIGYILDFNSDSWLLKGCLLVTLFFLTSLFPRFLVGYKNLVYLPTAFLLSSVFWIFMTWFILFFPDLAGAPFYFSFIFSIVAFLYFFYKTWATDPGFTKASEEEKKVNIITLAETGSLDFRTFCTSCLIRKPLRSLHCHVCNCCVARYDQHCLWTGRCIGFGNHHYYIFFLFFLSMVCGWIIYGSFIYLSSHCATTFKEDGLWTYLNQIVACSPWVLYILMLATFHFSWSTFLLLNQLFQIAFLGLTSHERISLQKQSKHMKQTLSLRKTPYNLGFMQNLADFFQCGCFGLVKPCVVDWTSQYTMVFHPAREKVLRSV

SEQ ID NO: 9306 - protein, 622 aa, Homo sapiens [sequence omitted]

SEQ ID NO: 9307 - protein, 1522 aa, Homo sapiens
MKAVRNLLIYIFSTYLLVMFGFNAAQDFWCSTLVKGVIYGSYSVSEMFPKNFTNCTWTLENPDPTKYSIYLKFSKKDLSCSNFSLLAYQFDHFSHEKIKDLLRKNHSIMQLCNSKNAFVFLQYDKNFIQIRRVFPTNFPGLQKKGEEDQKSFFEFLVLNKVSPSQFGCHVLCTWLESCLKSENGRTESCGIMYTKCTCPQHLGEWGIDDQSLILLNNVVLPLNEQTEGCLTQELQTTQVCNLTREAKRPPKEEFGMMGDHTIKSQRPRSVHEKRVPQEQADAAKFMAQTGESGVEEWSQWSTCSVTCGQGSQVRTRTCVSPYGTHCSGPLRESRVCNNTALCPVHGVWEEWSPWSLCSFTCGRGQRTRTRSCTPPQYGGRPCEGPETHHKPCNIALCPVDGQWQEWSSWSQCSVTCSNGTQQRSRQCTAAAHGGSECRGPWAESRECYNPECTANGQWNQWGHWSGCSKSCDGGWERRIRTCQGAVITGQQCEGTGEEVRRCSEQRCPAPYEICPEDYLMSMVWKRTPAGDLAFNQCPLNATGTTSRRCSLSLHGVAFWEQPSFARCISNEYRHLQHSIKEHLAKGQRMLAGDGMSQVTKTLLDLTQRKNFYAGDLLMSVEILRNVTDTFKRASYIPASDGVQNFFQIVSNLLDEENKEKWEDAQQIYPGSIELMQVIEDFIHIVGMGMMDFQNSYLMTGNVVASIQKLPAASVLTDINFPMKGRKGMVDWARNSEDRVVIPKSIFTPVSSKELDESSVFVLGAVLYKNLDLILPTLRNYTVINSKIIVVTIRPEPKTTDSFLEIELAHLANGTLNPYCVLWDDSKTNESLGTWSTQGCKTVLTDASHTKCLCDRLSTFAILAQQPREIIMESSGTPSVTLIVGSGLSCLALITLAVVYAALWRYIRSERSIILINFCLSIISSNILILVGQTQTHNKSICTTTTAFLHFFFLASFCWVLTEAWQSYMAVTGKIRTRLIRKRFLCLGWGLPALVVATSVGFTRTKGYGTDHYCWLSLEGGLLYAFVGPAAAVVLVNMVIGILVFNKLVSRDGILDKKLKHRAGQMSEPHSGLTLKCAKCGVVSTTALSATTASNAMASLWSSCVVLPLLALTWMSAVLAMTDKRSILFQILFAVFDSLQGFVIVMVHCILRREVQDAFRCRLRNCQDPINADSSSSFPNGHAQIMTDFEKDVDIACRSVLHKDIGPCRAATITGTLSRISLNDDEEEKGTNPEGLSYSTLPGNVISKVIIQQPTGLHMPMSMNELSNPCLKKENSELRRTVYLCTDDNLRGADMDIVHPQERMMESDYIVMPRSSVNNQPSMKEESKMNIGMETLPHERLLHYKVNPEFNMNPPVMDQFNMNLEQHLAPQEHMQNLPFEPRTAVKNFMASELDDNAGLSRSETGSTISMSSLERRKSRYSDLDFEKVMHTRKRHMELFQELNQKFQTLDRFRDIPNTSSMENPAPNKNPWDTFKNPSEYPHYTTINVLDTEAKDALELRPAEWEKCLNLPLDVQEGDFQTEV

SEQ ID NO: 9308 - protein, 765 aa, Homo sapiens
MNTSGDPAQTGPEGCRGTMSAEEDARWLRWVTQQFKTIAGEDGEISLQEFKAALHVKESFFAERFFALFDSDRSGTITLQELQEALTLLIHGSPMDKLKFLFQVYDIDVCARQGASAGTEWGAGAGPHWASSPLGTGSGSIDPDELRTVLQSCLRESAISLPDEKLDQLTLALFESADADGNGAITFEELRDELQRFPGVMENLTISAAHWLTAPAPRPRPRRPRQLTRAYWHNHRSQLFCLATYAGLHVLLFGLAASAHRDLGASVMVAKGCGQCLNFDCSFIAVLMLRRCLTWLRATWLAQVLPLDQNIQFHQLMGYVVVGLSLVHTVAHTVNFVLQAQAEASPFQFWELLLTTRPGIGWVHGSASPTGVALLLLLLLMFICSSSCIRRSGHFEVFYWTHLSYLLVWLLLIFHGPNFWKWLLVPGILFFLEKAIGLAVSRMAAVCIMEVNLLPSKVTHLLIKRPPFFHYRPGDYLYLNIPTIARYEWHPFTISSAPEQKDTIWLHIRSQGQWTNRLYESFKASDPLGRGSKRLSRSVTMRKSQRSSKGSEILLEKHKFCNIKCYIDGPYGTPTRRIFASEHAVLIGAGIGITPFASILQSIMYRHQKRKHTCPSCQHSWIEGVQDNMKLHKVDFIWINRDQRSFEWFVSLLTKLEMDQAEEAQYGRFLELHMYMTSALGKNDMKAIGLQMALDLLANKEKKDSITGLQTRTQPGRPDWSKVFQKVAAEKKGKVQVFFCGSPALAKVLKGHCEKFGFRFFQENF

SEQ ID NO: 9309 - protein, 683 aa, Homo sapiens
MDDYKYQDNYGGYAPSDGYYRGNESNPEEDAQSDVTEGHDEEDEIYEGEYQGIPHPDDVKAKQAKMAPSRMDSLRGQTDLMAERLEDEEQLAHQYETIMDECGHGRFQWILFFVLGLALMADGVEVFVVSFALPSAEKDMCLSSSKKGMLGMIVYLGMMAGAFILGGLADKLGRKRVLSMSLAVNASFASLSSFVQGYGAFLFCRLISGIGIGGALPIVFAYFSEFLSREKRGEHLSWLGIFWMTGGLYASAMAWSIIPHYGWGFSMGTNYHFHSWRVFVIVCALPCTVSMVALKFMPESPRFLLEMGKHDEAWMILKQVHDTNMRAKGTPEKVFTVSNIKTPKQMDEFIEIQSSTGTWYQRWLVRFKTIFKQVWDNALYCVMGPYRMNTLILAVVWFAMAFSYYGLTVWFPDMIRYFQDEEYKSKMKVFFGEHVYGATINFTMENQIHQHGKLVNDKFTRMYFKHVLFEDTFFDECYFEDVTSTDTYFKNCTIESTIFYNTDLYEHKFINCRFINSTFLEQKEGCHMDLEQDNDFLIYLVSFLGSLSVLPGNIISALLMDRIGRLKMIGGSMLISAVCCFFLFFGNSESAMIGWQCLFCGTSIAAWNALDVITVELYPTNQRATAFGILNGLCKFGAILGNTIFASFVGITKVVPILLAAASLVGGGLIALRLPETREQVLM

SEQ ID NO: 9310 - protein, 1222 aa, Homo sapiens
MPKGGAPPWIMALMFTGHLLFLALLMFAFSTFEESVSNYSEWAVFTDDIDQFKTQKVQDFRPNQKLKKSMLHPSLYFDAGEIQAMRQKSRASHLHLFRAIRSAVTVMLSNPTYYLPPPKHADFAAKWNEIYGNNLPPLALYCLLCPEDKVAFEFVLEYMDRMVGYKDWLVENAPGDEVPIGHSLTGFATAFDFLYNLLDNHRRQKYLEKIWVITEEMYEYSKVRSWGKQLLHNHQATNMIALLTGALVTGVDKGSKANIWKQAVVDVMEKTMFLLNHIVDGSLDEGVAYGSYTAKSVTQYVFLAQRHFNINNLDNNWLKMHFWFYYATLLPGFQRTVGIADSNYNWFYGPESQLVFLDKFILKNGAGNWLAQQIRKHRPKDGPMVPSTAQRWSTLHTEYIWYDPQLTPQPPADYGTAKIHTFPNWGVVTYGAGLPNTQTNTFVSFKSGKLGGRAVYDIVHFQPYSWIDGWRSFNPGHEHPDQNSFTFAPNGQVFVSEALYGPKLSHLNNVLVFAPSPSSQCNKPWEGQLGECAQWLKWTGEEVGDAAGEIITASQHGEMVFVSGEAVSAYSSAMRLKSVYRALLLLNSQTLLVVDHIERQEDSPINSVSAFFHNLDIDFKYIPYKFMNRYNGAMMDVWDAHYKMFWFDHHGNSPMASIQEAEQAAEFKKRWTQFVNVTFQMEPTITRIAYVFYGPYINVSSCRFIDSSNPGLQISLNVNNTEHVVSIVTDYHNLKTRFNYLGFGGFASVADQGQITRFGLGTQAIVKPVRHDRIIFPFGFKFNIAVGLILCISLVILTFQWRFYLSFRKLMRWILILVIALWFIELLDVWSTCSQPICAKWTRTEAEGSKKSLSSEGHHMDLPDVVITSLPGSGAEILKQLFFNSSDFLYIRVPTAYIDIPETELEIDSFVDACEWKVSDIRSGHFRLLRGWLQSLVQDTKLHLQNIHLHEPNRGKLAQYFAMNKDKKRKFKRRESLPEQRSQMKGAFDRDAEYIRALRRHLVYYPSARPVLSLSSGSWTLKLHFFQEVLGASMRALYIVRDPRAWIYSMLYNSKPSLYSLKNVPEHLAKLFKIEGGKGKCNLNSGYAFEYEPLRKELSKSKSNAVSLLSHLWLANTAAALRINTDLLPTSYQLVKFEDIVHFPQKTTERIFAFLGIPLSPASLNQILFATSTNLFYLPYEGEISPTNTNVWKQNLPRDEIKLIENICWTLMDRLGYPKFMD

SEQ ID NO: 9311 - protein, 216 aa, Homo sapiens
MKVDRTKLKKTPTEAPADCRALIDKLKVCNDEQLLLELQQIKTWNIGKCELYHWVDLLDRFDGILADAGQTVENMSWMLVCDRPEREQLKMLLLAVLNFTALLIEYSFSRHLYSSIEHLTTLLASSDMQVVLAVLNLLYVFSKRSNYITRLGSDKRTPLLTRLQHLAESWGGKENGFGLAECCRDLHMMKYPPSATTLHFEFYADPGAEVKKKKKK

SEQ ID NO: 9312 - protein, 750 aa, Homo sapiens
AEGFGDAEGGRVWAAREPQGALAFAETMAEEEGPPVELRQRKKPKSSENKESAKEEKISDIPIPERAPKHVLFQRFAKIFIGCLAAVTSGMMYALYLSAYHERKFWFSNRQELEREITFQGDSAIYYSYYKDMLKAPSFERGVYELTHNNKTVSLKTINAVQQMSLYPELIASILYQATGSNEIIEPVYFYIGIVFGLQGIYVTALFVTSWLMSGTWLAGMLTVAWFVINRVDTTRIEYSIPLRENWALPYFACQIAALTGYLKSNLNTYGERFCYLLMSASTYTFMMMWEYSHYLLFLQAISLFLLDTFSVEQSDKVYEVYKIYIFSLFLGYLLQFENPALLVSPLLSLVAALMLAKCLQLNVKKGSFVAKIIKVINFYLVCTLTITLNIIMKMFVPHKENGHMLKFLEVKFGLNMTKNFTMNWLLCQESLQAPSQDFFLRLTQSSLLPFYILVLIICFLSMLQVIFRRINGKSLKETVTLEDGRIGERPEIIYHVIHTILLGSLAMVIEGLKYIWIPYVCMLAAFGVCSPELWMTLFKWLRLRTVHPILLALILSMAVPTIIGLSLWKEFFPRLMTELMELQEFYDPDTVELMTWIKRQAPVAAVFAGSPQLMGAIKLCTGWMVTSLPLYNDDDLLKRNENIYQIYSKRSAEDIYKILTSYKANYLIVEDAICNEVGPMRGCRVKDLLDIANGHMVCEEGDKLTYSKYGRFCHEVKINYSPYVNYFTRVYWNRSYFVYKINTVISFQS

SEQ ID NO: 9313 - protein, 894 aa, Homo sapiens [sequence omitted]

SEQ ID NO: 9314 - protein, 144 aa, Homo sapiens
MARQKKMGQSVLRAVFFLVLGLLGHSHGGFPNTISIGGLFMRNTVQEHSAFRFAVQLYNTNQNTTEKPFHLNYHVDHLDSSNSFSVTNACPAERDYLPWPGSIRENNWTALPCCKDHGLLHLKCSPGGARQNWAYCIWGVTGEL

SEQ ID NO: 9315 - protein, 894 aa, Homo sapiens [sequence omitted]

SEQ ID NO: 9316 - protein, 1438 aa, Homo sapiens
AAPRSFPLRLPRGDESAQRGGRRPPTLCALSPAPAAQPSPVRPAETMDTEDDPLLQDVWLEEEQEEEEATGETFLGAQKPGPQPGAGGQCCWRHWPLASRPPASGFWSTLGWAFTNPCCAGLVLFLGCSIPMALSAFMFLYYPPLDIDISYNAFEIRNHEASQRFDALTLALKSQFGSWGRNRRDLADFTSETLQRLISEQLQQLHLGNRSRQASRAPRVIPAASLGSPGPYRDTSAAQKPTANRSGRLRRETPPLEDLAANQSEDPRNQRLSKNGRYQPSIPPHAAVAANQSRARRGASRWDYSRAYVSANTQTHAHWRIELIFLARGDAERNIFTSERLVTIHEIERKIMDHPGFREFCWKPHEVLKDLPLGSYSYCSPPSSLMTYFFPTERGGKIYYDGMGQDLADIRGSLELAMTHPEFYWYVDEGLSADNLKSSLLRSEILFGAPLPNYYSVDDRWEEQRAKFQSFVVTYVAMLAKQSTSKVQVLYGGTDLFDYEVRRTFNNDMLLAFISSSCIAALVYILTSCSVFLSFFGIASIGLSCLVALFLYHVVFGIQYLGILNGVAAFVIVGIGVDDVFVFINTYRQATHLEDPQLRMIHTVQTAGKATFFTSLTTAAAYAANVFSQIPAVHDFGLFMSLIVSCCWLAVLVTMPAALGLWSLYLAPLESSCQTSCHQNCSRKTSLHFPGDVFATPEQVGGSPAQGPIPYLDDDIPLLEVEEEPVSLELGDVSLVSVSPEGLQPASNTGSRGHLIVQLQELLHHWVLWSAVKSRWVIVGLFVSILILSLVFASRLRPASRAPLLFRPDTNIQVLLDLKYNLSAEGISCITCSGLFQEKPHSLQNNIRTSLEKKRRGSGVPWASRPEATLQDFPGTVYISKVKSQGHPAVYRLSLNASLPAPWQAVSPGDGEVPSFQVYRAPFGNFTKKLTACMSTVGLLQAASPSRKWMLTTLACDAKRGWKFDFSFYVATKEQQHTRKLYFAQSHKPPFHGRVCMAPPGCLLSSSPDGPTKGFFFVPSEKVPKARLSATFGFNPCVNTGCGKPAVRPLVDTGAMVFVVFGIIGVNRTRQVDNHVIGDPGSVVYDSSFDLFKEIGHLCHLCKAIAANSELVKPGGAQCLPSGYSISSFLQMLHPECKELPEPNLLPGQLSHGAVGVREGRVQWISMAFESTTYKGKSSFQTYSDYLRWESFLQQQLQALPEGSVLRRGFQTCEHWKQIFMEIVGVQSALCGLVLSLLICVAAVAVFTTHILLLLPVLLSILGIVCLVVTIMYWSGWEMGAVEAISLSILVGSSVDYCVHLVEGYLLAGENLPPHQAEDARTQRQWRTLEAVRHVGVAIVSSALTTVIATVPLFFCIIAPFAKFGKIVALNTGVSILYTLTVSTALLGIMAPSSFTRTRTSFLKALGAVLLAGALGLGACLVLLQSGYKIPLPAGASL

SEQ ID NO: 9317 - protein, 425 aa, Homo sapiens [sequence omitted]

SEQ ID NO: 9318 - protein, 595 aa, Homo sapiens [sequence omitted]

SEQ ID NO: 9319 - protein, 676 aa, Homo sapiens
MAANVGSMFQYWKRFDLQQLQRELDATATVLANRQDESEQSRKRLIEQSREFKKNTPEDLRKQVAPLLKSFQGEIDALSKRSKEAEAAFLNVYKRLIDVPDPVPALDLGQQLQLKVQRLHDIETENQKLRETLEEYNKEFAEVKNQEVTIKALKEKIREYEQTLKNQAETIALEKEQKLQNDFAEKERKLQETQMSTTSKLEEAEHKVQSLQTALEKTRTELFDLKTKYDEETTAKADEIEMIMTDLERANQRAEVAQREAETLREQLSSANHSLQLASQIQKAPDVAIEVLTRSSLEVELAAKEREIAQLVEDVQRLQASLTKLRENSASQISQLEQQLSAKNSTLKQLEEKLKGQADYEEVKKELNILKSMEFAPSEGAGTQDAAKPLEVLLLEKNRSLQSENAALRISNSDLSGRCAELQVRITEAVATATEQRELIARLEQDLSIIQSIQRPDAEGAAEHRLEKIPEPIKEATALFYGPAAPASGALPEGQVDSLLSIISSQRERFRARNQELEAENRLAQHTLQALQSELDSLRADNIKLFEKIKFLQSYPGRGSGSDDTELRYSSQYEERLDPFSSFSKRERQRKYLSLSPWDKATLSMGRLVLSNKMARTIGFFYTLFLHCLVFLVLYKLAWSESMERDCATFCAKKFADHLHKFHENDNGAAAGDLWQ

SEQ ID NO: 9320 - protein, 1516 aa, Homo sapiens
MAANVGSMFQYWKRFDLQQLQRELDATATVLANRQDESEQSRKRLIEQSREFKKNTPEDLRKQVAPLLKSFQGEIDALSKRSKEAEAAFLNVYKRLIDVPDPVPALDLGQQLQLKVQRLHDIETENQKLRETLEEYNKEFAEVKNQEVTIKALKEKIREYEQTLKNQAETIALEKEQKLQNDFAEKERKLQETQMSTTSKLEEAEHKVQSLQTALEKTRTELFDLKTKYDEETTAKADEIEMIMTDLERANQRAEVAQREAETLREQLSSANHSLQLASQIQKAPDVEQAIEVLTRSSLEVELAAKEREIAQLVEDVQRLQASLTKLRENSASQISQLEQQLSAKNSTLKQLEEKLKGQADYEEVKKELNILKSMEFAPSEGAGTQDAAKPLEVLLLEKNRSLQSENAALRISNSDLSGSARRKGKDQPESRRPGSLPAPPPSQLPRNPGEQASNTNGTHQFSPAGLSQDFFSSSLASPSLPLASTGKFALNSLLQRQLMQSFYSKAMQEAGSTSMIFSTGPYSTNSISSQSPLQQSPDVNGMAPSPSQSESAGSVSEGEEMDTAEIARQVKEQLIKHNIGQRIFGHYVLGLSQGSVSEILARPKPWNKLTVRGKEPFHKMKQFLSDEQNILALRSIQGRQRENPGQSLNRLFQEVPKRRNGSEGNITTRIRASETGSDEAIKSILEQAKRELQVQKTAEPAQPSSASGSGNSDDAIRSILQQARREMEAQQAALDPALKQAPLSQSDITILTPKLLSTSPMPTVSSYPPLAISLKKPSAAPEAGASALPNPPALKKEAQDAPGLDPQGAADCAQGVLRQVKNEVGRSGAWKDHWWSAVQPERRNAASSEEAKAEETGGGKEKGSGGSGGGSQPRAERSQLQGPSSSEYWKEWPSAESPYSQSSELSLTGASRSETPQNSPLPSSPIVPMSKPTKPSVPPLTPEQYEVYMYQEVDTIELTRQVKEKLAKNGICQRIFGEKVLGLSQGSVSDMLSRPKPWSKLTQKGREPFIRMQLWLNGELGQGVLPVQGQQQGPVLHSVTSLQDPLQQGCVSSESTPKTSASCSPAPESPMSSSESVKSLTELVQQPCPPIEASKDSKPPEPSDPPASDSQPTTPLPLSGHSALSIQELVAMSPELDTYGITKRVKEVLTDNNLGQRLFGETILGLTQGSVSDLLARPKPWHKLSLKGREPFVRMQLWLNDPNNVEKLMDMKRMEKKAYMKRRHSSVSDSQPCEPPSVGTEYSQGASPQPQHQLKKPRVVLAPEEKEALKRAYQQKPYPSPKTIEDLATQLNLKTSTVINWFHNYRSRIRRELFIEEIQAGSQGQAGASDSPSARSGRAAPSSEGDSCDGVEATEGPGSADTEEPKSQGEAEREEVPRPAEQTEPPPSGTPGPDDARDDDHEGGPVEGPGPLPSPASATATAAPAAPEDAATSAAAAPGEGPAAPSSAPPPSNSSSSSAPRRPSSLQSLFGLPEAAGARDSRDNPLRKKKAANLNSIIHRLEKAASREEPIEWEF

SEQ ID NO: 9321 - protein, 678 aa, Homo sapiens [sequence omitted]

SEQ ID NO: 9322 - protein, 1505 aa, Homo sapiens [sequence omitted]

SEQ ID NO: 9323 - protein, 555 aa, Homo sapiens
ALHPCCFCFEGGGSMLSPQRVAAAASRGADDAMESSKPGPVQVVLVQKDQHSFELDEKALASILLQDHIRDLDVVVVSVAGAFRKGKSFILDFMLRYLYSQKESGHSNWLGDPEEPLTGFSWRGGSDPETTGIQIWSEVFTVEKPGGKKVAVVLMDTQGAFDSQSTVKDCAAIFALSTMTSSVQIYNLSQNIQEDDLQQLQLFTEYGRLAMDEIFRKPFQTLMFLVRDRSFPYEYSYGLQGGMAFLDKRLQVKEHQHEEIQNVRNHIHSCFSDVTCFLLPHPGLQVATSPDFDGKLKDIAGEFKEQLQALIPYVLNPSKLMEKEINGSKVTCRGLLEYFKAYIKIYQGEDLPHPKSMLQATAEAYNLAAAASAKDIYYNNMEEVCGGEKPYLSPDILEEKHCEFKQLALDHFKKTKKMGGKDFSFRYQQELEEEIKELYENFCKHNGSKNVFSTFRTPAVLFTGIVALYIASGLTGFIGLEVVAQLFNCMVGLLLIALLTWGYIRYSGQYRELGGAIDFGAAYVLEQASSHIGNSTQATVRDAVVGRPSMDKKAQ

SEQ ID NO: 9324 - protein, 567 aa, Homo sapiens
MRTAGRDPVSAGLQFPKDGSTQRPANRARFVPARTRPSPLHPCCFCFEGGGSMLSPQRVAAAASRGADDAMESSILLQDHIRDLDVVVVSVAGAFRKGKSFILDFMLRYLYSQKESGHSNWLGDPEEPLTGFSWRGGSDPETTGIQIWSEVFTVEKPGGKKVAVVLMDTQGAFDSQSTVKDCATIFALSTMTSSVQIYSLSQNIQEDDLQQLQLFTEYGRLAMDEIFQKPFQTLMFLVRDWSFPYEYSYGLQGGMAFLDKRLQVKEHQHEEIQNVRNHIHSCFSDVTCFLLPHPGLQVATSPDFDGKLKDIAGEFKEQLQALIPYVLNPSKLMEKEINGSKVTCRGLLEYFKAYIKIYQGEDLPHPKSMLQATAEANNLAAAASAKDIYYNNMEEVCGGEKPYLSPDILEEKHCEFKQLALDHFKKTKKMGGKDFSFRYQQELEEEIKELYENFCKHNGSKNVFSTFRTPAVLFTGIVALYIASGLTGFIGLEVVAQLFNCMVGLLLIALLTWGYIRYSGQYRELGGAIDFGAAYVLEQASSHIGNSTQATVRDAVVGRPSMDKKAQ

SEQ ID NO: 9325 - protein, 862 aa, Homo sapiens [sequence omitted]

SEQ ID NO: 9326 - protein, 855 aa, Homo sapiens
MSEARRDSTSSLQRKKPPWLKLDIPSAVPLTAEEPSFLQPLRRQAFLRSVSMPAETAHISSPHHELRRPVLQRQTSITQTIRRGTADWFGVSKDSDSTQKWQRKSIRHCSQRYGKLKPQVLRELDLPSQDNVSLTSTETPPPLYVGPCQLGMQKIIDPLARGRAFRVADDTAEGLSAPHTPVTPGAASLCSFSSSRSGFHRLPRRRKRESVAKMSFRAAAALMKGRSVRDGTFRRAQRRSFTPASFLEEDTTDFPDELDTSFFAREGILHEELSTYPDEVFESPSEAALKDWEKAPEQADLTGGALDRSELERSHLMLPLERGWRKQKEGAAAPQPKVRLRQEVVSTAGPRRGQRIAVPVRKLFAREKRPYGLGMVGRLTNRTYRKRIDSFVKRQIEDMDDHRPFFTYWLTFVHSLVAILAVCIYGIAPVGFSQHETVDSVLRNRGVYENVKYVQQENFWIGPSSEALIHLGAKFSPCMRQDPQVHSFIRSAREREKHSACCVRNDRSGCVQTSEEECSSTLAVWVKWPIHPSAPELAGHKRQFGSVCHQDPRVCDEPSSEDPHEWPEDITKWPICTKNSAGNHTNHPHMDCVITGRPCCIGTKGRCEITSREYCDFMRGYFHEEATLCSQVHCMDDVCGLLPFLNPEVPDQFYRLWLSLFLHAGILHCLVSICFQMTVLRDLEKLAGWHRIAIIYLLSGVTGNLASAIFLPYRAEVGPAGSQFGILACLFVELFQSWQILARPWRAFFKLLAVVLFLFTFGLLPWIDNFAHISGFISGLFLSFAFLPYISFGKFDLYRKRCQIIIFQVVFLGLLAGLVVLFYVYPVRCEWCEFLTCIPFTDKFCEKYELDAQLH

SEQ ID NO: 9327 - protein, 466 aa, Homo sapiens
MAEAEGVPTTPGPASGSTFRGRRDVSGSWERDQQVEAAQRALVEVLGPYEPLLSRVQAALVWERPARSALWCLGLNAAFWFFALTSLRLVFLLAFGLMIIVCIDQWKNKIWPEIKVPRPDALDNESWGFVHPRLLSVPELCHHVAEVWVSGTIFIRNVLLFKKQNPGKFCLLSCGILTFLAVLGRYVPGLLLSYLMLVTVMMWPLAVYHRLWDRAYVRLKPALQRLDFSVRGYMMSKQRERQLRRRALHPERAMDNHSDSEEELAAFCPQLDDSTVARELAITDSEHSDAEVSCTDNGTFNLSRGQTPLTEGSEDLDGHSDPEESFARDLPDFPSINMDPAGLDDEDDTSIGMPSLMYRSPPGAEEPQAPPASRDEAALPELLLGALPVGSNLTSNLASLVSQGMIQLALSGASQPGPSGAPAQRATRGFLRSPSSDLDTDAEGDDFELLDQSELSQLDPASSRSH

SEQ ID NO: 9328 - protein, 584 aa, Homo sapiens
CVAGAMYITGFAESISDLLGLGNIWAVRGISVAVLLALLGINLAGVKWIICLQLLLLFLLAVSTLDFVVGSFTHLDPEHGFIGYSPELLQNNTLPDYSPGESFFTVFGVFFPAATGVMAGFNMGGDLREPAASIPLGSLAAVGISWFLYIVFVFLLGAICTREALRYDFLIAEKVSLMGFLFLLGLYISSLASCMGGLYGAPRILQCIAQEKVIPALACLGQGKGPNKTPVAAICLTSLVTMAFVFVGQVNVLAPIVTINFMLTYVAVDYSYFSLSMCSCSLTPVPEPVLREGAEGLHCSEHLLLEKAPSYGSEGPAQRVLEGTLLEFTKDMDQLLQLTRSLRVASPGKERVTGPQKVRRGKARRPPSRPYKIASSWTSNPLLLSLSRSLTGCPLPPGRGRSPAGTSRLPRAKGLSLREHMESNLFLSCATNQSPVEKDFFLKSRLQEQDVWRRSTSFYTHMCNPWVSLLGAVGSLLIMFVIQWVYTLVNMGVAAIVYFYIGRASPGLHLGSASNFSFFRWMRSLLLPSCRSLQSPQEQIILAPSLAKVDMEMTQLTQENADFATRDRYHHSSLVNREQLMPHY

SEQ ID NO: 9329 - protein, 1447 aa, Homo sapiens
MENSLRCVWVPKLAFVLFGASLLSAHLQVTGFQIKAFTALRFLSEPSDAVTMRGGNVLLDCSAESDRGVPVIKWKKDGIHLALGMDERKQQLSNGSLLIQNILHSRHHKPDEGLYQCEASLGDSGSIISRTAKVAVAGPLRFLSQTESVTAFMGDTVLLKCEVIGEPMPTIHWQKNQQDLTPIPGDSRVVVLPSGALQISRLQPGDIGIYRCSARNPASSRTGNEAEVRILSDPGLHRQLYFLQRPSNVVAIEGKDAVLECCVSGYPPPSFTWLRGEEVIQLRSKKYSLLGGSNLLISNVTDDDSGMYTCVVTYKNENISASAELTVLVPPWFLNHPSNLYAYESMDIEFECTVSGKPVPTVNWMKNGDVVIPSDYFQIVGGSNLRILGVVKSDEGFYQCVAENEAGNAQTSAQLIVPKPAIPSSSVLPSAPRDVVPVLVSSRFVRLSWRPPAEAKGNIQTFTVFFSREGDNRERALNTTQPGSLQLTVGNLKPEAMYTFRVVAYNEWGPGESSQPIKVATQPELQVPGPVENLQAVSTSPTSILITWEPPAYANGPVQGYRLFCTEVSTGKEQNIEVDGLSYKLEGLKKFTEYSLRFLAYNRYGPGVSTDDITVVTLSDVPSAPPQNVSLEVVNSRSIKVSWLPPPSGTQNGFITGYKIRHRKTTRRGEMETLEPNNLWYLFTGLEKGSQYSFQVSAMTVNGTGPPSNWYTAETPENDLDESQVPDQPSSLHVRPQTNCIIMSWTPPLNPNIVVRGYIIGYGVGSPYAETVRVDSKQRYYSIERLESSSHYVISLKAFNNAGEGVPLYESATTRSITDPTDPVDYYPLLDDFPTSVPDLSTPMLPPVGVQAVALTHDAVRVSWADNSVPKNQKTSEVRLYTVRWRTSFSASAKYKSEDTTSLSYTATGLKPNTMYEFSVMVTKNRRSSTWSMTAHATTYEAAPTSAPKDFTVITREGKPRAVIVSWQPPLEANGKITAYILFYTLDKNIPIDDWIMETISGDRLTHQIMDLNLDTMYYFRIQARNSKGVGPLSDPILFRTLKVEHPDKMANDQGRHGDGGYWPVDTNLIDRSTLNEPPIGQMHPPHGSVTPQKNSNLLVIIVVTVGVITVLVVVIVAVICTRRSSAQQRKKRATHSAGKRKGSQKDLRPPDLWIHHEEMEMKNIEKPSGTDPAGRDSPIQSCQDLTPVSHSQSETQLGSKSTSHSGQDTEEAGSSMSTLERSLAARRAPRAKLMIPMDAQSNNPAVVSAIPVPTLESAQYPGILPSPTCGYPHPQFTLRPVPFPTLSVDRGFGAGRSQSVSEGPTTQQPPMLPPSQPEHSSSEEAPSRTIPTACVRPTHPLRSFANPLLPPPMSAIEPKVPYTPLLSQPGPTLPKTHVKTASLGLAGKARSPLLPVSVPTAPEVSEESHKPTEDSANVYEQDDLSEQMASLEGLMKQLNAITGSAF

SEQ ID NO: 9330 - protein, 1132 aa, Homo sapiens
MQRRGAGLGWPRQQQQQPPPLAVGPRAAAMVPSGGVPQGLGGRSACALLLLCYLNVVPSLGRQTSLTTSVIPKAEQSVAYKDFIYFTVFEGNVRNVSEVSVEYLCSQPCVVNLEAVVSSEFRSSIPVYKKRWKNEKHLHTSRTQIVHVKFPSIMVYRDDYFIRHSISVSAVIVRAWITHKYSGRDWNVKWEENLLHAVAKNYTLLQTIPPFERPFKDHQVCLEWNMGYIWNLRANRIPQCPLENDVVALLGFPYASSGENTGIVKKFPRFRNRELEATRRQRMDYPVFTVSLWLYLLHYCKANLCGILYFVDSNEMYGTPSVFLTEEGYLHIQMHLVKGEDLAVKTKFIIPLKEWFRLDISFNGGQIVVTTSIGQDLKSYHNQTISFREDFHYNDTAGYFIIGGSRYVAGIEGFFGPLKYYRLRSLHPAQIFNPLLEKQLAEQIKLYYERCAEVQEIVSVYASAAKHGGERQEACHLHNSYLDLQRRYGRPSMCRAFPWEKELKDKHPSLFQALLEMDLLTVPRNQNESVSEIGGKIFEKAVKRLSSIDGLHQISSIVPFLTDSSCCGYHKASYYLAVFYETGLNVPRDQLQGMLYSLVGGQGSERLSSMNLGYKHYQGIDNYPLDWELSYAYYSNIATKTPLDQHTLQGDQAYVETIRLKDDEILKVQTKEDGDVFMWLKHEATRGNAAAQQRLAQMLFWGQQGVAKNPEAAIEWYAKGALETEDPALIYDYAIVLFKGQGVKKNRRLALELMKKAASKGLHQAVNGLGWYYHKFKKNYAKAAKYWLKAEEMGNPDASYNLGVLHLDGIFPGVPGRNQTLAGEYFHKAAQGGHMEGTLWCSLYYITGNLETFPRDPEKAVVWAKHVAEKNGYLGHVIRKGLNAYLEGSWHEALLYYVLAAETGIEVSQTNLAHICEERPDLARRYLGVNCVWRYYNFSVFQIDAPSFAYLKMGDLYYYGHQNQSQDLELSVQMYAQAALDGDSQGFFNLALLIEEGTIIPHHILDFLEIDSTLHSNNISILQELYERCWSHSNEESFSPCSLAWLYLHLRLLWGAILHSALIYFLGTFLLSILIAWTVQYFQSVSASDPPPRPSQASPDTATSTASPAVTPAADASDQDQPTVTNNPEPRG

SEQ ID NO: 9331 - protein, 979 aa, Homo sapiens
MVYRDDYFIRHSISVSAVIVRAWITHKYSGRDWNVKWEENLLHAVAKNYTLLQTIPPFERPFKDHQVCLEWNMGYIWNLRANRIPQCPLENDVVALLGFPYASSGENTGIVKKFPRFRNRELEATRRQRMDYPVFTVSLWLYLLHYCKANLCGILYFVDSNEMYGTPSVFLTEEGYLHIQMHLVKGEDLAVKTKFIIPLKEWFRLDISFNGGQIVVTTSIGQDLKSYHNQTISFREDFHYNDTAGYFIIGGSRYVAGIEGFFGPLKYYRLRSLHPAQIFNPLLEKQLAEQIKLYYERCAEVQEIVSVYASAAKHGGERQEACHLHNSYLDLQRRYGRPSMCRAFPWEKELKDKHPSLFQALLEMDLLTVPRNQNESVSEIGGKIFEKAVKRLSSIDGLHQISSIVPFLTDSSCCGYHKASYYLAVFYETGLNVPRDQLQGMLYSLVGGQGSERLSSMNLGYKHYQGIDNYPLDWELSYAYYSNIATKTPLDQHTLQGDQAYVETIRLKDDEILKVQTKEDGDVFMWLKHEATRGNAAAQQRLAQMLFWGQQGVAKNPEAAIEWYAKGALETEDPALIYDYAIVLFKGQGVKKNRRLALELMKKAASKGLHQAVNGLGWYYHKFKKNYAKAAKYWLKAEEMGNPDASYNLGVLHLDGIFPGVPGRNQTLAGEIFHKAAQGGHMEGTLWCSLYYITGNLETFPRDPEKAVVWAKHVAEKNGYLGHVIRKGLNAYLEGSWHEALLYYVLAAETGIEVSQTNLAHICEERPDLARRYLGVNCVWRYYNFSVFQIDAPSFAYLKMGDLYYYGHQNQSQDLELSVQMYAQAALDGDSQGFFNLALLIEEGTIIPHHILDFLEIDSTLHSNNISILQELYERCWSHSNEESFSPCSLAWLYLHLRLLWGAILHSALIYFLGTFLLSILIAWTVQYFQSVSASDPPPRPSQASPDTATSTASPAVTPAADASDQDQPTVTNNPEPRG

SEQ ID NO: 9332 - protein, 1738 aa, Homo sapiens
MLKRKQSSRVEAQPVTDFGPDESLSDNADILWINKPWVHSLLRICAIISVISVCMNTPMTFEHYPPLQYVTFTLDTLLMFLYTAEMIAKMHIRGIVKGDSSYVKDRWCVFDGFMVFCLWVSLVLQVFEIADIVDQMSPWGMLRIPRPLIMIRAFRIYFRFELPRTRITNILKRSGEQIWSVSIFLLFFLLLYGILGVQMFGTFTYHCVVNDTKPGNVTWNSLAIPDTHCSPELEEGYQCPPGFKCMDLEDLGLSRQELGYSGFNEIGTSIFTVYEAASQEGWVFLMYRAIDSFPRWRSYFYFITLIFFLAWLVKNVFIAVIIETFAEIRVQFQQMWGSRSSTTSTATTQMFHEDAAGGWQLVAVDVNKPQGRAPACLQKMMRSSVFHMFILSMVTVDVIVAASNYYKGENFRRQYDEFYLAEVAFTVLFDLEALLKIWCLGFTGYISSSLHKFELLLVIGTTLHVYPDLYHSQFTYFQVLRVVRLIKISPALEDFVYKIFGPGKKLGSLVVFTASLLIVMSAISLQMFCFVEELDRFTTFPRAFMSMFQILTQEGWVDVMDQTLNAVGHMWAPVVAIYFILYHLFATLILLSLFVAVILDNLELDEDLKKLKQLKQSEANADTKEKLPLRLRIFEKFPNRPQMVKISKLPSDFTVPKIRESFMKQFIDRQQQDTCCLLRSLPTTSSSSCDHSKRSAIEDNKYIDQKLRKSVFSIRARNLLEKETAVTKILRACTRQRMLSGSFEGQPAKERSILSVQHHIRQERRSLRHGSNSQRISRGKSLETLTQDHSNTVRYRNAQREDSEIKMIQEKKEQAEMKRKVQEEELRENHPYFDKPLFIVGREHRFRNFCRVVVRARFNASKTDPVTGAVKNTKYHQLYDLLGLVTYLDWVMIIVTICSCISMMFESPFRRVMHAPTLQIAEYVFVIFMSIELNLKIMADGLFFTPTAVIRDFGGVMDIFIYLVSLIFLCWMPQNVPAESGAQLLMVLRCLRPLRIFKLVPQMRKVVRELFSGFKEIFLVSILLLTLMLVFASFGVQLFAGKLAKCNDPNIIRREDCNGIFRINVSVSKNLNLKLRPGEKKPGFWVPRVWANPRNFNFDNVGNAMLALFEVLSLKGWVEVRDVIIHRVGPIHGIYIHVFVFLGCMIGLTLFVGVVIANFNENKGTALLTVDQRRWEDLKSRLKIAQPLHLPPRPDNDGFRAKMYDITQHPFFKRTIALLVLAQSVLLSVKWDVEDPVTVPLATMSVVFTFIFVLEVTMKIIAMSPAGFWQSRRNRYDLLVTSLGVVWVVLHFALLNAYTYMMGACVIVFRFFSICGKHVTLKMLLLTVVVSMYKSFFIIVGMFLLLLCYAFAGVVLFGTVKYGENINRHANFSSAGKAITVLFRIVTGEDWNKIMHDCMVQPPFCTPDEFTYWATDCGNYAGALMYFCSFYVIIAYIMLNLLVAIIVENFSLFYSTEEDQLLSYNDLRHFQIIWNMVDDKREGVIPTFRVKFLLRLLRGRLEVDLDKDKLLFKHMCYEMERLHNGGDVTFHDVLSMLSYRSVDIRKSLQLEELLAREQLEYTIEEEVAKQTIRMWLKKCLKRIRAKQQQSCSIIHSLRESQQQELSRFLNPPSIETTQPSEDTNANSQDNSMQPETSSQQQLLSPTLSDRGGSRQDAADAGKPQRKFGQWRLPSAPKPISHSVSSVNLRFGGRTTMKSVVCKMNPMTDAASCGSEVKKWWTRQLTVESDESGDDLLDI

SEQ ID NO: 9333 - protein, 1172 aa, Homo sapiens
FMSMFQILTQEGWVDVMDQTLNAVGHMWAPVVAIYFILYHLFATLILLSLFVAVILDNLELDEDLKKLKQLKQSEANADTKEKLPLRLRIFEKFPNRPQMVKISKLPSDFTVPKIRESFMKQFIDRQQQDTCCLLRSLPTTSSSSCDHSKRSAIEDNKYIDQKLRKSVFSIRARNLLEKETAVTKILRACTRQRMLSGSFEGQPAKERSILSVQHHIRQERRSLRHGSNSQRISRGKSLETLTQDHSNTVRYRNAQREDSEIKMIQEKKEQAEMKRKVQEEELRENHPYFDKPLFIVGREHRFRNFCRVVVRARFNASKTDPVTGAVKNTKYHQLYDLLGLVTYLDWVMIIVTICSCISMMFESPFRRVMHAPTLQIAEYVFVIFMSIELNLKIMADGLFFTPTAVIRDFGGVMDIFIYLVSLIFLCWMPQNVPAESGAQLLMVLRCLRPLRIFKLVPQMRKVVRELFSGFKEIFLVSILLLTLMLVFASFGVQLFAGKLAKCNDPNIIRREDCNGIFRINVSVSKNLNLKLRPGEKKPGFWVPRVWANPRNFNFDNVGNAMLALFEVLSLKGWVEVRDVIIHRVGPIHGIYIHVFVFLGCMIGLTLFVGVVIANFNENKGTALLTVDQRRWEDLKSRLKIAQPLHLPPRPDNDGFRAKMYDITQHPFFKRTIALLVLAQSVLLSVKWDVEDPVTVPLATMSVVFTFIFVLEVTMKIIAMSPAGFWQSRRNRYDLLVTSLGVVWVVLHFALLVTLKMLLLTVVVSMYKSFFIIVGMFLLLLCYAFAGVVLFGTVKYGENINRHANFSSAGKAITVLFRIVTGEDWNKIMHDCMVQPPFCTPDEFTYWATDCGNYAGALMYFCSFYVIIAYIMLNLLVAIIVENFSLFYSTEEDQLLSYNDLRHFQIIWNMVDDKREGVIPTFRVKFLLRLLRGRLEVDLDKDKLLFKHMCYEMERLHNGGDVTFHDVLSMLSYRSVDIRKSLQLEELLAREQLEYTIEEEVAKQTIRMWLKKCLKRIRAKQQQSCSIIHSLRESQQQELSRFLNPPSIETTQPSEDTNANSQDNSMQPETSSQQQLLSPTLSDRGGSRQDAADAGKPQRKFGQWRLPSAPKPISHSVSSVNLRFGGRTTMKSVVCKMNPMTDAASCGSEVKKWWTRQLTVESDESGDDLLDI

SEQ ID NO: 9334 - protein, 730 aa, Homo sapiens
MPKNSKVVKRELDDDVTESVKDLLSNEDAADDAFKTSELIVDGQEEKDTDVEEGSEVEDERPAWNSKLQYILAQVGFSVGLGNVWRFPYLCQKNGGGAYLLPYLILLMVIGIPLFFLELSVGQRIRRGSIGVWNYISPKLGGIGFASCVVCYFVALYYNVIIGWSLFYFSQSFQQPLPWDQCPLVKNASHTFVEPECEQSSATTYYWYREALNISSSISESGGLNWKMTICLLAAWVMVCLAMIKGIQSSGKIIYFSSLFPYVVLICFLIRAFLLNGSIDGIRHMFTPKLEIMLEPKVWREAATQVFFALGLGFGGVIAFSSYNKRDNNCHFDAVLVSFINFFTSVLATLVVFAVLGFKANVINEKCITQNSETIMKFLKMGNISQDIIPHHINLSTVTAEDYHLVYDIIQKVKEEEFPALHLNSCKIEEELNKAVQGTGLAFIAFTEAMTHFPASPFWSVMFFLMLVNLGLGSMFGTIEGIVTPIVDTFKVRKEILTVICCLLAFCIGLIFVQRSGNYFVTMFDDYSATLPLLIVVILENIAVCFVYGIDKFMEDLKDMLGFAPSRYYYYMWKYISPLMLLSLLIASVVNMGLSPPGYNAWIEDKASEEFLSYPTWGLVVCVSLVVFAILPVPVVFIVRRFNLIDDSSGNLASVTYKRGRVLKEPVNLEGDDTSLIHGKIPSEMPSPNFGKNIYRKQSGSPTLDTAPNGRYGIGYLMADIMPDMPESDL

SEQ ID NO: 9335 - protein, 289 aa, Homo sapiens
MPKNSKVVKRELDDDVTESVKDLLSNEDAADDAFKTSELIVDGQEEKDTDVEEGSEVEDERPAWNSKLQYILAQVGFSVGLGNVWRFPYLCQKNGGGAYLLPYLILLMVIGIPLFFLELSVGQRIRRGSIGVWNYISPKLGGIGFASCVVCYFVALYYNVIIGWSLFYFSQSFQQPLPWDQCPLVKNASHTFVEPECEQSSATTYYWYREALNISSSISESGGLNWKMTICLLAAWVMVCLAMIKGIQSSGKVSMLEPFLILLITISGFIPLSNSVTDFCGQITHNTSF

SEQ ID NO: 9336 - protein, 604 aa, Homo sapiens
MGEVVDKGWASGGRRVQAVLAVPTGCAAGSELAFVQELGDTVAVWEHPLVLPCQVEGEPPVSISWQRDRLALANESGVTLMPDGSLHLAALPSRRSLPSRAHEYHCVAQNRYGRLVSRQARVQLASLSRFHQHPESIEVERGGVARFQCLIQGVPEPSISWEHNGTALNTANHRVTLLPSGILHITSVSQTDMGTYRCVAWNVASTRHSQDAQLTLSVGPLRLLQEPEILSGPQNLTLTVHQTAVLECIATSHPWPLVSWSRLDGRSIGVEGIQVLDILDTGNLMISDVSVQHSGVYVCAANRPGTHVRRTAQGVLLVQGEPQGPNWLPEFVQWPQSLSKPPGSSAIFTCVAQGVPESRLVWLKNGKVLSPGNNIRLTHNNSTLMLAGVSVEDEAIYQCVAENSTGSNQASARLVVTGGPEPPRPQGPACHGSLYFCHSSVLGATPPSSRDIIGYVLHLRPVGEPSGPELQEAISKGTSEHVFSNLEPATAYTIHLRAYSAEGASQDSAPIFASTMGSKPAALYDIKLQAFNGNGDGNSSARCVSLCDVPLATPDGTVSTESKTGCSCSQGESSPLPGVVVGIHVGLAALIICLLCLFLGWRHS

SEQ ID NO: 9337 - protein, 891 aa, Homo sapiens
MSQVGGRGDRCTQEVQGLVHGAGDLSASLAENSPTMSQNGYFEDSSYYKCDTDDTFEAREEILGDEAFDTANSSIVSGESIRFFVNVNLEMQATNTENEATSGGCVLLHTSRKYLKLKNFKEEIRAHRDLDGFLAQASIVLNETATSLDNVLRTMLRRFARDPDNNEPNCNLDLLMAMLFTDAGAPMRGKVHLLSDTIQGVTATVTGVRYQQSWLCIICTMKALQKRHVCISRLVRPQNWGENSCEVRFVILVLAPPKMKSTKTAMEVARTFATMFSDIAFRQKLLETRTEEEFKEALVHQRQLLTMVSHGPVAPRTKERSTVSLPAHRHPEPPKCKDFVPFGKGIREDIARRFPLYPLDFTDGIIGKNKAVGKYITTTLFLYFACLLPTIAFGSLNDENTDGAIDVQKTIAGQSIGGLLYALFSGQPLVILLTTAPLALYIQVIRVICDDYDLDFNSFYAWTGLWNSFFLALYAFFNLSLVMSLFKRSTEEIIALFISITFVLDAVKGTVKIFWKYYYGHYLDDYHTKRTSSLVSLSGLGASLNASLHTALNASFLASPTELPSATHSGQATAVLSLLIMLGTLWLGYTLYQFKKSPYLHPCVREILSDCALPIAVLAFSLISSHGFREIEMSKFRYNPSESPFAMAQIQSLSLRAVSGAMGLGFLLSMLFFIEQNLVAALVNAPENRLVKGTAYHWDLLLLAIINTGLSLFGLPWIHAAYPHSPLHVRALALVEERVENGHIYDTIVNVKETRLTSLGASVLVGLSLLLLPVPLQWIPKPVLYGLFLYIALTSLDGNQLVQRVALLLKEQTAYPPTHYIRRVPQRKIHYFTGLQVLQLLLLCAFGMSSLPYMKMIFPLIMIAMIPIRYILLPRIIEAKYLDVMDAEHRP

SEQ ID NO: 9338 - protein, 911 aa, Homo sapiens
MAEKAPPGLNRKTSRSTLSLPPEPVDIIRSKTCSRRVKINVGGLNHEVLWRTLDRLPRTRLGKLRDCNTHESLLEVCDDYNLNENEYFFDRHPGAFTSILNFYRTGKLHMMEEMCALSFGQELDYWGIDEIYLESCCQARYHQKKEQMNEELRREAETMREREGEEFDNTCCPDKRKKLWDLLEKPNSSVAAKILAIVSILFIVLSTIALSLNTLPELQETDEFGQLNDNRQLAHVEAVCIAWFTMEYLLRFLSSPNKWKFFKGPLNVIDLLAILPYYVTIFLTESNKSVLQFQNVRRVVQIFRIMRILRILKLARHSTGLQSLGFTLRRSYNELGLLILFLAMGIMIFSSLVFFAEKDEDATKFTSIPASFWWATITMTTVGYGDIYPKTLLGKIVGGLCCIAGVLVIALPIPIIVNNFSEFYKEQKRQEKAIKRREALERAKRNGSIVSMNLKDAFARSMELIDVAVEKAGESANTKDSADDNHLSPSRWKWARKALSETSSNKSFENKYQEVSQKDSHEQLNNTSSSSPQHLSAQKLEMLYNEITKTQPHSHPNPDCQEKPERPSAYEEEIEMEEVVCPQEQLAVAQTEVIVDMKSTSSIDSFTSCATDFTETERSPLPPPSASHLQMKFPTDLPGTEEHQRARGPPFLTLSREKGPAARDGTLEYAPVDITVNLDASGSQCGLHSPLQSDNATDSPKSSLKGSNPLKSRSLKVNFKENRGSAPQTPPSTARPLPVTTADFSLTTPQHISTILLEETPSQGDRPLLGTEVSAPCQGPSKGLSPRFPKQKLFPFSSRERRSFTEIDTGDDEDFLELPGAREEKQVDSSPNCFADKPSDGRDPLREEGSVGSSSPQDTGHNCRQDIYHAVSEVKKDSSQEGCKMENHLFAPEIHSNPGDTGYCPTRETSM

SEQ ID NO: 9339 - protein, 936 aa, Homo sapiens
MLGPAVLGLSLWALLHPGTGAPLCLSQQLRMKGDYVLGGLFPLGEAEEAGLRSRTRPSSPVCTRFSSNGLLWALAMKMAVEEINNKSDLLPGLRLGYDLFDTCSEPVVAMKPSLMFLAKAGSRDIAAYCNYTQYQPRVLAVIGPHSSELAMVTGKFFSFFLMPQVSYGASMELLSARETFPSFFRTVPSDRVQLTAAAELLQEFGWNWVAALGSDDEYGRQGLSIFSALAAARGICIAHEGLVPLPRADDSRLGKVQDVLHQVNQSSVQVVLLFASVHAAHALFNYSISSRLSPKVWVASEAWLTSDLVMGLPGMAQMGTVLGFLQRGAQLHEFPQYVKTHLALATDPAFCSALGEREQGLEEDVVGQRCPQCDCITLQNVSAGLNHHQTFSVYAAVYSVAQALHNTLQCNASGCPAQDPVKPWQLLENMYNLTFHVGGLPLRFDSSGNVDMEYDLKLWVWQGSVPRLHDVGRFNGSLRTERLKIRWHTSDNQKPVSRCSRQCQEGQVRRVKGFHSCCYDCVDCEAGSYRQNPDDIACTFCGQDEWSPERSTRCFRRRSRFLAWGEPAVLLLLLLLSLALGLVLAALGLFVHHRDSPLVQASGGPLACFGLVCLGLVCLSVLLFPGQPSPARCLAQQPLSHLPLTGCLSTLFLQAAEIFVESELPLSWADRLSGCLRGPWAWLVVLLAMLVEVALCTWYLVAFPPEVVTDWHMLPTEALVHCRTRSWVSFGLAHATNATLAFLCFLGTFLVRSQPGCYNRARGLTFAMLAYFITWVSFVPLLANVQVVLRPAVQMGALLLCVLGILAAFHLPRCYLLMRQPGLNTPEFFLGGGPGDAQGQNDGNTGNQGKHEAPILHPARHHSSGRPGGGTQAYAQGRARRGRGGTQLPTLPFAQWVDSIMTVTSTRDRAQDLTPARRQAHTGSPVRVPGSAPSRA

SEQ ID NO: 9340 - protein, 471 aa, Homo sapiens [sequence omitted]

SEQ ID NO: 9341 - protein, 2638 aa, Homo sapiens
MGIKSGFTFWNLVFLLTVSCVKGFIYTCGGTLKGLNGTIESPGFPYGYPNGANCTWVIIAEERNRIQIVFQSFALEEEYDYLSLYDGHPHPTNFRTRLTGFHLPPPVTSTKSVFSLRLTSDFAVSAHGFKVYYEELQSSSCGNPGVPPKGVLYGTRFDVGDKIRYSCVTGYILDGHPQLTCIANSVNTASWDFPVPICRAEDACGGTMRGSSGIISSPSFPNEYHNNADCTWTIVAEPGDTISLIFTDFQMEEKYDYLEIEGSEPPTIWLSGMNIPPPIISNKNWLRLHFVTDSNHRYRGFSAPYQGSSTLTHTTSTGELEEHNRTTTGAIAVASTPADVTVSSVTAVTIHRLSEEQRVQVTSLRNSGLDPNTSKDGLSPHPADTQSTRRRPRHAEQIERTKELAVVTHRVKKAIDFKSRGFKLFPGKDNSNKFSILNEGGIKTASNLCPDPGEPENGKRIGSDFSLGSTVQFSCDEDYVLQGAKSITCQRIAEVFAAWSDHRPVCKVKTCGSNLQGPSGTFTSPNFPFQYDSNAQCVWVITAVNTNKVIQINFEEFDLEIGYDTLTIGDGGEVGDPRTVLQVLTGSFVPDLIVSMSSQMWLHLQTDESVGSVGFKVNYKEIEKESCGDPGTPLYGIREGDGFSNRDVLRFECQFGFELIGEKSIVCQENNQWSANIPICIFPCLSNFTAPMGTVLSPDYPEGYGNNLNCIWTIISDPGSRIHLSFNDFDLESQFDFLAVKDGDSPESPILGTFTGAEVPSHLTSNSHILRLEFQADHSMSGRGFNITYNTFGHNECPDPGIPINARRFGDNFQLGSSISVICEEGFIKTQGTETITCILMDGKVMWSGLIPKCGAPCGGHFSAPSGVILSPGWPGYYKDSLNCEWVIEAEPGHSIKITFERFQTELNYDVLEVHDGPNLLSPLLGSYNGTQVPQFLFSSSNFIYLLFTTDNSRSNNGFKIHYESVTVNTYSCLDPGIPVHGRRYGHDFSIGSTVSFSCDSGYRLSHEEPLLCEKNHWWSHPLPTCDALCGGDVRGPSGTILSPGYPEFYPNSLNCTWTVDVTHGKGVQFNFHTFHLEDHHDYLLITENGSFTQPLARLTGSDLPPTINAGLYGNFRAQLRFISDFSISYEGFNITFSEYNLEPCEDPGIPQYGSRIGFNFGIGDTLTFSCSSGYRLEGTSEIICLGGGRRVWSAPLPRCVAECGASATNNEGILLSPNYPLNYENNHECIYSIQVQAGKGINISARTFHLAQGDVLKIYDGKDKTTHLLGAFTGASMRGLTLSSTSNQLWLEFNSDTEGTDEGFQLVYTSFELSHCEDPGIPQFGYKISDQGHFAGSTIIYGCNPGYTLHGSSLLKCMTGERRAWDYPLPSCIAECGGRFKGESSGRILSPGYPFPYDNNLRCMWMIEVDPGNIVSLQFLAFDTEASHDILRVWDGPPENDMLLKEISGSLIPEGIHSTLNIVTIQFDTDFYISKSGFAIQFSSSVATACRDPGVPMNGTRNGDGREPGDTVVFQCDPGYELQGEERITCIQVENRYFWQPSPPVCIAPCGGNLTGSSGFILSPNFPHPYPHSRDCDWTITVNADYVISLAFISFSIEPNYDFLYIYDGPDSNSPLIGSFQDSKLPERIESSSNTMHLAFRSDGSVSYTGFHLEYKAKLRESCFDPGNIMNGTRLGMDYKLGSTVTYYCDAGYVLQGYSTLTCIMGDDGRPGWNRALPSCHAPCGSRSTGSEGTVLSPNYPKNYSVGHNCVYSIAVPKEFVVFGQFVFFQTSLHDVVEVYDGPTQQSSLLSSLSGSHSGESLPLSSGNQITIRFTSVGPITAKGFHFVYQAVPRTSSTQCSSVPEPRFGRRIGNEFAVGSSVLFDCNPGYILHGSIAIRCETVPNSLAQWNDSLPTCIVPCGGILTKRKGTILSPGYPEPYDNNLNCVWKITVPEGAGIQVQVVSFATEHNWDSLDFYDGGDNNAPRLGSYSGTTIPHLLNSTSNNLYLNFQSDISVSAAGFHLEYTAIGLDSCPEPQTPSSGIKIGDRYMVGDVVSFQCDQGYSLQGHSHITCMPGPVRRWNYPIPICLAQCGGAMSDFSGVILSPGFPGNYPSSLDCTWTINLPIGFGVHLQFVNFSTETIHDYLEVRSGSSETSTVIGRLSGPQIPSSLFSTTHETSLYFHSDYSQNKQGFHIVYQAYQLQSCPDPRPFRNGFVIGNDFTVGQTISFECFPGYTLIGNSALTCLHGVSRNWNHPLPRCEALCGGNITAMNGTIYSPGYPDEYPNFQDCFWLVRVPPGNGIYINFTVLQTEPIYDFITVWDGPDQNSPQIGQFSGNTALESVYSTSNQILIKFHSDFTTSGFFVLSYHAYQLRVCQPPPPVPNAEILTEDDEFEIGDIIRYQCLPGFTLVGNAILTCRLGERLQMDGAPPVCQVLCPANELRLDSTGVILSPGYPDSYPNLQMCAWSISVEKGYNITMFVEFFQTEKEFDVLQVYDGPNIQSPVLISLSGDYSSAFNITSNGHEVFLQWSADHGNNKKGFRIRYIAFYCSTPESPPHGYIISQTGGQLNSVVRWACDRGFRLVGKSSAVCRKSSYGYHAWDAPVPACQGEVYYAKMNKNMNVRLAPFNVFIWITNFSENGNIRKHIVNSFHKNKA

SEQ ID NO: 9342 - protein, 337 aa, Homo sapiens
MRAVFIQGAEEHPAAFCYQVNGSCPRTVHTLGIQLVIYLTCAAGMLIIVLGNVFVAFAVSYFKALHTPTNFLLLSLALADMFLGLLVLPLSTIRSVESCWFFGDFLCRLHTYLDTLFCLTSIFHLCFISIDRHCAICDPLLYPSKFTVRVALRYILAGWGVPAAYTSLFLYTDVVETRLSQWLEEMPCVGSCQLLLNKFWGWLNFPLFFVPCLIMISLYVKIFVVATRQAQQITTLSKSLAGAAKHERKAAKTLGIVVGIYLLCWLPFTIDTMVDSLLHFITPPLVFDIFIWFAYFNSACNPIIYVFSYQWFRKALKLTLSQKVFSPQTRTVDLYQE

SEQ ID NO: 9343 - protein, 877 aa, Homo sapiens
MLTRLQVLTLALFSKGFLLSLGDHNFLRREIKIEGDLVLGGLFPINEKGTGTEECGRINEDRGIQRLEAMLFAIDEINKDDYLLPGVKLGVHILDTCSRDTYALEQSLEFVRASLTKVDEAEYMCPDGSYAIQENIPLLIAGVIGGSYSSVSIQVANLLRLFQIPQISYASTSAKLSDKSRYDYFARTVPPDFYQAKAMAEILRFFNWTYVSTVASEGDYGETGIEAFEQEARLRNICIATAEKVGRSNIRKSYDSVIRELLQKPNARVVVLFMRSDDSRELIAAASRANASFTWVASDGWGAQESIIKGSEHVAYGAITLELASQPVRQFDRYFQSLNPYNNHRNPWFRDFWEQKFQCSLQNKRNHRRVCDKHLAIDSSNYEQESKIMFVVNAVYAMAHALHKMQRTLCPNTTKLCDAMKILDGKKLYKDYLLKINFTAPFNPNKDADSIVKFDTFGDGMGRYNVFNFQNVGGKYSYLKVGHWAETLSLDVNSIHWSRNSVPTSQCSDPCAPNEMKNMQPGDVCCWICIPCEPYEYLADEFTCMDCGSGQWPTADLTGCYDLPEDYIRWEDAWAIGPVTIACLGFMCTCMVVTVFIKHNNTPLVKASGRELCYILLFGVGLSYCMTFFFIAKPSPVICALRRLGLGSSFAICYSALLTKTNCIARIFDGVKNGAQRPKFISPSSQVFICLGLILVQIVMVSVWLILEAPGTRRYTLAEKRETVILKCNVKDSSMLISLTYDVILVILCTVYAFKTRKCPENFNEAKFIGFTMYTTCIIWLAFLPIFYVTSSDYRVQTTTMCISVSLSGFVVLGCLFAPKVHIILFQPQKNVVTHRLHLNRFSVSGTGTTYSQSSASTYVPTVCNGREVLDSTTSSL

SEQ ID NO: 9344 - protein, 382 aa, Homo sapiens
MRSAARRGRAAPAARDSLPVLLFLCLLLKTCEPKTANAFKPNILLIMADDLGTGDLGCYGNNTLRTPNIDQLAEEGVRLTQHLAAAPLCTPSRAAFLTGRHSFRSGMDASNGYRALQWNAGSGGLPENETTFARILQQHGYATGLIGKWHQGVNCASRGDHCHHPLNHGFDYFYGMPFTLTNDCDPGRPPEVDAALRAQLWGYTQFLALGILTLAAGQTCGFFCVSARAVTGMAGVGCLFFISWYSSFGFVRRWNCILMRNHDVTEQPMVLEKTASLMLKEAVSYIERHKHGPFLLFLSLLHVHIPLVTTSAFLGKSQHGLYGDNVEEMDWLIASDFMSSSEVTESEAIKLMFRTMQRRCLPSMAFKKPWRGPVRLQILKRA

SEQ ID NO: 9345 - protein, 593 aa, Homo sapiens
MRSAARRGRAAPAARDSLPVLLFLCLLLKTCEPKTANAFKPNILLIMADDLGTGDLGCYGNNTLRTPNIDQLAEEGVRLTQHLAAAPLCTPSRAAFLTGRHSFRSGMDASNGYRALQWNAGSGGLPENETTFARILQQHGYATGLIGKWHQGVNCASRGDHCHHPLNHGFDYFYGMPFTLTNDCDPGRPPEVDAALRAQLWGYTQFLALGILTLAAGQTCGFFSVSARAVTGMAGVGCLFFISWYSSFGFVRRWNCILMRNHDVTEQPMVLEKTASLMLKEAVSYIERHKHGPFLLFLSLLHVHIPLVTTSAFLGKSQHGLYGDNVEEMDWLIGKVLNAIEDNGLKNSTFTYFTSDHGGHLEARDGHSQLGGWNGIYKGGKGMGGWEGGIRVPGIFHWPGVLPAGRVIGEPTSLMDVFPTVVQLVGGEVPQDRVIDGHSLVPLLQGAEARSAHEFLFHYCGQHLHAARWHQKDSGSVWKVHYTTPQFHPEERGLLTAEASAHAEWGGVTHHRPPLLFDLSRDPSEARPLTPDSEPLYHAVIARVGAAVSEHRQTLSPVPQQFSMSNILWKPWLQPCCGHFPFCSCHEDGDGTP

SEQ ID NO: 9346 - protein, 631 aa, Homo sapiens
LGSGGGGRTVSSTLSPGLGPRGGEGGRGGGGGGGGGGGTMFLHSVNLWNLAFYVFMVFLATLGLWDVFFGFEENKCSMSYMFEYPEYQKIELPKKLAKRYPAYELYLYGEGSYAEEHKILPLTGIPVLFLPGNAGSYKQVRSIGSIALRKAEDIDFKYHFDFFSVNFNEELVALYGGSLQKQTKFVHECIKTILKLYKGQEFAPKSVAIIGHSMGGLVARALLTLKNFKHDLINLLITQATPHVAPVMPLDRFITDFYTTVNNYWILNARHINLTTLSVAGGFRDYQVRSGLTFLPKLSHHTSALSVVSSAVPKTWVSTDHLSIVWCKQLQLTTVRAFFDLIDADTKQITQNSKKKLSVLYHHFIRHPSKHFEENPAIISDLTGTSMWVLVKVSKWTYVAYNESEKIYFTFPLENHRKIYTHVYCQSTMLDTNSWIFACINSTSMCLQGVDLSWKAELLPTIKYLTLRLQDYPSLSHLVVYVPSVRGSKFVVDCEFFKKEKRYIQLPVTHLFSFGLSSRKVVLNTNGLYYNLELLNFGQIYQAFKINVVSKCSAVKEEITSIYRLHIPWSYEDSLTIAQAPSSTEISLKLHIAQPENNTHVALFKMYTSSDCRYEVTVKTSFSQILGQVVA

SEQ ID NO: 9347 - protein, 1865 aa, Homo sapiens
MSQKSWIESTLTKRECVYIIPSSKDPHRCLPGCQICQQLVRCFCGRLVKQHACFTASLAMKYSDVKLGDHFNQAIEEWSVEKHTEQSPTDAYGVINFQGGSHSYRAKYVRLSYDTKPEVILQLLLKEWQMELPKLVISVHGGMQKFELHPRIKQLLGKGLIKAAVTTGAWILTGGVNTGVAKHVGDALKEHASRSSRKICTIGIAPWGVIENRNDLVGRDVVAPYQTLLNPLSKLNVLNNLHSHFILVDDGTVGKYGAEVRLRRELEKTINQQRIHARIGQGVPVVALIFEGGPNVILTVLEYLQESPPVPVVVCEGTGRAADLLAYIHKQTEEGGNLPDAAEPDIISTIKKTFNFGQNEALHLFQTLMECMKRKELITVFHIGSDEHQDIDVAILTALLKGTNASAFDQLILTLAWDRVDIAKNHVFVYGQQWLVGSLEQAMLDALVMDRVAFVKLLIENGVSMHKFLTIPRLEELYNTKQGPTNPMLFHLVRDVKQGNLPPGYKITLIDIGLVIEYLMGGTYRCTYTRKRFRLIYNSLGGNNRRSGRNTSSSTPQLRKSHESFGNRADKKEKMRHNHFIKTAQPYRPKIDTVMEEGKKKRTKDEIVDIDDPETKRFPYPLNELLIWACLMKRQVMARFLWQHGEESMAKALVACKIYRSMAYEAKQSDLVDDTSEELKQYSNDFGQLAVELLEQSFRQDETMAMKLLTYELKNWSNSTCLKLAVSSRLRPFVAHTCTQMLLSDMWMGRLNMRKNSWYKVILSILVPPAILLLEYKTKAEMSHIPQSQDAHQMTMDDSENNFQNITEEIPMEVFKEVRILDSNEGKNEMEIQMKSKKLPITRKFYAFYHAPIVKFWFNTLAYLGFLMLYTFVVLVQMEQLPSVQEWIVIAYIFTYAIEKVREIFMSEAGKVNQKIKVWFSDYFNISDTIAIISFFIGFGLRFGAKWNFANAYDNHVFVAGRLIYCLNIIFWYVRLLDFLAVNQQAGPYVMMIGKMVANMFYIVVIMALVLLSFGVPRKAILYPHEAPSWTLAKDIVFHPYWMIFGEVYAYEIDVCANDSVIPQICGPGTWLTPFLQAVYLFVQYIIMVNLLIAFFNNVYLQVKAISNIVWKYQRYHFIMAYHEKPVLPPPLIILSHIVSLFCCICKRRKKDKTSDGPKLFLTEEDQKKLHDFEEQCVEMYFNEKDDKFHSGSEERIRVTFERVEQMCIQIKEVGDRVNYIKRSLQSLDSQIGHLQDLSALTVDTLKTLTAQKASEASKVHNEITRELSISKHLAQNLIDDGPVRPSVWKKHGVVNTLSSSLPQGDLESNNPFHCNILMKDDKDPQCNIFGQDLPAVPQRKEFNFPEAGSSSGALFPSAVSPPELRQRLHGVELLKIFNKNQKLGSSSTSIPHLSSPPTKFFVSTPSQPSCKSHLETGTKDQETVCSKATEGDNTEFGAFVGHRDSMDLQRFKETSNKIKILSNNNTSENTLKRVSSLAGFTDCHRTSIPVHSKQAEKISRRPSTEDTHEVDSKAALIPDWLQDRPSNREMPSEEGTLNGLTSPFKPAMDTNYYYSAVERNNLMRLSQSIPFTPVPPRGEPVTVYRLEESSPNILNNSMSSWSQLGLCAKIEFLSKEEMGGGLRRAVKVQCTWSEHDILKSGHLYIIKSFLPEVVNTWSSIYKEDTVLHLCLREIQQQRAAQKLTFAFNQMKPKSIPYSPRFLEVFLLYCHSAGQWFAVEECMTGEFRKYNNNNGDEIIPTNTLEEIMLAFSHWTYEYTRGELLVLDLQGVGENLTDPSVIKAEEKRSCDMVFGPANLGEDAIKNFRAKHHCNSCCRKLKLPDLKRNDYTPDKIIFPQDEPSDLNLQPGNSTKESESTNSVRLML

SEQ ID NO: 9348 - protein, 4967 aa, Homo sapiens
MADGGEGEDEIQFLRTDDEVVLQCTATIHKEQQKLCLAAEGFGNRLCFLESTSNSKNVPPDLSICTFVLEQSLSVRALQEMLANTVEKSEGQVDVEKWKFMMKTAQGGGHRTLLYGHAILLRHSYSGMYLCCLSTSRSSTDKLAFDVGLQEDTTGEACWWTIHPASKQRSEGEKVRVGDDLILVSVSSERYLHLSYGNGSLHVDAAFQQTLWSVAPISSGSEAAQGYLIGGDVLRLLHGHMDECLTVPSGEHGEEQRRTVHYEGGAVSVHARSLWRLETLRVAWSGSHIRWGQPFRLRHVTTGKYLSLMEDKNLLLMDKEKADVKSTAFTFRSSKEKLDVGVRKEVDGMGTSEIKYGDSVCYIQHVDTGLWLTYQSVDVKSVRMGSIQRKAIMHHEGHMDDGISLSRSQHEESRTARVIRSTVFLFNRFIRGLDALSKKAKASTVDLPIESVSLSLQDLIGYFHPPDEHLEHEDKQNRLRALKNRQNLFQEEGMINLVLECIDRLHVYSSAAHFADVAGREAGESWKSILNSLYELLAALIRGNRKNCAQFSGSLDWLISRLERLEASSGILEVLHCVLVESPEALNIIKEGHIKSIISLLDKHGRNHKVLDVLCSLCVCHGVAVRSNQHLICDNLLPGRDLLLQTRLVNHVSSMRPNIFLGVSEGSAQYKKWYYELMVDHTEPFVTAEATHLRVGWASTEGYSPYPGGGEEWGGNGVGDDLFSYGFDGLHLWSGCIARTVSSPNQHLLRTDDVISCCLDLSAPSISFRINGQPVQGMFENFNIDGLFFPVVSFSAGIKVRFLLGGRHGEFKFLPPPGYAPCYEAVLPKEKLKVEHSREYKQERTYTRDLLGPTVSLTQAAFTPIPVDTSQIVLPPHLERIREKLAENIHELWVMNKIELGWQYGPVRDDNKRQHPCLVEFSKLPEQERNYNLQMSLETLKTLLALGCHVGISDEHAEDKVKKMKLPKNYQLTSGYKPAPMDLSFIKLTPSQEAMVDKLAENAHNVWARDRIRQGWTYGIQQDVKNRRNPRLVPYTPLDDRTKKSNKDSLREAVRTLLGYGYNLEAPDQDHAARAEVCSGTGERFRIFRAEKTYAVKAGRWYFEFETVTAGDMRVGWSRPGCQPDQELGSDERAFAFDGFKAQRWHQGNEHYGRSWQAGDVVGCMVDMNEHTMMFTLNGEILLDDSGSELAFKDFDVGDGFIPVCSLGVAQVGRMNFGKDVSTLKYFTICGLQEGYEPFAVNTNRDITMWLSKRLPQFLQVPSNHEHIEVTRIDGTIDSSPCLKVTQKSFGSQNSNTDIMFYRLSMPIECAEVFSKTVAGGLPGAGLFGPKNDLEDYDADSDFEVLMKTAHGHLVPDRVDKDKEATKPEFNNHKDYAQEKPSRLKQRFLLRRTKPDYSTSHSARLTEDVLADDRDDYDFLMQTSTYYYSVRIFPGQEPANVWVGWITSDFHQYDTGFDLDRVRTVTVTLGDEKGKVHESIKRSNCYMVCAGESMSPGQGRNNNGLEIGCVVDAASGLLTFIANGKELSTYYQVEPSTKLFPAVFAQATSPNVFQFELGRIKNVMPLSAGLFKSEHKNPVPQCPPRLHVQFLSHVLWSRMPNQFLKVDVSRISERQGWLVQCLDPLQFMSLHIPEENRSVDILELTEQEELLKFHYHTLRLYSAVCALGNHRVAHALCSHVDEPQLLYAIENKYMPGLLRAGYYDLLIDIHLSSYATARLMMNNEYIVPMTEETKSITLFPDENKKHGLPGIGLSTSLRPRMQFSSPSFVSISNECYQYSPEFPLDILKSKTIQMLTEAVKEGSLHARDPVGGTTEFLFVPLIKLFYTLLIMGIFHNEDLKHILQLIEPSVFKEAATPEEESDTLEKELSVDDAKLQGAGEEEAKGGKRPKEGLLQMKLPEPVKLQMCLLLQYLCDCQVRHRIEAIVAFSDDFVAKLQDNQRFRYNEVMQALNMSAALTARKTKEFRSPPQEQINMLLNFKDDKSECPCPEEIRDQLLDFHEDLMTHCGIELDEDGSLDGNSDLTIRGRLLSLVEKVTYLKKKQAEKPVESDSKKSSTLQQLISETMVRWAQESVIEDPELVRAMFVLLHRQYDGIGGLVRALPKTYTINGVSVEDTINLLASLGQIRSLLSVRMGKEEEKLMIRGLGDIMNNKVFYQHPNLMRALGMHETVMEVMVNVLGGGESKEITFPKMVANCCRFLCYFCRISRQNQKAMFDHLSYLLENSSVGLASPAMRGSTPLDVAAASVMDNNELALALREPDLEKVVRYLAGCGLQSCQMLVSKGYPDIGWNPVEGERYLDFLRFAVFCNGESVEENANVVVRLLIRRPECFGPALRGEGGNGLLAAMEEAIKIAEDPSRDGPSPNSGSSKTLDTEEEEDDTIHMGNAIMTFYSALIDLLGRCAPEMHLIHAGKGEAIRIRSILRSLIPLGDLVGVISIAFQMPTIAKDGNVVEPDMSAGFCPDHKAAMVLFLDRVYGIEVQDFLLHLLEVGFLPDLRAAASLDTAALSATDMALALNRYLCTAVLPLLTRCAPLFAGTEHHASLIDSLLHTVYRLSKGCSLTKAQRDSIEVCLLSICGQLRPSMMQHLLRRLVFDVPLLNEHAKMPLKLLTNHYERCWKYYCLPGGWGNFGAASEEELHLSRKLFWGIFDALSQKKYEQELFKLALPCLSAVAGALPPDYMESNYVSMMEKQSSMDSEGNFNPQPVDTSNITIPEKLEYFINKYAEHSHDKWSMDKLANGWIYGEIYSDSSKVQPLMKPYKLLSEKEKEIYRWPIKESLKTMLARTMRTERTREGDSMALYNRTRRISQTSQVSVDAAHGYSPRAIDMSNVTLSRDLHAMAEMMAENYHNIWAKKKKMELESKGGGNHPLLVPYDTLTAKEKAKDREKAQDILKFLQINGYAVSRGFKDLELDTPSIEKRFAYSFLQQLIRYVDEAHQYILEFDGGSRGKGEHFPYEQEIKFFAKVVLPLIDQYFKNHRLYFLSAASRPLCSGGHASNKEKEMVTSLFCKLGVLVRHRISLFGNDATSIVNCLHILGQTLDARTVMKTGLESVKSALRAFLDNAAEDLEKTMENLKQGQFTHTRNQPKGVTQIINYTTVALLPMLSSLFEHIGQHQFGEDLILEDVQVSCYRILTSLYALGTSKSIYVERQRSALGECLAAFAGAFPVAFLETHLDKHNIYSIYNTKSSRERAALSLPTNVEDVCPNIPSLEKLMEEIVELAESGIRYTQMPHVMEVILPMLCSYMSRWWEHGPENNPERAEMCCTALNSEHMNTLLGNILKIIYNNLGIDEGAWMKRLAVFSQPIINKVKPQLLKTHFLPLMEKLKKKAATVVSEEDHLKAEARGDMSEAELLILDEFTTLARDLYAFYPLLIRFVDYNRAKWLKEPNPEAEELFRMVAEVFIYWSKSHNFKREEQNFVVQNEINNMSFLITDTKSKMSKAAVSDQERKKMKRKGDRYSMQTSLIVAALKRLLPIGLNICAPGDQELIALAKNRFSLKDTEDEVRDIIRSNIHLQGKLEDPAIRWQMALYKDLPNRTDDTSDPEKTVERVLDIANVLFHLEQKSKRVGRRHYCLVEHPQRSKKAVWHKLLSKQRKRAVVACFRMAPLYNLPRHRAVNLFLQGYEKSWIETEEHYFEDKLIEDLAKPGAEPPEEDEGTKRVDPLHQLILLFSRTALTEKCKLEEDFLYMAYADIMAKSCHDEEDDDGEEEVKSFEEKEMEKQKLLYQQARLHDRGAAEMVLQTISASKGETGPMVAATLKLGIAILNGGNSTVQQKMLDYLKEKKDVGFFQSLAGLMQSCSVLDLNAFERQNKAEGLGMVTEEGSGEKVLQDDEFTCDLFRFLQLLCEGHNSDFQNYLRTQTGNNTTVNIIISTVDYLLRVQESISDFYWYYSGKDVIDEQGQRNFSKAIQVAKQVFNTLTEYIQGPCTGNQQSLAHSRLWDAVVGFLHVFAHMQMKLSQDSSQIELLKELMDLQKDMVVMLLSMLEGNVVNGTIGKQMVDMLVESSNNVEMILKFFDMFLKLKDLTSSDTFKEYDPDGKGVISKRDFHKAMESHKHYTQSETEFLLSCAETDENETLDYEEFVKRFHEPAKDIGFNVAVLLTNLSEHMPNDTRLQTFLELAESVLNYFQPFLGRIEIMGSAKRIERVYFEISESSRTQWEKPQVKESKRQFIFDVVNEGGEKEKMELFVNFCEDTIFEMQLAAQISESDLNERSANKEESEKERPEEQGPRMAFFSILTVRSALFALRYNILTLMRMLSLKSLKKQMKKVKKMTVKDMVTAFFSSYWSIFMTLLHFVASVFRGFFRIICSLLLGGSLVEGAKKIKVAELLANMPDPTQDEVRGDGEEGERKPLEAALPSEDLTDLKELTEESDLLSDIFGLDLKREGGQYKLIPHNPNAGLSDLMSNPVPMPEVQEKFQEQKAKEEEKEEKEETKSEPEKAEGEDGEKEEKAKEDKGKQKLRQLHTHRYGEPEVPESAFWKKIIAYQQKLLNYFARNFYNMRMLALFVAFAINFILLFYKVSTSSVVEGKELPTRSSSENAKVTSLDSSSHRIIAVHYVLEESSGYMEPTLRILAILHTVISFFCIIGYYCLKVPLVIFKREKEVARKLEFDGLYITEQPSEDDIKGQWDRLVINTQSFPNNYWDKFVKRKVMDKYGEFYGRDRISELLGMDKAALDFSDAREKKKPKKDSSLSAVLNSIDVKYQMWKLGVVFTDNSFLYLAWYMTMSVLGHYNNFFFAAHLLDIAMGFKTLRTILSSVTHNGKQLVLTVGLLAVVVYLYTVVAFNFFRKFYNKSEDGDTPDMKCDDMLTCYMFHMYVGVRAGGGIGDEIEDPAGDEYEIYRIIFDITFFFFVIVILLAIIQGLIIDAFGELRDQQEQVKEDMETKCFICGIGNDYFDTVPHGFETHTLQEHNLANYLFFLMYLINKDETEHTGQESYVWKMYQERCWEFFPAGDCFRKQYEDQLN

SEQ ID NO: 9349 - protein, 4975 aa, Homo sapiens
MADGGEGEDEIQFLRTDDEVVLQCTATIHKEQQKLCLAAEGFGNRLCFLESTSNSKNVPPDLSICTFVLEQSLSVRALQEMLANTVEKSEGQVDVEKWKFMMKTAQGGGHRTLLYGHAILLRHSYSGMYLCCLSTSRSSTDKLAFDVGLQEDTTGEACWWTIHPASKQRSEGEKVRVGDDLILVSVSSERYLHLSYGNGSLHVDAAFQQTLWSVAPISSGSEAAQGYLIGGDVLRLLHGHMDECLTVPSGEHGEEQRRTVHYEGGAVSVHARSLWRLETLRVAWSGSHIRWGQPFRLRHVTTGKYLSLMEDKNLLLMDKEKADVKSTAFTFRSSKEKLDVGVRKEVDGMGTSEIKYGDSVCYIQHVDTGLWLTYQSVDVKSVRMGSIQRKAIMHHEGHMDDGISLSRSQHEESRTARVIRSTVFLFNRFIRGLDALSKKAKASTVDLPIESVSLSLQDLIGYFHPPDEHLEHEDKQNRLRALKNRQNLFQEEGMINLVLECIDRLHVYSSAAHFADVAGREAGESWKSILNSLYELLAALIRGNRKNCAQFSGSLDWLISRLERLEASSGILEVLHCVLVESPEALNIIKEGHIKSIISLLDKHGRNHKVLDVLCSLCVCHGVAVRSNQHLICDNLLPGRDLLLQTRLVNHVSSMRPNIFLGVSEGSAQYKKWYYELMVDHTEPFVTAEATHLRVGWASTEGYSPYPGGGEEWGGNGVGDDLFSYGFDGLHLWSGCIARTVSSPNQHLLRTDDVISCCLDLSAPSISFRINGQPVQGMFENFNIDGLFFPVVSFSAGIKVRFLLGGRHGEFKFLPPPGYAPCYEAVLPKEKLKVEHSREYKQERTYTRDLLGPTVSLTQAAFTPIPVDTSQIVLPPHLERIREKLAENIHELWVMNKIELGWQYGPVRDDNKRQHPCLVEFSKLPEQERNYNLQMSLETLKTLLALGCHVGISDEHAEDKVKKMKLPKNYQLTSGYKPAPMDLSFIKLTPSQEAMVDKLAENAHNVWARDRIRQGWTYGIQQDVKNRRNPRLVPYTPLDDRTKKSNKDSLREAVRTLLGYGYNLEAPDQDHAARAEVCSGTGERFRIFRAEKTYAVKAGRWYFEFETVTAGDMRVGWSRPGCQPDQELGSDERAFAFDGFKAQRWHQGNEHYGRSWQAGDVVGCMVDMNEHTMMFTLNGEILLDDSGSELAFKDFDVGDGFIPVCSLGVAQVGRMNFGKDVSTLKYFTICGLQEGYEPFAVNTNRDITMWLSKRLPQFLQVPSNHEHIEVTRIDGTIDSSPCLKVTQKSFGSQNSNTDIMFYRLSMPIECAEVFSKTVAGGLPGAGLFGPKNDLEDYDADSDFEVLMKTAHGHLVPDRVDKDKEATKPEFNNHKDYAQEKPSRLKQRFLLRRTKPDYSTSHSARLTEDVLADDRDDYDFLMQTSTYYYSVRIFPGQEPANVWVGWITSDFHQYDTGFDLDRVRTVTVTLGDEKGKVHESIKRSNCYMVCAGESMSPGQGRNNNGLEIGCVVDAASGLLTFIANGKELSTYYQVEPSTKLFPAVFAQATSPNVFQFELGRIKNVMPLSAGLFKSEHKNPVPQCPPRLHVQFLSHVLWSRMPNQFLKVDVSRISERQGWLVQCLDPLQFMSLHIPEENRSVDILELTEQEELLKFHYHTLRLYSAVCALGNHRVAHALCSHVDEPQLLYAIENKYMPGLLRAGYYDLLIDIHLSSYATARLMMNNEYIVPMTEETKSITLFPDENKKHGLPGIGLSTSLRPRMQFSSPSFVSISNECYQYSPEFPLDILKSKTIQMLTEAVKEGSLHARDPVGGTTEFLFVPLIKLFYTLLIMGIFHNEDLKHILQLIEPSVFKEAATPEEESDTLEKELSVDDAKLQGAGEEEAKGGKRPKEGLLQMKLPEPVKLQMCLLLQYLCDCQVRHRIEAIVAFSDDFVAKLQDNQRFRYNEVMQALNMSAALTARKTKEFRSPPQEQINMLLNFKDDKSECPCPEEIRDQLLDFHEDLMTHCGIELDEDGSLDGNSDLTIRGRLLSLVEKVTYLKKKQAEKPVESDSKKSSTLQQLISETMVRWAQESVIEDPELVRAMFVLLHRQYDGIGGLVRALPKTYTINGVSVEDTINLLASLGQIRSLLSVRMGKEEEKLMIRGLGDIMNNKVFYQHPNLMRALGMHETVMEVMVNVLGGGESKEITFPKMVANCCRFLCYFCRISRQNQKAMFDHLSYLLENSSVGLASPAMRGSTPLDVAAASVMDNNELALALREPDLEKVVRYLAGCGLQSCQMLVSKGYPDIGWNPVEGERYLDFLRFAVFCNGESVEENANVVVRLLIRRPECFGPALRGEGGNGLLAAMEEAIKIAEDPSRDGPSPNSGSSKTLDTEEEEDDTIHMGNAIMTFYSALIDLLGRCAPEMHLIHAGKGEAIRIRSILRSLIPLGDLVGVISIAFQMPTIAKDGNVVEPDMSAGFCPDHKAAMVLFLDRVYGIEVQDFLLHLLEVGFLPDLRAAASLDTAALSATDMALALNRYLCTAVLPLLTRCAPLFAGTEHHASLIDSLLHTVYRLSKGCSLTKAQRDSIEVCLLSICGQLRPSMMQHLLRRLVFDVPLLNEHAKMPLKLLTNHYERCWKYYCLPGGWGNFGAASEEELHLSRKLFWGIFDALSQKKYEQELFKLALPCLSAVAGALPPDYMESNYVSMMEKQSSMDSEGNFNPQPVDTSNITIPEKLEYFINKYAEHSHDKWSMDKLANGWIYGEIYSDSSKVQPLMKPYKLLSEKEKEIYRWPIKESLKTMLARTMRTERTREGDSMALYNRTRRISQTSQVSVDAAHGYSPRAIDMSNVTLSRDLHAMAEMMAENYHNIWAKKKKMELESKGGGNHPLLVPYDTLTAKEKAKDREKAQDILKFLQINGYAVSRGFKDLELDTPSIEKRFAYSFLQQLIRYVDEAHQYILEFDGGSRGKGEHFPYEQEIKFFAKVVLPLIDQYFKNHRLYFLSAASRPLCSGGHASNKEKEMVTSLFCKLGVLVRHRISLFGNDATSIVNCLHILGQTLDARTVMKTGLESVKSALRAFLDNAAEDLEKTMENLKQGQFTHTRNQPKGVTQIINYTTVALLPMLSSLFEHIGQHQFGEDLILEDVQVSCYRILTSLYALGTSKSIYVERQRSALGECLAAFAGAFPVAFLETHLDKHNIYSIYNTKSSRERAALSLPTNVEDVCPNIPSLEKLMEEIVELAESGIRYTQMPHVMEVILPMLCSYMSRWWEHGPENNPERAEMCCTALNSEHMNTLLGNILKIIYNNLGIDEGAWMKRLAVFSQPIINKVKPQLLKTHFLPLMEKLKKKAATVVSEEDHLKAEARGDMSEAELLILDEFTTLARDLYAFYPLLIRFVDYNRAKWLKEPNPEAEELFRMVAEVFIYWSKSHNFKREEQNFVVQNEINNMSFLITDTKSKMSKAAVSDQERKKMKRKGDRYSMQTSLIVAALKRLLPIGLNICAPGDQELIALAKNRFSLKDTEDEVRDIIRSNIHLQGKLEDPAIRWQMALYKDLPNRTDDTSDPEKTVERVLDIANVLFHLEQKSKRVGRRHYCLVEHPQRSKKAVWHKLLSKQRKRAVVACFRMAPLYNLPRHRAVNLFLQGYEKSWIETEEHYFEDKLIEDLAKPGAEPPEEDEGTKRVDPLHQLILLFSRTALTEKCKLEEDFLYMAYADIMAKSCHDEEDDDGEEEVKSFEVTGSQRSKEKEMEKQKLLYQQARLHDRGAAEMVLQTISASKGETGPMVAATLKLGIAILNGGNSTVQQKMLDYLKEKKDVGFFQSLAGLMQSCSVLDLNAFERQNKAEGLGMVTEEGSGEKVLQDDEFTCDLFRFLQLLCEGHNSDFQNYLRTQTGNNTTVNIIISTVDYLLRVQESISDFYWYYSGKDVIDEQGQRNFSKAIQVAKQVFNTLTEYIQGPCTGNQQSLAHSRLWDAVVGFLHVFAHMQMKLSQDSSQIELLKELMDLQKDMVVMLLSMLEGNVVNGTIGKQMVDMLVESSNNVEMILKFFDMFLKLKDLTSSDTFKEYDPDGKGVISKRDFHKAMESHKHYTQSETEFLLSCAETDENETLDYEEFVKRFHEPAKDIGFNVAVLLTNLSEHMPNDTRLQTFLELAESVLNYFQPFLGRIEIMGSAKRIERVYFEISESSRTQWEKPQVKESKRQFIFDVVNEGGEKEKMELFVNFCEDTIFEMQLAAQISESDLNERSANKEESEKERPEEQGPRMAFFSILTVRSALFALRYNILTLMRMLSLKSLKKQMKKVKKMTVKDMVTAFFSSYWSIFMTLLHFVASVFRGFFRIICSLLLGGSLVEGAKKIKVAELLANMPDPTQDEVRGDGEEGERKPLEAALPSEDLTDLKELTEESDLLSDIFGLDLKREGGQYKLIPHNPNAGLSDLMSNPVPMPEVQEKFQEQKAKEEEKEEKEETKSEPEKAEGEDGEKEEKAKEDKGKQKLRQLHTHRYGEPEVPESAFWKKIIAYQQKLLNYFARNFYNMRMLALFVAFAINFILLFYKVSTSSVVEGKELPTRSSSENAKVTSLDSSSHRIIAVHYVLEESSGYMEPTLRILAILHTVISFFCIIGYYCLKVPLVIFKREKEVARKLEFDGLYITEQPSEDDIKGQWDRLVINTQSFPNNYWDKFVKRKVMDKYGEFYGRDRISELLGMDKAALDFSDAREKKKPKKDSSLSAVLNSIDVKYQMWKLGVVFTDNSFLYLAWYMTMSVLGHYNNFFFAAHLLDIAMGFKTLRTILSSVTHNGKQLVLTVGLLAVVVYLYTVVAFNFFRKFYNKSEDGDTPDMKCDDMLTCYMFHMYVGVRAGGGIGDEIEDPAGDEYEIYRIIFDITFFFFVIVILLAIIQGLIIDAFGELRDQQEQVKEDMETKCFICGIGNDYFDTVPHGFETHTLQEHNLANYLFFLMYLINKDETEHTGQESYVWKMYQERCWEFFPAGDCFRKQYEDQLN

SEQ ID NO: 9350 - protein, 562 aa, Homo sapiens
MTRNARPNIVLLMADDLGVGDLCCYGNNSVSTPNIDRLASEGVRLTQHLAAASMCTPSRAAFLTGRYPIRSGMVSAYNLNRAFTWLGGSGGLPTNETTFAKLLQHRGYRTGLIGKWHLGLSCASRNDHCYHPLNHGFHYFYGVPFGLLSDCQASKTPELHRWLRIKLWISTVALALVPFLLLIPKFARWFSVPWKVIFVFALLAFLFFTSWYSSYGFTRRWNCILMRNHEIIQQPMKEEKVASLMLKEALAFIERYKREPFLLFFSFLHVHTPLISKKKFVGRSKYGRYGDNVEEMDWMVGKILDALDQERLANHTLVYFTSDNGGHLEPLDGAVQLGGWNGIYKGGKGMGGWEGGIRVPGIFRWPSVLEAGRVINEPTSLMDIYPTLSYIGGGILSQDRVIDGQNLMPLLEGRASHSDHEFLFHYCGVYLHTVRWHQKDCATVWKAHYVTPKFYPEGTGACYGSGICSCSGDVTYHDPPLLFDISRDPSEALPLNPDNEPLFDSVIKKMEAAIREHRRTLTPVPQQFSVFNTIWKPWLQPCCGTFPFCGCDKEDDILPMAP

SEQ ID NO: 9351 - protein, 1689 aa, Homo sapiens
MLASPEPKGLVPFTKESFELIKQHIAKTHNEDHEEEDLKPTPDLEVGKKLPFIYGNLSQGMVSEPLEDVDPYYYKKKNTFIVLNKNRTIFRFNAASILCTLSPFNCIRRTTIKVLVHPYPFLLTSTFFQLFILISVLIDCVFMSLTNLPKWRPVLENTLLGIYTFEILVKLFARGVWAGSFSFLGDPWNWLDFSVTVFEVIIRYSPLDFIPTLQTARTLRILKIIPLNQGLKSLVGVLIHCLKQLIGVIILTLFFLSIFSLIGMGLFMGNLKHKCFRWPQENENETLHNRTGNPYYIRETENFYYLEGERYALLCGNRTDAGQCPEGYVCVKAGINPDQGFTNFDSFGWALFALFRLMAQDYPEVLYHQILYASGKVYMIFFVVVSFLFSFYMASLFLGILAMAYEEEKQRVGEISKKIEPKFQQTGKELQEGNETDEAKTIQIEMKKRSPISTDTSLDVLEDATLRHKEELEKSKKICPLYWYKFAKTFLIWNCSPCWLKLKEFVHRIIMAPFTDLFLIICIILNVCFLTLEHYPMSKQTNTLLNIGNLVFIGIFTAEMIFKIIAMHPYGYFQVGWNIFDSMIVFHGLIELCLANVAGMALLRLFRMLRIFKLGKYWPTFQILMWSLSNSWVALKDLVLLLFTFIFFSAAFGMKLFGKNYEEFVCHIDKDCQLPRWHMHDFFHSFLNVFRILCGEWVETLWDCMEVAGQSWCIPFYLMVILIGNLLVLYLFLALVSSFSSCKDVTAEENNEAKNLQLAVARIKKGINYVLLKILCKTQNVPKDTMDHVNEVYVKEDISDHTLSELSNTQDFLKDKEKSSGTEKNATENESQSLIPSPSVSETVPIASGESDIENLDNKEIQSKSGDGGSKEKIKQSSSSECSTVDIAISEEEEMFYGGERSKHLKNGCRRGSSLGQISGASKKGKIWQNIRKTCCKIVENNWFKCFIGLVTLLSTGTLAFEDIYMDQRKTIKILLEYADMIFTYIFILEMLLKWMAYGFKAYFSNGWYRLDFVVVIVFCLSLIGKTREELKPLISMKFLRPLRVLSQFERMKVVVRALIKTTLPTLNVFLVCLMIWLIFSIMGVDLFAGRFYECIDPTSGERFPSSEVMNKSRCESLLFNESMLWENAKMNFDNVGNGFLSLLQVATFNGWITIMNSAIDSVAVNIQPHFEVNIYMYCYFINFIIFGVFLPLSMLITVIIDNFNKHKIKISSNIFITVKQRKQYRRLKKLMYEDSQRPVPRPLNKLQGFIFDVVTSQAFNVIVMVLICFQAIAMMIDTDVQSLQMSIALYWINSIFVMLYTMECILKLIAFRCFYFTIAWNIFDFMVVIFSITGLCLPMTVGSYLVPPSLVQLILLSRIIHMLRLGKGPKVFHNLMLPLMLSLPALLNIILLIFLVMFIYAVFGMYNFAYVKKEAGINDVSNFETFGNSMLCLFQVAIFAGWDGMLDAIFNSKWSDCDPDKINPGTQVRGDCGNPSVGIFYFVSYILISWLIIVNMYIVVVMEFLNIASKKKNKTLSEDDFRKFFQVWKRFDPDRTQYIDSSKLSDFAAALDPPLFMAKPNKGQLIALDLPMAVGDRIHCLDILLAFTKRVMGQDVRMEKVVSEIESGFLLANPFKITCEPITTTLKRKQEAVSATIIQRAYKNYRLRRNDKNTSDIHMIDGDRDVHATKEGAYFDKAKEKSPIQSQI

SEQ ID NO: 9352 - protein, 1948 aa, Homo sapiens [sequence omitted]

SEQ ID NO: 9353 - protein, 1928 aa, Homo sapiens
MAPTWGPGMVSVVGPMGLLVVLLVGGCAAEEPPRFIKEPKDQIGVSGGVASFVCQATGDPKPRVTWNKKGKKVNSQRFETIEFDESAGAVLRIQPLRTPRDENVYECVAQNSVGEITVHAKLTVLREDQLPSGFPNIDMGPQLKVVERTRTATMLCAASGNPDPEITWFKDFLPVDPSASNGRIKQLRSETFESTPIRGALQIESSEETDQGKYECVATNSAGVRYSSPANLYVRVRRVAPRFSILPMSHEIMPGGNVNITCVAVGSPMPYVKWMQGAEDLTPEDDMPVGRNVLELTDVKDSANYTCVAMSSLGVIEAVAQITVKSLPKAPGTPMVTENTATSITITWDSGNPDPVSYYVIEYKSKSQDGPYQIKEDITTTRYSIGGLSPNSEYEIWVSAVNSIGQGPPSESVVTRTGEQAPASAPRNVQARMLSATTMIVQWEEPVEPNGLIRGYRVYYTMEPEHPVGNWQKHNVDDSLLTTVGSLLEDETYTVRVLAFTSVGDGPLSDPIQVKTQQGVPGQPMNLRAEARSETSITLSWSPPRQESIIKYELLFREGDHGREVGRTFDPTTSYVVEDLKPNTEYAFRLAARSPQGLGAFTPVVRQRTLQSKPSAPPQDVKCVSVRSTAILVSWRPPPPETHNGALVGYSVRYRPLGSEDPEPKEVNGIPPTTTQILLEALEKWTQYRITTVAHTEVGPGPESSPVVVRTDEDVPSAPPRKVEAEALNATAIRVLWLGPVPGRQHGQIRGYQVHYVRMEGAEGRGPPRIKDVMLADAQWETDDTAEYEMVITNLQPETAYSITVAAYTMKGDGARSKPKVVVTKGAVLGRPTLSVQQTPEGSLLARWEPPAGTAEDQVLGYRLQFGREDSTPLATLEFPPSEDRYTASGVHKGATYVFRLAARSRGGLGEEAAEVLSIPEDTPRGHPQILEAAGNASAGTVLLRWLPPVPAERNGAIVKYTVAVREAGALGPARETELPAAAEPGAENAVTLQGLKPDTAYDLQVRAHTRRGPGPFSPPVRYRTFLRDQVSPKNFKVKMIMKTSVLLSWEFPDNYNSPTPYKIQYNGLTLDVDGRTTKKLITHLKPHTFYNFVLTNRGSSLGGLQQTVTAWTAFNLLNGKPSVAPKPDADGFIMVYLPDGQSPVPVQSYFIVMVPLRKSRGGQFLTPLGSPEDMDLEELIQDISRLQRRTVRHSRQLEVPRPYIAARFSVLPPTFHPGDQKQYGGFDNRGLEPGHRYVLFVLAVLQKSEPTFAASPFSDPFQLDNPDPQPIVDGEEGLIWVIGPVLAVVFIICIVIAILLYKNKPDSKRKDSEPRTKCLLNNADLAPHHPKDPVEMRRINFQTPGMLSHPPIPIADMAEHTERLKANDSLKLSQEYESIDPGQQFTWEHSNLEVNKPKNRYANVIAYDHFRVILQPIEGIMGSDYINANYVDGYRRQNAYIATQGPLPETFGDFWRMVWEQRSATIVMMTRLEEKSRIKCDQYWPNRGTETYGFIQVTLLDTIELATFCVRTFSLHKNGSSEKREVRQFQFTAWPDHGVPEYPTPFLAFLRRVKTCNPPDAGPIVVHCSAGVGRTGCFIVIDAMLERIKPEKTVDVYGHVTLMRSQRNYMVQTEDQYSFIHEALLEAVGCGNTEVPARSLYAYIQKLAQVEPGEHVTGMELEFKRLANSKAHTSRFISANLPCNKFKNRLVNIMPYESTRVCLQPIRGVEGSDYINASFIDGYRQQKAYIATQGPLAETTEDFWRMLWENNSTIVVMLTKLREMGREKCHQYWPAERSARYQYFVVDPMAEYNMPQYILREFKVTDARDGQSRTVRQFQFTDWPEQGVPKSGEGFIDFIGQVHKTKEQFGQDGPISVHCSAGVGRTGVFITLSIVLERMRYEGVVDIFQTVKMLRTQRPAMVQTEDEYQFCYQAALEYLGSFDHYAT

SEQ ID NO: 9354 - protein, 1501 aa, Homo sapiens
MAPTWGPGMVSVVGPMGLLVVLLVGGCAAEEPPRFIKEPKDQIGVSGGVASFVCQATGDPKPRVTWNKKGKKVNSQRFETIEFDESAGAVLRIQPLRTPRDENVYECVAQNSVGEITVHAKLTVLREDQLPSGFPNIDMGPQLKVVERTRTATMLCAASGNPDPEITWFKDFLPVDPSASNGRIKQLRSGALQIESSEETDQGKYECVATNSAGVRYSSPANLYVRVRRVAPRFSILPMSHEIMPGGNVNITCVAVGSPMPYVKWMQGAEDLTPEDDMPVGRNVLELTDVKDSANYTCVAMSSLGVIEAVAQITVKSLPKAPGTPMVTENTATSITITWDSGNPDPVSYYVIEYKSKSQDGPYQIKEDITTTRYSIGGLSPNSEYEIWVSAVNSIGQGPPSESVVTRTGEQAPASAPRNVQARMLSATTMIVQWEEPVEPNGLIRGYRVYYTMEPEHPVGNWQKHNVDDSLLTTVGSLLEDETYTVRVLAFTSVGDGPLSDPIQVKTQQGVPGQPMNLRAEARSETSITLSWSPPRQESIIKYELLFREGDHGREVGRTFDPTTSYVVEDLKPNTEYAFRLAARSPQGLGAFTPVVRQRTLQSISPKNFKVKMIMKTSVLLSWEFPDNYNSPTPYKIQYNGLTLDVDGRTTKKLITHLKPHTFYNFVLTNRGSSLGGLQQTVTAWTAFNLLNGKPSVAPKPDADGFIMVYLPDGQSPVPVQSYFIVMVPLRKSRGGQFLTPLGSPEDMDLEELIQDISRLQRRSLRHSRQLEVPRPYIAARFSVLPPTFHPGDQKQYGGFDNRGLEPGHRYVLFVLAVLQKSEPTFAASPFSDPFQLDNPDPQPIVDGEEGLIWVIGPVLAVVFIICIVIAILLYKNKPDSKRKDSEPRTKCLLNNADLAPHHPKDPVEMRRINFQTPGMLSHPPIPIADMAEHTERLKANDSLKLSQEYESIDPGQQFTWEHSNLEVNKPKNRYANVIAYDHSRVILQPIEGIMGSDYINANYVDGYRRQNAYIATQGPLPETFGDFWRMVWEQRSATIVMMTRLEEKSRIKCDQYWPNRGTETYGFIQVTLLDTIELATFCVRTFSLHKNGSSEKREVRQFQFTAWPDHGVPEYPTPFLAFLRRVKTCNPPDAGPIVVHCSAGVGRTGCFIVIDAMLERIKPEKTVDVYGHVTLMRSQRNYMVQTEDQYSFIHEALLEAVGCGNTEVPARSLYAYIQKLAQVEPGEHVTGMELEFKRLANSKAHTSRFISANLPCNKFKNRLVNIMPYESTRVCLQPIRGVEGSDYINASFIDGYRQQKAYIATQGPLAETTEDFWRMLWENNSTIVVMLTKLREMGREKCHQYWPAERSARYQYFVVDPMAEYNMPQYILREFKVTDARDGQSRTVRQFQFTDWPEQGVPKSGEGFIDFIGQVHKTKEQFGQDGPISVHCSAGVGRTGVFITLSIVLERMRYEGVVDIFQTVKMLRTQRPAMVQTEDEYQFCYQAALEYLGSFDHYAT

SEQ ID NO: 9355 - protein, 1910 aa, Homo sapiens
MAPTWGPGMVSVVGPMGLLVVLLVGGCAAEEPPRFIKEPKDQIGVSGGVASFVCQATGDPKPRVTWNKKGKKVNSQRFETIEFDESAGAVLRIQPLRTPRDENVYECVAQNSVGEITVHAKLTVLREDQLPSGFPNIDMGPQLKVVERTRTATMLCAASGNPDPEITWFKDFLPVDPSASNGRIKQLRSGALQIESSEETDQGKYECVATNSAGVRYSSPANLYVRVRRVAPRFSILPMSHEIMPGGNVNITCVAVGSPMPYVKWMQGAEDLTPEDDMPVGRNVLELTDVKDSANYTCVAMSSLGVIEAVAQITVKSLPKAPGTPMVTENTATSITITWDSGNPDPVSYYVIEYKSKSQDGPYQIKEDITTTRYSIGGLSPNSEYEIWVSAVNSIGQGPPSESVVTRTGEQAPASAPRNVQARMLSATTMIVQWEEPVEPNGLIRGYRVYYTMEPEHPVGNWQKHNVDDSLLTTVGSLLEDETYTVRVLAFTSVGDGPLSDPIQVKTQQGVPGQPMNLRAEARSETSITLSWSPPRQESIIKYELLFREGDHGREVGRTFDPTTSYVVEDLKPNTEYAFRLAARSPQGLGAFTPVVRQRTLQSKPSAPPQDVKCVSVRSTAILVSWRPPPPETHNGALVGYSVRYRPLGSEDPEPKEVNGIPPTTTQILLEALEKWTQYRITTVAHTEVGPGPESSPVVVRTDEDVPSAPPRKVEAEALNATAIRVLWRSPAPGRQHGQIRGYQVHYVRMEGAEARGPPRIKDVMLADAQEMVITNLQPETAYSITVAAYTMKGDGARSKPKVVVTKGAVLGRPTLSVQQTPEGSLLARWEPPAGTAEDQVLGYRLQFGREDSTPLATLEFPPSEDRYTASGVHKGATYVFRLAARSRGGLGEEAAEVLSIPEDTPRGHPQILEAAGNASAGTVLLRWLPPVPAERNGAIVKYTVAVREAGALGPARETELPAAAEPGAENALTLQGLKPDTAYDLQVRAHTRRGPGPFSPPVRYRTFLRDQVSPKNFKVKMIMKTSVLLSWEFPDNYNSPTPYKIQYNGLTLDVDGRTTKKLITHLKPHTFYNFVLTNRGSSLGGLQQTVTAWTAFNLLNGKPSVAPKPDADGFIMVYLPDGQSPVPVQSYFIVMVPLRKSRGGQFLTPLGSPEDMDLEELIQDISRLQRRSLRHSRQLEVPRPYIAARFSVLPPTFHPGDQKQYGGFDNRGLEPGHRYVLFVLAVLQKSEPTFAASPFSDPFQLDNPDPQPIVDGEEGLIWVIGPVLAVVFIICIVIAILLYKNKPDSKRKDSEPRTKCLLNNADLAPHHPKDPVEMRRINFQTPGMLSHPPIPIADMAEHTERLKANDSLKLSQEYESIDPGQQFTWEHSNLEVNKPKNRYANVIAYDHSRVILQPIEGIMGSDYINANYVDGYRRQNAYIATQGPLPETFGDFWRMVWEQRSATIVMMTRLEEKSRIKCDQYWPNRGTETYGFIQVTLLDTIELATFCVRTFSLHKNGSSEKREVRQFQFTAWPDHGVPEYPTPFLAFLRRVKTCNPPDAGPIVVHCSAGVGRTGCFIVIDAMLERIKPEKTVDVYGHVTLMRSQRNYMVQTEDQYSFIHEALLEAVGCGNTEVPARSLYAYIQKLAQVEPGEHVTGMELEFKRLANSKAHTSRFISANLPCNKFKNRLVNIMPYESTRVCLQPIRGVEGSDYINASFIDGYRQQKAYIATQGPLAETTEDFWRMLWENNSTIVVMLTKLREMGREKCHQYWPAERSARYQYFVVDPMAEYNMPQYILREFKVTDARDGQSRTVRQFQFTDWPEQGVPKSGEGFIDFIGQVHKTKEQFGQDGPISVHCSAGVGRTGVFITLSIVLERMRYEGVVDIFQTVKMLRTQRPAMVQTEDEYQFCYQAALEYLGSFDHYAT

SEQ ID NO: 9356 - protein, 1530 aa, Homo sapiens
MAPTWGPGMVSVVGPMGLLVVLLVGGCAAEEPPRFIKEPKDQIGVSGGVASFVCQATGDPKPRVTWNKKGKKVNSQRFETIEFDESAGAVLRIQPLRTPRDENVYECVAQNSVGEITVHAKLTVLREDQLPSGFPNIDMGPQLKVVERTRTATMLCAASGNPDPEITWFKDFLPVDPSASNGRIKQLRSETFESTPIRGALQIESSEETDQGKYECVATNSAGVRYSSPANLYVRELREVRRVAPRFSILPMSHEIMPGGNVNITCVAVGSPMPYVKWMQGAEDLTPEDDMPVGRNVLELTDVKDSANYTCVAMSSLGVIEAVAQITVKSLPKAPGTPMVTENTATSITITWDSGNPDPVSYYVIEYKSKSQDGPYQIKEDITTTRYSIGGLSPNSEYEIWVSAVNSIGQGPPSESVVTRTGEQAPASAPRNVQARMLSATTMIVQWEEPVEPNGLIRGYRVYYTMEPEHPVGNWQKHNVDDSLLTTVGSLLEDETYTVRVLAFTSVGDGPLSDPIQVKTQQGVPGQPMNLRAEARSETSITLSWSPPRQESIIKYELLFREGDHGREVGRTFDPTTSYVVEDLKPNTEYAFRLAARSPQGLGAFTPVVRQRTLQSISPKNFKVKMIMKTSVLLSWEFPDNYNSPTPYKIQYNGLTLDVDGRTTKKLITHLKPHTFYNFVLTNRGSSLGGLQQTVTAWTAFNLLNGKPSVAPKPDADGFIMVYLPDGQSPVPVQSYFIVMVPLRKSRGGQFLTPLGSPEDMDLEELIQDISRLQRRTVRHSRQLEVPRPYIAARFSVLPPTFHPGDQKQYGGFDNRGLEPGHRYVLFVLAVLQKSEPTFAASPFSDPFQLDNPDPQPIVDGEEGLIWVIGPVLAVVFIICIVIAILLYKNKPDSKRKDSEPRTKCLLNNADLAPHHPKDPVEMRRINFQTPDSGLRSPLREPGFHFESMLSHPPIPIADMAEHTERLKANDSLKLSQEYESIDPGQQFTWEHSNLEVNKPKNRYANVIAYDHFRVILQPIEGIMGSDYINANYVDGYRRQNAYIATQGPLPETFGDFWRMVWEQRSATIVMMTRLEEKSRIKCDQYWPNRGTETYGFIQVTLLDTIELATFCVRTFSLHKNGSSEKREVRQFQFTAWPDHGVPEYPTPFLAFLRRVKTCNPPDAGPIVVHCSAGVGRTGCFIVIDAMLERIKPEKTVDVYGHVTLMRSQRNYMVQTEDQYSFIHEALLEAVGCGNTEVPARSLYAYIQKLAQVEPGEHVTGMELEFKRLANSKAHTSRFISANLPCNKFKNRLVNIMPYESTRVCLQPIRGVEGSDYINASFIDGYRQQKAYIATQGPLAETTEDFWRMLWENNSTIVVMLTKLREMGREKCHQYWPAERSARYQYFVVDPMAEYNMPQYILREFKVTDARDGQSRTVRQFQFTDWPEQGVPKSGEGFIDFIGQVHKTKEQFGQDGPISVHCSAGVGRTGVFITLSIVLERMRYEGVVDIFQTVKMLRTQRPAMVQTEDEYQFCYQAALEYLGSFDHYAT

SEQ ID NO: 9357 - protein, 1939 aa, Homo sapiens
MAPTWGPGMVSVVGPMGLLVVLLVGGCAAEEPPRFIKEPKDQIGVSGGVASFVCQATGDPKPRVTWNKKGKKVNSQRFETIEFDESAGAVLRIQPLRTPRDENVYECVAQNSVGEITVHAKLTVLREDQLPSGFPNIDMGPQLKVVERTRTATMLCAASGNPDPEITWFKDFLPVDPSASNGRIKQLRSETFESTPIRGALQIESSEETDQGKYECVATNSAGVRYSSPANLYVRELREVRRVAPRFSILPMSHEIMPGGNVNITCVAVGSPMPYVKWMQGAEDLTPEDDMPVGRNVLELTDVKDSANYTCVAMSSLGVIEAVAQITVKSLPKAPGTPMVTENTATSITITWDSGNPDPVSYYVIEYKSKSQDGPYQIKEDITTTRYSIGGLSPNSEYEIWVSAVNSIGQGPPSESVVTRTGEQAPASAPRNVQARMLSATTMIVQWEEPVEPNGLIRGYRVYYTMEPEHPVGNWQKHNVDDSLLTTVGSLLEDETYTVRVLAFTSVGDGPLSDPIQVKTQQGVPGQPMNLRAEARSETSITLSWSPPRQESIIKYELLFREGDHGREVGRTFDPTTSYVVEDLKPNTEYAFRLAARSPQGLGAFTPVVRQRTLQSKPSAPPQDVKCVSVRSTAILVSWRPPPPETHNGALVGYSVRYRPLGSEDPEPKEVNGIPPTTTQILLEALEKWTQYRITTVAHTEVGPGPESSPVVVRTDEDVPSAPPRKVEAEALNATAIRVLWLGPVPGRQHGQIRGYQVHYVRMEGAEGRGPPRIKDVMLADAQEMVITNLQPETAYSITVAAYTMKGDGARSKPKVVVTKGAVLGRPTLSVQQTPEGSLLARWEPPAGTAEDQVLGYRLQFGREDSTPLATLEFPPSEDRYTASGVHKGATYVFRLAARSRGGLGEEAAEVLSIPEDTPRGHPQILEAAGNASAGTVLLRWLPPVPAERNGAIVKYTVAVREAGALGPARETELPAAAEPGAENAVTLQGLKPDTAYDLQVRAHTRRGPGPFSPPVRYRTFLRDQVSPKNFKVKMIMKTSVLLSWEFPDNYNSPTPYKIQYNGLTLDVDGRTTKKLITHLKPHTFYNFVLTNRGSSLGGLQQTVTAWTAFNLLNGKPSVAPKPDADGFIMVYLPDGQSPVPVQSYFIVMVPLRKSRGGQFLTPLGSPEDMDLEELIQDISRLQRRTVRHSRQLEVPRPYIAARFSVLPPTFHPGDQKQYGGFDNRGLEPGHRYVLFVLAVLQKSEPTFAASPFSDPFQLDNPDPQPIVDGEEGLIWVIGPVLAVVFIICIVIAILLYKNKPDSKRKDSEPRTKCLLNNADLAPHHPKDPVEMRRINFQTPDSGLRSPLREPGFHFESMLSHPPIPIADMAEHTERLKANDSLKLSQEYESIDPGQQFTWEHSNLEVNKPKNRYANVIAYDHFRVILQPIEGIMGSDYINANYVDGYRRQNAYIATQGPLPETFGDFWRMVWEQRSATIVMMTRLEEKSRIKCDQYWPNRGTETYGFIQVTLLDTIELATFCVRTFSLHKNGSSEKREVRQFQFTAWPDHGVPEYPTPFLAFLRRVKTCNPPDAGPIVVHCSAGVGRTGCFIVIDAMLERIKPEKTVDVYGHVTLMRSQRNYMVQTEDQYSFIHEALLEAVGCGNTEVPARSLYAYIQKLAQVEPGEHVTGMELEFKRLANSKAHTSRFISANLPCNKFKNRLVNIMPYESTRVCLQPIRGVEGSDYINASFIDGYRQQKAYIATQGPLAETTEDFWRMLWENNSTIVVMLTKLREMGREKCHQYWPAERSARYQYFVVDPMAEYNMPQYILREFKVTDARDGQSRTVRQFQFTDWPEQGVPKSGEGFIDFIGQVHKTKEQFGQDGPISVHCSAGVGRTGVFITLSIVLERMRYEGVVDIFQTVKMLRTQRPAMVQTEDEYQFCYQAALEYLGSFDHYAT

SEQ ID NO: 9358 - protein, 1939 aa, Homo sapiens
MAPTWGPGMVSVVGPMGLLVVLLVGGCAAEEPPRFIKEPKDQIGVSGGVASFVCQATGDPKPRVTWNKKGKKVNSQRFETIEFDESAGAVLRIQPLRTPRDENVYECVAQNSVGEITVHAKLTVLREDQLPSGFPNIDMGPQLKVVERTRTATMLCAASGNPDPEITWFKDFLPVDPSASNGRIKQLRSGALQIESSEETDQGKYECVATNSAGVRYSSPANLYVRELREVRRVAPRFSILPMSHEIMPGGNVNITCVAVGSPMPYVKWMQGAEDLTPEDDMPVGRNVLELTDVKDSANYTCVAMSSLGVIEAVAQITVKSLPKAPGTPMVTENTATSITITWDSGNPDPVSYYVIEYKSKSQDGPYQIKEDITTTRYSIGGLSPNSEYEIWVSAVNSIGQGPPSESVVTRTGEQAPASAPRNVQARMLSATTMIVQWEEPVEPNGLIRGYRVYYTMEPEHPVGNWQKHNVDDSLLTTVGSLLEDETYTVRVLAFTSVGDGPLSDPIQVKTQQGVPGQPMNLRAEARSETSITLSWSPPRQESIIKYELLFREGDHGREVGRTFDPTTSYVVEDLKPNTEYAFRLAARSPQGLGAFTPVVRQRTLQSKPSAPPQDVKCVSVRSTAILVSWRPPPPETHNGALVGYSVRYRPLGSEDPEPKEVNGIPPTTTQILLEALEKWTQYRITTVAHTEVGPGPESSPVVVRTDEDVPSAPPRKVEAEALNATAIRVLWLGPVPGRQHGQIRGYQVHYVRMEGAEGRGPPRIKDVMLADAQWETDDTAEYEMVITNLQPETAYSITVAAYTMKGDGARSKPKVVVTKGAVLGRPTLSVQQTPEGSLLARWEPPAGTAEDQVLGYRLQFGREDSTPLATLEFPPSEDRYTASGVHKGATYVFRLAARSRGGLGEEAAEVLSIPEDTPRGHPQILEAAGNASAGTVLLRWLPPVPAERNGAIVKYTVAVREAGALGPARETELPAAAEPGAENAVTLQGLKPDTAYDLQVRAHTRRGPGPFSPPVRYRTFLRDQVSPKNFKVKMIMKTSVLLSWEFPDNYNSPTPYKIQYNGLTLDVDGRTTKKLITHLKPHTFYNFVLTNRGSSLGGLQQTVTAWTAFNLLNGKPSVAPKPDADGFIMVYLPDGQSPVPVQSYFIVMVPLRKSRGGQFLTPLGSPEDMDLEELIQDISRLQRRTVRHSRQLEVPRPYIAARFSVLPPTFHPGDQKQYGGFDNRGLEPGHRYVLFVLAVLQKSEPTFAASPFSDPFQLDNPDPQPIVDGEEGLIWVIGPVLAVVFIICIVIAILLYKNKPDSKRKDSEPRTKCLLNNADLAPHHPKDPVEMRRINFQTPDSGLRSPLREPGFHFESMLSHPPIPIADMAEHTERLKANDSLKLSQEYESIDPGQQFTWEHSNLEVNKPKNRYANVIAYDHFRVILQPIEGIMGSDYINANYVDGYRRQNAYIATQGPLPETFGDFWRMVWEQRSATIVMMTRLEEKSRIKCDQYWPNRGTETYGFIQVTLLDTIELATFCVRTFSLHKNGSSEKREVRQFQFTAWPDHGVPEYPTPFLAFLRRVKTCNPPDAGPIVVHCSAGVGRTGCFIVIDAMLERIKPEKTVDVYGHVTLMRSQRNYMVQTEDQYSFIHEALLEAVGCGNTEVPARSLYAYIQKLAQVEPGEHVTGMELEFKRLANSKAHTSRFISANLPCNKFKNRLVNIMPYESTRVCLQPIRGVEGSDYINASFIDGYRQQKAYIATQGPLAETTEDFWRMLWENNSTIVVMLTKLREMGREKCHQYWPAERSARYQYFVVDPMAEYNMPQYILREFKVTDARDGQSRTVRQFQFTDWPEQGVPKSGEGFIDFIGQVHKTKEQFGQDGPISVHCSAGVGRTGVFITLSIVLERMRYEGVVDIFQTVKMLRTQRPAMVQTEDEYQFCYQAALEYLGSFDHYAT

SEQ ID NO: 9359 - protein, 291 aa, Homo sapiens
MAEISRIQYEMEYTEGISQRMRVPEKLKVAPPNADLEQGFQEGVPNASVIMQVPERIVVAGNNEDVSFSRPADLDLIQSTPFKPLALKTPPRVLTLSERPLDFLDLERPPTTPQNEEIRAVGRLKRERSMSENAVRQNGQLVRNDSLVTPSPQQARVCPPHMLPEDGANLSSARGILSLIQSSTRRAYQQILDVLDENRRPVLRGGSAAATSNPHHDNVRYGISNIDTTIEGTSDDLTVVDAASLRRQIIKLNRRLQLLEEENKERAKREMVMYSITVAFWLLNSWLWFRR

SEQ ID NO: 9360 - protein, 342 aa, Homo sapiens
MSKGTSSDTSLGRVSRAAFPSPTAAEMAEISRIQYEMEYTEGISQRMRVPEKLKVAPPNADLEQGFQEGVPNASVIMQVPERIVVAGNNEDVSFSRPADLDLIQSTPFKPLALKTPPRVLTLSERPLDFLDLERPPTTPQNEEIRAVGRLKRERSMSENAVRQNGQLVRNDSLWHRSDSAPRNKISRFQAPISAPEYTVTPSPQQARVCPPHMLPEDGANLSSARGILSLIQSSTRRAYQQILDVLDENRRPVLRGGSAAATSNPHHDNVRYGISNIDTTIEGTSDDLTVVDAASLRRQIIKLNRRLQLLEEENKERAKREMVMYSITVAFWLLNSWLWFRR

SEQ ID NO: 9361 - protein, 311 aa, Homo sapiens [sequence omitted]

SEQ ID NO: 9362 - protein, 834 aa, Homo sapiens
MKHTLALLAPLLGLGLGLALSQLAAGATDCKFLGPAEHLTFTPAARARWLAPRVRAPGLLDSLYGTVRRFLSVVQLNPFPSELVKALLNELASVKVNEVVRYEAGYVVCAVIAGLYLLLVPTAGLCFCCCRCHRRCGGRVKTEHKALACERAALMVFLLLTTLLLLIGVVCAFVTNQRTHEQMGPSIEAMPETLLSLWGLVSDVPQELQAVAQQFSLPQEQVSEELDGVGVSIGSAIHTQLRSSVYPLLAAVGSLGQVLQVSVHHLQTLNATVVELQAGQQDLEPAIREHRDRLLELLQEARCQGDCAGALSWARTLELGADFSQVPSVDHVLHQLKGVPEANFSSMVQEENSTFNALPALAAMQTSSVVQELKKAVAQQPEGVRTLAEGFPGLEAASRWAQALQEVEESSRPYLQEVQRYETYRWIVGCVLCSVVLFVVLCNLLGLNLGIWGLSARDDPSHPEAKGEAGARFLMAGVGLSFLFAAPLILLVFATFLVGGNVQTLVCQSWENGELFEFADTPGNLPPSMNLSQLLGLRKNISIHQAYQQCKEGAALWTVLQLNDSYDLEEHLDINQYTNKLRQELQSLKVDTQSLDLLSSAARRDLEALQSSGLQRIHYPDFLVQIQRPVVKTSMEQLAQELQGLAQAQDNSVLGQRLQEEAQGLRNLHQEKVVPQQSLVAKLNLSVRALESSAPNLQLETSDVLANVTYLKGELPAWAARILRNVSECFLAREMGYFSQYVAWVREEVTQRIATCQPLSGALDNSRVILCDMMADPWNAFWFCLAWCTFFLIPSIIFAVKTSKYFRPIRKRLSSTSSEETQLFHIPRVTSLKL

SEQ ID NO: 9363 - protein, 479 aa, Homo sapiens
MMDVNSSGRPDLYGHLRSFLLPEVGRGLPDLSPDGGADPVAGSWAPHLLSEVTASPAPTWDAPPDNASGCGEQINYGRVEKVVIGSILTLITLLTIAGNCLVVISVCFVKKLRQPSNYLIVSLALADLSVAVAVMPFVSVTDLIGGKWIFGHFFCNVFIAMDVMCCTASIMTLCVISIDRYLGITRPLTYPVRQNGKCMAKMILSVWLLSASITLPPLFGWAQNVNDDKVCLISQDFGYTIYSTAVAFYIPMSVMLFMYYQIYKAARKSAAKHKFPGFPRVEPDSVIALNGIVKLQKEVEECANLSRLLKHERKNISIFKREQKAATTLGIIVGAFTVCWLPFFLLSTARPFICGTSCSCIPLWVERTFLWLGYANSLINPFIYAFFNRDLRTTYRSLLQCQYRNINRKLSAAGMHEALKLAERPERPEFVLRACTRRVLLRPEKRPPVSVWVLQSPDHHNWLADKMLTTVEKKVMIHD

SEQ ID NO: 9364 - protein, 445 aa, Homo sapiens
MMDVNSSGRPDLYGHLRSFLLPEVGRGLPDLSPDGGADPVAGSWAPHLLSEVTASPAPTWDAPPDNASGCGEQINYGRVEKVVIGSILTLITLLTIAGNCLVVISVCFVKKLRQPSNYLIVSLALADLSVAVAVMPFVSVTDLIGGKWIFGHFFCNVFIAMDVMCCTASIMTLCVISIDRYLGITRPLTYPVRQNGKCMAKMILSVWLLSASITLPPLFGWAQNVNDDKVCLISQDFGYTIYSTAVAFYIPMSVMLFMYYQIYKAARKSAAKHKFPGFPRVEPDSVIALNGIVKLQKEVEECANLSRLLKHERKNISIFKREQKAATTLGIIVGAFTVCWLPFFLLSTARPFICGTSCSCIPLWVERTFLWLGYANSLINPFIYAFFNRDLRTTYRSLLQCQYRNINRKLSAAGMHEALKLAERPERPEFVLQNADYCRKKGHDS

SEQ ID NO: 9365 - protein, 432 aa, Homo sapiens
MMDVNSSGRPDLYGHLRSFLLPEVGRGLPDLSPDGGADPVAGSWAPHLLSEVTASPAPTWDAPPDNASGCGEQINYGRVEKVVIGSILTLITLLTIAGNCLVVISVCFVKKLRQPSNYLIVSLALADLSVAVAVMPFVSVTDLIGGKWIFGHFFCNVFIAMDVMCCTASIMTLCVISIDRYLGITRPLTYPVRQNGKCMAKMILSVWLLSASITLPPLFGWAQNVNDDKVCLISQDFGYTIYSTAVAFYIPMSVMLFMYYQIYKAARKSAAKHKFPGFPRVEPDSVIALNGIVKLQKEVEECANLSRLLKHERKNISIFKREQKAATTLGIIVGAFTVCWLPFFLLSTARPFICGTSCSCIPLWVERTFLWLGYANSLINPFIYAFFNRDLRTTYRSLLQCQYRNINRKLSAAGMHEALKLAERPERPEFVL

SEQ ID NO: 9366 - protein, 369 aa, Homo sapiens
MAAVAPAGPGDSASAALDELSLNFTYGAPGAGNGSLSGDWYRRNQIHLFGVLLAILGNLVISISLNIQKYSHLQLAQQEHPRPYFKSVLWWGGVLLMAVGETGNFAAYGFAPITLIAPLGCVSVTGSAIISVTFLKDNLRASDLLGTTLAFAGTYLLVNFAPNITQAISARTVQYYLVGWQFLIYVILEILIFCILLYFYKRKGMKHMVILLTLVAILASLTVISVKAVSGMITFSVMDKMQLTYPIFYIMFIIMIASCVFQVKFLNQATKLYNTTTVVPVNHIFFTISAIIAGIIFYQEFLGAPFLTVFIYLFGCFLSFLGVFLVTRNREKEHLQQSYIDFGNIPEDTTPERKAWRETNVGQNTTRFT

SEQ ID NO: 9367 - protein, 460 aa, Homo sapiens
MNTSAPPAVSPNITVLAPGKGPWQVAFIGITTGLLSLATVTGNLLVLISFKVNTELKTVNNYFLLSLACADLIIGTFSMNLYTTYLLMGHWALGTLACDLWLALDYVASNASVMNLLLISFDRYFSVTRPLSYRAKRTPRRAALMIGLAWLVSFVLWAPAILFWQYLVGERTVLAGQCYIQFLSQPIITFGTAMAAFYLPVTVMCTLYWRIYRETENRARELAALQGSETPGKGGGSSSSSERSQPGAEGSPETPPGRCCRCCRAPRLLQAYSWKEEEEEDEGSMESLTSSEGEEPGSEVVIKMPMVDPEAQAPTKQPPRSSPNTVKRPTKKGRDRAGKGQKPRGKEQLAKRKTFSLVKEKKAARTLSAILLAFILTWTPYNIMVLVSTFCKDCVPETLWELGYWLCYVNSTINPMCYALCNKAFRDTFRLLLLCRWDKRRWRKIPKRPGSVHRTPSRQC

SEQ ID NO: 9368 - protein, 1283 aa, Homo sapiens
KHLYGLFHYNPMMLGLESLPDPTDTWEIIETIGKGTYGKVYKVTNKRDGSLAAVKILDPVSDMDEEIEAEYNILQFLPNHPNVVKFYGMFYKADHCVGGQLWLVLELCNGGSVTELVKGLLRCGQRLDEAMISYILYGALLGLQHLHNNRIIHRDVKGNNILLTTEGGVKLVDFGVSAQLTSTRLRRNTSVGTPFWMAPEVIACEQQYDSSYDARCDVWSLGITAIELGDGDPPLFDMHPVKTLFKIPRNPPPTLLHPEKWCEEFNHFISQCLIKDFERRPSVTHLLDHPFIKGVHGKVLFLQKQLAKVLQDQKHQNPVAKTRHERMHTRRPYHVEDAEKYCLEDDLVNLEVLDEDTIIHQLQKRYADLLIYTYVGDILIALNPFQNLSIYSPQFSRLYHGVKRASNPPHIFASADAAYQCMVTLSKDQCIVISGESGSGKTESAHLIVQHLTFLGKANNQTLREKILQVNSLVEAFGNSCTAINDNSSRFGKYLEMMFTPTGVVMGARISEYLLEKSRVIKQAAREKNFHIFYYIYAGLHHQKKLSDFRLPEEKPPRYIADETGRVMHDITSKESYRRQFEAIQHCFRIIGFTDKEVHSVYRILAGILNIGNIEFAAISSQHQTDKSEVPNAEALQNAASVLCISPEELQEALTSHCVVTRGETIIRANTVDRAADVRDAMSKALYGRLFSWIVNRINTLLQPDENIWQVPRRAEGGGMNVGILDIFGFENFQRNSFEQLCINIANEQIQYYFNQHVFALEQMEYQNEGIDAVPVEYEDNRPLLDMFLQKPLGLLALLDEESRFPQATDQTLVDKFEDNLRCKYFWRPKGVELCFGIQHYAGKVLYDASGVLEKNRDTLPADVVVVLRTSENKLLQQLFSIPLTKTGNLAQTRARITVASSSLPPHFSAGKAKVDTLEVIRHPEETTNMKRQTVASYFRYSLMDLLSKMVVGQPHFVRCIKPNDDREALQFSRERVLAQLRSTGILETVSIRRQGYSHRILFEEFVKRYYYLAFTAHQTPLASKESCVAILEKSRLDHWVLGKTKVFLKYYHVEQLNLLLREVIGRVVVLQAYTKGWLGARRYKRVREKREKGAIAIQSAWRGYDARRKFKKISNRRNESAAHNQAGDTSNQSSGPHSPVAAGTRGSAEVQDCSEPGDHKVLRGSVHRRSHSQAESNNGRTQTSSNSPAVTEKNGWSFTLLLRLECNSMISADCNLRPLGSSDSPASASRVAGITEEHPRQEKQEWAIARGRICRAILGSTRFLGLICCLLGYAILLQISKD

SEQ ID NO: 9369 - protein, 1345 aa, Homo sapiens
KHLYGLFHYNPMMLGLESLPDPTDTWEIIETIGKGTYGKVYKVTNKRDGSLAAVKILDPVSDMDEEIEAEYNILQFLPNHPNVVKFYGMFYKADHCVGGQLWLVLELCNGGSVTELVKGLLRCGQRLDEAMISYILYGALLGLQHLHNNRIIHRDVKGNNILLTTEGGVKLVDFGVSAQLTSTRLRRNTSVGTPFWMAPEVIACEQQYDSSYDARCDVWSLGITAIELGDGDPPLFDMHPVKTLFKIPRNPPPTLLHPEKWCEEFNHFISQCLIKDFERRPSVTHLLDHPFIKGVHGKVLFLQKQLAKVLQDQKHQNPVAKTRHERMHTRRPYHVEDAEKYCLEDDLVNLEVLDEDTIIHQLQKRYADLLIYTYVGDILIALNPFQNLSIYSPQFSRLYHGVKRASNPPHIFASADAAYQCMVTLSKDQCIVISGESGSGKTESAHLIVQHLTFLGKANNQTLREKILQVNSLVEAFGNSCTAINDNSSRFGKYLEMMFTPTGVVMGARISEYLLEKSRVIKQAAREKNFHIFYYIYAGLHHQKKLSDFRLPEEKPPRYIADETGRVMHDITSKESYRRQFEAIQHCFRIIGFTDKEVHSVYRILAGILNIGNIEFAAISSQHQTDKSEVPNAEALQNAASVLCISPEELQEALTSHCVVTRGETIIRANTVDRAADVRDAMSKALYGRLFSWIVNRINTLLQPDENIWQVPRRAEGGGMNVGILDIFGFENFQRNSFEQLCINIANEQIQYYFNQHVFALEQMEYQNEGIDAVPVEYEDNRPLLDMFLQKPLGLLALLDEESRFPQATDQTLVDKFEDNLRCKYFWRPKGVELCFGIQHYAGKVLYDASGVLEKNRDTLPADVVVVLRTSENKLLQQLFSIPLTKTGNLAQTRARITVASSSLPPHFSAGKAKVDTLEVIRHPEETTNMKRQTVASYFRYSLMDLLSKMVVGQPHFVRCIKPNDDREALQFSRERVLAQLRSTGILETVSIRRQGYSHRILFEEFVKRYYYLAFTAHQTPLASKESCVAILEKSRLDHWVLGKTKVFLKYYHVEQLNLLLREVIGRVVVLQAYTKGWLGARRYKRVREKREKGAIAIQSAWRGYDARRKFKKISNRRNESAAHNQAGDTSNQSSGPHSPVAAGTRGSAEVQDCSEPGDHKVLRGSVHRRSHSQAESNNGRTQTSSNSPAVTEKNGHSQAQSSPKGCDIFAGHANKHSVSGTDLLSSRICHPAPDQQGLSLWGAPQKPGSENGLAQKHRTPRRRCQQPKMLSSPEDTMYYNQLNGTLEYQGSKRKPRKLGQIKVLDGEDEYYKSLSPVDCIPEENNSAHPSFFSSSSKGDSFAQH

SEQ ID NO: 9370 - protein, 1985 aa, Homo sapiens
PGCAARLSRARAPGPGAAGAGRKRLADPGPPPASRRLRAPGSRPRLAPCTRRAAQPAHARMAPRAAGGAPLSARAAAASPPPFQTPPRCPVPLLLLLLLGAARAGALEIQRRFPSPTPTNNFALDGAAGTVYLAAVNRLYQLSGANLSLEAEAAVGPVPDSPLCHAPQLPQASCEHPRRLTDNYNKILQLDPGQGLVVVCGSIYQGFCQLRRRGNISAVAVRFPPAAPPAEPVTVFPSMLNVAANHPNASTVGLVLPPAAGAGGSRLLVGATYTGYGSSFFPRNRSLEDHRFENTPEIAIRSLDTRGDLAKLFTFDLNPSDDNILKIKQGAKEQHKLGFVSAFLHPSDPPPGAQSYAYLALNSEARAGDKESQARSLLARICLPHGAGGDAKKLTESYIQLGLQCAGGAGRGDLYSRLVSVFPARERLFAVFERPQGSPAARAAPAALCAFRFADVRAAIRAARTACFVEPAPDVVAVLDSVVQGTGPACERKLNIQLQPEQLDCGAAHLQHPLSILQPLKATPVFRAPGLTSVAVASVNNYTAVFLGTVNGRLLKINLNESMQVVSRRVVTVAYGEPVHHVMQFDPADSVYLYLMTSHQMARVKVAACNVHSTCGDCVGAADAYCGWCALETRCTLQQDCTNSSQQHFWTSASEGPSRCPAMTVLPSEIDVRQEYPGMILQISGSLPSLSGMEMACDYGNNIRTVARVPGPAFGHQIAYCNLLPRDQFPPFPPNQDHVTVEMSVRVNGRNIVKANFTIYDCSRTAQVYPHTACTSCLSAQWPCFWCSQQHSCVSNQSRCEASPNPTSPQDCPRTLLSPLAPVPTGGSQNILVPLANTAFFQGAALECSFGLEEIFEAVWVNESVVRCDQVVLHTTRKSQVFPLSLQLKGRPARFLDSPEPMTVMVYNCAMGSPDCSQCLGREDLGHLCMWSDGCRLRGPLQPMAGTCPAPEIRAIEPLSGPLDGGTLLTIRGRNLGRRLSDVAHGVWIGGVACEPLPDRYTVSEEIVCVTGPAPGPLSGVVTVNASKEGKSRDRFSYVLPLVHSLEPTMGPKAGGTRITIHGNDLHVGSELQVLVNDTDPCTELMRTDTSIACTMPEGALPAPVPVCVRFERRGCVHGNLTFWYMQNPVITAISPRRSPVSGGRTITVAGERFHMVQNVSMAVHHIGREPTLCKVLNSTLITCPSPGALSNASAPVDFFINGRAYADEVAVAEELLDPEEAQRGSRFRLDYLPNPQFSTAKREKWIKHHPGEPLTLVIHKEQDSLGLQSHEYRVKIGQVSCDIQIVSDRIIHCSVNESLGAAVGQLPITIQVGNFNQTIATLQLGGSETAIIVSIVICSVLLLLSVVALFVFCTKSRRAERYWQKTLLQMEEMESQIREEIRKGFAELQTDMTDLTKELNRSQGIPFLEYKHFVTRTFFPKCSSLYEERYVLPSQTLNSQGSSQAQETHPLLGEWKIPESCRPNMEEGISLFSSLLNNKHFLIVFVHALEQQKDFAVRDRCSLASLLTIALHGKLEYYTSIMKELLVDLIDASAAKNPKLMLRRTESVVEKMLTNWMSICMYSCLRETVGEPFFLLLCAIKQQINKGSIDAITGKARYTLNEEWLLRENIEAKPRNLNVSFQGCGMDSLSVRAMDTDTLTQVKEKILEAFCKNVPYSQWPRAEDVDLEWFASSTQSYILRDLDDTSVVEDGRKKLNTLAHYKIPEGASLAMSLIDKKDNTLGRVKDLDTEKYFHLVLPTDELAEPKKSHRQSHRKKVLPEIYLTRLLSTKGTLQKFLDDLFKAILSIREDKPPLAVKYFFDFLEEQAEKRGISDPDTLHIWKTNSLPLRFWVNILKNPQFVFDIDKTDHIDACLSVIAQAFIDACSISDLQLGKDSPTNKLLYAKEIPEYRKIVQRYYKQIQDMTPLSEQEMNAHLAEESRKYQNEFNTNVAMAEIYKYAKRYRPQIMAALEANPTARRTQLQHKFEQVVALMEDNIYECYSEA

SEQ ID NO: 9371 - protein, 791 aa, Homo sapiens
MSQPRPRYVVDRAAYSLTLFDDEFEKKDRTYPVGEKLRNAFRCSSAKIKAVVFGLLPVLSWLPKYKIKDYIIPDLLGGLSGGSIQVPQGMAFALLANLPAVNGLYSSFFPLLTYFFLGGVHQMVPGTFAVISILVGNICLQLAPESKFQVFNNATNESYVDTAAMEAERLHVSATLACLTAIIQMGLGFMQFGFVAIYLSESFIRGFMTAAGLQILISVLKYIFGLTIPSYTGPGSIVFTFIDICKNLPHTNIASLIFALISGAFLVLVKELNARYMHKIRFPIPTEMIVVVVATAISGGCKMPKKYHMQIVGEIQRGFPTPVSPVVSQWKDMIGTAFSLAIVSYVINLAMGRTLANKHGYDVDSNQEMIALGCSNFFGSFFKIHVICCALSVTLAVDGAGGKSQVASLCVSLVVMITMLVLGIYLYPLPKSVLGALIAVNLKNSLKQLTDPYYLWRKSKLDCCIWVVSFLSSFFLSLPYGVAVGVAFSVLVVVFQTQFRNGYALAQVMDTDIYVNPKTYNRAQDIQGIKIITYCSPLYFANSEIFRQKVIAKTGMDPQKVLLAKQKYLKKQEKRRMRPTQQRRSLFMKTKTVSLQELQQDFENAPPTDPNNNQTPANGTSVSYITFSPDSSSPAQSEPPASAEAPGEPSDMLASVPPFVTFHTLILDMSGVSFVDLMGIKALAKLSSTYGKIGVKVFLVNIHAQVYNDISHGGVFEDGSLECKHVFPSIHDAVLFAQANARDVTPGHNFQGAPGDAELSLYDSEEDIRSYWDLEQEMFGSMFHAETLTAL

SEQ ID NO: 9372 - protein, 926 aa, Homo sapiens
FEQSPFTHLRNTFRLPAPQTHLQPCPAGFAHPLLVNAPDMSQPRPRYVVDRAAYSLTLFDDEFEKKDRTYPVGEKLRNAFRCSSAKIKAVVFGLLPVLSWLPKYKIKDYIIPDLLGGLSGGSIQVPQGMAFALLANLPAVNGLYSSFFPLLTYFFLGGVHQMVPGTFAVISILVGNICLQLAPESKFQVFNNATNESYVDTAAMEAERLHVSATLACLTAIIQMGLGFMQFGFVAIYLSESFIRGFMTAAGLQILISVLKYIFGLTIPSYTGPGSIVFTFIDICKNLPHTNIASLIFALISGAFLVLVKELNARYMHKIRFPIPTEMIVVVVATAISGGCKMPKKYHMQIVGEIQRGFPTPVSPVVSQWKDMIGTAFSLAIVSYVINLAMGRTLANKHGYDVDSNQEMIALGCSNFFGSFFKIHVICCALSVTLAVDGAGGKSQVASLCVSLVVMITMLVLGIYLYPLPKSVLGALIAVNLKNSLKQLTDPYYLWRKSKLDCCIWVVSFLSSFFLSLPYGVAVGVAFSVLVVVFQTQFRNGYALAQVMDTDIYVNPKTYNRAQDIQGIKIITYCSPLYFANSEIFRQKVIAKTGMDPQKVLLAKQKYLKKQEKRRMRPTQQRRSLFMKTKTVSLQELQQDFENAPPTDPNNNQTPANGTSVSYITFSPDSSSPAQSEPPASAEAPGEPSDMLASVPPFVTFHTLILDMSGVSFVDLMGIKALAKLSSTYGKIGVKVFLVNIHAQVYNDISHGGVFEDGSLECKHVFPSIHDAVLFAQANARDVTPGHNFQGAPGDAELSLYDSEEDIRSYWDLEQEMFGSMFHAETLTARESLSAAGGCYPYRSESLVSPLFTRQALAAMDKPPAHSTPPTSALSLAAEGHLDFQLLRVSQKQKDKYNCAGLLYKLQKVSQSPHGSVSDGVRLSRT

SEQ ID NO: 9373 - protein, 5038 aa, Homo sapiens
MGDAEGEDEVQFLRTDDEVVLQCSATVLKEQLKLCLAAEGFGNRLCFLEPTSNAQNVPPDLAICCFVLEQSLSVRALQEMLANTVEAGVESSQGGGHRTLLYGHAILLRHAHSRMYLSCLTTSRSMTDKLAFDVGLQEDATGEACWWTMHPASKQRSEGEKVRVGDDIILVSVSSERYLHLSTASGELQVDASFMQTLWNMNPICSRCEEGFVTGGHVLRLFHGHMDECLTISPADSDDQRRLVYYEGGAVCTHARSLWRLEPLRISWSGSHLRWGQPLRVRHVTTGQYLALTEDQGLVVVDASKAHTKATSFCFRISKEKLDVAPKRDVEGMGPPEIKYGESLCFVQHVASGLWLTYAAPDPKALRLGVLKKKAMLHQEGHMDDALSLTRCQQEESQAARMIHSTNGLYNQFIKSLDSFSGKPRGSGPPAGTALPIEGVILSLQDLIIYFEPPSEDLQHEEKQSKLRSLRNRQSLFQEEGMLSMVLNCIDRLNVYTTAAHFAEFAGEEAAESWKEIVNLLYELLASLIRGNRSNCALFSTNLDWLVSKLDRLEASSGILEVLYCVLIESPEVLNIIQENHIKSIISLLDKHGRNHKVLDVLCSLCVCNGVAVRSNQDLITENLLPGRELLLQTNLINYVTSIRPNIFVGRAEGTTQYSKWYFEVMVDEVTPFLTAQATHLRVGWALTEGYTPYPGAGEGWGGNGVGDDLYSYGFDGLHLWTGHVARPVTSPGQHLLAPEDVISCCLDLSVPSISFRINGCPVQGVFESFNLDGLFFPVVSFSAGVKVRFLLGGRHGEFKFLPPPGYAPCHEAVLPRERLHLEPIKEYRREGPRGPHLVGPSRCLSHTDFVPCPVDTVQIVLPPHLERIREKLAENIHELWALTRIEQGWTYGPVRDDNKRLHPCLVDFHSLPEPERNYNLQMSGETLKTLLALGCHVGMADEKAEDNLKKTKLPKTYMMSNGYKPAPLDLSHVRLTPAQTTLVDRLAENGHNVWARDRVGQGWSYSAVQDIPARRNPRLVPYRLLDEATKRSNRDSLCQAVRTLLGYGYNIEPPDQEPSQVENQSRCDRVRIFRAEKSYTVQSGRWYFEFEAVTTGEMRVGWARPELRPDVELGADELAYVFNGHRGQRWHLGSEPFGRPWQPGDVVGCMIDLTENTIIFTLNGEVLMSDSGSETAFREIEIGDGFLPVCSLGPGQVGHLNLGQDVSSLRFFAICGLQEGFEPFAINMQRPVTTWFSKGLPQFEPVPLEHPHYEVSRVDGTVDTPPCLRLTHRTWGSQNSLVEMLFLRLSLPVQFHQHFRCTAGATPLAPPGLQPPAEDEARAAEPDPDYENLRRSAGGWSEAENGKEGTAKEGAPGGTPQAGGEAQPARAENEKDATTEKNKKRGFLFKAKKVAMMTQPPATPTLPRLPHDVVPADNRDDPEIILNTTTYYYSVRVFAGQEPSCVWAGWVTPDYHQHDMSFDLSKVRVVTVTMGDEQGNVHSSLKCSNCYMVWGGDFVSPGQQGRISHTDLVIGCLVDLATGLMTFTANGKESNTFFQVEPNTKLFPAVFVLPTHQNVIQFELGKQKNIMPLSAAMFQSERKNPAPQCPPRLEMQMLMPVSWSRMPNHFLQVETRRAGERLGWAVQCQEPLTMMALHIPEENRCMDILELSERLDLQRFHSHTLRLYRAVCALGNNRVAHALCSHVDQAQLLHALEDAHLPGPLRAGYYDLLISIHLESACRSRRSMLSEYIVPLTPETRAITLFPPGRSTENGHPRHGLPGVGVTTSLRPPHHFSPPCFVAALPAAGAAEAPARLSPAIPLEALRDKALRMLGEAVRDGGQHARDPVGASVEFQFVPVLKLVSTLLVMGIFGDEDVKQILKMIEPEVFTEEEEEEDEEEEGEEEDEEEKEEDEEETAQEKEDEEKEEEEAAEGEKEEGLEEGLLQMKLPESVKLQMCHLLEYFCDQELQHRVESLAAFAERYVDKLQANQRSRYGLLIKAFSMTAAETARRTREFRSPPQEQINMLLQFKDGTDEEDCPLPEEIRQDLLDFHQDLLAHCGIQLDGEEEEPEEETTLGSRLMSLLEKVRLVKKKEEKPEEERSAEESKPRSLQELVSHMVVRWAQEDFVQSPELVRAMFSLLHRQYDGLGELLRALPRAYTISPSSVEDTMSLLECLGQIRSLLIVQMGPQEENLMIQSIGNIMNNKVFYQHPNLMRALGMHETVMEVMVNVLGGGESKEIRFPKMVTSCCRFLCYFCRISRQNQRSMFDHLSYLLENSGIGLGMQGSTPLDVAAASVIDNNELALALQEQDLEKVVSYLAGCGLQSCPMLVAKGYPDIGWNPCGGERYLDFLRFAVFVNGESVEENANVVVRLLIRKPECFGPALRGEGGSGLLAAIEEAIRISEDPARDGPGIRRDRRREHFGEEPPEENRVHLGHAIMSFYAALIDLLGRCAPEMHLIQAGKGEALRIRAILRSLVPLEDLVGIISLPLQIPTLGKDGALVQPKMSASFVPDHKASMVLFLDRVYGIENQDFLLHVLDVGFLPDMRAAASLDTATFSTTEMALAVNRYLCLAVLPLITKCAPLFAGTEHRAIMVDSMLHTVYRLSRGRSLTKAQRDVIEDCLMSLCRYIRPSMLQHLLRRLVFDVPILNEFAKMPLKLLTNHYERCWKYYCLPTGWANFGVTSEEELHLTRKLFWGIFDSLAHKKYDPELYRMAMPCLCAIAGALPPDYVDASYSSKAEKKATVDAEGNFDPRPVETLNVIIPEKLDSFINKFAEYTHEKWAFDKIQNNWSYGENIDEELKTHPMLRPYKTFSEKDKEIYRWPIKESLKAMIAWEWTIEKAREGEEEKTEKKKTRKISQSAQTYDPREGYNPQPPDLSAVTLSRELQAMAEQLAENYHNTWGRKKKQELEAKGGGTHPLLVPYDTLTAKEKARDREKAQELLKFLQMNGYAVTRGLKDMELDSSSIEKRFAFGFLQQLLRWMDISQEFIAHLEAVVSSGRVEKSPHEQEIKFFAKILLPLINQYFTNHCLYFLSTPAKVLGSGGHASNKEKEMITSLFCKLAALVRHRVSLFGTDAPAVVNCLHILARSLDARTVMKSGPEIVKAGLRSFFESASEDIEKMVENLRLGKVSQARTQVKGVGQNLTYTTVALLPVLTTLFQHIAQHQFGDDVILDDVQVSCYRTLCSIYSLGTTKNTYVEKLRPALGECLARLAAAMPVAFLEPQLNEYNACSVYTTKSPRERAILGLPNSVEEMCPDIPVLERLMADIGGLAESGARYTEMPHVIEITLPMLCSYLPRWWERGPEAPPSALPAGAPPPCTAVTSDHLNSLLGNILRIIVNNLGIDEASWMKRLAVFAQPIVSRARPELLQSHFIPTIGRLRKRAGKVVSEEEQLRLEAKAEAQEGELLVRDEFSVLCRDLYALYPLLIRYVDNNRAQWLTEPNPSAEELFRMVGEIFIYWSKSHNFKREEQNFVVQNEINNMSFLTADNKSKMAKAGDIQSGGSDQERTKKKRRGDRYSVQTSLIVATLKKMLPIGLNMCAPTDQDLITLAKTRYALKDTDEEVREFLHNNLHLQGKVEGSPSLRWQMALYRGVPGREEDADDPEKIVRRVQEVSAVLYYLDQTEHPYKSKKAVWHKLLSKQRRRAVVACFRMTPLYNLPTHRACNMFLESYKAAWILTEDHSFEDRMIDDLSKAGEQEEEEEEVEEKKPDPLHQLVLHFSRTALTEKSKLDEDYLYMAYADIMAKSCHLEEGGENGEAEEEVEVSFEEKQMEKQRLLYQQARLHTRGAAEMVLQMISACKGETGAMVSSTLKLGISILNGGNAEVQQKMLDYLKDKKEVGFFQSIQALMQTCSVLDLNAFERQNKAEGLGMVNEDGTVINRQNGEKVMADDEFTQDLFRFLQLLCEGHNNDFQNYLRTQTGNTTTINIIICTVDYLLRLQESISDFYWYYSGKDVIEEQGKRNFSKAMSVAKQVFNSLTEYIQGPCTGNQQSLAHSRLWDAVVGFLHVFAHMMMKLAQDSSQIELLKELLDLQKDMVVMLLSLLEGNVVNGMIARQMVDMLVESSSNVEMILKFFDMFLKLKDIVGSEAFQDYVTDPRGLISKKDFQKAMDSQKQFSGPEIQFLLSCSEADENEMINCEEFANRFQEPARDIGFNVAVLLTNLSEHVPHDPRLHNFLELAESILEYFRPYLGRIEIMGASRRIERIYFEISETNRAQWEMPQVKESKRQFIFDVVNEGGEAEKMELFVSFCEDTIFEMQIAAQISEPEGEPETDEDEGAGAAEAGAEGAEEGAAGLEGTAATAAAGATARVVAAAGRALRGLSYRSLRRRVRRLRRLTAREAATAVAALLWAAVTRAGAAGAGAAAGALGLLWGSLFGGGLVEGAKKVTVTELLAGMPDPTSDEVHGEQPAGPGGDADGEGASEGAGDAAEGAGDEEEAVHEAGPGGADGAVAVTDGGPFRPEGAGGLGDMGDTTPAEPPTPEGSPILKRKLGVDGVEEELPPEPEPEPEPELEPEKADAENGEKEEVPEPTPEPPKKQAPPSPPPKKEEAGGEFWGELEVQRVKFLNYLSRNFYTLRFLALFLAFAINFILLFYKVSDSPPGEDDMEGSAAGDVSGAGSGGSSGWGLGAGEEAEGDEDENMVYYFLEESTGYMEPALRCLSLLHTLVAFLCIIGYNCLKVPLVIFKREKELARKLEFDGLYITEQPEDDDVKGQWDRLVLNTPSFPSNYWDKFVKRKVLDKHGDIYGRERIAELLGMDLATLEITAHNERKPNPPPGLLTWLMSIDVKYQIWKFGVIFTDNSFLYLGWYMVMSLLGHYNNFFFAAHLLDIAMGVKTLRTILSSVTHNGKQLVMTVGLLAVVVYLYTVVAFNFFRKFYNKSEDEDEPDMKCDDMMTCYLFHMYVGVRAGGGIGDEIEDPAGDEYELYRVVFDITFFFFVIVILLAIIQGLIIDAFGELRDQQEQVKEDMETKCFICGIGSDYFDTTPHGFETHTLEEHNLANYMFFLMYLINKDETEHTGQESYVWKMYQERCWDFFPAGDCFRKQYEDQLS

SEQ ID NO: 9374 - protein, 5033 aa, Homo sapiens
MGDAEGEDEVQFLRTDDEVVLQCSATVLKEQLKLCLAAEGFGNRLCFLEPTSNAQNVPPDLAICCFVLEQSLSVRALQEMLANTVEAGVESSQGGGHRTLLYGHAILLRHAHSRMYLSCLTTSRSMTDKLAFDVGLQEDATGEACWWTMHPASKQRSEGEKVRVGDDIILVSVSSERYLHLSTASGELQVDASFMQTLWNMNPICSRCEEGFVTGGHVLRLFHGHMDECLTISPADSDDQRRLVYYEGGAVCTHARSLWRLEPLRISWSGSHLRWGQPLRVRHVTTGQYLALTEDQGLVVVDASKAHTKATSFCFRISKEKLDVAPKRDVEGMGPPEIKYGESLCFVQHVASGLWLTYAAPDPKALRLGVLKKKAMLHQEGHMDDALSLTRCQQEESQAARMIHSTNGLYNQFIKSLDSFSGKPRGSGPPAGTALPIEGVILSLQDLIIYFEPPSEDLQHEEKQSKLRSLRNRQSLFQEEGMLSMVLNCIDRLNVYTTAAHFAEFAGEEAAESWKEIVNLLYELLASLIRGNRSNCALFSTNLDWLVSKLDRLEASSGILEVLYCVLIESPEVLNIIQENHIKSIISLLDKHGRNHKVLDVLCSLCVCNGVAVRSNQDLITENLLPGRELLLQTNLINYVTSIRPNIFVGRAEGTTQYSKWYFEVMVDEVTPFLTAQATHLRVGWALTEGYTPYPGAGEGWGGNGVGDDLYSYGFDGLHLWTGHVARPVTSPGQHLLAPEDVISCCLDLSVPSISFRINGCPVQGVFESFNLDGLFFPVVSFSAGVKVRFLLGGRHGEFKFLPPPGYAPCHEAVLPRERLHLEPIKEYRREGPRGPHLVGPSRCLSHTDFVPCPVDTVQIVLPPHLERIREKLAENIHELWALTRIEQGWTYGPVRDDNKRLHPCLVDFHSLPEPERNYNLQMSGETLKTLLALGCHVGMADEKAEDNLKKTKLPKTYMMSNGYKPAPLDLSHVRLTPAQTTLVDRLAENGHNVWARDRVGQGWSYSAVQDIPARRNPRLVPYRLLDEATKRSNRDSLCQAVRTLLGYGYNIEPPDQEPSQVENQSRCDRVRIFRAEKSYTVQSGRWYFEFEAVTTGEMRVGWARPELRPDVELGADELAYVFNGHRGQRWHLGSEPFGRPWQPGDVVGCMIDLTENTIIFTLNGEVLMSDSGSETAFREIEIGDGFLPVCSLGPGQVGHLNLGQDVSSLRFFAICGLQEGFEPFAINMQRPVTTWFSKGLPQFEPVPLEHPHYEVSRVDGTVDTPPCLRLTHRTWGSQNSLVEMLFLRLSLPVQFHQHFRCTAGATPLAPPGLQPPAEDEARAAEPDPDYENLRRSAGGWSEAENGKEGTAKEGAPGGTPQAGGEAQPARAENEKDATTEKNKKRGFLFKAKKVAMMTQPPATPTLPRLPHDVVPADNRDDPEIILNTTTYYYSVRVFAGQEPSCVWAGWVTPDYHQHDMSFDLSKVRVVTVTMGDEQGNVHSSLKCSNCYMVWGGDFVSPGQQGRISHTDLVIGCLVDLATGLMTFTANGKESNTFFQVEPNTKLFPAVFVLPTHQNVIQFELGKQKNIMPLSAAMFQSERKNPAPQCPPRLEMQMLMPVSWSRMPNHFLQVETRRAGERLGWAVQCQEPLTMMALHIPEENRCMDILELSERLDLQRFHSHTLRLYRAVCALGNNRVAHALCSHVDQAQLLHALEDAHLPGPLRAGYYDLLISIHLESACRSRRSMLSEYIVPLTPETRAITLFPPGRSTENGHPRHGLPGVGVTTSLRPPHHFSPPCFVAALPAAGAAEAPARLSPAIPLEALRDKALRMLGEAVRDGGQHARDPVGASVEFQFVPVLKLVSTLLVMGIFGDEDVKQILKMIEPEVFTEEEEEEDEEEEGEEEDEEEKEEDEEETAQEKEDEEKEEEEAAEGEKEEGLEEGLLQMKLPESVKLQMCHLLEYFCDQELQHRVESLAAFAERYVDKLQANQRSRYGLLIKAFSMTAAETARRTREFRSPPQEQINMLLQFKDGTDEEDCPLPEEIRQDLLDFHQDLLAHCGIQLDGEEEEPEEETTLGSRLMSLLEKVRLVKKKEEKPEEERSAEESKPRSLQELVSHMVVRWAQEDFVQSPELVRAMFSLLHRQYDGLGELLRALPRAYTISPSSVEDTMSLLECLGQIRSLLIVQMGPQEENLMIQSIGNIMNNKVFYQHPNLMRALGMHETVMEVMVNVLGGGESKEIRFPKMVTSCCRFLCYFCRISRQNQRSMFDHLSYLLENSGIGLGMQGSTPLDVAAASVIDNNELALALQEQDLEKVVSYLAGCGLQSCPMLVAKGYPDIGWNPCGGERYLDFLRFAVFVNGESVEENANVVVRLLIRKPECFGPALRGEGGSGLLAAIEEAIRISEDPARDGPGIRRDRRREHFGEEPPEENRVHLGHAIMSFYAALIDLLGRCAPEMHLIQAGKGEALRIRAILRSLVPLEDLVGIISLPLQIPTLGKDGALVQPKMSASFVPDHKASMVLFLDRVYGIENQDFLLHVLDVGFLPDMRAAASLDTATFSTTEMALAVNRYLCLAVLPLITKCAPLFAGTEHRAIMVDSMLHTVYRLSRGRSLTKAQRDVIEDCLMSLCRYIRPSMLQHLLRRLVFDVPILNEFAKMPLKLLTNHYERCWKYYCLPTGWANFGVTSEEELHLTRKLFWGIFDSLAHKKYDPELYRMAMPCLCAIAGALPPDYVDASYSSKAEKKATVDAEGNFDPRPVETLNVIIPEKLDSFINKFAEYTHEKWAFDKIQNNWSYGENIDEELKTHPMLRPYKTFSEKDKEIYRWPIKESLKAMIAWEWTIEKAREGEEEKTEKKKTRKISQSAQTYDPREGYNPQPPDLSAVTLSRELQAMAEQLAENYHNTWGRKKKQELEAKGGGTHPLLVPYDTLTAKEKARDREKAQELLKFLQMNGYAVTRGLKDMELDSSSIEKRFAFGFLQQLLRWMDISQEFIAHLEAVVSSGRVEKSPHEQEIKFFAKILLPLINQYFTNHCLYFLSTPAKVLGSGGHASNKEKEMITSLFCKLAALVRHRVSLFGTDAPAVVNCLHILARSLDARTVMKSGPEIVKAGLRSFFESASEDIEKMVENLRLGKVSQARTQVKGVGQNLTYTTVALLPVLTTLFQHIAQHQFGDDVILDDVQVSCYRTLCSIYSLGTTKNTYVEKLRPALGECLARLAAAMPVAFLEPQLNEYNACSVYTTKSPRERAILGLPNSVEEMCPDIPVLERLMADIGGLAESGARYTEMPHVIEITLPMLCSYLPRWWERGPEAPPSALPAGAPPPCTAVTSDHLNSLLGNILRIIVNNLGIDEASWMKRLAVFAQPIVSRARPELLQSHFIPTIGRLRKRAGKVVSEEEQLRLEAKAEAQEGELLVRDEFSVLCRDLYALYPLLIRYVDNNRAQWLTEPNPSAEELFRMVGEIFIYWSKSHNFKREEQNFVVQNEINNMSFLTADNKSKMAKAGDIQSGGSDQERTKKKRRGDRYSVQTSLIVATLKKMLPIGLNMCAPTDQDLITLAKTRYALKDTDEEVREFLHNNLHLQGKVEGSPSLRWQMALYRGVPGREEDADDPEKIVRRVQEVSAVLYYLDQTEHPYKSKKAVWHKLLSKQRRRAVVACFRMTPLYNLPTHRACNMFLESYKAAWILTEDHSFEDRMIDDLSKAGEQEEEEEEVEEKKPDPLHQLVLHFSRTALTEKSKLDEDYLYMAYADIMAKSCHLEEGGENGEAEEEVEVSFEEKQMEKQRLLYQQARLHTRGAAEMVLQMISACKGETGAMVSSTLKLGISILNGGNAEVQQKMLDYLKDKKEVGFFQSIQALMQTCSVLDLNAFERQNKAEGLGMVNEDGTVGEKVMADDEFTQDLFRFLQLLCEGHNNDFQNYLRTQTGNTTTINIIICTVDYLLRLQESISDFYWYYSGKDVIEEQGKRNFSKAMSVAKQVFNSLTEYIQGPCTGNQQSLAHSRLWDAVVGFLHVFAHMMMKLAQDSSQIELLKELLDLQKDMVVMLLSLLEGNVVNGMIARQMVDMLVESSSNVEMILKFFDMFLKLKDIVGSEAFQDYVTDPRGLISKKDFQKAMDSQKQFSGPEIQFLLSCSEADENEMINCEEFANRFQEPARDIGFNVAVLLTNLSEHVPHDPRLHNFLELAESILEYFRPYLGRIEIMGASRRIERIYFEISETNRAQWEMPQVKESKRQFIFDVVNEGGEAEKMELFVSFCEDTIFEMQIAAQISEPEGEPETDEDEGAGAAEAGAEGAEEGAAGLEGTAATAAAGATARVVAAAGRALRGLSYRSLRRRVRRLRRLTAREAATAVAALLWAAVTRAGAAGAGAAAGALGLLWGSLFGGGLVEGAKKVTVTELLAGMPDPTSDEVHGEQPAGPGGDADGEGASEGAGDAAEGAGDEEEAVHEAGPGGADGAVAVTDGGPFRPEGAGGLGDMGDTTPAEPPTPEGSPILKRKLGVDGVEEELPPEPEPEPEPELEPEKADAENGEKEEVPEPTPEPPKKQAPPSPPPKKEEAGGEFWGELEVQRVKFLNYLSRNFYTLRFLALFLAFAINFILLFYKVSDSPPGEDDMEGSAAGDVSGAGSGGSSGWGLGAGEEAEGDEDENMVYYFLEESTGYMEPALRCLSLLHTLVAFLCIIGYNCLKVPLVIFKREKELARKLEFDGLYITEQPEDDDVKGQWDRLVLNTPSFPSNYWDKFVKRKVLDKHGDIYGRERIAELLGMDLATLEITAHNERKPNPPPGLLTWLMSIDVKYQIWKFGVIFTDNSFLYLGWYMVMSLLGHYNNFFFAAHLLDIAMGVKTLRTILSSVTHNGKQLVMTVGLLAVVVYLYTVVAFNFFRKFYNKSEDEDEPDMKCDDMMTCYLFHMYVGVRAGGGIGDEIEDPAGDEYELYRVVFDITFFFFVIVILLAIIQGLIIDAFGELRDQQEQVKEDMETKCFICGIGSDYFDTTPHGFETHTLEEHNLANYMFFLMYLINKDETEHTGQESYVWKMYQERCWDFFPAGDCFRKQYEDQLS

SEQ ID NO: 9375 - protein, 5033 aa, Homo sapiens
MGDAEGEDEVQFLRTDDEVVLQCSATVLKEQLKLCLAAEGFGNRLCFLEPTSNAQNVPPDLAICCFVLEQSLSVRALQEMLANTVEAGVESSQGGGHRTLLYGHAILLRHAHSRMYLSCLTTSRSMTDKLAFDVGLQEDATGEACWWTMHPASKQRSEGEKVRVGDDIILVSVSSERYLHLSTASGELQVDASFMQTLWNMNPICSRCEEGFVTGGHVLRLFHGHMDECLTISPADSDDQRRLVYYEGGAVCTHARSLWRLEPLRISWSGSHLRWGQPLRVRHVTTGQYLALTEDQGLVVVDASKAHTKATSFCFRISKEKLDVAPKRDVEGMGPPEIKYGESLCFVQHVASGLWLTYAAPDPKALRLGVLKKKAMLHQEGHMDDALSLTRCQQEESQAARMIHSTNGLYNQFIKSLDSFSGKPRGSGPPAGTALPIEGVILSLQDLIIYFEPPSEDLQHEEKQSKLRSLRNRQSLFQEEGMLSMVLNCIDRLNVYTTAAHFAEFAGEEAAESWKEIVNLLYELLASLIRGNRSNCALFSTNLDWLVSKLDRLEASSGILEVLYCVLIESPEVLNIIQENHIKSIISLLDKHGRNHKVLDVLCSLCVCNGVAVRSNQDLITENLLPGRELLLQTNLINYVTSIRPNIFVGRAEGTTQYSKWYFEVMVDEVTPFLTAQATHLRVGWALTEGYTPYPGAGEGWGGNGVGDDLYSYGFDGLHLWTGHVARPVTSPGQHLLAPEDVISCCLDLSVPSISFRINGCPVQGVFESFNLDGLFFPVVSFSAGVKVRFLLGGRHGEFKFLPPPGYAPCHEAVLPRERLHLEPIKEYRREGPRGPHLVGPSRCLSHTDFVPCPVDTVQIVLPPHLERIREKLAENIHELWALTRIEQGWTYGPVRDDNKRLHPCLVDFHSLPEPERNYNLQMSGETLKTLLALGCHVGMADEKAEDNLKKTKLPKTYMMSNGYKPAPLDLSHVRLTPAQTTLVDRLAENGHNVWARDRVGQGWSYSAVQDIPARRNPRLVPYRLLDEATKRSNRDSLCQAVRTLLGYGYNIEPPDQEPSQVENQSRCDRVRIFRAEKSYTVQSGRWYFEFEAVTTGEMRVGWARPELRPDVELGADELAYVFNGHRGQRWHLGSEPFGRPWQPGDVVGCMIDLTENTIIFTLNGEVLMSDSGSETAFREIEIGDGFLPVCSLGPGQVGHLNLGQDVSSLRFFAICGLQEGFEPFAINMQRPVTTWFSKGLPQFEPVPLEHPHYEVSRVDGTVDTPPCLRLTHRTWGSQNSLVEMLFLRLSLPVQFHQHFRCTAGATPLAPPGLQPPAEDEARAAEPDPDYENLRRSAGGWSEAENGKEGTAKEGAPGGTPQAGGEAQPARAENEKDATTEKNKKRGFLFKAKKVAMMTQPPATPTLPRLPHDVVPADNRDDPEIILNTTTYYYSVRVFAGQEPSCVWAGWVTPDYHQHDMSFDLSKVRVVTVTMGDEQGNVHSSLKCSNCYMVWGGDFVSPGQQGRISHTDLVIGCLVDLATGLMTFTANGKESNTFFQVEPNTKLFPAVFVLPTHQNVIQFELGKQKNIMPLSAAMFQSERKNPAPQCPPRLEMQMLMPVSWSRMPNHFLQVETRRAGERLGWAVQCQEPLTMMALHIPEENRCMDILELSERLDLQRFHSHTLRLYRAVCALGNNRVAHALCSHVDQAQLLHALEDAHLPGPLRAGYYDLLISIHLESACRSRRSMLSEYIVPLTPETRAITLFPPGRSTENGHPRHGLPGVGVTTSLRPPHHFSPPCFVAALPAAGAAEAPARLSPAIPLEALRDKALRMLGEAVRDGGQHARDPVGASVEFQFVPVLKLVSTLLVMGIFGDEDVKQILKMIEPEVFTEEEEEEDEEEEGEEEDEEEKEEDEEETAQEKEDEEKEEEEAAEGEKEEGLEEGLLQMKLPESVKLQMCHLLEYFCDQELQHRVESLAAFAERYVDKLQANQRSRYGLLIKAFSMTAAETARRTREFRSPPQEQINMLLQFKDGTDEEDCPLPEEIRQDLLDFHQDLLAHCGIQLDGEEEEPEEETTLGSRLMSLLEKVRLVKKKEEKPEEERSAEESKPRSLQELVSHMVVRWAQEDFVQSPELVRAMFSLLHRQYDGLGELLRALPRAYTISPSSVEDTMSLLECLGQIRSLLIVQMGPQEENLMIQSIGNIMNNKVFYQHPNLMRALGMHETVMEVMVNVLGGGESKEIRFPKMVTSCCRFLCYFCRISRQNQRSMFDHLSYLLENSGIGLGMQGSTPLDVAAASVIDNNELALALQEQDLEKVVSYLAGCGLQSCPMLVAKGYPDIGWNPCGGERYLDFLRFAVFVNGESVEENANVVVRLLIRKPECFGPALRGEGGSGLLAAIEEAIRISEDPARDGPGIRRDRRREHFGEEPPEENRVHLGHAIMSFYAALIDLLGRCAPEMHLIQAGKGEALRIRAILRSLVPLEDLVGIISLPLQIPTLGKDGALVQPKMSASFVPDHKASMVLFLDRVYGIENQDFLLHVLDVGFLPDMRAAASLDTATFSTTEMALAVNRYLCLAVLPLITKCAPLFAGTEHRAIMVDSMLHTVYRLSRGRSLTKAQRDVIEDCLMSLCRYIRPSMLQHLLRRLVFDVPILNEFAKMPLKLLTNHYERCWKYYCLPTGWANFGVTSEEELHLTRKLFWGIFDSLAHKKYDPELYRMAMPCLCAIAGALPPDYVDASYSSKAEKKATVDAEGNFDPRPVETLNVIIPEKLDSFINKFAEYTHEKWAFDKIQNNWSYGENIDEELKTHPMLRPYKTFSEKDKEIYRWPIKESLKAMIAWEWTIEKAREGEEEKTEKKKTRKISQSAQTYDPREGYNPQPPDLSAVTLSRELQAMAEQLAENYHNTWGRKKKQELEAKGGGTHPLLVPYDTLTAKEKARDREKAQELLKFLQMNGYAVTRGLKDMELDSSSIEKRFAFGFLQQLLRWMDISQEFIAHLEAVVSSGRVEKSPHEQEIKFFAKILLPLINQYFTNHCLYFLSTPAKVLGSGGHASNKEKEMITSLFCKLAALVRHRVSLFGTDAPAVVNCLHILARSLDARTVMKSGPEIVKAGLRSFFESASEDIEKMVENLRLGKVSQARTQVKGVGQNLTYTTVALLPVLTTLFQHIAQHQFGDDVILDDVQVSCYRTLCSIYSLGTTKNTYVEKLRPALGECLARLAAAMPVAFLEPQLNEYNACSVYTTKSPRERAILGLPNSVEEMCPDIPVLERLMADIGGLAESGARYTEMPHVIEITLPMLCSYLPRWWERGPEAPPSALPAGAPPPCTAVTSDHLNSLLGNILRIIVNNLGIDEASWMKRLAVFAQPIVSRARPELLQSHFIPTIGRLRKRAGKVVSEEEQLRLEAKAEAQEGELLVRDEFSVLCRDLYALYPLLIRYVDNNRAQWLTEPNPSAEELFRMVGEIFIYWSKSHNFKREEQNFVVQNEINNMSFLTADNKSKMAKSGGSDQERTKKKRRGDRYSVQTSLIVATLKKMLPIGLNMCAPTDQDLITLAKTRYALKDTDEEVREFLHNNLHLQGKVEGSPSLRWQMALYRGVPGREEDADDPEKIVRRVQEVSAVLYYLDQTEHPYKSKKAVWHKLLSKQRRRAVVACFRMTPLYNLPTHRACNMFLESYKAAWILTEDHSFEDRMIDDLSKAGEQEEEEEEVEEKKPDPLHQLVLHFSRTALTEKSKLDEDYLYMAYADIMAKSCHLEEGGENGEAEEEVEVSFEEKQMEKQRLLYQQARLHTRGAAEMVLQMISACKGETGAMVSSTLKLGISILNGGNAEVQQKMLDYLKDKKEVGFFQSIQALMQTCSVLDLNAFERQNKAEGLGMVNEDGTVINRQNGEKVMADDEFTQDLFRFLQLLCEGHNNDFQNYLRTQTGNTTTINIIICTVDYLLRLQESISDFYWYYSGKDVIEEQGKRNFSKAMSVAKQVFNSLTEYIQGPCTGNQQSLAHSRLWDAVVGFLHVFAHMMMKLAQDSSQIELLKELLDLQKDMVVMLLSLLEGNVVNGMIARQMVDMLVESSSNVEMILKFFDMFLKLKDIVGSEAFQDYVTDPRGLISKKDFQKAMDSQKQFSGPEIQFLLSCSEADENEMINCEEFANRFQEPARDIGFNVAVLLTNLSEHVPHDPRLHNFLELAESILEYFRPYLGRIEIMGASRRIERIYFEISETNRAQWEMPQVKESKRQFIFDVVNEGGEAEKMELFVSFCEDTIFEMQIAAQISEPEGEPETDEDEGAGAAEAGAEGAEEGAAGLEGTAATAAAGATARVVAAAGRALRGLSYRSLRRRVRRLRRLTAREAATAVAALLWAAVTRAGAAGAGAAAGALGLLWGSLFGGGLVEGAKKVTVTELLAGMPDPTSDEVHGEQPAGPGGDADGEGASEGAGDAAEGAGDEEEAVHEAGPGGADGAVAVTDGGPFRPEGAGGLGDMGDTTPAEPPTPEGSPILKRKLGVDGVEEELPPEPEPEPEPELEPEKADAENGEKEEVPEPTPEPPKKQAPPSPPPKKEEAGGEFWGELEVQRVKFLNYLSRNFYTLRFLALFLAFAINFILLFYKVSDSPPGEDDMEGSAAGDVSGAGSGGSSGWGLGAGEEAEGDEDENMVYYFLEESTGYMEPALRCLSLLHTLVAFLCIIGYNCLKVPLVIFKREKELARKLEFDGLYITEQPEDDDVKGQWDRLVLNTPSFPSNYWDKFVKRKVLDKHGDIYGRERIAELLGMDLATLEITAHNERKPNPPPGLLTWLMSIDVKYQIWKFGVIFTDNSFLYLGWYMVMSLLGHYNNFFFAAHLLDIAMGVKTLRTILSSVTHNGKQLVMTVGLLAVVVYLYTVVAFNFFRKFYNKSEDEDEPDMKCDDMMTCYLFHMYVGVRAGGGIGDEIEDPAGDEYELYRVVFDITFFFFVIVILLAIIQGLIIDAFGELRDQQEQVKEDMETKCFICGIGSDYFDTTPHGFETHTLEEHNLANYMFFLMYLINKDETEHTGQESYVWKMYQERCWDFFPAGDCFRKQYEDQLS

SEQ ID NO: 9376 - protein, 712 aa, Homo sapiens
MDTSSKENIQLFCKTSVQPVGRPSFKTEYPSSEEKQPCCGELKVFLCALSFVYFAKALAEGYLKSTITQIERRFDIPSSLVGVIDGSFEIGNLLVITFVSYFGAKLHRPKIIGAGCVIMGVGTLLIAMPQFFMEQYKYERYSPSSNSTLSISPCLLESSSQLPVSVMEKSKSKISNECEVDTSSSMWIYVFLGNLLRGIGETPIQPLGIAYLDDFASEDNAAFYIGCVQTVAIIGPIFGFLLGSLCAKLYVDIGFVNLDHITITPKDPQWVGAWWLGYLIAGIISLLAAVPFWYLPKSLPRSQSREDSNSSSEKSKFIIDDHTDYQTPQGENAKIMEMARDFLPSLKNLFGNPVYFLYLCTSTVQFNSLFGMVTYKPKYIEQQYGQSSSRANFVIGLINIPAVALGIFSGGIVMKKFRISVCGAAKLYLGSSVFGYLLFLSLFALGCENSDVAGLTVSYQGTKPVSYHERALFSDCNSRCKCSETKWEPMCGENGITYVSACLAGCQTSNRSGKNIIFYNCTCVGIAASKSGNSSGIVGRCQKDNGCPQMFLYFLVISVITSYTLSLGGIPGYILLLRCIKPQLKSFALGIYTLAIRVLAGIPAPVYFGVLIDTSCLKWGFKRCGSRGSCRLYDSNVFRHIYLGLTVILGTVSILLSIAVLFILKKNYVSKHRSFITKRERTMVSTRFQKENYTTSDHLLQPNYWPGKETQL

SEQ ID NO: 9377 - protein, 313 aa, Homo sapiens
MEGKNLTSISECFLLGFSEQLEEQKPLFGSFLFMYLVTVAGNLLIILVIITDTQLHTPMYFFLANLSLADACFVSTTVPKMLANIQIQSQAISYSGCLLQLYFFMLFVMLEAFLLAVMAYDCYVAICHPLHYILIMSPGLCIFLVSASWIMNALHSLLHTLLMNSLSFCANHEIPHFFCDINPLLSLSCTDPFTNELVIFITGGLTGLICVLCLIISYTNVFSTILKIPSAQGKRKAFSTCSSHLSVVSLFFGTSFCVDFSSPSTHSAQKDTVASVMYTVVTPMLNPFIYSLRNQEIKSSLRKLIWVRKIHSP

SEQ ID NO: 9378 - protein, 882 aa, Homo sapiens
MPALACLRRLCRHVSPQAVLFLLFIFCLFSVFISAYYLYGWKRGLEPSADAPEPDCGDPPPVAPSRLLPLKPVQAATPSRTDPLVLVFVESLYSQLGQEVVAILESSRFKYRTEIAPGKGDMPTLTDKGRGRFALIIYENILKYVNLDAWNRELLDKYCVAYGVGIIGFFKANENSLLSAQLKGFPLFLHSNLGLKDCSINPKSPLLYVTRPSEVEKGVLPGEDWTVFQSNHSTYEPVLLAKTRSSESIPHLGADAGLHAALHATVVQDLGLHDGIQRVLFGNNLNFWLHKLVFVDAVAFLTGKRLSLPLDRYILVDIDDIFVGKEGTRMKVEDVKALFDTQNELRAHIPNFTFNLGYSGKFFHTGTNAEDAGDDLLLSYVKEFWWFPHMWSHMQPHLFHNQSVLAEQMALNKKFAVEHGIPTDMGYAVAPHHSGVYPVHVQLYEAWKQVWSIRVTSTEEYPHLKPARYRRGFIHNGIMVLPRQTCGLFTHTIFYNEYPGGSSELDKIINGGELFLTVLLNPISIFMTHLSNYGNDRLGLYTFKHLVRFLHSWTNLRLQTLPPVQLAQKYFQIFSEEKDPLWQDPCEDKRHKDIWSKEKTCDRFPKLLIIGPQKTGTTALYLFLGMHPDLSSNYPSSETFEEIQFFNGHNYHKGIDWYMEFFPIPSNTTSDFYFEKSANYFDSEVAPRRAAALLPKAKVLTILINPADRAYSWYQHQRAHDDPVALKYTFHEVITAGSDASSKLRALQNRCLVPGWYATHIERWLSAYHANQILVLDGKLLRTEPAKVMDMVQKFLGVTNTIDYHKTLAFDPKKGFWCQLLEGGKTKCLGKSKGRKYPEMDLDSRAFLKDYYRDHNIELSKLLYKMGQTLPTWLREDLQNTR

SEQ ID NO: 9379 - protein, 556 aa, Homo sapiens [sequence omitted]

SEQ ID NO: 9380 - protein, 883 aa, Homo sapiens
MQKIMHISVLLSPVLWGLIFGVSSNSIQIGGLFPRGADQEYSAFRVGMVQFSTSEFRLTPHIDNLEVANSFAVTNAFCSQFSRGVYAIFGFYDKKSVNTITSFCGTLHVSFITPSFPTDGTHPFVIQMRPDLKGALLSLIEYYQWDKFAYLYDSDRGLSTLQAVLDSAAEKKWQVTAINVGNINNDKKDEMYRSLFQDLELKKERRVILDCERDKVNDIVDQVITIGKHVKGYHYIIANLGFTDGDLLKIQFGGANVSGFQIVDYDDSLVSKFIERWSTLEEKEYPGAHTTTIKYTSALTYDAVQVMTEAFRNLRKQRIEISRRGNAGDCLANPAVPWGQGVEIERALKQVQVEGLSGNIKFDQNGKRINYTINIMELKTNGPRKIGYWSEVDKMVVTLTELPSGNDTSGLENKTVVVTTILESPYVMMKKNHEMLEGNERYEGYCVDLAAEIAKHCGFKYKLTIVGDGKYGARDADTKIWNGMVGELVYGKADIAIAPLTITLVREEVIDFSKPFMSLGISIMIKKPQKSKPGVFSFLDPLAYEIWMCIVFAYIGVSVVLFLVSRFSPYEWHTEEFEDGRETQSSESTNEFGIFNSLWFSLGAFMQQGCDISPRSLSGRIVGGVWWFFTLIIISSYTANLAAFLTVERMVSPIESAEDLSKQTEIAYGTLDSGSTKEFFRRSKIAVFDKMWTYMRSAEPSVFVRTTAEGVARVRKSKGKYAYLLESTMNEYIEQRKPCDTMKVGGNLDSKGYGIATPKGSSLRNAVNLAVLKLNEQGLLDKLKNKWWYDKGECGSGGGDSKEKTSALSLSNVAGVFYILVGGLGLAMLVALIEFCYKSRAEAKRMKVAKNAQNINPSSSQNSQNFATYKEGYNVYGIESVKI

SEQ ID NO: 9381 - protein, 883 aa, Homo sapiens
MQKIMHISVLLSPVLWGLIFGVSSNSIQIGGLFPRGADQEYSAFRVGMVQFSTSEFRLTPHIDNLEVANSFAVTNAFCSQFSRGVYAIFGFYDKKSVNTITSFCGTLHVSFITPSFPTDGTHPFVIQMRPDLKGALLSLIEYYQWDKFAYLYDSDRGLSTLQAVLDSAAEKKWQVTAINVGNINNDKKDEMYRSLFQDLELKKERRVILDCERDKVNDIVDQVITIGKHVKGYHYIIANLGFTDGDLLKIQFGGANVSGFQIVDYDDSLVSKFIERWSTLEEKEYPGAHTTTIKYTSALTYDAVQVMTEAFRNLRKQRIEISRRGNAGDCLANPAVPWGQGVEIERALKQVQVEGLSGNIKFDQNGKRINYTINIMELKTNGPRKIGYWSEVDKMVVTLTELPSGNDTSGLENKTVVVTTILESPYVMMKKNHEMLEGNERYEGYCVDLAAEIAKHCGFKYKLTIVGDGKYGARDADTKIWNGMVGELVYGKADIAIAPLTITLVREEVIDFSKPFMSLGISIMIKKPQKSKPGVFSFLDPLAYEIWMCIVFAYIGVSVVLFLVSRFSPYEWHTEEFEDGRETQSSESTNEFGIFNSLWFSLGAFMQQGCDISPRSLSGRIVGGVWWFFTLIIISSYTANLAAFLTVERMVSPIESAEDLSKQTEIAYGTLDSGSTKEFFRRSKIAVFDKMWTYMRSAEPSVFVRTTAEGVARVRKSKGKYAYLLESTMNEYIEQRKPCDTMKVGGNLDSKGYGIATPKGSSLRTPVNLAVLKLSEQGVLDKLKNKWWYDKGECGAKDSGSKEKTSALSLSNVAGVFYILVGGLGLAMLVALIEFCYKSRAEAKRMKVAKNAQNINPSSSQNSQNFATYKEGYNVYGIESVKI

SEQ ID NO: 9382 - protein, 436 aa, Homo sapiens
MTFGRSGAASVVLNVGGARYSLSRELLKDFPLRRVSRLHGCRSERDVLEVCDDYDRERNEYFFDRHSEAFGFILLYVRGHGKLRFAPRMCELSFYNEMIYWGLEGAHLEYCCQRRLDDRMSDTYTFYSADEPGVLGRDEARPGGAEAAPSRRWLERMRRTFEEPTSSLAAQILASVSVVFVIVSMVVLCASTLPDWRNAAADNRSLDDRSRYSAGPGREPSGIIEAICIGWFTAECIVRFIVSKNKCEFVKRPLNIIDLLAITPYYISVLMTVFTGENSQLQRAGVTLRVLRMMRIFWVIKLARHFIGLQTLGLTLKRCYREMVMLLVFICVAMAIFSALSQLLEHGLDLETSNKDFTSIPAACWWVIISMTTVGYGDMYPITVPGRILGGVCVVSGIVLLALPITFIYHSFVQCYHELKFRSARYSRSLSTEFLN

SEQ ID NO: 9383 - protein, 425 aa, Homo sapiens
MTFGRSGAASVVLNVGGARYSLSRELLKDFPLRRVSRLHGCRSERDVLEVCDDYDRERNEYFFDRHSEAFGFILLYVRGHGKLRFAPRMCELSFYNEMIYWGLEGAHLEYCCQRRLDDRMSDTYTFYSADEPGVLGRDEARPGGAEAAPSRRWLERMRRTFEEPTSSLAAQILASVSVVFVIVSMVVLCASTLPDWRNAAADNRSLDDRSRIIEAICIGWFTAECIVRFIVSKNKCEFVKRPLNIIDLLAITPYYISVLMTVFTGENSQLQRAGVTLRVLRMMRIFWVIKLARHFIGLQTLGLTLKRCYREMVMLLVFICVAMAIFSALSQLLEHGLDLETSNKDFTSIPAACWWVIISMTTVGYGDMYPITVPGRILGGVCVVSGIVLLALPITFIYHSFVQCYHELKFRSARYSRSLSTEFLN

SEQ ID NO: 9384 - protein, 680 aa, Homo sapiens
MTLQHNSALSPELPLKLGKSEHLVLLTNISAEGTLNQIPLSLSCTTLCCTSSPAFCLSRGGGGWARRRMGAAPSPTQASSRGGGPGPPAPTRAVSSSSRARGGALSALGPSPARPLTTSPAPAPPPRSRPARQQPDPQCWEKRGGAGGDTKGGAAGPGPGRLRGMDAEYPAFEPPLCSELKHLCRRLREAYRELKEDLTPFKDDRYYRLAPMRLYTLSKRHFVLVFVVFFICFGLTIFVGIRGPKVIQTSAANFSLNNSKKLKPIQILSNPLSTYNQQLWLTCVVELDQSKETSIKTSFPMTVKVDGVAQDGTTMYIHNKVHNRTRTLTCAGKCAEIIVAHLGYLNYTQYTVIVGFEHLKLPIKGMNFTWKTYNPAFSRLEIWFRFFFVVLTFIVTCLFAHSLRKFSMRDWGIEQKWMSVLLPLLLLYNDPFFPLSFLVNSWLPGMLDDLFQSMFLCALLLFWLCVYHGIRVQGERKCLTFYLPKFFIVGLLWLASVTLGIWQTVNELHDPMYQYRVDTGNFQGMKVFFMVVAAVYILYLLFLIVRACSELRHMPYVDLRLKFLTALTFVVLVISIAILYLRFGAQVLQDNFVAELSTHYQNSAEFLSFYGLLNFYLYTLAFVYSPSKNALYESQLKDNPAFSMLNDSDDDVIYGSDYEEMPLQNGQAIRAKYKEESDSD

SEQ ID NO: 9385 - protein, 523 aa, Homo sapiens
LPSPGPAQRASSPIPSAGRREGAQAATQRVERRDRDPGGCAAWTPSTLPLSPRSAASSSTCAGGCGKRTASSRRTSRPSRMTATTGPKVIQTSAANFSLNNSKKLKPIQILSNPLSTYNQQLWLTCVVELDQSKETSIKTSFPMTVKVDGVAQDGTTMYIHNKVHNRTRTLTCAGKCAEIIVAHLGYLNYTQYTVIVGFEHLKLPIKGMNFTWKTYNPAFSRLEIWFRFFFVVLTFIVTCLFAHSLRKFSMRDWGIEQKWMSVLLPLLLLYNDPFFPLSFLVNSWLPGMLDDLFQSMFLCALLLFWLCVYHGIRVQGERKCLTFYLPKFFIVGLLWLASVTLGIWQTVNELHDPMYQYRVDTGNFQGMKVFFMVVAAVYILYLLFLIVRACSELRHMPYVDLRLKFLTALTFVVLVISIAILYLRFGAQVLQDNFVAELSTHYQNSAEFLSFYGLLNFYLYTLAFVYSPSKNALYESQLKDNPAFSMLNDSDDDVIYGSHYEEMPLQNGQAIRAKYKEESDSD

SEQ ID NO: 9386 - protein, 997 aa, Homo sapiens
MENAHTKTVEEVLGHFGVNESTGLSLEQVKKLKERWGSNELPAEEGKTLLELVIEQFEDLLVRILLLAACISFVLAWFEEGEETITAFVEPFVILLILVANAIVGVWQERNAENAIEALKEYEPEMGKVYRQDRKSVQRIKAKDIVPGDIVEIAVGDKVPADIRLTSIKSTTLRVDQSILTGESVSVIKHTDPVPDPRAVNQDKKNMLFSGTNIAAGKAMGVVVATGVNTEIGKIRDEMVATEQERTPLQQKLDEFGEQLSKVISLICIAVWIINIGHFNDPVHGGSWIRGAIYYFKIAVALAVAAIPEGLPAVITTCLALGTRRMAKKNAIVRSLPSVETLGCTSVICSDKTGTLTTNQMSVCRMFILDRVEGDTCSLNEFTITGSTYAPIGEVHKDDKPVNCHQYDGLVELATICALCNDSALDYNEAKGVYEKVGEATETALTCLVEKMNVFDTELKGLSKIERANACNSVIKQLMKKEFTLEFSRDRKSMSVYCTPNKPSRTSMSKMFVKGAPEGVIDRCTHIRVGSTKVPMTSGVKQKIMSVIREWGSGSDTLRCLALATHDNPLRREEMHLEDSANFIKYETNLTFVGCVGMLDPPRIEVASSVKLCRQAGIRVIMITGDNKGTAVAICRRIGIFGQDEDVTSKAFTGREFDELNPSAQRDACLNARCFARVEPSHKSKIVEFLQSFDEITAMTGDGVNDAPALKKAEIGIAMGSGTAVAKTASEMVLADDNFSTIVAAVEEGRAIYNNMKQFIRYLISSNVGEVVCIFLTAALGFPEALIPVQLLWVNLVTDGLPATALGFNPPDLDIMNKPPRNPKEPLISGWLFFRYLAIGCYVGAATVGAAAWWFIAADGGPRVSFYQLSHFLQCKEDNPDFEGVDCAIFESPYPMTMALSVLVTIEMCNALNSLSENQSLLRMPPWENIWLVGSICLSMSLHFLILYVEPLPLIFQITPLNVTQWLMVLKISLPVILMDETLKFVARNYLEPAILE

SEQ ID NO: 9387 - protein, 1054 aa, Homo sapiens
GCSSGTGVRALWREEKPGGGRRVKRRNPGRQAVGHTEEDPPRVGTPWKEHTGPGPQEGSTMEAAHAKTTEECLAYFGVGETTGLTPDQVKRNLEKYGLNELPAEEGKTLWELVIEQFEDLLVRILLLAACISFVLAWFEEGEETITAFVEPFVILLILIANAIVGVWQERNAENAIEALKEYEPEMGKVYRADRKSVQRIKARDIVPGDIVEVAVGDKVPADIRILAIKSTTLRVDQSILTGESVSVIKHTEPVPDPRAVNQDKKNMLFSGTNIAAGKALGIVATTGVGTEIGRIRDQMAATEQDKTPLQQKLDEFGEQLSKVISLICVAVWLINIGHFNDPVHGGSWFRGAIYYFKIAVALAVAAIPEGLPAVITTCLALGTRRMAKKNAIVRSLPSVETLGCTSVICSDKTGTLTTNQMSVCKMFIIDKVDGDICLLNEFSITGSTYAPEGEVLKNDKPVRPGQYDGLVELATICALCNDSSLDFNEAKGVYEKVGEATETALTTLVEKMNVFNTDVRSLSKVERANACNSVIRQLMKKEFTLEFSRDRKSMSVYCSPAKSSRAAVGNKMFVKGAPEGVIDRCNYVRVGTTRVPPTGPVKEKIMAVIKEWGTGRDTLRCLALATRDTPPKREEMVLDDSARFLEYETDLTFVGVVGMLDPPRKEVTGSIQLCRDAGIRVIMITGDHKGTAIAICRRIGIFGENEEVADRAYTGREFDDLPLAEQREACRRACCFARVEPSHKSKIVEYLQSYDEITAMTGDGVNDAPALKKAEIGIAMGSGTAVAKTASEMVLADDNFSTIVAAVEEGRAIYNNMKQFIRYLISSNVGEVVCIFLTAALGLPEALIPVQLLWVNLVTDGLPATALGFNPPDLDIMDRPPRSPKEPLISGWLFFRYMAIGGYVGAATVGAAAWWFLYAEDGPHVNYSQLTHFMQCTEDNTHFEGIDCEVFEAPEPMTMALSVLVTIEMCNALNSLSENQSLLRMPPWVNIWLLGSICLSMSLHFLILYVDPLPMIFKLRALDLTQWLMVLKISLPVIGLDEILKFVARNYLEG

SEQ ID NO: 9388 - protein, 1043 aa, Homo sapiens
MENAHTKTVEEVLGHFGVNESTGLSLEQVKKLKERWGSNELPAEEGKTLLELVIEQFEDLLVRILLLAACISFVLAWFEEGEETITAFVEPFVILLILVANAIVGVWQERNAENAIEALKEYEPEMGKVYRQDRKSVQRIKAKDIVPGDIVEIAVGDKVPADIRLTSIKSTTLRVDQSILTGESVSVIKHTDPVPDPRAVNQDKKNMLFSGTNIAAGKAMGVVVATGVNTEIGKIRDEMVATEQERTPLQQKLDEFGEQLSKVISLICIAVWIINIGHFNDPVHGGSWIRGAIYYFKIAVALAVAAIPEGLPAVITTCLALGTRRMAKKNAIVRSLPSVETLGCTSVICSDKTGTLTTNQMSVCRMFILDRVEGDTCSLNEFTITGSTYAPIGEVHKDDKPVNCHQYDGLVELATICALCNDSALDYNEAKGVYEKVGEATETALTCLVEKMNVFDTELKGLSKIERANACNSVIKQLMKKEFTLEFSRDRKSMSVYCTPNKPSRTSMSKMFVKARAPEGVIDRCTHIRVGSTKVPMTSGVKQKIMSVIREWGSGSDTLRCLALATHDNPLRREEMHLEDSANFIKYETNLTFVGCVGMLDPPRIEVASSVKLCRQAGIRVIMITGDNKGTAVAICRRIGIFGQDEDVTSKAFTGREFDELNPSAQRDACLNARCFARVEPSHKSKIVEFLQSFDEITAMTGDGVNDAPALKKAEIGIAMGSGTAVAKTASEMVLADDNFSTIVAAVEEGRAIYNNMKQFIRYLISSNVGEVVCIFLTAALGFPEALIPVQLLWVNLVTDGLPATALGFNPPDLDIMNKPPRNPKEPLISGWLFFRYLAIGCYVGAATVGAAAWWFIAADGGPRVSFYQLSHFLQCKEDNPDFEGVDCAIFESPYPMTMALSVLVTIEMCNALNSLSENQSLLRMPPWENIWLVGSICLSMSLHFLILYVEPLPLIFQITPLNVTQWLMVLKISLPVILMDETLKFVARNYLEPGKECVQPATKSCSFSACTDGISWPFVLLIMPLVIWVYSTDTNFSDMFWS

SEQ ID NO: 9389 - protein, 1001 aa, Homo sapiens
MEAAHAKTTEECLAYFGVSETTGLTPDQVKRNLEKYGLNELPAEEGKTLWELVIEQFEDLLVRILLLAACISFVLAWFEEGEETITAFVEPFVILLILIANAIVGVWQERNAENAIEALKEYEPEMGKVYRADRKSVQRIKARDIVPGDIVEVAVGDKVPADIRILAIKSTTLRVDQSILTGESVSVIKHTEPVPDPRAVNQDKKNMLFSGTNIAAGKALGIVATTGVGTEIGKIRDQMAATEQDKTPLQQKLDEFGEQLSKVISLICVAVWLINIGHFNDPVHGGSWFRGAIYYFKIAVALAVAAIPEGLPAVITTCLALGTRRMAKKNAIVRSLPSVETLGCTSVICSDKTGTLTTNQMSVCKMFIIDKVDGDICLLNEFSITGSTYAPEGEVLKNDKPVRPGQYDGLVELATICALCNDSSLDFNEAKGVYEKVGEATETALTTLVEKMNVFNTDVRSLSKVERANACNSVIRQLMKKEFTLEFSRDRKSMSVYCSPAKSSRAAVGNKMFVKGAPEGVIDRCNYVRVGTTRVPLTGPVKEKIMAVIKEWGTGRDTLRCLALATRDTPPKREEMVLDDSARFLEYETDLTFVGVVGMLDPPRKEVTGSIQLCRDAGIRVIMITGDNKGTAIAICRRIGIFGENEEVADRAYTGREFDDLPLAEQREACRRACCFARVEPSHKSKIVEYLQSYDEITAMTGDGVNDAPALKKAEIGIAMGSGTAVAKTASEMVLADDNFSTIVAAVEEGRAIYNNMKQFIRYLISSNVGEVVCIFLTAALGLPEALIPVQLLWVNLVTDGLPATALGFNPPDLDIMDRPPRSPKEPLISGWLFFRYMAIGGYVGAATVGAAAWWFLYAEDGPHVNYSQLTHFMQCTEDNTHFEGIDCEVFEAPEPMTMALSVLVTIEMCNALNSLSENQSLLRMPPWVNIWLLGSICLSMSLHFLILYVDPLPMIFKLRALDLTQWLMVLKISLPVIGLDEILKFVARNYLEDPEDERRK

SEQ ID NO: 9390 - protein, 438 aa, Homo sapiens
MRGPSGPPGLLYVPHLLLCLLCLLPPPLQYAAGQSQMPKDQPLWALLEQYCHTIMTLTNLSGPYSYCNTTLDQIGTCWPRSAAGALVERPCPEYFNGVKYNTTRNAYRECLENGTWASKINYSQCEPILDDKQRKYDLHYRIALVVNYLGHCVSVAALVAAFLLFLALRSIRCLRNVIHWNLITTFILRNVMWFLLQLVDHEVHESNEVWCRCITTIFNYFVVTNFFWMFVEGCYLHTAIVMTYSTERLRKCLFLFIGWCIPFPIIVAWAIGKLYYENEQCWFGKEPGDLVDYIYQGPIILVLLINFVFLFNIVRILMTKLRASTTSETIQYRKAVKATLVLLPLLGITYMLFFVNPGEDDLSQIMFIYFNSFLQSFQGFFVSVFYCFFNGEVRSAVRKRWHRWQDHHSLRVPMARAMSIPTSPTRISFHSIKQTAAV

SEQ ID NO: 9391 - protein, 290 aa, Homo sapiens
MMPQEQYTHHRSTMPGSVGPQVYKVGIYGWRKRCLYFFVLLLMILILVNLAMTIWILKVMNFTIDGMGNLRITEKGLKLEGDSEFLQPLYAKEIQSQPGNALYFKSARNVTVNILNDQTKVLTQLITGPKAVEAYGKKFEVKTVSGKLLFSADNNEVVVGAERLRVLGAEGTVFPKSIETPNVRADPFKELRLESPTRSLVMEAPKGVEINAEAGNMEATCRTELRLESKDGEIKLDAAKIRLPRLPHGSYTPTGTRQKVFEICVCANGRLFLSQAGAGSTCQINTSVCL

SEQ ID NO: 9392 - protein, 334 aa, Homo sapiens
LGQLLSAGWACTHSAGRVATSFRAAQHALGSRAVFIGRFVKRTREMPQEQYTHHRSTMPGSVGPQVYKVGIYGWRKRCLYFFVLLLMILILVNLAMTIWILKVMNFTIDGMGNLRITEKGLKLEGDSEFLQPLYAKEIQSRPGNALYFKSARNVTVNILNDQTKVLTQLITGPKAVEAYGKKFEVKTVSGKLLFSADNNEVVVGAERLRVLGAEGTVFPKSIETPNVRADPFKELRLESPTRSLVMEAPKGVEINAEAGNMEATCRTELRLESKDGEIKLDAAKIRLPRLPHGSYTPTGTRQKVFEICVCANGRLFLSQAGAGSTCQINTSVCL

SEQ ID NO: 9393 - protein, 256 aa, Homo sapiens
MMPQEQYTHHRSTMPGSVGPQVYKVGIYGWRKRCLYFFVLLLMILILVNLAMTIWILKVMNFTIDGMGNLRITEKGLKLEGDSEFLQPLYAKEIQSRPGNALYFKSARNVTVNILNDQTKVLTQLITGPKAVEAYGKKFEVKTVSGKLLFSADNNEVVVGAERLRVLGAEGTVFPKSIETPNVRADPFKELRLESPTRSLVMEAPKGVEINAEAGNMEATCRTELRLESKDGEVRDEKDRSSKSYSFNRPTLPITG

SEQ ID NO: 9394 - protein, 2253 aa, Homo sapiens
MRPGPALLLLGVGLSLSVGRLPLPPVPRGAQAAVSGAPGGLLRGAPGLGVRGGRALLSLRPSAVRAGGAVLSGRGSLCFPHGGTGRRWYCLDLRVLLSAQRLPWPAAPALALVDLQLSARGGRLSLTWSVRLPRSPGRLAWAFRLRLLGPGAARPASPAARVSPRSAAPGPRPQQGFVARTECPTDGPARVMLQAVNSSSHRAVESSVSCQINACVIQRVRINTDQKGAPVRLSMQAEATINASVQLDCPAARAIAQYWQVFSVPAVGQAPDWTQPLDLPQLEIRNSPLFIHIPNNSLQWGVYVFNFTVSITTGNPKMPEVKDSDAVYVWIVRSSLQAVMLGDANITANFTEQLILDGSTSSDPDADSPLQGLQFFWYCTTDPRNYGGDRIILGSKEVCHPEQANLKWPWASGPVLTLLPETLKGDHVYFFRMVIRKDSRTAFSDKRVHVLQGPKAIAHITCIENCERNFIVSDRFSLFLNCTNCASRDFYKWSILSSSGGEMLFDWMGETVTGRNGAYLSIKAFAFRHFLEAEFSISLYLACWSGVTSVFRHSFIINHGPQIGECKINPAKGIALITKFVVQCSNFRDKHVPLTYKIIVSDLHSVGEISSVKENTLGTILYLGPQSTVPPSFLPVGMLASQYGLKIYAQVYDSLGAFSQVTLHATAQAPTDKNSSKTVLNQLLSFTVGPSSLLSTLIQKKDFLPAGYLLYIVASVLNNMKTELPLRDDRVNLRKHLIDQSFLLPVSTLVEIGQVVMTITKLTQKPSEFTWDAQKRATMRVWQANQALQEYQQKDKRFRSEQIEIVSTGILMSLSNILKMTSPHQVVKDPFYVIESLSDTILANKVPGNKTTSMRTPNFNMYVKKVEKWGINQLFRNEKHCRNCFYPTLNVSSVPGLSANGPISTMFCDFTNDLFPWLNDQENTSVEVSGFRMTGVADNGSVLEITPDVAEVYLVRKNLTFAAFNLTVGPNSEVDGSLKKTTGGFSFQVDSTVLREVLVHIVTEVMVLFTVLVYTGSQITPTALVATFLVPHDIPPFASQSALFDPACTVKKARVVCLPVSLLQLIAQHSHSPHCTVSIVLQAPRFVMKLNDKLVRISIFSVQCLDMYGIQSEWREGYCILGEKTSWYEVHCICKNVVRARRQLGTIGLTGIHLHTHYVMAKVIVIPNPVDLRLNIIKSLHQNPVTLFTVLFIILLYVGLAFWALYRDEMDQHLRGHVIVLPDNDPYDNLCYLVTIFTGSRWGSGTRANVFVQLRGTVSTSDVHCLSHPHFTTLYRGSINTFLLTTKSDLGDIHSIRVWHNNEGRSPSWYLSRIKVENLFSRHIWLFICQKWLSVDTTLDRTFHVTHPDERLTRKDFFFIDVSSNLRKNHMWFSIFASVVAKTFNRLQRLSCCLAMLLSSLLCNIMFFNLNRQEQTESRERKYMRSMMIGIESVLITIPVQLLITFLFTCSQRKPQADLKEVSPQKHPLMSEASEHWEEYLRKWHAYETAKVHPREVAKPASKGKPRLPKASPKATSKPKHRHRKAQIKTPETLGPNTNSNNNIEDDQDVHSEQHPSQKDLQQLKKKPRIVLPWWCVYVAWFLVFATSSISSFFIVFYGLTYGYDKSIEWLFASFCSFCQSVLLVQPSKIILLSGFRTNKPKYCKNLSWSTKYKYTEIRLDGMRMHPEEMQRIHDQIVRIRGTRMYQPLTEDEIRIFKRKKRIKRRALLFLSYILTHFIFLALLLILIVLLRHTDCFYYNQFIRDRFSMDLATVTKLEDIYRWLNSVLLPLLHNDLNPTFLPESSSKILGLPLMRQVRAKSSEKMCLPAEKFVQNSIRREIHCHPKYGIDPEDTKNYSGFWNEVDKQAIDESTNGFTYKPQGTQWLYYSYGLLHTYGSGGYALYFFPEQQRFNSTLRLKELQESNWLDEKTWAVVLELTTFNPDINLFCSISVIFEVSQLGVVNTSISLHSFSLADFDRKASAEIYLYVAILIFFLAYVVDEGCIIMQERASYVRSVYNLLNFALKCIFTVLIVLFLRKHFLATGIIRFYLSNPEDFIPFHAVSQVDHIMRIILGFLLFLTILKTLRYSRFFYDVRLAQRAIQAALPGICHMAFVVSVYFFVYMAFGYLVFGQHEWNYSNLIHSTQTVFSYCVSAFQNTEFSNNRILGVLFLSSFMLVMICVLINLFQAVILSAYEEMKQPVYEEPSDEVEAMTYLCRKLRTMFSFLTSQSKAKDEPEFFIDMLYGQPEKNSHRYLGLKTRNINGKKMVYLVV

SEQ ID NO: 9395 - protein, 760 aa, Homo sapiens
NTVRNSRSTEVSGHLLETGRHLVSAAMPKVMKDVVHPLGGEEPSMARAVVRSVGGFTLGLSLATAYGLLELLVEGHSPWGCLVGTLTLAAFLSLGMGFSRQVRATVLLLLPQAFSRQGRTLLLVAAFGLVLQGPCANTLRNFTRASEAVACGAELALNQTAEVLQRAKQPLVSALNKIKAIARKTKEVADRVRKFFRSIMDGVKHIARALRNVWQWLLHIGDVCNSELGNPYLKCARVFDDAKDSCMMVIPQAYHLCYVLMPFKLALCGLASLVQVFCVIPKYIQPFLRQTIGTPVIQLLNRVRQEFEFNMTATHHFSVDLNASRSLSQVAMDLHEAVSMKLHRVREALALMGFTTPLLLVLLYLQALFYRYCYLNWDHYDNIYITSRFLRMEAVRSTAGLPTVLPLSAHEARRYIPPGSIFLSQWEKFFYILETFNLIRHLLLVLFLVFLDYAVFWVLDLARHQLQGEIVARSPVLVSLTVEGTGYAGNIYRDLVSAFDVLQQGNISILSRRCLLRPSEPDSTGYIVIGVMYGLCFFITLFGSYVSRLRRVICASYYPSREQERISYLYNVLLSRRTNLLAALHRSVRRRAADQGHRSAFLVLASRCPCLGPFVSHFWLHQAYCLGCGQPQDEGDMENTVSCSTPGCQGLYCLTCFRLLDNTCSVCASPLSYQGDLDLELDSSDEEGPQLWLAAAQRKDPEQAWLLQQQLQEVLGRSLSMESTSESSDLDEEKGPQQRKHGQQPLPEAHQPVSILTSPE

SEQ ID NO: 9396 - protein, 604 aa, Homo sapiens
MDGVKHIARALRNVWQWLLHIGDVCNSELGNPYLKCARVFDDAKDSCMMVIPQAYHLCYVLMPFKLALCGLASLVQVFCVIPKYIQPFLRQTIGTPVIQLLNRVRQEFEFNMTATHHFSVDLNASRSLSQVAMDLHEAVSMKLHRVREALALMGFTTPLLLVLLYLQALFYRYCYLNWDHYDNIYITSRFLRMEAVRSTAGLPTVLPLSAHEARRYIPPGSIFLSQWEKFFYILETFNLIRHLLLVLFLVFLDYAVFWVLDLARHQLQGEIVARSPVLVSLTVEGTGYAGNIYRDLVSAFDVLQQGNISILSRRCLLRPSEPDSTGYIVIGVMYGLCFFITLFGSYVSRLRRVICASYYPSREQERISYLYNVLLSRRTNLLAALHRSVRRRAADQGHRSAFLVLASRCPCLGPFVSHFWLHQAYCLGCGQPQDEGDMENTVSCSTPGCQGLYCLTCFRLLDNTCSVCASPLSYQGDLDLELDSSDEEGPQLWLAAAQRKDPEQAWLLQQQLQEVLGRSLSMESTSESSDLDEEKGPQQRKHGQQPLPEAHQPVSILTSPEPTDHLRHPPPLKEPPLQLQNPQSLSHLPLFLILPTHPPNKPKV

SEQ ID NO: 9397 - protein, 639 aa, Homo sapiens
MPKVMKDVVHPLGGEEPSMARAVVRSVGGFTLGLSLATAYGLLELLVEGHSPWGCLVGTLTLAAFLSLGMGFSRQVRATVLLLLPQAFSRQGRTLLLVAAFGLVLQGPCANTLRNFTRASEAVACGAELALNQTAEVLQRAKQPLVSALNKIKAIARKTKEVADRVRKFFRSIMDGVKHIARALRNVWQWLLHIGDVCNSELGNPYLKCARVFDDAKDSCMMVIPQAYHLCYVLMPFKLALCGLASLVQVFCVIPKYIQPFLRQTIGTPVIQLLNRVRQEFEFNMTATHHFSVDLNASRSLSQVAMDLHEAVSMKLHRVREALALMGFTTPLLLVLLYLQALFYRYCYLNWDHYDNIYITSRFLRMEAVRSTAGLPTVLPLSAHEARRYIPPGSIFLSQWEKFFYILETFNLIRHLLLVLFLVFLDYAVFWVLDLARHQLQGEIVARSPVLVSLTVEGTGYAGNIYRDLVSAFDVLQQGNISILSRRCLLRPSEPDSTGYIVIGVMYGLCFFITLFGSYVSRLRRVICASYYPSREQERISYLYNVLLSRRTNLLAALHRSVRRRAADQGHRSAFLVLASRCPCLGPFVSHFWLHQAYCLGCGQPQDEGDMENTVSCSTPGCQGFICKWHCSSSLVCTP

SEQ ID NO: 9398 - protein, 489 aa, Homo sapiens
MTATHHFSVDLNASRSLSQVAMDLHEAVSMKLHRVREALALMGFTTPLLLVLLYLQALFYRYCYLNWDHYDNIYITSRFLRMEAVRSTAGLPTVLPLSAHEARRYIPPGSIFLSQWEKFFYILETFNLIRHLLLVLFLVFLDYAVFWVLDLARHQLQGEIVARSPVLVSLTVEGTGYAGNIYRDLVSAFDVLQQGNISILSRRCLLRPSEPDSTGYIVIGVMYGLCFFITLFGSYVSRLRRVICASYYPSREQERISYLYNVLLSRRTNLLAALHRSVRRRAADQGHRSAFLVLASRCPCLGPFVSHFWLHQAYCLGCGQPQDEGDMENTVSCSTPGCQGLYCLTCFRLLDNTCSVCASPLSYQGDLDLELDSSDEEGPQLWLAAAQRKDPEQAWLLQQQLQEVLGRSLSMESTSESSDLDEEKGPQQRKHGQQPLPEAHQPVSILTSPEPHRPPETSSATKGAPTPASEPSVPLSPPSLPDPSHPPPK

SEQ ID NO: 9399 - protein, 340 aa, Homo sapiens
MHKFRLKWQSISITLVEKVQMIAVILGSLFLIASVTWLLWSAFSPYAVWQRKDILFQICYGMYGFMDLVCIGSDFLSCKIFMNKYEIYQVVSSEECKTTKRTIKMSTEDFRAYVVWGCLSRLSSFLVSLWRAKTTRIQCGLIRDHLHSEDTFSTGSGDHSCQPPTAPCISELYKQSSCTPFKSVINFHQKTFITRLLEPKSNHLITTQSPPPLPSLESELLGSLRIAELWKLTGLIVHEGAAVYRVFKRWRAVNLHWDVLNYDKATDIEESSRGESSTSRTLWLPLTALRNRNLVHPTQLTSPRFQCGYVLLHLFNRMRPHEDLSEDNSSGEVVMRVTSV

SEQ ID NO: 9400 - protein, 220 aa, Homo sapiens
MRSSLTMVGTLWAFLSLVTAVTSSTSYFLPYWLFGSQMGKPVSFSTFRRCNYPVRGEGHSLIMVEECGRYASFNAIPSLAWQMCTVVTGAGCALLLLVALAAVLGCCMEELISRMMGRCMGAAQFVGGLLISSGCALYPLGWNSPEIMQTCGNVSNQFQLGTCRLGWAYYCAGGGAAAAMLICTWLSCFAGRNPKPVILVESIMRNTNSYAMELDHCLKP

SEQ ID NO: 9401 - protein, 270 aa, Homo sapiens
HFRVSNSISRSRGFSSWSFLRPLGSQEPLDRGRNEGAPGCESRGSLKRGGCSPSFFPPPPDFLICPHLPVGGDVYGQICGLGTMEVEEIYKHQEVKMQAPAFRDKKQGVSAKNQGAHDPDYENITLAFKNQDHAKGGHSRPTSQVPAQCRPPSDSTQVPCWLYRAILSLYILLALAFVLCIILSAFIMVKNAEMSKELLGFKRELWNVSNSVQACEERQKRGWDSVQQSITMVRSKIDRLETTLAGIKNIDTKVQKILEVLQKMPQSSPQ

SEQ ID NO: 9402 - protein, 228 aa, Homo sapiens
MEPASCCAERPKPGPTGVKTKPSCGGWRAVGLLLLLLLLVLAAVGIVAGGLLGSAQGPPKPRLQTLRMTLPSPHMPRPNQTILVDVARNAATITVTPPQSNHSWAVLFDGQSGCICYRPEEHQVCFLRLMEDSDRETLRLLVDTSKVQEAWVPSQDTHHTQELLAVQGSLEVDPAQAGALVQRLCMRTPIYWARRAEGPRRQRLIYLCIDICFPSNICVSVCFYYLPD

SEQ ID NO: 9403 - protein, 353 aa, Homo sapiens
MHNVFKKHVVMYTFCNYLFCCFVATICKTFQMVAPKKKKKKKKKKKKKKKNSRGGPVPGNLLPALSGGPRHPTQPGLPGASARGHSPRLHPGPVARGGGGGRQRAHVAARGGCHPGGLWGLRRLPGAGAGWAQLGGGLGGQAGVGAGGRGGDALPQPSAATRCPHQGCMNNVTLGNAHMGYYETVAGGAGAGPSWHGRSGVHSHMTNTRITDPEILESRYPVILRRFELRRGSGGRGRFRGGDGVTRELLFREEALLSVLTERRAFRPYGLHGGEPGARGLNLLIRKNGRTVNLGGKTSVTVYPGDVFCLHTPGGGGYGDPEDPAPPPGSPPQALAFPEHGSVYEYRRAQKAV

SEQ ID NO: 9404 - protein, 894 aa, Homo sapiens
VPRGHTACADAYLTPAIQRYVQGFCRGFQGQLKDVQVLFMRSDGGLAPMDTFSGSSAVLSGPAGGVVGYSATTYQQEGGQPVIGFDMGGTSTDVSRYAGEFEHVFEASTAGVTLQAPQLDINTVAAGGGSRLFFRSGLFVVGPESAGAHPGPACYRKGGPVTVTDANLVLGRLLPASFPCIFGPGENQPLSPEASRKALEAVATEVNSFLTNGPCPASPLSLEEVAMGFVRVANEAMCRPIRALTQVRPPLLSRLSCPQPLWSGTMREFGFVIPERPVVVDDVRVRGTGRSGLRLEDAPKAQTGPPRVDKMTQCYFEGGYQETPVYLLAELGYGHKLHGPCLIIDSNSTILVEPGCQAEVTKTGDICISVGAEVPGTVGPQLDPIQLSIFSHRFMSIAEQMGRILQRTAISTNIKERLDFSCALFGPDGGLVSNAPHIPVHLGAMQETVQFQIQHLGADLHPGDVLLSNHPSAGGSHLPDLTVITPVFWPGQTRPVFYVASRGHHADIGGITPGSMPPHSTMLQQEGAVFLSFKLVQGGVFQEEAVTEALRAPGKVPNCSGTRNLHDNLSDLRAQVAANQKGIQLVGELIGQYGLDVVQAYMGHIQANAELAVRDMLRAFGTSRQARGLPLEVSSEDHMDDGSPIRLRVQISLSQGSAVFDFSGTGPEVFGNLNAPRAVTLSALIYCLRCLVGRDIPLNQGCLAPVRVVIPRGSILDPSPEAAVVGGNVLTSQRVVDVILGAFGACAASQGCMNNVTLGNAHMGYYETVAGGAGAGPSWHGRSGVHSHMTNTRITDPEILESRYPVILRRFELRRGSGGRGRFRGGDGVTRELLFREEALLSVLTERRAFRPYGLHGARFPSPRGPPRPRPHPRPWSLWTPRLPPQGASLAPAA

SEQ ID NO: 9405 - protein, 529 aa, Homo sapiens
MSEHVEPAAPGPGPNGGGGGPAPARGPRTPNLNPNPLINVRDRLFHALFFKMAVTYSRLFPPAFRRLFEFFVLLKALFVLFVLAYIHIVFSRSPINCLEHVRDKWPREGILRVEVRHNSSRAPVFLQFCDSGGRGSFPGLAVEPGSNLDMEDEEEEELTMEMFGNSSIKFELDIEPKVFKPPSSTEALNDSQEFPFPETPTKVWPQDEYIVEYSLEYGFLRLSQATRQRLSIPVMVVTLDPTRDQCFGDRFSRLLLDEFLGYDDILMSSVKGLAENEENKGFLRNVVSGEHYRFVSMWMARTSYLAAFAIMVIFTLSVSMLLRYSHHQIFVFIVDLLQMLEMNMAIAFPAAPLLTVILALVGMEAIMSEFFNDTTTAFYIILIVWLADQYDAICCHTSTSKRHWLRFFYLYHFAFYAYHYRFNGQYSSLALVTSWLFIQHSMIYFFHHYELPAILQQVRIQEMLLQAPPLGPGTPTALPDDMNNNSGAPATAPDSAGQPPALGPVFELVSKERGWGSAEGSGGVLVGLQ

SEQ ID NO: 9406 - protein, 1494 aa, Homo sapiens
AQTALAGTPAPERPCRGRLWKRPALSPNFFSGWTRPILRKGYRQRLELSDIYQIPSVDSADNLSEKLEREWDRELASKKNPKLINALRRCFFWRFMFYGIFLYLGEVTKAVQPLLLGRIIASYDPDNKEERSIAIYLGIGLCLLFIVRTLLLHPAIFGLHHIGMQMRIAMFSLIYKKTLKLSSRVLDKISIGQLVSLLSNNLNKFDEGLALAHFVWIAPLQVALLMGLIWELLQASAFCGLGFLIVLALFQAGLGRMMMKYRDQRAGKISERLVITSEMIENIQSVKAYCWEEAMEKMIENLRQTELKLTRKAAYVRYFNSSAFFFSGFFVVFLSVLPYALIKGIILRKIFTTISFCIVLRMAVTRQFPWAVQTWYDSLGAINKIQDFLQKQEYKTLEYNLTTTEVVMENVTAFWEEGFGELFEKAKQNNNNRKTSNGDDSLFFSNFSLLGTPVLKDINFKIERGQLLAVAGSTGAGKTSLLMVIMGELEPSEGKIKHSGRISFCSQFSWIMPGTIKENIIFGVSYDEYRYRSVIKACQLEEDISKFAEKDNIVLGEGGITLSGGQRARISLARAVYKDADLYLLDSPFGYLDVLTEKEIFESCVCKLMANKTRILVTSKMEHLKKADKILILHEGSSYFYGTFSELQNLQPDFSSKLMGCDSFDQFSAERRNSILTETLHRFSLEGDAPVSWTETKKQSFKQTGEFGEKRKNSILNPINSIRKFSIVQKTPLQMNGIEEDSDEPLERRLSLVPDSEQGEAILPRISVISTGPTLQARRRQSVLNLMTHSVNQGQNIHRKTTASTRKVSLAPQANLTELDIYSRRLSQETGLEISEEINEEDLKECFFDDMESIPAVTTWNTYLRYITVHKSLIFVLIWCLVIFLAEVAASLVVLWLLGNTPLQDKGNSTHSRNNSYAVIITSTSSYYVFYIYVGVADTLLAMGFFRGLPLVHTLITVSKILHHKMLHSVLQAPMSTLNTLKAGGILNRFSKDIAILDDLLPLTIFDFIQLLLIVIGAIAVVAVLQPYIFVATVPVIVAFIMLRAYFLQTSQQLKQLESEGRSPIFTHLVTSLKGLWTLRAFGRQPYFETLFHKALNLHTANWFLYLSTLRWFQMRIEMIFVIFFIAVTFISILTTGEGEGRVGIILTLAMNIMSTLQWAVNSSIDVDSLMRSVSRVFKFIDMPTEGKPTKSTKPYKNGQLSKVMIIENSHVKKDDIWPSGGQMTVKDLTAKYTEGGNAILENISFSISPGQRVGLLGRTGSGKSTLLSAFLRLLNTEGEIQIDGVSWDSITLQQWRKAFGVIPQKVFIFSGTFRKNLDPYEQWSDQEIWKVADEVGLRSVIEQFPGKLDFVLVDGGCVLSHGHKQLMCLARSVLSKAKILLLDEPSAHLDPVTYQIIRRTLKQAFADCTVILCEHRIEAMLECQQFLVIEENKVRQYDSIQKLLNERSLFRQAISPSDRVKLFPHRNSSKCKSKPQIAALKEETEEEVQDTRL

SEQ ID NO: 9407 - protein, 2279 aa, Homo sapiens
MGFVRQIQLLLWKNWTLRKRQKIRFVVELVWPLSLFLVLIWLRNANPLYSHHECHFPNKAMPSAGMLPWLQGIFCNVNNPCFQSPTPGESPGIVSNYNNSILARVYRDFQELLMNAPESQHLGRIWTELHILSQFMDTLRTHPERIAGRGIRIRDILKDEETLTLFLIKNIGLSDSVVYLLINSQVRPEQFAHGVPDLALKDIACSEALLERFIIFSQRRGAKTVRYALCSLSQGTLQWIEDTLYANVDFFKLFRVLPTLLDSRSQGINLRSWGGILSDMSPRIQEFIHRPSMQDLLWVTRPLMQNGGPETFTKLMGILSDLLCGYPEGGGSRVLSFNWYEDNNYKAFLGIDSTRKDPIYSYDRRTTSFCNALIQSLESNPLTKIAWRAAKPLLMGKILYTPDSPAARRILKNANSTFEELEHVRKLVKAWEEVGPQIWYFFDNSTQMNMIRDTLGNPTVKDFLNRQLGEEGITAEAILNFLYKGPRESQADDMANFDWRDIFNITDRTLRLVNQYLECLVLDKFESYNDETQLTQRALSLLEENMFWAGVVFPDMYPWTSSLPPHVKYKIRMDIDVVEKTNKIKDRYWDSGPRADPVEDFRYIWGGFAYLQDMVEQGITRSQVQAEAPVGIYLQQMPYPCFVDDSFMIILNRCFPIFMVLAWIYSVSMTVKSIVLEKELRLKETLKNQGVSNAVIWCTWFLDSFSIMSMSIFLLTIFIMHGRILHYSDPFILFLFLLAFSTATIMLCFLLSTFFSKASLAAACSGVIYFTLYLPHILCFAWQDRMTAELKKAVSLLSPVAFGFGTEYLVRFEEQGLGLQWSNIGNSPTEGDEFSFLLSMQMMLLDAAVYGLLAWYLDQVFPGDYGTPLPWYFLLQESYWLGGEGCSTREERALEKTEPLTEETEDPEHPEGIHDSFFEREHPGWVPGVCVKNLVKIFEPCGRPAVDRLNITFYENQITAFLGHNGAGKTTTLSILTGLLPPTSGTVLVGGRDIETSLDAVRQSLGMCPQHNILFHHLTVAEHMLFYAQLKGKSQEEAQLEMEAMLEDTGLHHKRNEEAQDLSGGMQRKLSVAIAFVGDAKVVILDEPTSGVDPYSRRSIWDLLLKYRSGRTIIMSTHHMDEADLLGDRIAIIAQGRLYCSGTPLFLKNCFGTGLYLTLVRKMKNIQSQRKGSEGTCSCSSKGFSTTCPAHVDDLTPEQVLDGDVNELMDVVLHHVPEAKLVECIGQELIFLLPNKNFKHRAYASLFRELEETLADLGLSSFGISDTPLEEIFLKVTEDSDSGPLFAGGAQQKRENVNPRHPCLGPREKAGQTPQDSNVCSPGAPAAHPEGQPPPEPECPGPQLNTGTQLVLQHVQALLVKRFQHTIRSHKDFLAQIVLPATFVFLALMLSIVIPPFGEYPALTLHPWIYGQQYTFFSMDEPGSEQFTVLADVLLNKPGFGNRCLKEGWLPEYPCGNSTPWKTPSVSPNITQLFQKQKWTQVNPSPSCRCSTREKLTMLPECPEGAGGLPPPQRTQRSTEILQDLTDRNISDFLVKTYPALIRSSLKSKFWVNEQRYGGISIGGKLPVVPITGEALVGFLSDLGRIMNVSGGPITREASKEIPDFLKHLETEDNIKVWFNNKGWHALVSFLNVAHNAILRASLPKDRSPEEYGITVISQPLNLTKEQLSEITVLTTSVDAVVAICVIFSMSFVPASFVLYLIQERVNKSKHLQFISGVSPTTYWVTNFLWDIMNYSVSAGLVVGIFIGFQKKAYTSPENLPALVALLLLYGWAVIPMMYPASFLFDVPSTAYVALSCANLFIGINSSAITFILELFENNRTLLRFNAVLRKLLIVFPHFCLGRGLIDLALSQAVTDVYARFGEEHSANPFHWDLIGKNLFAMVVEGVVYFLLTLLVQRHFFLSQWIAEPTKEPIVDEDDDVAEERQRIITGGNKTDILRLHELTKIYPGTSSPAVDRLCVGVRPGECFGLLGVNGAGKTTTFKMLTGDTTVTSGDATVAGKSILTNISEVHQNMGYCPQFDAIDELLTGREHLYLYARLRGVPAEEIEKVANWSIKSLGLTVYADCLAGTYSGGNKRKLSTAIALIGCPPLVLLDEPTTGMDPQARRMLWNVIVSIIREGRAVVLTSHRQEIPRAGEECEALCTRLAIMVKGAFRCMGTIQHLKSKFGDGYIVTMKIKSPKDDLLPDLNPVEQFFQGNFPGSVQRERHYNMLQFQVSSSSLARIFQLLLSHKDSLLIEEYSVTQTTLDQASFVNFAKQQTESHDLPLHPRAAGASRQAQ

SEQ ID NO: 9408 - protein, 346 aa, Homo sapiens
MALLKVKFDQKKRVKLAQGLWLMNWFSVLAGIIIFSLGLFLKIELRKRSDVMNNSESHFVPNSLIGMGVLSCVFNSLAGKICYDALDPAKYARWKPWLKPYLAICVLFNIILFLVALCCFLLRGSLENTLGQGLKNGMKYYRDTDTPGRCFMKKTIDMLQIEFKCCGNNGFRDWFEIQWISNRYLDFSSKEVKDRIKSNVDGRYLVDGVPFSCCNPSSPRPCIQYQITNNSAHYSYDHQTEELNLWVRGCRAALLSYYSSLMNSMGVVTLLIWLFEVTITIGLRYLQTSLDGVSNPEESESESEGWLLEKSVPETWKAFLESVKKLGKGNQVEAEGAGAGQAPEAG

SEQ ID NO: 9409 - protein, 211 aa, Homo sapiens
MKNKRNVTEFVLTGLTQNPKMEKVMFAVFLVLYMITLSGNLLLVVTITTSQALSSPMYFFLSHLSLIDTVYSSSSAPKLIVDSLHEKKIISFNGCMAQAYEEHIFGATEIILLTVMACDNYVAICKPLHYTTIMSHSLCILLVVVAWIGGFLHANIQILFTVWLPFCGPNVIDHFMCDLCPLLKLVCLDTHTLGLFVAANSGFICLLNFLL

SEQ ID NO: 9410 - protein, 99 aa, Homo sapiens
VFQDLGMEVLSGVAKGYNICLFAYGQTGSGKTYTMLGTPVSITMIYIPNATASLNLALSLLLFLEIYNERVRDLLKQSGQKKSYTLRVREHPEMGPYVQ

SEQ ID NO: 9411 - protein, 474 aa, Homo sapiens
MWTVQNRESLGLLSFPVMITMVCCAHSTNEPSNMSYVKETVDRLLKGYDIRLRPDFGGPPVDVGMRIDVASIDMVSEVNMDYTLTMYFQQSWKDKRLSYSGIPLNLTLDNRVADQLWVPDTYFLNDKKSFVHGVTVKNRMIRLHPDGTVLYGLRITTTAACMMDLRRYPLDEQNCTLEIESYGYTTDDIEFYWNGGEGAVTGVNKIELPQFSIVDYKMVSKKVEFTTGAYPRLSLSFRLKRNIGYFILQTYMPSTLITILSWVSFWINYDASAARVALGITTVLTMTTISTHLRETLPKIPYVKAIDIYLMGCFVFVFLALLEYAFVNYIFFGKGPQKKGASKQDQSANEKNKLEMNKVQVDAHGNILLSTLEIRNETSGSEVLTSVSDPKATMYSYDSASIQYRKPLSSREAYGRALDRHGVPSKGRIRRRASQLKVKIPDLTDVNSIDKWSRMFFPITFSLFNVVYWLYYVH

SEQ ID NO: 9412 - protein, 1149 aa, Homo sapiens
MPTMRRTVSEIRSRAEGYEKTDDVSEKTSLADQEEVRTIFINQPQLTKFCNNHVSTAKYNIITFLPRFLYSQFRRAANSFFLFIALLQQIPDVSPTGRYTTLVPLLFILAVAAIKEIIEDIKRHKADNAVNKKQTQVLRNGAWEIVHWEKVAVGEIVKVTNGEHLPADLISLSSSEPQAMCYIETSNLDGETNLKIRQGLPATSDIKDVDSLMRISGRIECESPNRHLYDFVGNIRLDGHGTVPLGADQILLRGAQLRNTQWVHGIVVYTGHDTKLMQNSTSPPLKLSNVERITNVQILILFCILIAMSLVCSVGSAIWNRRHSGKDWYLNLNYGGASNFGLNFLTFIILFNNLIPISLLVTLEVVKFTQAYFINWDLDMHYEPTDTAAMARTSNLNEELGQVKYIFSDKTGTLTCNVMQFKKCTIAGVAYGQNSQFGDEKTFSDSSLLENLQNNHPTAPIICEFLTMMAVCHTAVPEREGDKIIYQAASPDEGALVRAAKQLNFVFTGRTPDSVIIDSLGQEERYELLNVLEFTSARKRMSVIVRTPSGKLRLYCKGADTVIYDRLAETSKYKEITLKHLEQFATEGLRTLCFAVAEISESDFQEWRAVYQRASTSVQNRLLKLEESYELIEKNLQLLGATAIEDKLQDQVPETIETLMKADIKIWILTGDKQETAINIGHSCKLLKKNMGMIVINEGSLDGTRETLSRHCTTLGDALRKENDFALIIDGKTLKYALTFGVRQYFLDLALSCKAVICCRVSPLQKSEVVEMVKKQVKVVTLAIGDGANDVSMIQTAHVGVGISGNEGLQAANSSDYSIAQFKYLKNLLMIHGAWNYNRVSKCILYCFYKNIVLYIIEIWFAFVNGFSGQILFERWCIGLYNVMFTAMPPLTLGIFERSCRKENMLKYPELYKTSQNALDFNTKVFWVHCLNGLFHSVILFWFPLKALQYGTAFGNGKTSDYLLLGNFVYTFVVITVCLKAGLETSYWTWFSHIAIWGSIALWVVFFGIYSSLWPAIPMAPDMSGEAAMLFSSGVFWMGLLFIPVASLLLDVVYKVIKRTAFKTLVDEVQELEAKSQDPGAVVLGKSLTERAQLLKNVFKKNHVNLYRSESLQQNLLHGYAFSQDENGIVSQSEVIRAYDTTKQRPDEW

SEQ ID NO: 9413 - protein, 1164 aa, Homo sapiens
MPTMRRTVSEIRSRAEGYEKTDDVSEKTSLADQEEVRTIFINQPQLTKFCNNHVSTAKYNIITFLPRFLYSQFRRAANSFFLFIALLQQIPDVSPTGRYTTLVPLLFILAVAAIKEIIEDIKRHKADNAVNKKQTQVLRNGAWEIVHWEKVAVGEIVKVTNGEHLPADLISLSSSEPQAMCYIETSNLDGETNLKIRQGLPATSDIKDVDSLMRISGRIECESPNRHLYDFVGNIRLDGHGTVPLGADQILLRGAQLRNTQWVHGIVVYTGHDTKLMQNSTSPPLKLSNVERITNVQILILFCILIAMSLVCSVGSAIWNRRHSGKDWYLNLNYGGASNFGLNFLTFIILFNNLIPISLLVTLEVVKFTQAYFINWDLDMHYEPTDTAAMARTSNLNEELGQVKYIFSDKTGTLTCNVMQFKKCTIAGVAYGHVPEPEDYGCSPDEWQNSQFGDEKTFSDSSLLENLQNNHPTAPIICEFLTMMAVCHTAVPEREGDKIIYQAASPDEGALVRAAKQLNFVFTGRTPDSVIIDSLGQEERYELLNVLEFTSARKRMSVIVRTPSGKLRLYCKGADTVIYDRLAETSKYKEITLKHLEQFATEGLRTLCFAVAEISESDFQEWRAVYQRASTSVQNRLLKLEESYELIEKNLQLLGATAIEDKLQDQVPETIETLMKADIKIWILTGDKQETAINIGHSCKLLKKNMGMIVINEGSLDGTRETLSRHCTTLGDALRKENDFALIIDGKTLKYALTFGVRQYFLDLALSCKAVICCRVSPLQKSEVVEMVKKQVKVVTLAIGDGANDVSMIQTAHVGVGISGNEGLQAANSSDYSIAQFKYLKNLLMIHGAWNYNRVSKCILYCFYKNIVLYIIEIWFAFVNGFSGQILFERWCIGLYNVMFTAMPPLTLGIFERSCRKENMLKYPELYKTSQNALDFNTKVFWVHCLNGLFHSVILFWFPLKALQYGTAFGNGKTSDYLLLGNFVYTFVVITVCLKAGLETSYWTWFSHIAIWGSIALWVVFFGIYSSLWPAIPMAPDMSGEAAMLFSSGVFWMGLLFIPVASLLLDVVYKVIKRTAFKTLVDEVQELEAKSQDPGAVVLGKSLTERAQLLKNVFKKNHVNLYRSESLQQNLLHGYAFSQDENGIVSQSEVIRAYDTTKQRPDEW

SEQ ID NO: 9414 - protein, 270 aa, Homo sapiens
SVRARPPPPGSPEQPGARPRWAQHSVGGGGGAMLCFLRGMAFVPFLLVTWSSAAFIISYVVAVLSGHVNPFLPFASDTGTTPPESGIFGFMINFSAFLGAATMYTRYKIVQKQNQTCYFSTPVFNLVSLVLGLVGCFGMGIVANFQELAVPVVHDGGALLAFVCGVVYTLLQSIISYKSCPQWNSLSTCHIRMVISAVSCAAVIPMIVCASLISITKLEWNPREKDYVYHVVSAICEWTVAFGFIFYFLTFIQDFQSVTLRISTEINGDI

SEQ ID NO: 9415 - protein, 307 aa, Homo sapiens
MLNFTDVTEFILLGLTSRREWQVLFFIIFLVVYIITMVGNIGMMVLIKVSPQLNNPMYFFLSHLSFVDVWFSSNVTPKMLENLFSDKKTITYAGCLVQCFFFIALVHVEIFILAAMAFDRYMAIGNPLLYGSKMSRVVCIRLITFPYIYGFLTSLAATLWTYGLYFCGKIEINHFYCADPPLIKMACAGTFVKEYTMIILAGINFTYSLTVIIISYLFILIAILRMRSAEGRQKAFSTCGSHLTAVIIFYGTLIFMYLRRPTEESVEQGKMVAVFYTTVIPMLNPMIYSLRNKDVKKAMMKVISRSC

SEQ ID NO: 9416 - protein, 2237 aa, Homo sapiens [sequence omitted]

SEQ ID NO: 9417 - protein, 1083 aa, Homo sapiens
MPAMRGLLAPQNTFLDTIATRFDGTHSNFVLGNAQVAGLFPVVYCSDGFCDLTGFSRAEVMQRGCACSFLYGPDTSELVRQQIRKALDEHKEFKAELILYRKSGLPFWCLLDVIPIKNEKGEVALFLVSHKDISETKNRGGPDRWKETGGGRRRYGRARSKGFNANRRRSRAVLYHLSGHLQKQPKGKHKLNKGVFGEKPNLPEYKVAAIRKSPFILLHCGALRATWDGFILLATLYVAVTVPYSVCVSTAREPSAARGPPSVCDLAVEVLFILDIVLNFRTTFVSKSGQVVFAPKSICLHYVTTWFLLDVIAALPFDLLHAFKVNVYFGAHLLKTVRLLRLLRLLPRLDRYSQYSAVVLTLLMAVFALLAHWVACVWFYIGQREIESSESELPEIGWLQELARRLETPYYLVGRRPAGGNSSGQSDNCSSSSEANGTGLELLGGPSLRSAYITSLYFALSSLTSVGFGNVSANTDTEKIFSICTMLIGALMHAVVFGNVTAIIQRMYARRFLYHSRTRDLRDYIRIHRIPKPLKQRMLEYFQATWAVNNGIDTTELLQSLPDELRADIAMHLHKEVLQLPLFEAASRGCLRALSLALRPAFCTPGEYLIHQGDALQALYFVCSGSMEVLKGGTVLAILGKGDLIGCELPRREQVVKANADVKGLTYCVLQCLQLAGLHDSLALYPEFAPRFSRGLRGELSYNLGAGGGSAEVDTSSLSGDNTLMSTLEEKETDGEQGPTVSPAPADEPSSPLLSPGCTSSSSAAKLLSPRRTAPRPRLGGRGRPGRAGALKAEAGPSAPPRALEGLRLPPMPWNVPPDLSPRVVDGIEDGCGSDQPKFSFRVGQSGPECSSSPSPGPESGLLTVPHGPSEARNTDTLDKLRQAVTELSEQVLQMREGLQSLRQAVQLVLAPHREGPCPRASGEGPCPASTSGLLQPLCVDTGASSYCLQPPAGSVLSGTWPHPRPGPPPLMAPWPWGPPASQSSPWPRATAFWTSTSDSEPPASGDLCSEPSTPASPPPSEEGARTGPAEPVSQAEATSTGEPPPGSGGLALPWDPHSLEMVLIGCHGSGTVQWTQEEGTGV

SEQ ID NO: 9418 - protein, 1017 aa, Homo sapiens
MPVMKGLLAPQNTFLDTIATRFDGTHSNFLLANAQGTRGFPIVYCSDGFCELTGYGRTEVMQKTCSCRFLYGPETSEPALQRLHKALEGHQEHRAEICFYRKDGSAFWCLLDMMPIKNEMGEVVLFLFSFKDITQSGSPGLGPQGGRGDSNHENSLGRRGATWKFRSARRRSRTVLHRLTGHFGRRGQGGMKANNNVFEPKPSVPEYKVASVGGSRCLLLHYSVSKAIWDGLILLATFYVAVTVPYNVCFSGDDDTPITSRHTLVSDIAVEMLFILDIILNFRTTYVSQSGQVISAPRSIGLHYLATWFFIDLIAALPFDLLYIFNITVTSLVHLLKTVRLLRLLRLLQKLERYSQCSAVVLTLLMSVFALLAHWMACIWYVIGRREMEANDPLLWDIGWLHELGKRLEVPYVNGSVGGPSRRSAYIAALYFTLSSLTSVGFGNVCANTDAEKIFSICTMLIGALMHAVVFGNVTAIIQRMYSRRSLYHSRMKDLKDFIRVHRLPRPLKQRMLEYFQTTWAVNSGIDANELLRDFPDELRADIAMHLNREILQLPLFGAASRGCLRALSLHIKTSFCAPGEYLLRRGDALQAHYYVCSGSLEVLRDNMVLAILGKGDLIGADIPEPGQEPGLGADPNFVLKTSADVKALTYCGLQQLSSRGLAEVLRLYPEYGAAFRAGLPRDLTFNLRQGSDTSGLSRFSRSPRLSQPRSESLGSSSDKTLPSITEAESGAEPGGGPRPRRPLLLPNLSPARPRGSLVSLLGEELPPFSALVSSPSLSPSLSPALAGQGHSASPHGPPRCSAAWKPPQLLIPPLGTFGPPDLSPRIVDGIEDSGSTAEAPSFRFSRRPELPRPRSQAPPTGTRPSPELASEAEEVKEKVCRLNQEISRLNQEVSQLSRELRHIMGLLQARLGPPGHPAGSAWTPDPPCPQLRPPCLSPCASRPPPSLQDTTLAEVHCPASVGTMETGTALLDLRPSILPPYPSEPDPLGPSPVPEASPPTPSLLRHSFQSRSDTFH

SEQ ID NO: 9419 - protein, 2493 aa, Homo sapiens
MARFGDEMPARYGGGGSGAAAGVVVGSGGGRGAGGSRQGGQPGAQRMYKQSMAQRARTMALYNPIPVRQNCLTVNRSLFLFSEDNVVRKYAKKITEWPPFEYMILATIIANCIVLALEQHLPDDDKTPMSERLDDTEPYFIGIFCFEAGIKIIALGFAFHKGSYLRNGWNVMDFVVVLTGILATVGTEFDLRTLRAVRVLRPLKLVSGIPSLQVVLKSIMKAMIPLLQIGLLLFFAILIFAIIGLEFYMGKFHTTCFEEGTDDIQGESPAPCGTEEPARTCPNGTKCQPYWEGPNNGITQFDNILFAVLTVFQCITMEGWTDLLYNSNDASGNTWNWLYFIPLIIIGSFFMLNLVLGVLSGEFAKERERVENRRAFLKLRRQQQIERELNGYMEWISKAEEVILAEDETDGEQRHPFDGALRRTTIKKSKTDLLNPEEAEDQLADIASVGSPFARASIKSAKLENSTFFHKKERRMRFYIRRMVKTQAFYWTVLSLVALNTLCVAIVHYNQPEWLSDFLYYAEFIFLGLFMSEMFIKMYGLGTRPYFHSSFNCFDCGVIIGSIFEVIWAVIKPGTSFGISVLRALRLLRIFKVTKYWASLRNLVVSLLNSMKSIISLLFLLFLFIVVFALLGMQLFGGQFNFDEGTPPTNFDTFPAAIMTVFQILTGEDWNEVMYDGIKSQGGVQGGMVFSIYFIVLTLFGNYTLLNVFLAIAVDNLANAQELTKDEQEEEEAANQKLALQKAKEVAEVSPLSAANMSIAVKEQQKNQKPAKSVWEQRTSEMRKQNLLASREALYNEMDPDERWKAAYTRHLRPDMKTHLDRPLVVDPQENRNNNTNKSRAAEPTVDQRLGQQRAEDFLRKQARYHDRARDPSGSAGLDARRPWAGSQEAELSREGPYGRESDHHAREGSLEQPGFWEGEAERGKAGDPHRRHVHRQGGSRESRSGSPRTGADGEHRRHRAHRRPGEEGPEDKAERRARHREGSRPARGGEGEGEGPDGGERRRRHRHGAPATYEGDARREDKERRHRRRKENQGSGVPVSGPNLSTTRPIQQDLGRQDPPLAEDIDNMKNNKLATAESAAPHGSLGHAGLPQSPAKMGNSTDPGPMLAIPAMATNPQNAASRRTPNNPGNPSNPGPPKTPENSLIVTNPSGTQTNSAKTARKPDHTTVDIPPACPPPLNHTVVQVNKNANPDPLPKKEEEKKEEEEDDRGEDGPKPMPPYSSMFILSTTNPLRRLCHYILNLRYFEMCILMVIAMSSIALAAEDPVQPNAPRNNVLRYFDYVFTGVFTFEMVIKMIDLGLVLHQGAYFRDLWNILDFIVVSGALVAFAFTGNSKGKDINTIKSLRVLRVLRPLKTIKRLPKLKAVFDCVVNSLKNVFNILIVYMLFMFIFAVVAVQLFKGKFFHCTDESKEFEKDCRGKYLLYEKNEVKARDREWKKYEFHYDNVLWALLTLFTVSTGEGWPQVLKHSVDATFENQGPSPGYRMEMSIFYVVYFVVFPFFFVNIFVALIIITFQEQGDKMMEEYSLEKNERACIDFAISAKPLTRHMPQNKQSFQYRMWQFVVSPPFEYTIMAMIALNTIVLMMKFYGASVAYENALRVFNIVFTSLFSLECVLKVMAFGILNYFRDAWNIFDFVTVLGSITDILVTEFGNNFINLSFLRLFRAARLIKLLRQGYTIRILLWTFVQSFKALPYVCLLIAMLFFIYAIIGMQVFGNIGIDVEDEDSDEDEFQITEHNNFRTFFQALMLLFRSATGEAWHNIMLSCLSGKPCDKNSGILTRECGNEFAYFYFVSFIFLCSFLMLNLFVAVIMDNFEYLTRDSSILGPHHLDEYVRVWAEYDPAAWGRMPYLDMYQMLRHMSPPLGLGKKCPARVAYKRLLRMDLPVADDNTVHFNSTLMALIRTALDIKIAKGGADKQQMDAELRKEMMAIWPNLSQKTLDLLVTPHKSTDLTVGKIYAAMMIMEYYRQSKAKKLQAMREEQDRTPLMFQRMEPPSPTQEGGPGQNALPSTQLDPGGALMAHESGLKESPSWVTQRAQEMFQKTGTWSPEQGPPTDMPNSQPNSQSVEMREMGRDGYSDSEHYLPMEGQGRAASMPRLPAENQTISDTSPMKRSASVLGPKARRLDDYSLERVPPEENQRHHQRRRDRSHRASERSLGRYTDVDTGLGTDLSMTTQSGDLPSKERDQERGRPKDRKHRQHHHHHHHHHHPPPPDKDRYAQERPDHGRARARDQRWSRSPSEGREHMAHRQGSSSVSGSPAPSTSGTSTPRRGRRQLPQTPSTPRPHVSYSPVIRKAGGSGPPQQQQQQQQQQQAVARPGRAATSGPRRYPGPTAEPLAGDRPPTGGHSSGRSPRMERRVPGPARSESPRACRHGGARWPASGPHVSEGPPGPRHHGYYRGSDYDEADGPGSGGGEEAMAGAYDAPPPVRHASSGATGRSPRTPRASGPACASPSRHGRRLPNGYYPAHGLARPRGPGSRKGLHEPYSESDDDWC

SEQ ID NO: 9420 - protein, 314 aa, Homo sapiens
MGDVNQSVASDFILVGLFSHSGSRQLLFSLVAVMFVIGLLGNTVLLFLIRVDSRLHTPMYFLLSQLSLFDIGCPMVTIPKMASDFLRGEGATSYGGGAAQIFFLTLMGVAEGVLLVLMSYDRYVAVCQPLQYPVLMRRQVCLLMMGSSWVVGVLNASIQTSITLHFPYCASRIVDHFFCEVPALLKLSCADTCAYEMALSTSGVLILMLPLSLIATSYGHVLQAVLSMRSEEARHKAVTTCSSHITVVGLFYGAAVFMYMVPCAYHSPQQDNVVSLFYSLVTPTLNPLIYSLRNPEVWMALVKVLSRAGLRQMC

SEQ ID NO: 9421 - protein, 337 aa, Homo sapiens
MLGRCFPPDTKEKQQLRMTKLCDPAESELSPFLITLILAVLLAEYLIGIIANGFIMAIHAAEWVQNKAVSTSGRILVFLSVSRIALQSLMMLEITISSTSLSFYSEDAVYYAFKISFIFLNFCSLWFAAWLSFFYFVKIANFSYPLFLKLRWRITGLIPWLLWLSVFISFSHSMFCINICTVYCNNSFPIHSSNSTKKTYLSEINVVGLAFFFNLGIVTPLIMFILTATLLILSLKRHTLHMGSNATGSNDPSMEAHMGAIKAISYFLILYIFNAVALFIYLSNMFDINSLWNNLCQIIMAAYPASHSILLIQDNPGLRRAWSGFSFDFIFTQKSGL

SEQ ID NO: 9422 - protein, 695 aa, Homo sapiens
MSGAALGLEIVFVFFLALFLLHRYGDFKKQHRLVIIGTLLAWYLCFLIVFILPLDVSTTIYNRCKHAAANSSPPENSNITGLYATANPVPSQHPCFKPWSYIPDGIMPIFWRVVYWTSQFLTWILLPFMQSYARSGGFSITGKIKTALIENAIYYGTYLLIFGAFLIYVAVNPHLHLEWNQLQTIGIAAANTWGLFLLVLLLGYGLVEIPRSYWNGAKRGYLLMKTYFKAAKLMTEKADAEENLEDAMEEVRKVNESIKYNHPLRKCVDTILKKCPTEYQEKMGRNMDDYEDFDEKHSIYPSEKSLVKLHKQVIYSVQRHRRTQVQWQILLEQAFYLEDVAKNETSATHQFVHTFQSPEPENRFIQYFYNPTFEWYWECLLRPWFYKILAVVLSIFSVIVVWSECTFFSTTPVLSLFAVFIQLAEKTYNYIYIEIACFLSIFFLSICVYSTVFRIRVFNYYYLASHHQTDAYSLLFSGMLFCRLTPPLCLNFLGLTHMDSSISHKNTQPTAYTSIMGSMKVLSFIADGFYIYYPMLVVILCIATYFSLGTRCLNLLGFQQFMGDDDMTSDLVNEGKELIRKEKRKRQRQEEGENRRREWKERYGHNREDSTRNRNIHTDPKESNFSDVNTNRSAFKYTRANNRTERDRIELLQDAEPLDFNAETFTDDPLESESGRYQPGGRYLSMSRSDIFNDV

SEQ ID NO: 9423 - protein, 622 aa, Homo sapiens
MKDDFAEEEEVQSFGYKRFGIQEGTQCTKCKNNWALKFSIILLYILCALLTITVAILGYKVVEKMDNVTGGMETSRQTYDDKLTAVESDLKKLGDQTGKKAISTNSELSTFRSDILDLRQQLREITEKTSKNKDTLEKLQASGDALVDRQSQLKETLENNSFLITTVNKTLQAYNGYVTNLQQDTSVLQGNLQNQMYSHNVVIMNLNNLNLTQVQQRNLITNLQRSVDDTSQAIQRIKNDFQNLQQVFLQAKKDTDWLKEKVQSLQTLAANNSALAKANNDTLEDMNSQLNSFTGQMENITTISQANEQNLKDLQDLHKDAENRTAIKFNQLEERFQLFETDIVNIISNISYTAHHLRTLTSNLNEVRTTCTDTLTKHTDDLTSLNNTLANIRLDSVSLRMQQDLMRSRLDTEVANLSVIMEEMKLVDSKHGQLIKNFTILQGPPGPRGPRGDRGSQGPPGPTGNKGQKGEKGEPGPPGPAGERGPIGPAGPPGERGGKGSKGSQGPKGSRGSPGKPGPQGPSGDPGPPGPPGKEGLPGPQGPPGFQGLQGTVGEPGVPGPRGLPGLPGVPGMPGPKGPPGPPGPSGAVVPLALQNEPTPAPEDNSKSKPSLQPGGQGSACA

SEQ ID NO: 9424 - protein, 800 aa, Homo sapiens
AGSAGSAGRRRRGRTGAQTAGARRGYHGRAVSSRSGRLPRLRGARAELPGRRCVPTVTMKDDFAEEEEVQSFGYKRFGIQEGTQCTKCKNNWALKFSIILLYILCALLTITVAILGYKVVEKMDNVTGGMETSRQTYDDKLTAVESDLKKLGDQTGKKAISTNSELSTFRSDILDLRQQLREITEKTSKNKDTLEKLQASGDALVDRQSQLKETLENNSFLITTVNKTLQAYNGYVTNLQQDTSVLQGNLQNQMYSHNVVIMNLNNLNLTQVQQRNLITNLQRSVDDTSQAIQRIKNDFQNLQQVFLQAKKDTDWLKEKVQSLQTLAANNSALAKANNDTLEDMNSQLNSFTGQMENITTISQANEQNLKDLQDLHKDAENRTAIKFNQLEERFQLFETDIVNIISNISYTAHHLRTLTSNLNEVRTTCTDTLTKHTDDLTSLNNTLANIRLDSVSLRMQQDLMRSRLDTEVANLSVIMEEMKLVDSKHGQLIKNFTILQGPPGPRGPRGDRGSQGPPGPTGNKGQKGEKGEPGPPGPAGERGPIGPAGPPGERGGKGSKGSQGPKGSRGSPGKPGPQGSSGDPGPPGPPGKEGLPGPQGPPGFQGLQGTVGEPGVPGPRGLPGLPGVPGMPGPKGPPGPPGPSGAVVPLALQNEPTPAPEDNGCPPHWKNFTDKCYYFSVEKEIFEDAKLFCEDKSSHLVFINTREEQQWIKKQMVGRESHWIGLTDSERENEWKWLDGTSPDYKNWKAGQPDNWGHGHGPGEDCAGLIYAGQWNDFQCEDVNNFICEKDRETVLSSAL

SEQ ID NO: 9425 - protein, 2849 aa, Homo sapiens
MAEEAAQNISDDQERCLQAACCLSFGGELSVSTDKSWGLHLCSCSPPGGGLWVEVYANHVLLMSDGKCGCPWCALNGKAEDRESQSPSSSASRQKNIWKTTSEAALSVVNEKTQAVVNEKTQAPLDCDNSADRIPHKPFIIIARAWSSGGPRFHHRRLCATGTADSTFSALLQLQGTTSAAAPCSLKMEASCCVLRLLCCAEDVATGLLPGTVTMETPTKVARPTQTSSQRVPLWPISHFPTSPRSSHGLPPGIPRTPSFTASQSGSEILYPPTQHPPVAILARNSDNFMNPVLNCSLEVEARAPPNLGFRVHMASGEALCLMMDFGDSSGVEMRLHNMSEAMAVTAYHQYSKGIFFHLLHFQLDMSTYKEAETQNTTLNVYLCQSENSCLEDSDPSNLGYELISAFVTKGVYMLKAVIYNEFHGTEVELGPYYVEIGHEAVSAFMNSSSVHEDEVLVFADSQVNQKSTVVIHHFPSIPSYNVSFISQTQVGDSQAWHSMTVWYKMQSVSVYTNGTVFATDTDITFTAVTKETIPLEFEWYFGEDPPVRTTSRSIKKRLSIPQWYRVMVKASNRMSSVVSEPHVIRVQKKIVANRLTSPSSALVNASVAFECWINFGTDVAYLWDFGDGTVSLGSSSSSHVYSREGEFTVEVLAFNNVSASTLRQQLFIVCEPCQPPLVKNMGPGKVQIWRSQPVRLGVTFEAAVFCDISQGLSYTWNLMDSEGLPVSLPAAVDTHRQTLILPSHTLEYGNYTALAKVQIEGSVVYSNYCVGLEVRAQAPVSVISEGTHLFFSRTTSSPIVLRGTQSFDPDDPGATLRYHWECATAGSPAHPCFDSSTAHQLDAAAPTVSFEAQWLSDSYDQFLVMLRVSSGGRNSSETRVFLSPYPDSAFRFVHISWVSFKDTFVNWNDELSLQAMCEDCSEIPNLSYSWDLFLVNATEKNRIEVPFCRVVGLLGSLGLGAISESSQLNLLPTEPGTADPDATTTPFSREPSPVTLGQPATSAPRGTPTEPMTGVYWIPPAGDSAVLGEAPEEGSLDLEPGPQSKGSLMTGRSERSQPTHSPDPHLSDFEAYYSDIQEAIPSGGRQPAKDTSFPGSGPSLSAEESPGDGDNLVDPSLSAGRAEPVLMIDWPKALLGRAVFQGYSSSGITEQTVTIKPYSLSSGETYVLQVSVASKHGLLGKAQLYLTVNPAPRDMACQVQPHHGLEAHTVFSVFCMSGKPDFHYEFSYQIGNTSKHTLYHGRDTQYYFVLPAGEHLDNYKVMVSTEITDGKGSKVQPCTVVVTVLPRYHGNDCLGEDLYNSSLKNLSTLQLMGSYTEIRNYITVITRILSRLSKEDKTASCNQWSRIQDALISSVCRLAFVDQEEMIGSVLMLRDLVSFSNKLGFMSAVLILKYTRALLAQGQFSGPFVIDKGVRLELIGLISRVWEVSEQENSKEEVYRHEEGITVISDLLLGCLSLNHVSTGQMEFRTLLHYNLQSSVQSLGSVQVHLPGDLAGHSPAGAETQSPCYISQLILFKKNPYPGSQAPGQIGGVVGLNLYTCSSRRPINRQWLRKPVMVEFGEEDGLDNRRNKTTFVLLRDKVNLHQFTELSENPQESLQIEIEFSKPVTRAFPVMLLVRFSEKPTPSDFLVKQIYFWDESIVQIYIPAASQKDASVGYLSLLDADYDRKPPNRYLAKAVNYTVHFQWIRCLFWDKREWKSERFSPQPGTSPEKVNCSYHRLAAFALLRRKLKASFEVSDISKLQSHPENLLPSIFIMGSVILYGFLVAKSRQVDHHEKKKAGYIFLQEASLPGHQLYAVVIDTGFRAPARLTSKVYIVLCGDNGLSETKELSCPEKPLFERNSRHTFILSAPAQLGLLRKIRLWHDSRGPSPGWFISHVMVKELHTGQGWFFPAQCWLSAGRHDGRVERELTCLQGGLGFRKLFYCKFTEYLEDFHVWLSVYSRPSSSRYLHTPRLTVSFSLLCVYACLTALVAAGGQEQPHLDVSPTLGSFRVGLLCTLLASPGAQLLSLLFRLSKEAPGSARVEPHSPLRGGAQTEAPHGPNSWGRIPDAQEPRKQPASAILSGSGRAQRKAASDNGTACPAPKLQVHGADHSRTSLMGKSHCCPPHTQAPSSGLEGLMPQWSRALQPWWSSAVWAICGTASLACSLGTGFLAYRFGQEQCVQWLHLLSLSVVCCIFITQPLMVCLMALGFAWKRRADNHFFTESLCEATRDLDSELAERSWTRLPFSSSCSIPDCAGEVEKVLAARQQARHLRWAHPPSKAQLRGTRQRMRRESRTRAALRDISMDILMLLLLLCVIYGRFSQDEYSLNQAIRKEFTRNARNCLGGLRNIADWWDWSLTTLLDGLYPGGTPSARVPGAQPGALGGKCYLIGSSVIRQLKVFPRHLCKPPRPFSALIEDSIPTCSPEVGGPENPYLIDPENQNVTLNGPGGCGTREDCVLSLGRTRTEAHTALSRLRASMWIDRSTRAVSVHFTLYNPPTQLFTSVSLRVEILPTGSLVPSSLVESFSIFRSDSALQYHLMLPQLVFLALSLIHLCVQLYRMMDKGVLSYWRKPRNWLELSVVGVSLTYYAVSGHLVTLAGDVTNQFHRGLCRAFMDLTLMASWNQRARWLRGILLFLFTLKCVYLPGIQNTMASCSSMMRHSLPSIFVAGLVGALMLAALSHLHRFLLSMWVLPPGTFTDAFPGLLFHFPRRSQKDCLLGLSKSDQRAMACYFGILLIVSATLCFGMLRGFLMTLPQKRKSFQSKSFVRLKDVTAYMWEKVLTFLRLETPKLEEAEMVENHNYYLDEFANLLDELLMKINGLSDSLQLPLLEKTSNNTGEARTEESPLVDISSYQAAEPADIKDF

SEQ ID NO: 9426 - protein, 421 aa, Homo sapiens
VGNKKTHINIVVIGHVDLGKYTATGHLTYKCGGINERTIENIENEATEMRKNSFKYAWVSLNKLSSECECSIIIGIALWKFEISRYYVTIIDDPRHSYFIKNLIAGISHTGLSGLLLLALVIFKLCFPRVDTHEHASLAHTPGMKQLIVGVNKSRIHRFHPTTRRDMNKLLRKSALTLRKLTYYRHKVAFVPIFGWDGEPSACMLWFKAWKVIDKDSNAGGTMLPEGLVCKLPPTHPADKPLHLPFQDVYKMIGTIPVGQVESGVLKLAWWSPFFESVTTEVKSVGRYHEALSEALPKNNVGFSFNNVPVKHVRCGNVAGDSKYDPPMEASGFTAQMIIRKRISVSYTPVLNCHTAHIAGKFAALKEKIEHCSGKKLENDPEFLKFGDASIIDKIPSKCMCVETFSNYSLLGHFAVRHMKQ

SEQ ID NO: 9427 - protein, 380 aa, Homo sapiens
MCPMLLKNGYNGNATPVTTTAPWASLGLSAKTCNNVSFEESRIVLVVVYSAVCTLGVPANCLTAWLALLQVLQGNVLAVYLLCLALCELLYTGTLPLWVIYIRNQHRWTLGLLACKVTAYIFFCNIYVSILFLCCISCDRFVAVVYALESRGRRRRRTAILISACIFILVGIVHYPVFQTEDKETCFDMLQMDSRIAGYYYARFTVGFAIPLSIIAFTNHRIFRSIKQSMGLSAAQKAKVKHSAIAVVVIFLVCFAPYHLVLLVKAAAFSYYRGDRNAMCGLEERLYTASVVFLCLSTVNGVADPIIYVLATDHSRQEVSRIHKGWKEWSMKTDVTRLTHSRDTEELQSPVALADHYTFSRPVHPPGSPCPAKRLIEESC

SEQ ID NO: 9428 - protein, 799 aa, Homo sapiens
MPERLAEMLLDLWTPLIILWITLPPCIYMAPMNQSQVLMSGSPLELNSLGEEQRILNRSKRGWVWNQMFVLEEFSGPEPILVGRLHTDLDPGSKKIKYILSGDGAGTIFQINDVTGDIHAIKRLDREEKAEYTLTAQAVDWETSKPLEPPSEFIIKVQDINDNAPEFLNGPYHATVPEMSILGTSVTNVTATDADDPVYGNSAKLVYSILEGQPYFSIEPETAIIKTALPNMDREAKEEYLVVIQAKDMGGHSGGLSGTTTLTVTLTDVNDNPPKFAQSLYHFSVPEDVVLGTAIGRVKANDQDIGENAQSSYDIIDGDGTALFEITSDAQAQDGIIRLRKPLDFETKKSYTLKVEAANVHIDPRFSGRGPFKDTATVKIVVEDADEPPVFSSPTYLLEVHENAALNSVIGQVTARDPDITSSPIRFSIDRHTDLERQFNINADDGKITLATPLDRELSVWHNITIIATEIRNHSQISRVPVAIKVLDVNDNAPEFASEYEAFLCENGKPGQVIQTVSAMDKDDPKNGHYFLYSLLPEMVNNPNFTIKKNEDNSLSILAKHNGFNRQKQEVYLLPIIISDSGNPPLSSTSTLTIRVCGCSNDGVVQSCNVEAYVLPIGLSMGALIAILACIILLLVIVVLFVTLRRHKNEPLIIKDDEDVRENIIRYDDEGGGEEDTEAFDIATLQNPDGINGFLPRKDIKPDLQFMPRQGLAPVPNGVDVDEFINVRLHEADNDPTAPPYDSIQIYGYEGRGSVAGSLSSLESTTSDSDQNFDYLSDWGPRFKRLGELYSVGESDKET

SEQ ID NO: 9429 - protein, 347 aa, Homo sapiens
MNPLAQPVIYSTIFAGTLITALSSHWFFTWVGLEMNMLAFIPVLTKKMNPRSTEAAIKYFLTQATASMILLMAILFNNMLSGQWTMTNTTNQYSSLMIMMAMAMKLGMAPFHFWVPEVTQGTPLTSGLLLLTWQKLAPISIMYQISPSLNVSLLLTLSILSIMAGSWGGLNQTQLRKILAYSSITHMGWMMAVLPYNPNMTILNLTIYIILTTTAFLLLNLNSSTTTLLLSRTWNKLTWLTPLIPSTLLSLGGLPPLTGFLPKWAIIEEFTKNNSLIIPTIMATITLLNLYFYLRLIYSTSITLLPMSNNVKMKWQFEHTKPTPFLPTLIALTTLLLPISPFMLMIL

SEQ ID NO: 9430 - protein, 466 aa, Homo sapiens
MNNSTNSSNNSLALTSPYKTFEVVFIVLVAGSLSLVTIIGNILVMVSIKVNRHLQTVNNYFLFSLACADLIIGVFSMNLYTLYTVIGYWPLGPVVCDLWLALDYVVSNASVMNLLIISFDRYFCVTKPLTYPVKRTTKMAGMMIAAAWVLSFILWAPAILFWQFIVGVRTVEDGECYIQFFSNAAVTFGTAIAAFYLPVIIMTVLYWHISRASKSRIKKDKKEPVANQDPVSPSLVQGRIVKPNNNNMPSSDDGLEHNKIQNGKAPRDPVTENCVQGEEKESSNDSTSVSAVASNMRDDEITQDENTVSTSLGHSKDENSKQTCIRIGTKTPKSDSCTPTNTTVEVVGSSGQNGDEKQNIVARKIVKMTKQPAKKKPPPSREKKVTRTILAILLAFIITWAPYNVMVLINTFCAPCIPNTVWTIGYWLCYINSTINPACYALCNATFKKTFKHLLMCHYKNIGATR

SEQ ID NO: 9431 - protein, 775 aa, Homo sapiens
MEPPYSLTAHYDEFQEVKYVSRCGAGGARGASLPPGFPLGAARSATGARSGLPRWNRREVCLLSGLVFAAGLCAILAAMLALKYLGPVAAGGGACPEGCPERKAFARAARFLAANLDASIDPCQDFYSFACGGWLRRHAIPDDKLTYGTIAAIGEQNEERLRRLLARPGGGPGGAAQRKVRAFFRSCLDMREIERLGPRPMLEVIEDCGGWDLGGAEERPGVAARWDLNRLLYKAQGVYSAAALFSLTVSLDDRNSSRYVIRIDQDGLTLPERTLYLAQDEDSEKVLAAYRVFMERVLSLLGADAVEQKAQEILQVEQQLANITVSEYDDLRRDVSSMYNKVTLGQLQKITPHLRWKWLLDQIFQEDFSEEEEVVLLATDYMQQVSQLIRSTPHRVLHNYLVWRVVVVLSEHLSPPFREALHELAQEMEGSDKPQELARVCLGQANRHFGMALGALFVHEHFSAASKAKVQQLVEDIKYILGQRLEELDWMDAETRAAARAKLQYMMVMVGYPDFLLKPDAVDKEYEFEVHEKTYFKNILNSIRFSIQLSVKKIRQEVDKSTWLLPPQALNAYYLPNKNQMVFPAGILQPTLYDPDFPQSLNYGGIGTIIGHELTHGYDDWGGQYDRSGNLLHWWTEASYSRFLRKAECIVRLYDNFTVYNQRVNGKHTLGENIADMGGLKLAYHAYQKWVREHGPEHPLPRLKYTHDQLFFIAFAQNWCIKRRSQSIYLQVLTDKHAPEHYRVLGSVSQFEEFGRVLHCPKVSPMNPAHKCSVW

SEQ ID NO: 9432 - protein, 402 aa, Homo sapiens
MMGSWKHCLFSASLISALIFVFVYNTELWENKRFLRAALSNASLLAEACHQIFEGKVFYPTENALKTTLDEATCYEYMVRSHYVTETLSEEEAGFPLAYTVTIHKDFGTFERLFRAIYMPQNVYCVHLDQKATDAFKGAVKQLLSCFPNAFLASKKESVVYGGISRLQADLNCLEDLVASEVPWKYVINTCGQDFPLKTNREIVQYLKGFKGKNITPGVLPPDHAVGRTKYVHQELLNHKNSYVIKTTKLKTPPPHDMVIYFGTAYVALTRDFANFVLQDQLALDLLSWSKDTYSPDEHFWVTLNRIPGVPGSMPNASWTGNLRAIKWSDMEDRHGGCHGHYVHGICIYGNGDLKWLVNSPSLFANKFELNTYPLTVECLELRHRERTLNQSETAIQPSWYF

SEQ ID NO: 9433 - protein, 400 aa, Homo sapiens
MPLSMRYLFIISVSSVIIFIVFSVFNFGGDPSFQRLNISDPLRLTQVCTSFINGKTRFLWKNKLMIHEKSSCKEYLTQSHYITAPLSKEEADFPLAYIMVIHHHFDTFARLFRAIYMPQNIYCVHVDEKATTEFKDAVEQLLSCFPNAFLASKMEPVVYGGISRLQADLNCIRDLSAFEVSWKYVINTCGQDFPLKTNKEIVQYLKGFKGKNITPGVLPPAHAIGRTKYVHQEHLGKELSYVIRTTALKPPPPHNLTIYFGSAYVALSREFANFVLHDPRAVDLLQWSKDTFSPDEHFWVTLNRIPGVPGSMPNASWTGNLRAIKWSDMEDRHGGCHGHYVHGICIYGNGDLKWLVNSPSLFANKFELNTYPLTVECLELRHRERTLNQSETAIQPSWYF

SEQ ID NO: 9434 - protein, 839 aa, Homo sapiens
MDVSLCPAKCSFWRIFLLGSVWLDYVGSVLACPANCVCSKTEINCRRPDDGNLFPLLEGQDSGNSNGNASINITDISRNITSIHIENWRSLHTLNAVDMELYTGLQKLTIKNSGLRSIQPRAFAKNPHLRYINLSSNRLTTLSWQLFQTLSLRELQLEQNFFNCSCDIRWMQLWQEQGEAKLNSQNLYCINADGSQLPLFRMNISQCDLPEISVSHVNLTVREGDNAVITCNGSGSPLPDVDWIVTGLQSINTHQTNLNWTNVHAINLTLVNVTSEDNGFTLTCIAENVVGMSNASVALTVYYPPRVVSLEEPELRLEHCIEFVVRGNPPPTLHWLHNGQPLRESKIIHVEYYQEGEISEGCLLFNKPTHYNNGNYTLIAKNPLGTANQTINGHFLKEPFPESTDNFILFDEVSPTPPITVTHKPEEDTFGVSIAVGLAAFACVLLVVLFVMINKYGRRSKFGMKGPVAVISGEEDSASPLHHINHGITTPSSLDAGPDTVVIGMTRIPVIENPQYFRQGHNCHKPDTYVQHIKRRDIVLKRELGEGAFGKVFLAECYNLSPTKDKMLVAVKALKDPTLAARKDFQREAELLTNLQHEHIVKFYGVCGDGDPLIMVFEYMKHGDLNKFLRAHGPDAMILVDGQPRQAKGELGLSQMLHIASQIASGMVYLASQHFVHRDLATRNCLVGANLLVKIGDFGMSRDVYSTDYYRLFNPSGNDFCIWCEVGGHTMLPIRWMPPESIMYRKFTTESDVWSFGVILWEIFTYGKQPWFQLSNTEVIECITQGRVLERPRVCPKEVYDVMLGCWQREPQQRLNIKEIYKILHALGKATPIYLDILG

SEQ ID NO: 9435 - protein, 612 aa, Homo sapiens
MDVSLCPAKCSFWRIFLLGSVWLDYVGSVLACPANCVCSKTEINCRRPDDGNLFPLLEGQDSGNSNGNASINITDISRNITSIHIENWRSLHTLNAVDMELYTGLQKLTIKNSGLRSIQPRAFAKNPHLRYINLSSNRLTTLSWQLFQTLSLRELQLEQNFFNCSCDIRWMQLWQEQGEAKLNSQNLYCINADGSQLPLFRMNISQCDLPEISVSHVNLTVREGDNAVITCNGSGSPLPDVDWIVTGLQSINTHQTNLNWTNVHAINLTLVNVTSEDNGFTLTCIAENVVGMSNASVALTVYYPPRVVSLEEPELRLEHCIEFVVRGNPPPTLHWLHNGQPLRESKIIHVEYYQEGEISEGCLLFNKPTHYNNGNYTLIAKNPLGTANQTINGHFLKEPFPESTDNFILFDEVSPTPPITVTHKPEEDTFGVSIAVGLAAFACVLLVVLFVMINKYGRRSKFGMKGPVAVISGEEDSASPLHHINHGITTPSSLDAGPDTVVIGMTRIPVIENPQYFRQGHNCHKPDTWVFSNIDNHGILNLKDNRDHLVPSTHYIYEEPEVQSGEVSYPRSHGFREIMLNPISLPGHSKPLNHGIYVEDVNVYFSKGRHGF

SEQ ID NO: 9436 - protein, 357 aa, Homo sapiens
MGIGQLPHYALVVPADGGDWEVRPMWSRCLFLHHQPDLPPSSHDQSIPLLWSQEESPPLAENDGTDFNIDSLPLPRKAHHDWAVFHEESPKNNYKLFHKPVITLFNYTATFSRHSHLPLTTQYLESIEVLKSLRYLVPLQSKNKLRKRLAPLVYVQSDCDPPSDRDSYVRELMTYIEVDSYGECLRNKDLPQQLKNPASMDADGFYRIIAQYKFILAFENAVCDDYITEKFWRPLKLGVVPVYYGSPSITDWLPSNKSAILVSEFSHPRELASYIRRLDSDDRLYEAYVEWKLKGEISNQRLLTALRERKWGVQDVNQDNYIDAFECMVCTKVWANIRLQEKVSKSKVGIEPAGWPS

SEQ ID NO: 9437 - protein, 428 aa, Homo sapiens
MEEAPTHFNSFLKKEGLTFNRKRKWELDSYPIMLWWSPLTGETGRLGQCGADACFFTINRTYLHHHMTKAFLFYGTDFNIDSLPLPRKAHHDWAVFHEESPKNNYKLFHKPVITLFNYTATFSRHSHLPLTTQYLESIEVLKSLRYLVPLQSKNKLRKRLAPLVYVQSDCDPPSDRDSYVRELMTYIEVDSYGECLRNKDLPQQLKNPASMDADGFYRIIAQYKFILAFENAVCDDYITEKFWRPLKLGVVPVYYGSPSITDWLPSNKSAILVSEFSHPRELASYIRRLDSDDRLYEAYVEWKLKGEISNQRLLTAVRERKWGVQDVNQDNYIDAFECMVCTKVWANIRLQEKGLPPKRWEAEDTHLSCPEPTVFAFSPLRTPPLSSLREMWISSFEQSKKEAQALRWLVDRNQNFSSQEFWGLVFKD

SEQ ID NO: 9438 - protein, 419 aa, Homo sapiens
MVRIQRRKLLASCLCVTATVFLLVTLQVMVELGKFERKEFKSSSLQDGHTKMEEAPTHLNSFLKKEGLTFNRKRKWELDSYPIMLWWSPLTGETGRLGQCGADACFFTINRTYLHHHMTKAFLFYGTDFNIDSLPLPRKAHHDWAVFHEESPKNNYKLFHKPVITLFNYTATFSRHSHLPLTTQYLESIEVLKSLRYLVPLQSKNKLRKRLAPLVYVQSDCDPPSDRDSYVRELMTYIEVDSYGECLRNKDLPQQLKNPASMDADGFYRIIAQYKFILAFENAVCDDYITEKFWRPLKLGVVPVYYGSPSITDWLPSNKSAILVSEFSHPRELASYIRRLDSDDRLYEAYVEWKLKGEISNQRLLTALRERKWGVQDVNQDNYIDAFECMVCTKVWANIRLQEKVSKSKVGIEPAGWPS

SEQ ID NO: 9439 - protein, 617 aa, Homo sapiens
MRCLAARVNYKTLIIICALFTLVTVLLWNKCSSDKAIQFPRRSSSGFRVDGFEKRAAASESNNYMNHVAKQQSEEAFPQEQQKAPPVVGGFNSNVGSKVLGLKYEEIDCLINDEHTIKGRREGNEVFLPFTWVEKYFDVYGKVVQYDGYDRFEFSHSYSKVYAQRAPYHPDGVFMSFEGYNVEVRDRVKCISGVEGVPLSTQWGPQGYFYPIQIAQYGLSHYSKNLTEKPPHIEVYETAEDRDKNKPNDWTVPKGCFMANVADKSRFTNVKQFIAPETSEGVSLQLGNTKDFIISFDLKFLTNGSVSVVLETTEKNQLFTIHYVSNAQLIAFKERDIYYGIGPRTSWSTVTRDLVTDLRKGVGLSNTKAVKPTKIMPKKVVRLIAKGKGFLDNITISTTAHMAAFFAASDWLVRNQDEKGGWPIMVTRKLGEGFKSLEPGWYSAMAQGQAISTLVRAYLLTKDHIFLNSALRATAPYKFLSEQHGVKAVFMNKHDWYEEYPTTPSSFVLNGFMYSLIGLYDLKETAGEKLGKEARSLYERGMESLKAMLPLYDTGSGTIYDLRHFMLGIAPNLARWDYHTTHINQLQLLSTIDESPVFKEFVKRWKSYLKGSRAKHN

SEQ ID NO: 9440 - protein, 729 aa, Homo sapiens
MGGFLPKAEGPGSQLQKLLPSFLVREQDWDQHLDKLHMLQQKRILESPLLRASKENDLSVLRQLLLDCTCDVRQRGALGETALHIAALYDNLEAALVLMEAAPELVFEPTTCEAFAGQTALHIAVVNQNVNLVRALLTRRASVSARATGTAFRRSPRNLIYFGEHPLSFAACVNSEEIVRLLIEHGADIRAQDSLGNTVLHILILQPNKTFACQMYNLLLSYDGHGDHLQPLDLVPNHQGLTPFKLAGVEGNTVMFQHLMQKRRHIQWTYGPLTSILYDLTEIDSWGEELSFLELVVSSDKREARQILEQTPVKELVSFKWNKYGRPYFCILAALYLLYMICFTTCCVYRPLKFRGGNRTHSRDITILQQKLLQEAYETREDIIRLVGELVSIVGAVIILLLEIPDIFRVGASRYFGKTILGGPFHVIIITYASLVLVTMVMRLTNTNGEVVPMSFALVLGWCSVMYFTRGFQMLGPFTIMIQKMIFGDLMRFCWLMAVVILGFASAFYIIFQTEDPTSLGQFYDYPMALFTTFELFLTVIDAPANYDVDLPFMFSIVNFAFAIIATLLMLNLFIAMMGDTHWRVAQERDELWRAQVVATTVMLERKLPRCLWPRSGICGCEFGLGDRWFLRVENHNDQNPLRVLRYVEVFKNSDKEDDQEHPSEKQPSGAESGTLARASLALPTSSLSRTASQSSSHRGWEILRQNTLGHLNLGLNLSEGDGEEVYHF

SEQ ID NO: 9441 - protein, 729 aa, Homo sapiens [sequence omitted]

SEQ ID NO: 9442 - protein, 1503 aa, Homo sapiens [sequence omitted]

SEQ ID NO: 9443 - protein, 519 aa, Homo sapiens [sequence omitted]

SEQ ID NO: 9444 - protein, 787 aa, Homo sapiens
MEEHSYIQKELDLQNGSLEEDSVVHSVENDSQNMMESLSPKKYSSSLRFKANGDYSGSYLTLSQPVPAKRSPSPLGTSVRSSPSLAKIQGSKQFSHDGTDKNIPMKPPTPLLNTTSSLSGYPLGRADFDHYTGRDSERALRLSEKPPYSKYSSRHKSHDNVYSLGGLEGRKASGSLLAMWNGSSLSDAGPPPISRSGAASMPSSPKQARKMSIQDSLALQPKLTRHKELASENINLRTRKYSSSSLSHMGAYSRSLPRLYRATENQLTPLSLPPRNSLGNSKRTKLGEKDLPHSVIDNDNYLNFSSLSSGALPYKTSASEGNPYVSSTLSVPASPRVARKMLLASTSSCASDDFDQASYVGTNPSHSLLAGESDRVFATRRNFSCGSVEFDEADLESLRQASGTPQPALRERKSSISSISGRDDLMDYHRRQREERLREQEMERLERQRLETILSLCAEYTKPDSRLSTGTTVEDVQKINKELEKLQLSDEESVFEEALMSPDTRYRCHRKDSLPDADLASCGSLSQSSASFFTPRSTRNDELLSDLTRTPPPPSSTFPKASSESSYLSILPKTPEGISEEQRSQELAAMEETRIVILNNLEELKQKIKDINDQMDESFRELDMECALLDGEQKSETTELMKEKEILDHLNRKIAELEKNIVGEKTKEKVKLDAEREKLERLQELYSEQKTQLDNCPESMREQLQQQLKRDADLLDVESKHFEDLEFQQLEHESRLDEEKENLTQQLLREVAEYQRNIVSRKEKISALKKQANHIVQQAQREQDHFV

SEQ ID NO: 9445 - protein, 1210 aa, Homo sapiens
MEEHSYIQKELDLQNGSLEEDSVVHSVENDSQNMMESLSPKKYSSSLRFKANGDYSGSYLTLSQPVPAKRSPSPLGTSVRSSPSLAKIQGSKQFSYDGTDKNIPMKPPTPLLNTTSSLSGYPLGRADFDHYTGRDSERALRLSEKPPYSKYSSRHKSHDNVYSLGGLEGRKASGSLLAMWNGSSLSDAGPPPISRSGAASMPSSPKQARKMSIQDSLALQPKLTRHKELASENINLRTRKYSSSSLSHMGAYSRSLPRLYRATENQLTPLSLPPRNSLGNSKRTKLGEKDLPHSVIDNDNYLNFSSLSSGALPYKTSASEGNPYVSSTLSVPASPRVARKMLLASTSSCASDDFDQASYVGTNPSHSLLAGESDRVFATRRNFSCGSVEFDEADLESLRQASGTPQPALRERKSSISSISGRDDLMDYHRRQREERLREQEMERLERQRLETILSLCAEYTKPDSRLSTGTTVEDVQKINKELEKLQLSDEESVFEEALMSPDTRYRCHRKDSLPDADLASCGSLSQSSASFFTPRSTRNDELLSDLTRTPPPPSSTFPKASSESSYLSILPKTPEGISEEQRSQELAAMEETRIVILNNLEELKQKIKDINDQMDESFRELDMECALLDGEQKSETTELMKEKEILDHLNRKIAELEKNIVGEKTKDADLLDVESKHFEDLEFQQLEHESRLDEEKENLTQQLLREVAEYQRNIVSRKEKISALKKQANHIVQQAQREQDHFVKEKNNLIMMLQREKENLCNLEKKYSSLSGGKGFPVNPNTLKEGYISVNEINEPCGNSTNLSPSTQFPADADAVATEPATAVLASQPQSKEHFRSLEERKKQHKEGLYLSDTLPRKKTTSSISPHFSSATMGRSITPKAHLPLGQSNSCGSVLPPSLAAMAKDSESRRMLRGYNHQQMSEGHRQKSEFYNRTASESNVYLNSFHYPDHSYKDQAFDTLSLDSSDSMETSISACSPDNISSASTSNIARIEEMERLLKQAHAEKTRLLESREREMEAKKRALEEEKRRREILEKRLQEETSQRQKLIEKEVKIRERQRAQARPLTRYLPVRKEDFDLRSHVETAGHNIDTCYHVSITEKTCRGFLIKMGGKIKTWKKRWFVFDRNKRTFSYYADKHETKLKGVIYFQAIEEVYYDHLKNANKSPNPLLTFSVKTHDRIYYMVAPSPEAMRIWMDVIVTGAEGYTHFLL

SEQ ID NO: 9446 - protein, 907 aa, Homo sapiens
MDTSRLGVLLSLPVLLQLATGGSSPRSGVLLRGCPTHCHCEPDGRMLLRVDCSDLGLSELPSNLSVFTSYLDLSMNNISQLLPNPLPSLRFLEELRLAGNALTYIPKGAFTGLYSLKVLMLQNNQLRHVPTEALQNLRSLQSLRLDANHISYVPPSCFSGLHSLRHLWLDDNALTEIPVQAFRSLSALQAMTLALNKIHHIPDYAFGNLSSLVVLHLHNNRIHSLGKKCFDGLHSLETLDLNYNNLDEFPTAIRTLSNLKELGFHSNNIRSIPEKAFVGNPSLITIHFYDNPIQFVGRSAFQHLPELRTLTLNGASQITEFPDLTGTANLESLTLTGAQISSLPQTVCNQLPNLQVLDLSYNLLEDLPSFSVCQKLQKIDLRHNEIYEIKVDTFQQLLSLRSLNLAWNKIAIIHPNAFSTLPSLIKLDLSSNLLSSFPITGLHGLTHLKLTGNHALQSLISSENFPELKVIEMPYAYQCCAFGVCENAYKISNQWNKGDNSSMDDLHKKDAGMFQAQDERDLEDFLLDFEEDLKALHSVQCSPSPGPFKPCEHLLDGWLIRIGVWTIAVLALTCNALVTSTVFRSPLYISPIKLLIGVIAAVNMLTGVSSAVLAGVDAFTFGSFARHGAWWENGVGCHVIGFLSIFASESSVFLLTLAALERGFSVKYSAKFETKAPFSSLKVIILLCALLALTMAAVPLLGGSKYGASPLCLPLPFGEPSTMGYMVALILLNSLCFLMMTIAYTKLYCNLDKGDLENIWDCSMVKHIALLLFTNCILNCPVAFLSFSSLINLTFISPEVIKFILLVVVPLPACLNPLLYILFNPHFKEDLVSLRKQTYVWTRSKHPSLMSINSDDVEKQSCDSTQALVTFTSSSITYDLPPSSVPSPAYPVTESCHLSSVAFVPCL

SEQ ID NO: 9447 - protein, 1453 aa, Homo sapiens
MMLPQNSWHIDFGRCCCHQNLFSAVVTCILLLNSCFLISSFNGTDLELRLVNGDGPCSGTVEVKFQGQWGTVCDDGWNTTASTVVCKQLGCPFSFAMFRFGQAVTRHGKIWLDDVSCYGNESALWECQHREWGSHNCYHGEDVGVNCYGEANLGLRLVDGNNSCSGRVEVKFQERWGTICDDGWNLNTAAVVCRQLGCPSSFISSGVVNSPAVLRPIWLDDILCQGNELALWNCRHRGWGNHDCSHNEDVTLTCYDSSDLELRLVGGTNRCMGRVELKIQGRWGTVCHHKWNNAAADVVCKQLGCGTALHFAGLPHLQSGSDVVWLDGVSCSGNESFLWDCRHSGTVNFDCLHQNDVSVICSDGADLELRLADGSNNCSGRVEVRIHEQWWTICDQNWKNEQALVVCKQLGCPFSVFGSRRAKPSNEARDIWINSISCTGNESALWDCTYDGKAKRTCFRRSDAGVICSDKADLDLRLVGAHSPCYGRLEVKYQGEWGTVCHDRWSTRNAAVVCKQLGCGKPMHVFGMTYFKEASGPIWLDDVSCIGNESNIWDCEHSGWGKHNCVHREDVIVTCSGDATWGLRLVGGSNRCSGRLEVYFQGRWGTVCDDGWNSKAAAVVCSQLDCPSSIIGMGLGNASTGYGKIWLDDVSCDGDESDLWSCRNSGWGNNDCSHSEDVGVICSDASDMELRLVGGSSRCAGKVEVNVQGAVGILCANGWGMNIAEVVCRQLECGSAIRVSREPHFTERTLHILMSNSGCTGGEASLWDCIRWEWKQTACHLNMEASLICSAHRQPRLVGADMPCSGRVEVKHADTWRSVCDSDFSLHAANVLCRELNCGDAISLSVGDHFGKGNGLTWAEKFQCEGSETHLALCPIVQHPEDTCIHSREVGVVCSRYTDVRLVNGKSQCDGQVEINVLGHWGSLCDTHWDPEDARVLCRQLSCGTALSTTGGKYIGERSVRVWGHRFHCLGNESLLDNCQMTVLGAPPCIHGNTVSVICTGSLTQPLFPCLANVSDPYLSAVPEGSALICLEDKRLRLVDGDSRCAGRVEIYHDGFWGTICDDGWDLSDAHVVCQKLGCGVAFNATVSAHFGEGSGPIWLDDLNCTGMESHLWQCPSRGWGQHDCRHKEDAGVICSEFTALRLYSETETESCAGRLEVFYNGTWGSVGRRNITTAIAGIVCRQLGCGENGVVSLAPLSKTGSGFMWVDDIQCPKTHISIWQCLSAPWERRISSTAEETWITCEDRIRVRGGDTECSGRVEIWHAGSWGTVCDDSWDLAEAEVVCQQLGCGSALAALRDASFGQGTGTIWLDDMRCKGNESFLWDCHAKPWGQSDCGHKEDAGVRCSGQSLKSLNASSGRLALILSSIFGLLLPVLFILFLTWCRVQKQKHLPLRVSTRRRGSLEENLFHEMETCLKREDPHGTRTSDDTPNHGCEDASDTSLLGVLPASEATK

SEQ ID NO: 9448 - protein, 620 aa, Homo sapiens
MLSAIYTVLAGLLFLPLLVNLCCPYFFQDIGYFLKVAAVGRRVRSYGQRRPARTILRAFLEKARQTPHKPFLLFRDETLTYAQVDRRSNQVARALHDHLGLRQGDCVALLMGNEPAYVWLWLGLVKLGCAMACLNYNIRAKSLLHCFQCCGAKVLLVSPELQAAVEEILPSLKKDDVSIYYVSRTSNTDGIDSFLDKVDEVSTEPIPESWRSEVTFSTPALYIYTSGTTGLPKAAMITHQRIWYGTGLTFVSGLKADDVIYITLPFYHSAALLIGIHGCIVAGATLALRTKFSASQFWDDCRKYNVTVIQYIGELLRYLCNSPQKPNDRDHKVRLALGNGLRGDVWRQFVKRFGDICIYEFYAATEGNIGFMNYARKVGAVGRVNYLQKKIITYDLIKYDVEKDEPVRDENGYCVRVPKGEVGLLVCKITQLTPFNGYAGAKAQTEKKKLRDVFKKGDLYFNSGDLLMVDHENFIYFHDRVGDTFRWKGENVATTEVADTVGLVDFVQEVNVYGVHVPDHEGRIGMASIKMKENHEFDGKKLFQHIADYLPSYARPRFLRIQDTIEITGTFKHRKMTLVEEGFNPAVIKDALYFLDDTAKMYVPMTEDIYNAISAKTLKL

SEQ ID NO: 9449 - protein, 1151 aa, Homo sapiens
VLCCYCKNEMSGPAQVPMMSPNGSVPPIYVPPGYAPQVIEDNGVRRVVVVPQAPEFHPGSHTVLHRSPHPPLPGFIPVPTMMPPPPRHMYSPVTGAGDMTTQYMPQYQSSQVYGDVDAHSTHGRSNFRDERSSKTYERLQKKLKDRQGTQKDKMSSPPSSPQKCPSPINEHNGLIKGQIAGGINTGSAKIKSGKGKGGTQVDTEIEEKDEETKAFEALLSNIVKPVASDIQARTVVLTWSPPSSLINGETDESSVPELYGYEVLISSTGKDGKYKSVYVGEETNITLNDLKPAMDYHAKVQAEYNSIKGTPSEAEIFTTLSCEPDIPNPPRIANRTKNSLTLQWKAPSDNGSKIQNFVLEWDEGKGNGEFCQCYMGSQKQFKITKLSPAMGCKFRLSARNDYGTSGFSEEVLYYTSGCAPSMPASPVLTKAGITWLSLQWSKPSGTPSDEGISYILEMEEETSGYGFKPKYDGEDLAYTVKNLRRSTKYKFKVIAYNSEGKSNPSEVVEFTTCPDKPGIPVKPSVKGKIHSHSFKITWDPPKDNGGATINKYVVEMAEGSNGNKWEMIYSGATREHLCDRLNPGCFYRLRVYCISDGGQSAVSESLLVQTPAVPPGPCLPPRLQGRPKAKEIQLRWGPPLVDGGSPISCYSVEMSPIEKDEPREVYQGSEVECTVSSLLPGKTYSFRLRAANKMGFGPFSEKCDITTAPGPPDQCKPPQVTCRSATCAQVNWEVPLSNGTDVTEYRLEWGGVEGSMQICYCGPGLSYEIKGLSPATTYYCRVQALSVVGAGPFSEVVACVTPPSVPGIVTCLQEISDDEIENPHYSPSTCLAISWEKPCDHGSEILAYSIDFGDKQSLTVGKVTSYIINNLQPDTTYRIRIQALNSLGAGPFSHMIKLKTKPLPPDPPRLECVAFSHQNLKLKWGEGTPKTLSTDSIQYHLQMEDKNGRFVSLYRGPCHTYKVQRLNESTSYKFCIQACNEAGEGPLSQEYIFTTPKSVPAALKAPKIEKVNDHICEITWECLQPMKGDPVIYSLQVMLGKDSEFKQIYKGPDSSFRYSSLQLNCEYRFRVCAIRQCQDSLGHQDLVGPYSTTVLFISQRTEPPASTNRDTVESTRTRRALSDEQCAAVILVLFAFFSILIAFIIQYFVIK

SEQ ID NO: 9450 - protein, 988 aa, Homo sapiens
MCVTKKLFFIVQRTIFVGCVIWKFCLHYVLRGFLCFNSMQLDRNTLPKKGLRYTPSSRQANQEEGKEWLRSHSTGGLQDTGNQSPLVSPSAMSSSAAGKYHFSNLVSPTNLSQFNLPGPSMMRSNSIPAQDSSFDLYDDSQLCGSATSLEERPRAISHSGSFRDSMEEVHGSSLSLVSSTSSLYSTAEEKAHSEQIHKLRRELVASQEKVATLTSQLSANAHLVAAFEKSLGNMTGRLQSLTMTAEQKESELIELRETIEMLKAQNSAAQAAIQGALNGPDHPPKDLRIRRQHSSESVSSINSATSHSSIGSGNDADSKKKKKKNWVNSRGSELRSSFKQAFGKKKSTKPPSSHSDIEELTDSSLPASPKLPHNAGDCGSASMKPSQSASAICECTEAEAEIILQLKSELREKELKLTDIRLEALSSAHHLDQIREAMNRMQNEIEILKAENDRLKAETGNTAKPTRPPSESSSSTSSSSSRQSLGLSLNNLNITEAVSSDILLDDAGDATGHKDGRSVKIIVSISKGYGRAKDQKSQAYLIGSIGVSGKTKWDVLDGVIRRLFKEYVFRIDTSTSLGLSSDCIASYCIGDLIRSHNLEVPELLPCGYLVGDNNIITVNLKGVEENSLDSFVFDTLIPKPITQRYFNLLMEHHRIILSGPSGTGKTYLANKLAEYVITKSGRKKTEDAIATFNVDHKSSKELQQYLANLAEQCSADNNGVELPVVIILDNLHHVGSLSDIFNGFLNCKYNKCPYIIGTMNQGVSSSPNLELHHNFRWVLCANHTEPVKGFLGRYLRRKLIEIEIERNIRNNDLVKIIDWIPKTWHHLNSFLETHSSSDVTIGPRLFLPCPMDVEGSRVWFMDLWNYSLVPYILEAVREGLQMYGKRTPWEDPSKWVLDTYPWSSATLPQESPALLQLRPEDVGYESCTSTKEATTSKHIPQTDTEGDPLMNMLMKLQEAANYSSTQSCDSESTSHHEDILDSSLESTL

SEQ ID NO: 9451 - protein, 1130 aa, Homo sapiens
MDREERKTINQGQEDEMEIYGYNLSRWKLAIVSLGVICSGGFLLLLLYWMPEWRVKATCVRAAIKDCEVVLLRTTDEFKMWFCAKIRVLSLETYPVSSPKSMSNKLSNGHAVCLIENPTEENRHRISKYSQTESQQIRYFTHHSVKYFWNDTIHNFDFLKGLDEGVSCTSIYEKHSAGLTKGMHAYRKLLYGVNEIAVKVPSVFKLLIKEVLNPFYIFQLFSVILWSTDEYYYYALAIVVMSIVSIVSSLYSIRKQYVMLHDMVATHSTVRVSVCRVNEEIEEIFSTDLVPGDVMVIPLNGTIMPCDAVLINGTCIVNESMLTGESVPVTKTNLPNPSVDVKGIGDELYNPETHKRHTLFCGTTVIQTRFYTGELVKAIVVRTGFSTSKGQLVRSILYPKPTDFKLYRDAYLFLLCLVAVAGIGFIYTIINSILNEVQVGVIIIESLDIITITVPPALPAAMTAGIVYAQRRLKKIGIFCISPQRINICGQLNLVCFDKTGTLTEDGLDLWGIQRVENARFLSPEENVCNEMLVKSQFVACMATCHSLTKIEGVLSGDPLDLKMFEAIGWILEEATEEETALHNRIMPTVVRPPKQLLPESTPAGNQEMELFELPATYEIGIVRQFPFSSALQRMSVVARVLGDRKMDAYMKGAPEAIAGLCKPETVPVDFQNVLEDFTKQGFRVIALAHRKLESKLTWHKVQNISRDAIENNMDFMGLIIMQNKLKQETPAVLEDLHKANIRTVMVTGDSMLTAVSVARDCGMILPQDKVIIAEALPPKDGKVAKINWHYADSLTQCSHPSAIDPEAIPVKLVHDSLEDLQMTRYHFAMNGKSFSVILEHFQDLVPKLMLHGTVFARMAPDQKTQLIEALQNVDYFVGMCGDGANDCGALKRAHGGISLSELEASVASPFTSKTPSISCVPNLIREGRAALITSFCVFKFMALYSIIQYFSVTLLYSILSNLGDFQFLFIDLAIILVVVFTMSLNPAWKELVAQRPPSGLISGALLFSVLSQIIICIGFQSLGFFWVKQQPWYEVWHPKSDACNTTGSGFWNSSHVDNETELDEHNIQNYENTTVFFISSFQYLIVAIAFSKGKPFRQPCYKNYFFVFSVIFLYIFILFIMLYPVASVD

SEQ ID NO: 9452 - protein, 2035 aa, Homo sapiens
MDLRPELPTTLGPVSLRQLGLEHTRYPCLDLGAMLLYTLTFWLLLRQFVKEKLLKWAESPAALTEVTVADTEPTRTQTLLQSLGELVKGVYAKYWIYVCAGMFIVVSFAGRLVVYKIVYMFLFLLCLTLFQVYYSLWRKLLKAFWWLVVAYTMLVLIAVYTFQFQDFPAYWRNLTGFTDEQLGDLGLEQFSVSELFSSILVPGFFLLACILQLHYFHRPFMQLTDMEHVSLPGTRLPRWAHRQDAVSGTPLLREEQQEHQQQQQEEEEEEDSRDEGLGVATPHQATQVPEGAAKWGLVAERLLELAAGFSDVLSRVQVFLRRLLELHVFKLVALYTVWVALKEVSVMNLLLVVLWAFALPYPRFRPMASCLSTVWTCVIIVCKMLYQLKVVNPQEYSSNCTEPFPNSTNLLPTEISQSLLYRGPVDPANWFGVRKGFPNLGYIQNHLQVLLLLVFEAIVYRRQEHYRRQHQLAPLPAQAVFASGTRQQLDQDLLGCLKYFINFFFYKFGLEICFLMAVNVIGQRMNFLVTLHGCWLVAILTRRHRQAIARLWPNYCLFLALFLLYQYLLCLGMPPALCIDYPWRWSRAVPMNSALIKWLYLPDFFRAPNSTNLISDFLLLLCASQQWQVFSAERTEEWQRMAGVNTDRLEPLRGEPNPVPNFIHCRSYLDMLKVAVFRYLFWLVLVVVFVTGATRISIFGLGYLLACFYLLLFGTALLQRDTRARLVLWDCLILYNVTVIISKNMLSLLACVFVEQMQTGFCWVIQLFSLVCTVKGYYDPKEMMDRDQDCLLPVEEAGIIWDSVCFFFLLLQRRVFLSHYYLHVRADLQATALLASRGFALYNAANLKSIDFHRRIEEKSLAQLKRQMERIRAKQEKHRQGRVDRSRPQDTLGPKDPGLEPGPDSPGGSSPPRRQWWRPWLDHATVIHSGDYFLFESDSEEEEEAVPEDPRPSAQSAFQLAYQAWVTNAQAVLRRRQQEQEQARQEQAGQLPTGGGPSQEVEPAEGPEEAAAGRSHVVQRVLSTAQFLWMLGQALVDELTRWLQEFTRHHGTMSDVLRAERYLLTQELLQGGEVHRGVLDQLYTSQAEATLPGPTEAPNAPSTVSSGLGAEEPLSSMTDDMGSPLSTGYHTRSGSEEAVTDPGEREAGASLYQGLMRTASELLLDRRLRIPELEEAELFAEGQGRALRLLRAVYQCVAAHSELLCYFIIILNHMVTASAGSLVLPVLVFLWAMLSIPRPSKRFWMTAIVFTEIAVVVKYLFQFGFFPWNSHVVLRRYENKPYFPPRILGLEKTDGYIKYDLVQLMALFFHRSQLLCYGLWDHEEDSPSKEHDKSGEEEQGAEEGPGVPAATTEDHIQVEARVGPTDGTPEPQVELRPRDTRRISLRFRRRKKEGPARKGAAAIEAEDREEEEGEEEKEAPTGREKRPSRSGGRVRAAGRRLQGFCLSLAQGTYRPLRRFFHDILHTKYRAATDVYALMFLADVVDFIIIIFGFWAFGKHSAATDITSSLSDDQVPEAFLVMLLIQFSTMVVDRALYLRKTVLGKLAFQVALVLAIHLWMFFILPAVTERMFNQNVVAQLWYFVKCIYFALSAYQIRCGYPTRILGNFLTKKYNHLNLFLFQGFRLVPFLVELRAVMDWVWTDTTLSLSSWMCVEDIYANIFIIKCSRETEKKYPQPKGQKKKKIVKYGMGGLIILFLIAIIWFPLLFMSLVRSVVGVVNQPIDVTVTLKLGGYEPLFTMSAQQPSIIPFTAQAYEELSRQFDPQPLAMQFISQYSPEDIVTAQIEGSSGALWRISPPSRAQMKRELYNGTADITLRFTWNFQRDLAKGGTVEYANEKHMLALAPNSTARRQLASLLEGTSDQSVVIPNLFPKYIRAPNGPEANPVKQLQPNEEADYLGVRIQLRREQGAGATGFLEWWVIELQECRTDCNLLPMVIFSDKVSPPSLGFLAGYGIMGLYVSIVLVIGKFVRGFFSEISHSIMFEELPCVDRILKLCQDIFLVRETRELELEEELYAKLIFLYRSPETMIKWTREKE

SEQ ID NO: 9453 - protein, 2436 aa, Homo sapiens
MGFLHQLQLLLWKNVTLKRRSPWVLAFEIFIPLVLFFILLGLRQKKPTISVKEVPFYTAAPLTSAGILPVMQSLCPDGQRDEFGFLQYANSTVTQLLERLDRVVEEGNLFDPARPSLGSELEALRQHLEALSAGPGTSGSHLDRSTVSSFSLDSVARNPQELWRFLTQNLSLPNSTAQALLAARVDPPEVYHLLFGPSSALDSQSGLHKGQEPWSRLGGNPLFRMEELLLAPALLEQLTCTPGSGELGRILTVPESQKGALQGYRDAVCSGQAAARARRFSGLSAELRNQLDVAKVSQQLGLDAPNGSDSSPQAPPPRRLQALLGDLLDAQKVLQDVDVLSALALLLPQGACTGRTPGPPASGAGGAANGTGAGAVMGPNATAEEGAPSAAALATPDTLQGQCSAFVQLWAGLQPILCGNNRTIEPEALRRGNMSSLGFTSKEQRNLGLLVHLMTSNPKILYAPAGSEVDRVILKANETFAFVGNVTHYAQVWLNISAEIRSFLEQGRLQQHLRWLQQYVAELRLHPEALNLSLDELPPALRQDNFSLPSGMALLQQLDTIDNAACGWIQFMSKVSVDIFKGFPDEESIVNYTLNQAYQDNVTVFASVIFQTRKDGSLPPHVHYKIRQNSSFTEKTNEIRRAYWRPGPNTGGRFYFLYGFVWIQDMMERAIIDTFVGHDVVEPGSYVQMFPYPCYTRDDFLFVIEHMMPLCMVISWVYSVAMTIQHIVAEKEHRLKEVMKTMGLNNAVHWVAWFITGFVQLSISVTALTAILKYGQVLMHSHVVIIWLFLAVYAVATIMFCFLVSVLYSKAKLASACGGIIYFLSYVPYMYVAIREEVAHDKITAFEKCIASLMSTTAFGLGSKYFALYEVAGVGIQWHTFSQSPVEGDDFNLLLAVTMLMVDAVVYGILTWYIEAVHPGMYGLPRPWYFPLQKSYWLGSGRTEAWEWSWPWARTPRLSVMEEDQACAMESRRFEETRGMEEEPTHLPLVVCVDKLTKVYKDDKKLALNKLSLNLYENQVVSFLGHNGAGKTTTMSILTGLFPPTSGSATIYGHDIRTEMDEIRKNLGMCPQHNVLFDRLTVEEHLWFYSRLKSMAQEEIRREMDKMIEDLELSNKRHSLVQTLSGGMKRKLSVAIAFVGGSRAIILDEPTAGVDPYARRAIWDLILKYKPGRTILLSTHHMDEADLLGDRIAIISHGKLKCCGSPLFLKGTYGDGYRLTLVKRPAEPGGPQEPGLASSPPGRAPLSSCSELQVSQFIRKHVASCLLVSDTSTELSYILPSEAAKKGAFERLFQHLERSLDALHLSSFGLMDTTLEEVFLKVSEEDQSLENSEADVKESRKDVLPGAEGPASGEGHAGNLARCSELTQSQASLQSASSVGSARGDEGAGYTDVYGDYRPLFDNPQDPDNVSLQEVEAEALSRVGQGSRKLDGGWLKVRQFHGLLVKRFHCARRNSKALFSQILLPAFFVCVAMTVALSVPEIGDLPPLVLSPSQYHNYTQPRGNFIPYANEERREYRLRLSPDASPQQLVSTFRLPSGVGATCVLKSPANGSLGPTLNLSSGESRLLAARFFDSMCLESFTQGLPLSNFVPPPPSPAPSDSPASPDEDLQAWNVSLPPTAGPEMWTSAPSLPRLVREPVRCTCSAQGTGFSCPSSVGGHPPQMRVVTGDILTDITGHNVSEYLLFTSDRFRLHRYGAITFGNVLKSIPASFGTRAPPMVRKIAVRRAAQVFYNNKGYHSMPTYLNSLNNAILRANLPKSKGNPAAYGITVTNHPMNKTSASLSLDYLLQGTDVVIAIFIIVAMSFVPASFVVFLVAEKSTKAKHLQFVSGCNPIIYWLANYVWDMLNYLVPATCCVIILFVFDLPAYTSPTNFPAVLSLFLLYGWSITPIMYPASFWFEVPSSAYVFLIVINLFIGITATVATFLLQLFEHDKDLKVVNSYLKSCFLIFPNYNLGHGLMEMAYNEYINEYYAKIGQFDKMKSPFEWDIVTRGLVAMAVEGVVGFLLTIMCQYNFLRRPQRMPVSTKPVEDDVDVASERQRVLRGDADNDMVKIENLTKVYKSRKIGRILAVDRLCLGVRPGECFGLLGVNGAGKTSTFKMLTGDESTTGGEAFVNGHSVLKELLQVQQSLGYCPQCDALFDELTAREHLQLYTRLRGISWKDEARVVKWALEKLELTKYADKPAGTYSGGNKRKLSTAIALIGYPAFIFLDEPTTGMDPKARRFLWNLILDLIKTGRSVVLTSHSMEECEALCTRLAIMVNGRLRCLGSIQHLKNRFGDGYMITVRTKSSQSVKDVVRFFNRNFPEAMLKERHHTKVQYQLKSEHISLAQVFSKMEQVSGVLGIEDYSVSQTTLDNVFVNFAKKQSDNLEQQETEPPSALQSPLGCLLSLLRPRSAPTELRALVADEPEDLDTEDEGLISFEEERAQLSFNTDTLC

SEQ ID NO: 9454 - protein, 1176 aa, Homo sapiens
TVLCFPQFRFADGLDITLMILGILASLVNGACLPLMPLVLGEMSDNLISGCLVQTNTSEYTIIFLLTLYYVGIGVAALIFGYIQISLWIITAARQTKRIRKQFFHSVLAQDIGWFDSCDIGELNTRMTDDIDKISDGIGDKIALLFQNMSTFSIGLAVGLVKGWKLTLVTLSTSPLIMASAAACSRMVISLTSKELSAYSKAGAVAEEVLSSIRTVIAFRAQEKELQRYTQNLKDAKDFGIKRTIASKVSLGAVYFFMNGTYGLAFWYGTSLILNGEPGYTIGTVLAVKRKLSWKKTILILFLKCRDCQFTPLKIYNFLCFSKKPSIDNFSTAGYKPESIEGTVEFKNVSFNYPSRPSIKILKGLNLRIKSGETVALVGLNGSGKSTVVQLLQRLYDPDDGFIMVDENDIRALNVRHYRDHIGVVSQEPVLFGTTISNNIKYGRDDVTDEEMERAAREANAYDFIMEFPNKFNTLVGEKGAQMSGGQKQRIAIARALVRNPKILILDEATSALDSESKSAVQAALEKASKGRTTIVVAHRLSTIRSADLIVTLKDGMLAEKGAHAELMAKRGLYYSLVMSQVMLDIMLCQQGLTFQRSYHTRKQKLQIIILNFKKQPSLPEVSLLKILKLNKPEWPFVVLGTLASVLNGTVHPVFSIIFAKIITMFGNNDKTTLKHDAEIYSMIFVILGVICFVSKCFLIYSRKITSQIKKMIFDNHMLILLFDIAWFDEKENSTGGLTTILAIDIAQIQGVCSRIGVLTQNATNMGLSVIISFIYGWEMTFLILSIAPVLAVTGMIETAAMTGFANKDKQELKHAGKIATEALENIRTIVSLTREKAFEQMYKRCFRLNTGVPSTSKDYIPVPAFFFTFRVLLFYKGSMDDSNALSFDRVFTAIAYGAMAIGETLVLAPEYSKAKSGAAHLFALLEKKPNIDSRSQEGKKPDTCEGNLEFREVSFFYPCRPDVFILRGLSLSIERGKTVAFVGSSGCGKSTSVQLLQRLYDPVQGQVLFDGVDAKELNVQWLRSQIAIVPQEPVLFNCSIAENIAYGDNSRVVPLDEIKEAANAANIHSFIEGLPEKYNTQVGLKGAQLSGGQKQRLAIARALLQKPKILLLDEATSALDNDSEKVVQHALDKARTGRTCLVVTHRLSAIQNADLIVVLHNGKIKEQGTHQELLR

SEQ ID NO: 9455 - protein, 1165 aa, Homo sapiens
FRFADGLDITLMILGILASLVNGACLPLMPLVLGEMSDNLISGCLVQTNTSELTLYYVGIGVAALIFGYIQISLWIITAARQTKRIRKQFFHSVLAQDIGWFDSCDIGELNTRMTDDIDKISDGIGDKIALLFQNMSTFSIGLAVGLVKGWKLTLVTLSTSPLIMASAAACSRMVISLTSKELSAYSKAGAVAEEVLSSIRTVIAFRAQEKELQRYTQNLKDAKDFGIKRTIASKVSLGAVYFFMNGTYGLAFWYGTSLILNGEPGYTIGTVLAVKRKLSWKKTILILFLKCRDCQFTPLKIYNFLCFSKKPSIDNFSTAGYKPESIEGTVEFKNVSFNYPSRPSIKILKGLNLRIKSGETVALVGLNGSGKSTVVQLLQRLYDPDDGFIMVDENDIRALNVRHYRDHIGVVSQEPVLFGTTISNNIKYGRDDVTDEEMERAAREANAYDFIMEFPNKFNTLVGEKGAQMSGGQKQRIAIARALVRNPKILILDEATSALDSESKSAVQAALEKASKGRTTIVVAHRLSTIRSADLIVTLKDGMLAEKGAHAELMAKRGLYYSLVMSQVMLMDIMLCQQGLTFQRSYHTRKQKLQIIILNFKKQPSLPEVSLLKILKLNKPEWPFVVLGTLASVLNGTVHPVFSIIFAKIITVRVSQPSALLASHNAHCCKCFLIYSRKITSQIKKMIFDNHMLILLFSRILWFDEKENSTGGLTTILAIDIAQIQGATGSRIGVLTQNATNMGLSVIISFIYGWEMTFLILSIAPVLAVTGMIETAAMTGFANKDKQELKHAGKIATEALENIRTIVSLTREKAFEQMYEEMLQTQHRNTSKKAQIIGSCYAFSHAFIYFAYAAGFRFGAYLIQAGRMTPEGMFIVFTAIAYGAMAIGETLVLAPEYSKAKSGAAHLFALLEKKPNIDSRSQEGKKPDTCEGNLEFREVSFFYPCRPDVFILRGLSLSIERGKTVAFVGSSGCGKSTSVQLLQRLYDPVQGQVLFDGVDAKELNVQWLRSQIAIVPQEPVLFNCSIAENIAYGDNSRVVPLDEIKEAANAANIHSFIEGLPEKYNTQVGLKGAQLSGGQKQRLAIARALLQKPKILLLDEATSALDNDSEKVVQHALDKARTGRTCLVVTHRLSAIQNADLIVVLHNGKIKEQGTHQELLRNRD

SEQ ID NO: 9456 - protein, 1165 aa, Homo sapiens
GATVLCFPQFRFADGLDITLMILGILASLVNGACLPLMPLVLGEMSDNLISGCLVQTNTSEYTIIFLLTLYYVGIGVAALIFGYIQISLWIITAARQTKRIRKQFFHSVLAQDIGWFDSCDIGELNTRMTDDIDKISDGIGDKIALLFQNMSTFSIGLAVGLVKGWKLTLVTLSTSPLIMASAAACSRMVISLTSKELSAYSKAGAVAEEVLSSIRTVIAFRAQEKELQRYTQNLKDAKDFGIKRTIASKVSLGAVYFFMNGTYGLAFWYGTSLILNGEPGYTIGTVLAVKRKLSWKKTILILFLKCRDCQFTPLKIYNISCFSKKPSIDNFSTAGYKPESIEGTVEFKNVSFNYPSRPSIKILKGLNLRIKSGETVALVGLNGSGKSTVVQLLQRLYDPDDGFIMVDENDIRALNVRHYRDHIGVVSQEPVLFGTTISNNIKYGRDDVTDEEMERAAREANAYDFIMEFPNKFNTLVGEKGAQMSGGQKQRIAIARALVRNPKILILDEATSALDSESKSAVQAALEKASKGRTTIVVAHRLSTIRSADLIVTLKDGMLAEKGAHAELMAKRGLYYSLVMSQVMLCDIMLCQQGLTFQRSYHTRKQKLQIIILNFKKQPSLPEVSLLKILKLNKPEWPFVVLGTLASVLNGTVHPVFSIIFAKIITMFGNNDKTTLKHDAEIYSMIFVILGVICFVSYFMQDIAWFDEKENSTGGLTTILAIDIAQIQGATGSRIGVLTQNATNMGLSVIISFIYGWEMTFLILSIAPVLAVTGMIETAAMTGFANKDKQELKHAGKIATEALENIRTIVSLTREKAFEQMYKRCFRLNTGVPSTSKDYIPVPAFFFTFRVLLFYKGSMDDSNALSFDRVFTAIAYGAMAIGETLVLAPEYSKAKSGAAHLFALLEKKPNIDSRSQEGKKPDTCEGNLEFREVSFFYPCRPDVFILRGLSLSIERGKTVAFVGSSGCGKSTSVQLLQRLYDPVQGQVLFDGVDAKELNVQWLRSQIAIVPQEPVLFNCSIAENIAYGDNSRVVPLDEIKEAANAANIHSFIEGLPEKYNTQVGLKGAQLSGGQKQRLAIARALLQKPKILLLDEATSALDNDSEKVVQHALDKARTGRTCLVVTHRLSAIQNADLIVVLHNGKIKEQGTHQELLRNRDIYFKLV

SEQ ID NO: 9457 - protein, 779 aa, Homo sapiens [sequence omitted]

SEQ ID NO: 9458 - protein, 684 aa, Homo sapiens
MTPEFDEEVVFENSPLYQYLQDLGHTDFEICSSLSPKTEKCTTEGQQKPPTRVLPKQGILLKVAETIKSWIFFSQCNKKDDLLHKLDIGFRLDSLHTILQQEVLLQEDVELIELLDPSILSAGQSQQQENGHLPTLCSLATPNIWDLSMLFAFISLLVMLPTWWIVSSWLVWGVILFVYLVIRALRLWRTAKLQVTLKKYSVHLEDMATNSRAFTNLVRKALRLIQETEVISRGFTLVSAACPFNKAGQHPSQHLIGLRKAVYRTLRANFQAARLATLYMLKNYPLNSESDNVTNYICVVPFKELGLGLSEEQISEEEAHNFTDGFSLPALKVLFQLWVAQSSEFFRRVIILEDELEKLVCTKETQELVSEAYPILEQKLKLIQPHVQASNNCWEEAISQVDKLLRRNTDKKGKPEIACENPHCTVVPLKQPTLHIADKDPIPEEQELEAYVDDIDIDSDFRKDDFYYLSQEDKERQKREHEESKRVLQELKSVLGFKASEAERQKWKQLLFSDHAVLKSLSPVDPVEPISNSEPSMNSDMGKVSKNDTEEESNKSATTDNEISRTEYLCENSLEGKNKDNSSNEVFPQGAEERMCYQCESEDEPQADGSGLTTAPPTPRDSLQPSIKQRLARLQLSPDFTFTAGLAAEVAARSLSFTTMQEQTFGDEEEEQIIEENKNEIEEK

SEQ ID NO: 9459 - protein, 388 aa, Homo sapiens
GTRGPPGSPPPPPHVRGMPGCPCPGCGMAGPRLLFLTALALELLGRAGGSQPALRSRGTATACRLDNKESESWGALLSGERLDTWICSLLGSLMVGLSGVFPLLVIPLEMGTMLRSEAGAWRLKQLLSFALGGLLGNVFLHLLPEAWAYTCSASPGGEGQSLQQQQQLGLWVIAGILTFLALEKMFLDSKEEGTSQAPNKDPTAAAAALNGGHCLAQPAAEPGLGAVVRSIKVSGYLNLLANTIDNFTHGLAVAASFLVSKKIGLLTTMAILLHEIPHEVGDFAILLRAGFDRWSAAKLQLSTALGGLLGAGFAICTQSPKGVVGCSPAAEETAAWVLPFTSGGFLYIALVNVLPDLLEEEDPWRSLQQLLLLCAGIVVMVLFSLFVD

SEQ ID NO: 9460 - protein, 225 aa, Homo sapiens
  VARIANT 211, 218, 219: Xaa = Any Amino Acid
TQLGFCSVYIVFLAENVKQVHEGFLESKVFISNSTNSSNPCERRSVDLRIYMLCFLPFIILLVFIRELKNLFVLSFLANVSMAVSLVIIYQYVVRNMPDPHNLPIVAGWKKYPLFFGTAVFAFEGIGVVLPLENQMKESKRFPQALNIGMGIVTTLYVTLATLGYMCFHDEIKGSITLNLPQDVWLYQSVKILYSFGHFCGHISIPVLCSXQRSIIPXXHIQISY

SEQ ID NO: 9461 - protein, 369 aa, Homo sapiens
MEVSPWSCLQKQAAWGRSVVDFFLVITQLGFCSVYIVFLAENVKQVHEGFLESKVFISNSTNSSNPCERRSVDLRIYMLCFLPFIILLVFIRELKNLFVLSFLANVSMAVSLVIIYQYVVRNMPDPHNLPIVAGWKKYPLFFGTAVFAFEGIGVVLPLENQMKESKRFPQALNIGMGIVTTLYVTLATLGYMCFRDEIKGSITLNLPQDVWLYQSVKILYSFGIFVTYSIQFYVPAEIIIPGITSKFHTKWKQICEFGIRSFLVSITCAGAILIPRLDIVISFVGAVSSSTLALILPPLVEILTFSKEHYNIWMVLKNISIAFTGVVGFLLGTYITVEEIIYPTPKVVAGTPQSPFLNLNSTCLTSGLK

SEQ ID NO: 9462 - protein, 222 aa, Homo sapiens
TQLGFCSVYIVFLAENVKQVHEGFLESKVFISNSTNSSNPCERRSVDLRIYMLCFLPFIILLVFIRELKNLFVLSFLANVSMAVSLVIIYQYVVRNMPDPHNLPIVAGWKKYPLFFGTAVFAFEGIGVVLPLENQMKESKRFPQALNIGMGIVTTLYVTLATLGYMCFHDEIKGSITLNLPQDVWLYQSVKILYSFHFCDIFNSVLCSSRDHYPWDHIQISY

SEQ ID NO: 9463 - protein, 741 aa, Homo sapiens
MALFTPWKLSSQKLGFFLVTFGFIWGMMLLHFTIQQRTQPESSSMLREQILDLSKRYIKALAEENRNVVDGPYAGVMTAYDLKKTLAVLLDNILQRIGKLESKVDNLVVNGTGTNSTNSTTAVPSLVALEKINVADIINGAQEKCVLPPMDGYPHCEGKIKWMKDMWRSDPCYADYGVDGSTCSFFIYLSEVENWCPHLPWRAKNPYEEADHNSLAEIRTDFNILYSMMKKHEEFRWMRLRIRRMADAWIQAIKSLAEKQNLEKRKRKKVLVHLGLLTKESGFKIAETAFSGGPLGELVQWSDLITSLYLLGHDIRISASLAELKEIMKKVVGNRSGCPTVGDRIVELIYIDIVGLAQFKKTLGPSWVHYQCMLRVLDSFGTEPEFNHANYAQSKGHKTPWGKWNLNPQQFYTMFPHTPDNSFLGFVVEQHLNSSDIHHINEIKRQNQSLVYGKVDSFWKNKKIYLDIIHTYMEVHATVYGSSTKNIPSYVKNHGILSGRDLQFLLRETKLFVGLGFPYEGPAPLEAIANGCAFLNPKFNPPKSSKNTDFFIGKPTLRELTSQHPYAEVFIGRPHVWTVDLNNQEEVEDAVKAILNQKIEPYMPYEFTCEGMLQRINAFIEKQDFCHGQVMWPPLSALQVKLAEPGQSCKQVCQESQLICEPSFFQHLNKDKDMLKYKVTCQSSELAKDILVPSFDPKNKHCVFQGDLLLFSCAGAHPRHQRVCPCRDFIKGQVALCKDCL

SEQ ID NO: 9464 - protein, 408 aa, Homo sapiens
MIPPEQPQQQLQPPSPAPPNHVVTTIENLPAEGSGGGGSLSASSRAGVRQRIRKVLNREMLISVALGQVLSLLICGIGLTSKYLSEDFHANTPVFQSFLNYILLFLVYTTTLAVRQGEENLLAILRRRWWKYMILGLIDLEANYLVVKAYQYTTLTSIQLLDCFVIPVVILLSWFFLLIRYKAVHFIGIVVCILGMGCMVGADVLVGRHQGAGENKLVGDLLVLGGATLYGISNVWEEYIIRTLSRVEFLGMIGLFGAFFSGIQLAIMEHKELLKVPWDWQIGLLYVGFSACMFGLYSFMPVVIKKTSATSVNLSLLTADLYSLFCGLFLFHYKFSGLYLLSFFTILIGLVLYSSTSTYIAQDPRVYKQFRNPSGPVVDLPTTAQVEPSVTYTSLGQETEEEPHVRVA

SEQ ID NO: 9465 - protein, 806 aa, Homo sapiens
LRNSTFKNMQRRHTTLREKGRRQAIRGPAYMFNEKGTSLTPEEERFLDSAEYGNIPVVRKMLEESKTLNFNCVDYMGQNALQLAVGNEHLEVTELLLKKENLARVGDALLLAISKGYVRIVEAILNHPAFAQGQRLTLSPLEQELRDDDFYAYDEDGTRFSHDITPIILAAHCQEYEIVHILLLKGARIERPHDYFCKCNECTEKQRKDSFSHSRSRMNAYKGLASAAYLSLSSEDPVLTALELSNELARLANIETEFKNDYRKLSMQCKDFVVGVLDLCRDTEEVEAILNGDVNFQVWSDHHRPSLSRIKLAIKYEVKKLGRTLRSPFMKFVAHAVSFTIFLGLLVVNASDRFEGVKTLPNETFTDYPKQIFRVKTTQFSWTEMLIMKWVLGMIWSECKEIWEEGPREYVLHLWNLLDFGMLSIFVASFTARFMAFLKATEAQLYVDQHVQDDTLHNVSLPPEVAYFTYARDKWWPSDPQIISEGLYAIAVVLSFSRIAYILPANESFGPLQISLGRTVKDIFKFMVIFIMVFVAFMIGMFNLYSYYRGAKYNPAFTTVEESFKTLFWSIFGLSEVISVVLKYDHKFIENIGYVLYGVYNVTMVVVLLNMLIAMINNSYQEIEEDADVEWKFARAKLWLSYFDEGRTLPAPFNLVPSPKSFYYLIMRIKMCLIKLCKSKAKSCENDLEMGMLNSKFKKTRYQAGMRNSENLTANNTLSKPTRYQKIMKRLIKRYVLKAQVDRENDEVNEGELKEIKQDISSLRYELLEEKSQATGELADLIQQLSEKFGKNLNKDHLRVNKGKDI

SEQ ID NO: 9466 - protein, 862 aa, Homo sapiens
MLRNSTFKNMQRRHTTLREKGRRQAIRGPAYMFNEKGTSLTPEEERFLDSAEYGNIPVVRKMLEESKTLNFNCVDYMGQNALQLAVGNEHLEVTELLLKKENLARVGDALLLAISKGYVRIVEAILNHPAFAQGQRLTLSPLEQELRDDDFYAYDEDGTRFSHDITPIILAAHCQEYEIVHILLLKGARIERPHDYFCKCNECTEKQRKDSFSHSRSRMNAYKGLASAAYLSLSSEDPVLTALELSNELARLANIETEFKNDYRKLSMQCKDFVVGVLDLCRDTEEVEAILNGDVNFQVWSDHHRPSLSRIKLAIKYEVKKFVAHPNCQQQLLTMWYENLSGLRQQSIAVKFLAVFGVSIGLPFLAIAYWIAPCSKLGRTLRSPFMKFVAHAVSFTIFLGLLVVNASDRFEGVKTLPNETFTDYPKQIFRVKTTQFSWTEMLIMKWVLGMIWSECKEIWEEGPREYVLHLWNLLDFGMLSIFVASFTARFMAFLKATEAQLYVDQHVQDDTLHNVSLPPEVAYFTYARDKWWPSDPQIISEGLYAIAVVLSFSRIAYILPANESFGPLQISLGRTVKDIFKFMVIFIMVFVAFMIGMFNLYSYYRGAKYNPAFTTVEESFKTLFWSIFGLSEVISVVLKYDHKFIENIGYVLYGVYNVTMVVVLLNMLIAMINNSYQEIEEDADVEWKFARAKLWLSYFDEGRTLPAPFNLVPSPKSFYYLIMRIKMCLIKLCKSKAKSCENDLEMGMLNSKFKKTRYQAGMRNSENLTANNTLSKPTRYQKIMKRLIKRYVLKAQVDRENDEVNEGELKEIKQDISSLRYELLEEKSQATGELADLIQQLSEKFGKNLNKDHLRVNKGKDI

SEQ ID NO: 9467 - protein, 806 aa, Homo sapiens
MLRNSTFKNMQRRHTTLREKGRRQAIRGPAYMFNEKGTSLTPEEERFLDSAEYGNIPVVRKMLEESKTLNFNCVDYMGQNALQLAVGNEHLEVTELLLKKENLARVGDALLLAISKGYVRIVEAILNHPAFAQGQRLTLSPLEQELRDDDFYAYDEDGTRFSHDITPIILAAHCQEYEIVHILLLKGARIERPHDYFCKCNECTEKQRKDSFSHSRSRMNAYKGLASAAYLSLSSEDPVLTALELSNELARLANIETEFKNDYRKLSMQCKDFVVGVLDLCRDTEEVEAILNGDVNFQVWSDHHRPSLSRIKLAIKYEVKLGRTLRSPFMKFVAHAVSFTIFLGLLVVNASDRFEGVKTLPNETFTDYPKQIFRVKTTQFSWTEMLIMKWVLGMIWSECKEIWEEGPREYVLHLWNLLDFGMLSIFVASFTARFMAFLKATEAQLYVDQHVQDDTLHNVSLPPEVAYFTYARDKWWPSDPQIISEGLYAIAVVLSFSRIAYILPANESFGPLQISLGRTVKDIFKFMVIFIMVFVAFMIGMFNLYSYYRGAKYNPAFTTVEESFKTLFWSIFGLSEVISVVLKYDHKFIENIGYVLYGVYNVTMVVVLLNMLIAMINNSYQEIEEDADVEWKFARAKLWLSYFDEGRTLPAPFNLVPSPKSFYYLIMRIKMCLIKLCKSKAKSCENDLEMGMLNSKFKKTRYQAGMRNSENLTANNTLSKPTRYQKIMKRLIKRYVLKAQVDRENDEVNEGELKEIKQDISSLRYELLEEKSQATGELADLIQQLSEKFGKNLNKDHLRVNKGKDI

SEQ ID NO: 9468 - protein, 746 aa, Homo sapiens
MLRNSTFKNMQRRHTTLREKGRRQAIRGPAYMFNEKGTSLTPEEERFLDSAEYGNIPVVRKMLEESKTLNFNCVDYMGQNALQLAVGNEHLEVTELLLKKENLARVGDALLLAISKGYVRIVEAILNHPAFAQGQRLTLSPLEQELRDDDFYAYDEDGTRFSHDITPIILAAHCQEYEIVHILLLKGARIERPHDYFCKCNECTEKQRKDSFSHSRSRMNAYKGLASAAYLSLSSEDPVLTALELSNELARLANIETEFKLGRTLRSPFMKFVAHAVSFTIFLGLLVVNASDRFEGVKTLPNETFTDYPKQIFRVKTTQFSWTEMLIMKWVLGMIWSECKEIWEEGPREYVLHLWNLLDFGMLSIFVASFTARFMAFLKATEAQLYVDQHVQDDTLHNVSLPPEVAYFTYARDKWWPSDPQIISEGLYAIAVVLSFSRIAYILPANESFGPLQISLGRTVKDIFKFMVIFIMVFVAFMIGMFNLYSYYRGAKYNPAFTTVEESFKTLFWSIFGLSEVISVVLKYDHKFIENIGYVLYGVYNVTMVVVLLNMLIAMINNSYQEIEEDADVEWKFARAKLWLSYFDEGRTLPAPFNLVPSPKSFYYLIMRIKMCLIKLCKSKAKSCENDLEMGMLNSKFKKTRYQAGMRNSENLTANNTLSKPTRYQKIMKRLIKRYVLKAQVDRENDEVNEGELKEIKQDISSLRYELLEEKSQATGELADLIQQLSEKFGKNLNKDHLRVNKGKDI

SEQ ID NO: 9469 - protein, 189 aa, Homo sapiens
DKQLDADVSPKPTIFLPSIAETKLQKAGTYLCLLEKFFPDIIKIHWQEKKSNTILGSQEGNTMKTNDTYMKFSWLTVPEESLDKEHRCIVRHENNKNGIDQEIIFPPIKTDVTTVDPKDSYSKDANDVITMDPKDNWSKDANDTLLLQLTNTSAYYMYLLLLLKSVVYFAIITCCLLGRTAFCCNGEKS

SEQ ID NO: 9470 - protein, 811 aa, Homo sapiens
TMIPVTELRYFADTQPAYRILKPWWDVFTDYISIVMLMIAVFGGTLQVTQDKMICLPCKWVTKDSCNDSFRGWAAPGPEPTYPNSTILPTPDTGPTGIKYDLDRHQYNYVDAVCYENRLHWFAKYFPYLVLLHTLIFLACSNFWFKFPRTSSKLEHFVSILLKCFDSPWTTRALSETVVEESDPKPAFSKMNGSMDKKSSTVSEDVEATVPMLQRTKSRIEQGIVDRSETGVLDKKEGEQAKALFEKVKKFRTHVEEGDIVYRLYMRQTIIKVIKFILIICYTVYYVHNIKFDVDCTVDIESLTGYRTYRCAHPLATLFKILASFYISLVIFYGLICMYTLWWMLRRSLKKYSFESIREESSYSDIPDVKNDFAFMLHLIDQYDPLYSKRFAVFLSEVSENKLRQLNLNNEWTLDKLRQRLTKNAQDKLELHLFMLSGIPDTVFDLVELEVLKLELIPDVTIPPSIAQLTGLKELWLYHTAAKIEAPALAFLRENLRALHIKFTDIKEIPLWIYSLKTLEELHLTGNLSAENNRYIVIDGLRELKRLKVLRLKSNLSKLPQVVTDVGVHLQKLSINNEGTKLIVLNSLKKMANLTELELIRCDLERIPHSIFSLHNLQEIDLKDNNLKTIEEIISFQHLHRLTCLKLWYNHIAYIPIQIGNLTNLERLYLNRNKIEKIPTQLFYCRKLRYLDLSHNNLTFLPADIGLLQNLQNLAITANRIETLPPELFQCRKLRALHLGNNVLQSLPSRVGELTNLTQIELRGNRLECLPVELGECPLLKRSGLVVEEDLFNTLPPEVKERLWRADKEQA

SEQ ID NO: 9471 - protein, 546 aa, Homo sapiens
MRQTIIKVIKFILIICYTVYYVHNIKFDVDCTVDIESLTGYRTYRCAHPLATLFKILASFYISLVIFYGLICMYTLWWMLRRSLKKYSFESIREESSYSDIPDVKNDFAFMLHLIDQYDPLYSKRFAVFLSEVSENKLRQLNLNNEWTLDKLRQRLTKNAQDKLELHLFMLSGIPDTVFDLVELEVLKLELIPDVTIPPSIAQLTGLKELWLYHTAAKIEAPALAFLRENLRALHIKFTDIKEIPLWIYSLKTLEELHLTGNLSAENNRYIVIDGLRELKRLKVLRLKSNLSKLPQVVTDVGVHLQKLSINNEGTKLIVLNSLKKMANLTELELIRCDLERIPHSIFSLHNLQEIDLKDNNLKTIEEIISFQHLHRLTCLKLWYNHIAYIPIQIGNLTNLERLYLNRNKIEKIPTQLFYCRKLRYLDLSHNNLTFLPADIGLLQNLQNLAITANRIETLPPELFQCRKLRALHLGNNVLQSLPSRVGELTNLTQIELRGNRLECLPVELGECPLLKRSGLVVEEDLFNTLPPEVKERLWRADKEQA

SEQ ID NO: 9472 - protein, 246 aa, Homo sapiens
MAAAAATKILLCLPLLLLLSGWSRAGRADPHSLCYDITVIPKFRPGPRWCAVQGQVDEKTFLHYDCGNKTVTPVSPLGKKLNVTTAWKAQNPVLREVVDILTEQLRDIQLENYTPKEPLTLQARMSCEQKAEGHSSGSWQFSFDGQIFLLFDSEKRMWTTVHPGARKMKEKWENDKVVAMSFHYFSMGDCIGWLEDFLMGMDSTLEPSAGAPLAMSSGTTQLRATATTLILCCLLIILPCFILPGI

SEQ ID NO: 9473 - protein, 246 aa, Homo sapiens
MAAAAIPALLLCLPLLFLLFGWSRARRDDPHSLCYDITVIPKFRPGPRWCAVQGQVDEKTFLHYDCGNKTVTPVSPLGKKLNVTTAWKAQNPVLREVVDILTEQLLDIQLENYTPKEPLTLQARMSCEQKAEGHSSGSWQFSIDGQTFLLFDSEKRMWTTVHPGARKMKEKWENDKDVAMSFHYISMGDCIGWLEDFLMGMDSTLEPSAGAPLAMSSGTTQLRATATTLILCCLLIILPCFILPGI

SEQ ID NO: 9474 - protein, 752 aa, Homo sapiens
VVAAGTTDVCHQAQLHRQFRGGPWASGCPPPLLYKVLASGQPAQLPSLRRRDSPVPLTLSPAAPAGSSAGTMGGRVFLVFLAFCVWLTLPGAETQDSRGCARWCPQDSSCVNATACRCNPGFSSFSEIITTPMETCDDINECATLSKVSCGKFSDCWNTEGSYDCVCSPGYEPVSGAKTFKNESENTCQDMTFSTWTPPPGVHSQTLSRFFDKVQDLGRDYKPGLANNTIQSILQALDELLEAPGDLETLPRLQQHCVASHLLDGLEDVLRGLSKNLSNGLLNFSYPAGTELSLEVQKQVDRSVTLRQNQAVMQLDWNQAQKSGDPGPSVVGLVSIPGMGKLLAEAPLVLEPEKQMLLHETHQGLLQDGSPILLSDVISAFLSNNDTQNLSSPVTFTFSHRSVIPRQKVLCVFWEHGQNGCGHWATTGCSTIGTRDTSTICRCTHLSSFAVLMAHYDVQEEDPVLTVITYMGLSVSLLCLLLAALTFLLCKAIQNTSTSLHLQLSLCLFLAHLLFLVAIDQTGHKVLCSIIAGTLHYLYLATLTWMLLEALYLFLTARNLTVVNYSSINRFMKKLMFPVGYGVPAVTVAISAASRPHLYGTPSRCWLQPEKGFIWGFLGPVCAIFSVNLVLFLVTLWILKNRLSSLNSEVSTLRNTRMLAFKATAQLFILGCTWCLGILQVGPAARVMAYLFTIINSLQGVFIFLVYCLLSQQVREQYGKWSKGIRKLKTESEMHTLSSSAKADTSKPSTVN

SEQ ID NO: 9475 - protein, 858 aa, Homo sapiens
MLSHLLTHTTGGGDEERQSLGKGERKCVLLFCIFEQCSIVGSVLIFGQVRMNHQKGRGPGRQPQEGLRAGPSPRIEAFPCPPFGTRVSAPPRIPRIGEGRWASEGAGLGERRLREERGRRQWTRRPRGLEGEEAAVWDGAGGDQTQEPPPQHPPSRALPVQERRVRSDPERCGYKGDGPSGAPAEPTRQFAAAVRLWEQEVEGIRCGPTKGEKPLLTVPPYVLPSHSILTAQLSPSTASPRPPSSSAWISSLVYLKTQQARVSEVGFIFGTCVWSVAGFSLRQAHPSSKIESLRVTVDFLKVPLGLKKPVLKEVAVGPPKRPQPAALERYKARRSDAMDTESQYSGYSYKSGHSRSSRKHRDRRDRHRSKSRDGGRGDKSVTIQAPGEPLLDNESTRGDERDDNWGETTTVVTGTSEHSISHDDLTRIAKDMEDSVPLDCSRHLGVAAGATLALLSFLTPLAFLLLPPLLWREELEPCGTACEGLFISVAFKLLILLLGSWALFFRRPKASLPRVFVLRALLMVLVFLLVVSYWLFYGVRILDARERSYQGVVQFAVSLVDALLFVHYLAVVLLELRQLQPQFTLKVVRSTDGASRFYNVGHLSIQRVAVWILEKYYHDFPVYNPALLNLPKSVLAKKVSGFKVYSLGEENSTNNSTGQSRAVIAAAARRRDNSHNEYYYEEAEHERRVRKRRARLVVAVEEAFTHIKRLQEEEQKNPREVMDPREAAQAIFASMARAMQKYLRTTKQQPYHTMESILQHLEFCITHDMTPKAFLERYLAAGPTIQYHKERWLAKQWTLVSEEPVTNGLKDGIVFLLKRQDFSLVVSTKKVPFFKLSEEFVDPKSHKFVMRLQSETSV

SEQ ID NO: 9476 - protein, 725 aa, Homo sapiens
MEPGDAARPGSGRATGAPPPRLLLLPLLLGWGLRVAAAASASSSGAAAEDSSAMEELATEKEAEESHRQDSVSLLTFILLLTLTILTIWLFKHRRVRFLHETGLAMIYGLIVGVILRYGTPATSGRDKSLSCTQEDRAFSTLLVNVSGKFFEYTLKGEISPGKINSVEQNDMLRKVTFDPEVFFNILLPPIIFHAGYSLKKRHFFRNLGSILAYAFLGTAVSCFIIGNLMYGVVKLMKIMGQLSDKFYYTDCLFFGAIISATDPVTVLAIFNELHADVDLYALLFGESVLNDAVAIVLSSSIVAYQPAGLNTHAFDAAAFFKSVGIFLGIFSGSFTMGAVTGVNANVTKFTKLHCFPLLETALFFLMSWSTFLLAEACGFTGVVAVLFCGITQAHYTYNNLSVESRSRTKQLFEVLHFLAENFIFSYMGLALFTFQKHVFSPIFIIGAFVAIFLGRAAHIYPLSFFLNLGRRHKIGWNFQHMMMFSGLRGAMAFALAIRDTASYARQMMFTTTLLIVFFTVWIIGGGTTPMLSWLNIRVGVEEPSEEDQNEHHWQYFRVGVDPDQDPPPNNDSFQVLQGDGPDSARGNRTKQESAWIFRLWYSFDHNYLKPILTHSGPPLTTTLPAWCGLLARCLTSPQVYDNQEPLREEDSDFILTEGDLTLTYGDSTVTANGSSSSHTASTSLEGSRRTKSSSEEVLERDLGMGDQKVSSRGTRLVFPLEDNA

SEQ ID NO: 9477 - protein, 1513 aa, Homo sapiens
MSLSFCGNNISSYNINDGVLQNSCFVDALNLVPHVFLLFITFPILFIGWGSQSSKVQIHHNTWLHFPGHNLRWILTFALLFVHVCEIAEGIVSDSRRESRHLHLFMPAVMGFVATTTSIVYYHNIETSNFPKLLLALFLYWVMAFITKTIKLVKYCQSGLDISNLRFCITGMMVILNGLLMAVEINVIRVRRYVFFMNPQKVKPPEDLQDLGVRFLQPFVNLLSKATYWWMNTLIISAHKKPIDLKAIGKLPIAMRAVTNYVCLKDAYEEQKKKVADHPNRTPSIWLAMYRAFGRPILLSSTFRYLADLLGFAGPLCISGIVQRVNETQNGTNNTTGISETLSSKEFLENAYVLAVLLFLALILQRTFLQASYYVTIETGINLRGALLAMIYNKILRLSTSNLSMGEMTLGQINNLVAIETNQLMWFLFLCPNLWAMPVQIIMGVILLYNLLGSSALVGAAVIVLLAPIQYFIATKLAEAQKSTLDYSTERLKKTNEILKGIKLLKLYAWEHIFCKSVEETRMKELSSLKTFALYTSLSIFMNAAIPIAAVLATFVTHAYASGNNLKPAEAFASLSLFHILVTPLSLLFTVVRFAVKAIISVQKLNEFLLSDEIGDDSWRTGESSLPFESCKKHTGVVTNGYFSWGSGLATLSNIDIRIPTGQLTMIVGQVGCGKSSLLLAILGEMQTLEGKVHWSNVNESEPSFEATRSRNRYSVAYAAQKPWLLNATVEENITFGSPFNKQRYKAVTDACSLQPDIDLLPFGDQTEIGERGINLSGGQRQRICVARALYQNTNIVFLDDPFSALDIHLSDHLMQEGILKFLQDDKRTLVLVTHKLQYLTHADWIIAMKDGSVLREGTLKDIQTKDVELYEHWKTLMNRQDQELEKDMEADQTTLERKTLRRAMYSREAKAQMEDEDEEEEEEEDEDDNMSTVMRLRTKMPWKTCWRYLTSGGFFLLILMIFSKLLKHSVIVAIDYWLATWTSEYSINNTGKADQTYYVAGFSILCGAGIFLCLVTSLTVEWMGLTAAKNLHHNLLNKIILGPIRFFDTTPLGLILNRFSADTNIIDQHIPPTLESLTRSTLLCLSAIGMISYATPVFLVALLPLGVAFYFIQKYFRVASKDLQELDDSTQLPLLCHFSETAEGLTTIRAFRHETRFKQRMLELTDTNNIAYLFLSAANRWLEVRTDYLGACIVLTASIASISGSSNSGLVGLGLLYALTITNYLNWVVRNLADLEVQMGAVKKVNSFLTMESENYEGTMDPSQVPEHWPQEGEIKIHDLCVRYENNLKPVLKHVKAYIKPGQKVGICGRTGSGKSSLSLAFFRMVDIFDGKIVIDGIDISKLPLHTLRSRLSIILQDPILFSGSIRFNLDPECKCTDDRLWEALEIAQLKNMVKSLPGGLDAVVTEGGENFSVGQRQLFCLARAFVRKSSILIMDEATASIDMATENILQKVVMTAFADRTVVTMAHRVSSIMDAGLVLVFSEGILVECDTVPNLFAHKNGPFSTLVMTNK

SEQ ID NO: 9478 - protein, 1549 aa, Homo sapiens
MSLSFCGNNISSYNINDGVLQNSCFVDALNLVPHVFLLFITFPILFIGWGSQSSKVQIHHNTWLHFPGHNLRWILTFALLFVHVCEIAEGIVSDSRRESRHLHLFMPAVMGFVATTTSIVYYHNIETSNFPKLLLALFLYWVMAFITKTIKLVKYCQSGLDISNLRFCITGMMVILNGLLMAVEINVIRVRRYVFFMNPQKVKPPEDLQDLGVRFLQPFVNLLSKATYWWMNTLIISAHKKPIDLKAIGKLPIAMRAVTNYVCLKDAYEEQKKKVADHPNRTPSIWLAMYRAFGRPILLSSTFRYLADLLGFAGPLCISGIVQRVNETQNGTNNTTGISETLSSKEFLENAYVLAVLLFLALILQRTFLQASYYVTIETGINLRGALLAMIYNKILRLSTSNLSMGEMTLGQINNLVAIETNQLMWFLFLCPNLWAMPVQIIMGVILLYNLLGSSALVGAAVIVLLAPIQYFIATKLAEAQKSTLDYSTERLKKTNEILKGIKLLKLYAWEHIFCKSVEETRMKELSSLKTFALYTSLSIFMNAAIPIAAVLATFVTHAYASGNNLKPAEAFASLSLFHILVTPLSLLFTVVRFAVKAIISVQKLNEFLLSDEIGDDSWRTGESSLPFESCKKHTGVQPKTINRKQPGRYHLDSYEQSTRRLRPAETEDIAIKVTNGYFSWGSGLATLSNIDIRIPTGQLTMIVGQVGCGKSSLLLAILGEMQTLEGKVHWSNVNESEPSFEATRSRNRYSVAYAAQKPWLLNATVEENITFGSPFNKQRYKAVTDACSLQPDIDLLPFGDQTEIGERGINLSGGQRQRICVARALYQNTNIVFLDDPFSALDIHLSDHLMQEGILKFLQDDKRTLVLVTHKLQYLTHADWIIAMKDGSVLREGTLKDIQTKDVELYEHWKTLMNRQDQELEKDMEADQTTLERKTLRRAMYSREAKAQMEDEDEEEEEEEDEDDNMSTVMRLRTKMPWKTCWRYLTSGGFFLLILMIFSKLLKHSVIVAIDYWLATWTSEYSINNTGKADQTYYVAGFSILCGAGIFLCLVTSLTVEWMGLTAAKNLHHNLLNKIILGPIRFFDTTPLGLILNRFSADTNIIDQHIPPTLESLTRSTLLCLSAIGMISYATPVFLVALLPLGVAFYFIQKYFRVASKDLQELDDSTQLPLLCHFSETAEGLTTIRAFRHETRFKQRMLELTDTNNIAYLFLSAANRWLEVRTDYLGACIVLTASIASISGSSNSGLVGLGLLYALTITNYLNWVVRNLADLEVQMGAVKKVNSFLTMESENYEGTMDPSQVPEHWPQEGEIKIHDLCVRYENNLKPVLKHVKAYIKPGQKVGICGRTGSGKSSLSLAFFRMVDIFDGKIVIDGIDISKLPLHTLRSRLSIILQDPILFSGSIRFNLDPECKCTDDRLWEALEIAQLKNMVKSLPGGLDAVVTEGGENFSVGQRQLFCLARAFVRKSSILIMDEATASIDMATENILQKVVMTAFADRTVVTMAHRVSSIMDAGLVLVFSEGILVECDTVPNLFAHKNGPFSTLVMTNK

SEQ ID NO: 9479 - protein, 1549 aa, Homo sapiens
MSLSFCGNNISSYNINDGVLQNSCFVDALNLVPHVFLLFITFPILFIGWGSQSSKVQIHHNTWLHFPGHNLRWILTFALLFVHVCEIAEGIVSDSRRESRHLHLFMPAVMGFVATTTSIVYYHNIETSNFPKLLLALFLYWVMAFITKTIKLVKYCQSGLDISNLRFCITGMMVILNGLLMAVEINVIRVRRYVFFMNPQKVKPPEDLQDLGVRFLQPFVNLLSKATYWWMNTLIISAHKKPIDLKAIGKLPIAMRAVTNYVCLKDAYEEQKKKVADHPNRTPSIWLAMYRAFGRPILLSSTFRYLADLLGFAGPLCISGIVQRVNETQNGTNNTTGISETLSSKEFLENAYVLAVLLFLALILQRTFLQASYYVTIETGINLRGALLAMIYNKILRLSTSNLSMGEMTLGQINNLVAIETNQLMWFLFLCPNLWAMPVQIIMGVILLYNLLGSSALVGAAVIVLLAPIQYFIATKLAEAQKSTLDYSTERLKKTNEILKGIKLLKLYAWEHIFCKSVEETRMKELSSLKTFALYTSLSIFMNAAIPIAAVLATFVTHAYASGNNLKPAEAFASLSLFHILVTPLSLLFTVVRFAVKAIISVQKLNEFLLSDEIGDDSWRTGESSLPFESCKKHTGVQPKTINRKQPGRYHLDSYEQSTRRLRPAETEDIAIKVTNGYFSWGSGLATLSNIDIRIPTGQLTMIVGQVGCGKSSLLLAILGEMQTLEGKVHWSNVNESEPSFEATRSRNRYSVAYAAQKPWLLNATVEENITFGSPFNKQRYKAVTDACSLQPDIDLLPFGDQTEIGERGINLSGGQRQRICVARALYQNTNIVFLDDPFSALDIHLSDHLMQEGILKFLQDDKRTLVLVTHKLQYLTHADWIIAMKDGSVLREGTLKDIQTKDVELYEHWKTLMNRQDQELEKDMEADQTTLERKTLRRAMYSREAKAQMEDEDEEEEEEEDEDDNMSTVMRLRTKMPWKTCWRYLTSGGFFLLILMIFSKLLKHSVIVAIDYWLATWTSEYSINNTGKADQTYYVAGFSILCGAGIFLCLVTSLTVEWMGLTAAKNLHHNLLNKIILGPIRFFDTTPLGLILNRFSADTNIIDQHIPPTLESLTRSTLLCLSAIGMISYATPVFLVALLPLGVAFYFIQKYFRVASKDLQELDDSTQLPLLCHFSETAEGLTTIRAFRHETRFKQRMLELTDTNNIAYLFLSAANRWLEVRTDYLGACIVLTASIASISGSSNSGLVGLGLLYALTITNYLNWVVRNLADLEVQMGAVKKVNSFLTMESENYEGTMDPSQVPEHWPQEGEIKIHDLCVRYENNLKPVLKHVKAYIKPGQKVGICGRTGSGKSSLSLAFFRMVDIFDGKIVIDGIDISKLPLHTLRSRLSIILQDPILFSGSIRFNLDPECKCTDDRLWEALEIAQLKNMVKSLPGGLDAVVTEGGENFSVGQRQLFCLARAFVRKSSILIMDEATASIDMATENILQKVVMTAFADRTVVTMAHRVHTILTADLVIVMKRGNILEYDTPESLLAQENGVFASFVRADM

SEQ ID NO: 9480 - protein, 685 aa, Homo sapiens
MAEDKSKRDSIEMSMKGCQTNNGFVHNEDILEQTPDPGSSTDNLKHSTRGILGSQEPDFKGVQPYAGMPKEVLFQFSGQARYRIPREILFWLTVASVLVLIAATIAIIALSPKCLDWWQEGPMYQIYPRSFKDSNKDGNGDLKGIQDKLDYITALNIKTVWITSFYKSSLKDFRYGVEDFREVDPIFGTMEDFENLVAAIHDKGLKLIIDFIPNHTSDKHIWFQLSRTRTGKYTDYYIWHDCTHENGKTIPPNNWLSVYGNSSWHFDEVRNQCYFHQFMKEQPDLNFRNPDVQEEIKEILRFWLTKGVDGFSLDAVKFLLEAKHLRDEIQVNKTQIPDTVTQYSELYHDFTTTQVGMHDIVRSFRQTMDQYSTEPGRYRFMGTEAYAESIDRTVMYYGLPFIQEADFPFNNYLSMLDTVSGNSVYEVITSWMENMPEGKWPNWMIGGPDSSRLTSRLGNQYVNVMNMLLFTLPGTPITYYGEEIGMGNIVAANLNESYDINTLRSKSPMQWDNSSNAGFSEASNTWLPTNSDYHTVNVDVQKTQPRSALKLYQDLSLLHANELLLNRGWFCHLRNDSHYVVYTRELDGIDRIFIVVLNFGESTLLNLHNMISGLPAKIRIRLSTNSADKGSKVDTSGIFLDKGEGLIFEHNTKNLLHRQTAFRDRCFVSNRACYSSVLNILYTSC

SEQ ID NO: 9481 - protein, 1422 aa, Homo sapiens
MDPSMGVNSVTISVEGMTCNSCVWTIEQQIGKVNGVHHIKVSLEEKNATIIYDPKLQTPKTLQEAIDDMGFDAVIHNPDPLPVLTDTLFLTVTASLTLPWDHIQSTLLKTKGVTDIKIYPQKRTVAVTIIPSIVNANQIKELVPELSLDTGTLEKKSGACEDHSMAQAGEVVLKMKVEGMTCHSCTSTIEGKIGKLQGVQRIKVSLDNQEATIVYQPHLISVEEMKKQIEAMGFPAFVKKQPKYLKLGAIDVERLKNTPVKSSEGSQQRSPSYTNDSTATFIIDGMHCKSCVSNIESTLSALQYVSSIVVSLENRSAIVKYNASSVTPESLRKAIEAVSPGLYRVSITSEVESTSNSPSSSSLQKIPLNVVSQPLTQETVINIDGMTCNSCVQSIEGVISKKPGVKSIRVSLANSNGTVEYDPLLTSPETLRGAIEDMGFDATLSDTNEPLVVIAQPSSEMPLLTSTNEFYTKGMTPVQDKEEGKNSSKCYIQVTGMTCASCVANIERNLRREEGIYSILVALMAGKAEVRYNPAVIQPPMIAEFIRELGFGATVIENADEGDGVLELVVRGMTCASCVHKIESSLTKHRGILYCSVALATNKAHIKYDPEIIGPRDIIHTIESLGFEASLVKKDRSASHLDHKREIRQWRRSFLVSLFFCIPVMGLMTYMMVMDHHFATLHHNQNMSKEEMINLHSSMFLERQILPGLSVMNLLSFLLCVPVQGKTSEALAKLISLQATEATIVTLDSDNILLSEEQVDVELVQRGDIIKVVPGGKFPVDGRVIEGHSMVDESLITGEAMPVAKKPGSTVIAGSINQNGSLLICATHVGADTTLSQIVKLVEEAQTSKAPIQQFADKLSGYFVPFIVFVSIATLLVWIVIGFLNFEIVETYFPGYNRSISRTETIIRFAFQASITVLCIACPCSLGLATPTAVMVGTGVGAQNGILIKGGEPLEMAHKVKVVVFDKTGTITHGTPVVNQVKVLTESNRISHHKILAIVGTAESNSEHPLGTAITKYCKQELDTETLGTCIDFQVVPGCGISCKVTNIEGLLHKNNWNIEDNNIKNASLVQIDASNEQSSTSSSMIIDAQISNALNAQQHKVLIGNREWMIRNGLVINNDVNDFMTEHERKGRTAVLVAVDDELCGLIAIADTVKPEAELAIHILKSMGLEVVLMTGDNSKTARSIASQVGITKVFAEVLPSHKVAKVKQLQEEGKRVAMVGDGINDSPALAMANVGIAIGTGTDVAIEAADVVLIRNDLLDVVASIDLSRKTVKRIRINFVFALIYNLVGIPIAAGVFMPIGLVLQPWMGSAAMAASSVSVVLSSLFLKLYRKPTYESYELPARSQIGQKSPSEISVHVGIDDTSRNSPKLGLLDRIVNYSRASINSLLSDKRSLNSVVTSEPDKHSLLVGDFREDDDTAL

SEQ ID NO: 9482 - protein, 1500 aa, Homo sapiens
MDPSMGVNSVTISVEGMTCNSCVWTIEQQIGKVNGVHHIKVSLEEKNATIIYDPKLQTPKTLQEAIDDMGFDAVIHNPDPLPVLTDTLFLTVTASLTLPWDHIQSTLLKTKGVTDIKIYPQKRTVAVTIIPSIVNANQIKELVPELSLDTGTLEKKSGACEDHSMAQAGEVVLKMKVEGMTCHSCTSTIEGKIGKLQGVQRIKVSLDNQEATIVYQPHLISVEEMKKQIEAMGFPAFVKKQPKYLKLGAIDVERLKNTPVKSSEGSQQRSPSYTNDSTATFIIDGMHCKSCVSNIESTLSALQYVSSIVVSLENRSAIVKYNASSVTPESLRKAIEAVSPGLYRVSITSEVESTSNSPSSSSLQKIPLNVVSQPLTQETVINIDGMTCNSCVQSIEGVISKKPGVKSIRVSLANSNGTVEYDPLLTSPETLRGAIEDMGFDATLSDTNEPLVVIAQPSSEMPLLTSTNEFYTKGMTPVQDKEEGKNSSKCYIQVTGMTCASCVANIERNLRREEGIYSILVALMAGKAEVRYNPAVIQPPMIAEFIRELGFGATVIENADEGDGVLELVVRGMTCASCVHKIESSLTKHRGILYCSVALATNKAHIKYDPEIIGPRDIIHTIESLGFEASLVKKDRSASHLDHKREIRQWRRSFLVSLFFCIPVMGLMTYMMVMDHHFATLHHNQNMSKEEMINLHSSMFLERQILPGLSVMNLLSFLLCVPVQFFGGWYFYIQAYKALKHKTANMDVLIVLATTIAFAYSLIILLVAMYERAKVNPITFFDTPPMLFVFIALGRWLEHIAKGKTSEALAKLISLQATEATIVTLDSDNILLSEEQVDVELVQRGDIIKVVPGGKFPVDGRVIEGHSMVDESLITGEAMPVAKKPGSTVIAGSINQNGSLLICATHVGADTTLSQIVKLVEEAQTSKAPIQQFADKLSGYFVPFIVFVSIATLLVWIVIGFLNFEIVETYFPGYNRSISRTETIIRFAFQASITVLCIACPCSLGLATPTAVMVGTGVGAQNGILIKGGEPLEMAHKVKVVVFDKTGTITHGTPVVNQVKVLTESNRISHHKILAIVGTAESNSEHPLGTAITKYCKQELDTETLGTCIDFQVVPGCGISCKVTNIEGLLHKNNWNIEDNNIKNASLVQIDASNEQSSTSSSMIIDAQISNALNAQQHKVLIGNREWMIRNGLVINNDVNDFMTEHERKGRTAVLVAVDDELCGLIAIADTVKPEAELAIHILKSMGLEVVLMTGDNSKTARSIASQVGITKVFAEVLPSHKVAKVKQLQEEGKRVAMVGDGINDSPALAMANVGIAIGTGTDVAIEAADVVLIRNDLLDVVASIDLSRKTVKRIRINFVFALIYNLVGIPIAAGVFMPIGLVLQPWMGSAAMAASSVSVVLSSLFLKLYRKPTYESYELPARSQIGQKSPSEISVHVGIDDTSRNSPKLGLLDRIVNYSRASINSLLSDKRSLNSVVTSEPDKHSLLVGDFREDDDTAL

SEQ ID NO: 9483 - protein, 1581 aa, Homo sapiens [sequence omitted]

SEQ ID NO: 9484 - protein, 1514 aa, Homo sapiens
MRKLSIRKRDNNLLKDPSMGVNSVTISVEGMTCNSCVWTIEQQIGKVNGVHHIKVSLEEKNATIIYDPKLQTPKTLQEAIDDMGFDAVIHNPDPLPVLTDTLFLTVTASLTLPWDHIQSTLLKTKGVTDIKIYPQKRTVAVTIIPSIVNANQIKELVPELSLDTGTLEKKSGACEDHSMAQAGEVVLKMKVEGMTCHSCTSTIEGKIGKLQGVQRIKVSLDNQEATIVYQPHLISVEEMKKQIEAMGFPAFVKKQPKYLKLGAIDVERLKNTPVKSSEGSQQRSPSYTNDSTATFIIDGMHCKSCVSNIESTLSALQYVSSIVVSLENRSAIVKYNASSVTPESLRKAIEAVSPGLYRVSITSEVESTSNSPSSSSLQKIPLNVVSQPLTQETVINIDGMTCNSCVQSIEGVISKKPGVKSIRVSLANSNGTVEYDPLLTSPETLRGAIEDMGFDATLSDTNEPLVVIAQPSSEMPLLTSTNEFYTKGMTPVQDKEEGKNSSKCYIQVTGMTCASCVANIERNLRREEGIYSILVALMAGKAEVRYNPAVIQPPMIAEFIRELGFGATVIENADEGDGVLELVVRGMTCASCVHKIESSLTKHRGILYCSVALATNKAHIKYDPEIIGPRDIIHTIESLGFEASLVKKDRSASHLDHKREIRQWRRSFLVSLFFCIPVMGLMTYMMVMDHHFATLHHNQNMSKEEMINLHSSMFLERQILPGLSVMNLLSFLLCVPVQFFGGWYFYIQAYKALKHKTANMDVLIVLATTIAFAYSLIILLVAMYERAKVNPITFFDTPPMLFVFIALGRWLEHIAKGKTSEALAKLISLQATEATIVTLDSDNILLSEEQVDVELVQRGDIIKVVPGGKFPVDGRVIEGHSMVDESLITGEAMPVAKKPGSTVIAGSINQNGSLLICATHVGADTTLSQIVKLVEEAQTSKAPIQQFADKLSGYFVPFIVFVSIATLLVWIVIGFLNFEIVETYFPGYNRSISRTETIIRFAFQASITVLCIACPCSLGLATPTAVMVGTGVGAQNGILIKGGEPLEMAHKVKVVVFDKTGTITHGTPVVNQVKVLTESNRISHHKILAIVGTAESNSEHPLGTAITKYCKQELDTETLGTCIDFQVVPGCGISCKVTNIEGLLHKNNWNIEDNNIKNASLVQIDASNEQSSTSSSMIIDAQISNALNAQQHKVLIGNREWMIRNGLVINNDVNDFMTEHERKGRTAVLVAVDDELCGLIAIADTVKPEAELAIHILKSMGLEVVLMTGDNSKTARSIASQVGITKVFAEVLPSHKVAKVKQLQEEGKRVAMVGDGINDSPALAMANVGIAIGTGTDVAIEAADVVLIRNDLLDVVASIDLSRKTVKRIRINFVFALIYNLVGIPIAAGVFMPIGLVLQPWMGSAAMAASSVSVVLSSLFLKLYRKPTYESYELPARSQIGQKSPSEISVHVGIDDTSRNSPKLGLLDRIVNYSRASINSLLSDKRSLNSVVTSEPDKHSLLVGDFREDDDTAL

SEQ ID NO: 9485 - protein, 502 aa, Homo sapiens
MPVRRGHVAPQNTYLDTIIRKFEGQSRKFLIANAQMENCAIIYCNDGFCELFGYSRVEVMQQPCTCDFLTGPNTPSSAVSRLAQALLGAEECKVDILYYRKDASSFRCLVDVVPVKNEDGAVIMFILNFEDLAQLLAKCSSRSLSQRLLSQSFLGSEGSHGRPGGPGPGTGRGKYRTISQIPQFTLNFVEFNLEKHRSSSTTEIEIIAPHKVVERTQNVTEKVTQVLSLGADVLPEYKLQAPRIHRWTILHYSPFKAVWDWLILLLVIYTAVFTPYSAAFLLSDQDESRRGACSYTCSPLTVVDLIVDIMFVVDIVINFRTTYVNTNDEVVSHPRRIAVHYFKGWFLIDMVAAIPFDLLIFRTGSDETTTLIGLLKTARLLRLVRVARKLDRYSEYGAAVLFLLMCTFALIAHWLACIWYAIGNVERPYLEHKIGWLDSLGVQLGKRYNGSDPASGPSVQDKYVTALYFTFSSLTSVGFGNVSPNTNSEKVFSICVMLIGCE

SEQ ID NO: 9486 - protein, 994 aa, Homo sapiens
MPVRRGHVAPQNTYLDTIIRKFEGQSRKFLIANAQMENCAIIYCNDGFCELFGYSRVEVMQQPCTCDFLTGPNTPSSAVSRLAQALLGAEECKVDILYYRKDASSFRCLVDVVPVKNEDGAVIMFILNFEDLAQLLAKCSSRSLSQRLLSQSFLGSEGSHGRPGGPGPGTGRGKYRTISQIPQFTLNFVEFNLEKHRSSSTTEIEIIAPHKVVERTQNVTEKVTQVLSLGADVLPEYKLQAPRIHRWTILHYSPFKAVWDWLILLLVIYTAVFTPYSAAFLLSDQDESRRGACSYTCSPLTVVDLIVDIMFVVDIVINFRTTYVNTNDEVVSHPRRIAVHYFKGWFLIDMVAAIPFDLLIFRTGSDETTTLIGLLKTARLLRLVRVARKLDRYSEYGAAVLFLLMCTFALIAHWLACIWYAIGNVERPYLEHKIGWLDSLGVQLGKRYNGSDPASGPSVQDKYVTALYFTFSSLTSVGFGNVSPNTNSEKVFSICVMLIGSLMYASIFGNVSAIIQRLYSGTARYHTQMLRVKEFIRFHQIPNPLRQRLEEYFQHAWSYTNGIDMNAVLKGFPECLQADICLHLHRALLQHCPAFSGAGKGCLRALAVKFKTTHAPPGDTLVHLGDVLSTLYFISRGSIEILRDDVVVAILGKNDIFGEPVSLHAQPGKSSADVRALTYCDLHKIQRADLLEVLDMYPAFAESFWSKLEVTFNLRDAAGGLHSSPRQAPGSQDHQGFFLSDNQSGSPHELGPQFPSKGYSLLGPGSQNSMGAGPCAPGHPDAAPPLSISDASGLWPELLQEMPPRHSPQSPQEDPDCWPLKLGSRLEQLQAQMNRLESRVSSDLSRILQLLQKPMPQGHASYILEAPASNDLALVPIASETTSPGPRLPQGFLPPAQTPSYGDLDDCSPKHRNSSPRMPHLAVATDKTLAPSSEQEQPEGLWPPLASPLHPLEVQGLICGPCFSSLPEHLGSVPKQLDFQRHGSDPGFAGSWGH

SEQ ID NO: 9487 - protein, 3565 aa, Homo sapiens
MTAWRRFQSLLLLLGLLVLCARLLTAAKGQNCGGLVQGPNGTIESPGFPHGYPNYANCTWIIITGERNRIQLSFHTFALEENFDILSVYDGQPQQGNLKVRLSGFQLPSSIVSTGSILTLWFTTDFAVSAQGFKALYEVLPSHTCGNPGEILKGVLHGTRFNIGDKIRYSCLPGYILEGHAILTCIVSPGNGASWDFPAPFCRAEGACGGTLRGTSSSISSPHFPSEYENNADCTWTILAEPGDTIALVFTDFQLEEGYDFLEISGTEAPSIWLTGMNLPSPVISSKNWLRLHFTSDSNHRRKGFNAQFQVKKAIELKSRGVKMLPSKDGSHKNSVLSQGGVALVSHMCLDPGIPENGRRAGSDFSRVGANVQFSCEDNYVLQGSKSITCQRVTETLAAWSDHRPICRARTCGSNLRGPSGVITSPNYPVQYEDNAHCVWVITTTDPDKVIKLAFEEFELERGYDTLTVGDAGKVGDTRSVLYVLTGSSVPDLIVSMSNQMWLHLQSDDSIGSPGFKAVYQEIEKGGCGDPGIPAYGKRTGSSFLHGDTLTFECPAAFELVGERVITCQQNNQWSGNKPSCVFSCFFNFTASSGIILSPNYPEEYGNNMNCVWLIISEPGSRIHLIFNDFDVEPQFDFLAVKDDGISDITVLGTFSGNEVPSQLASSGHIVRLEFQSDHSTTGRGFNITYTTFGQNECHDPGIPINGRRFGDRFLLGSSVSFHCDDGFVKTQGSESITCILQDGNVVWSSTVPRCEAPCGGHLTASSGVILPPGWPGYYKDSLHCEWIIEAKPGHSIKMTFDRFQTEVNYDTLEVRDGPASSSPLIGEYHGTQAPQFLISTGNFMYLLFTTDNSRSSIGFLIHYESVTLESDSCLDPGIPVNGHRHGGDFGIRSTVTFSCDPGYTLSDDEPLVCERNHQWNHALPSCDALCGGYIQGKSGTVLSPGFPDFYPNSLNCTWTIEVSHGKGVQMIFHTFHLESSHDYLLITEDGSFSEPVARLTGSVLPHTIKAGLFGNFTAQLRFISDFSISYEGFNITFSEYDLEPCDDPGVPAFSRRIGFHFGVGDSLTFSCFLGYRLEGATKLTCLGGGRRVWSAPLPRCVAECGASVKGNEGTLLSPNFPSNYDNTHECIYKIETEAGKGIHLRTRSFQLFEGDTLKVYDGKDSSSRPLGTFTKNELLGLILNSTSNHLWLEFNTNGSDTDQGFQLTYTSFDLVKCEDPGIPNYGYRIRDEGHFTDTVVLYSCNPGYAMHGSNTLTCLSGDRRVWDKPLPSCIAECGGQIHAATSGRILSPGYPAPYDNNLHCTWIIEADPGKTISLHFIVFDTEMAHDILKVWDGPVDSDILLKEWSGSALPEDIHSTFNSLTLQFDSDFFISKSGFSIQFSTSIAATCNDPGMPQNGTRYGDSREAGDTVTFQCDPGYQLQGQAKITCVQLNNRFFWQPDPPTCIAACGGNLTGPAGVILSPNYPQPYPPGKECDWRVKVNPDFVIALIFKSFNMEPSYDFLHIYEGEDSNSPLIGSYQGSQAPERIESSGNSLFLAFRSDASVGLSGFAIEFKEKPREACFDPGNIMNGTRVGTDFKLGSTITYQCDSGYKILDPSSITCVIGADGKPSWDQVLPSCNAPCGGQYTGSEGVVLSPNYPHNYTAGQICLYSITVPKEFVVFGQFAYFQTALNDLAELFDGTHAQARLLSSLSGSHSGETLPLATSNQILLRFSAKSGASARGFHFVYQAVPRTSDTQCSSVPEPRYGRRIGSEFSAGSIVRFECNPGYLLQGSTALHCQSVPNALAQWNDTIPSCVVPCSGNFTQRRGTILSPGYPEPYGNNLNCIWKIIVTEGSGIQIQVISFATEQNWDSLEIHDGGDVTAPRLGSFSGTTVPALLNSTSNQLYLHFQSDISVAAAGFHLEYKTVGLAACQEPALPSNSIKIGDRYMVNDVLSFQCEPGYTLQGRSHISCMPGTVRRWNYPSPLCIATCGGTLSTLGGVILSPGFPGSYPNNLDCTWRISLPIGYGAHIQFLNFSTEANHDFLEIQNGPYHTSPMIGQFSGTDLPAALLSTTHETLIHFYSDHSQNRQGFKLAYQAYELQNCPDPPPFQNGYMINSDYSVGQSVSFECYPGYILIGHPVLTCQHGINRNWNYPFPRCDAPCGYNVTSQNGTIYSPGFPDEYPILKDCIWLITVPPGHGVYINFTLLQTEAVNDYIAVWDGPDQNSPQLGVFSGNTALETAYSSTNQVLLKFHSDFSNGGFFVLNFHAFQLKKCQPPPAVPQAEMLTEDDDFEIGDFVKYQCHPGYTLVGTDILTCKLSSQLQFEGSLPTCEAQCPANEVRTGSSGVILSPGYPGNYFNSQTCSWSIKVEPNYNITIFVDTFQSEKQFDALEVFDGSSGQSPLLVVLSGNHTEQSNFTSRSNQLYLRWSTDHATSKKGFKIRYAAPYCSLTHPLKNGGILNRTAGAVGSKVHYFCKPGYRMVGHSNATCRRNPLGMYQWDSLTPLCQAVSCGIPESPGNGSFTGNEFTLDSKVVYECHEGFKLESSQQATAVCQEDGLWSNKGKPPMCKPVACPSIEAQLSEHVIWRLVSGSLNEYGAQVLLSCSPGYYLEGWRLLRCQANGTWNIGDERPSCRVISCGSLSFPPNGNKIGTLTVYGATAIFTCNTGYTLVGSHVRECLANGLWSGSETRCLAGHCGSPDPIVNGHISGDGFSYRDTVVYQCNPGFRLVGTSVRICLQDHKWSGQTPVCVPITCGHPGNPAHGFTNGSEFNLNDVVNFTCNTGYLLQGVSRAQCRSNGQWSSPLPTCRVVNCSDPGFVENAIRHGQQNFPESFEYGMSILYHCKKGFHLLGSSALTCMANGLWDRSLPKCLAISCGHPGVPANAVLTGELFTYGAVVHYSCRGSESLIGNDTRVCQEDSHWSGALPHCTGNNPGFCGDPGTPAHGSRLGDDFKTKSLLRFSCEMGHQLRGSPERTCLLNGSWSGLQPVCEAVSCGNPGTPTNGMIVSSDGILFSSSVIYACWEGYKTSGLMTRHCTANGTWTGTAPDCTIISCGDPGTLANGIQFGTDFTFNKTVSYQCNPGYVMEAVTSATIRCTKDGRWNPSKPVCKAVLCPQPPPVQNGTVEGSDFRWGSSISYSCMDGYQLSHSAILSCEGRGVWKGEIPQCLPVFCGDPGIPAEGRLSGKSFTYKSEVFFQCKSPFILVGSSRRVCQADGTWSGIQPTCIDPAHNTCPDPGTPHFGIQNSSRGYEVGSTVFFRCRKGYHIQGSTTRTCLANLTWSGIQTECIPHACRQPETPAHADVRAIDLPTFGYTLVYTCHPGFFLAGGSEHRTCKADMKWTGKSPVCKSKGVREVNETVTKTPVPSDVFFVNSLWKGYYEYLGKRQPATLTVDWFNATSSKVNATFSEASPVELKLTGIYKKEEAHLLLKAFQIKGQADIFVSKFENDNWGLDGYVSSGLERGGFTFQGDIHGKDFGKFKLERQDPLNPDQDSSSHYHGTSSGSVAAAILVPFFALILSGFAFYLYKHRTRPKVQYNGYAGHENSNGQASFENPMYDTNLKPTEAKAVRFDTTLNTVCTVV

SEQ ID NO: 9488 - protein, 3388 aa, Homo sapiens
MTAWRRFQSLLLLLGLLVLCARLLTAAKGQNCGGLVQGPNGTIESPGFPHGYPNYANCTWIIITGERNRIQLSFHTFALEENFDILSVYDGQPQQGNLKVRLSGFQLPSSIVSTGSILTLWFTTDFAVSAQGFKALYEVLPSHTCGNPGEILKGVLHGTRFNIGDKIRYSCLPGYILEGHAILTCIVSPGNGASWDFPAPFCRAEGACGGTLRGTSSSISSPHFPSEYENNADCTWTILAEPGDTIALVFTDFQLEEGYDFLEISGTEAPSIWLTGMNLPSPVISSKNWLRLHFTSDSNHRRKGFNAQFQVKKAIELKSRGVKMLPSKDGSHKNSVLSQGGVALVSHMCLDPGIPENGRRAGSDFSRVGANVQFSCEDNYVLQGSKSITCQRVTETLAAWSDHRPICRARTCGSNLRGPSGVITSPNYPVQYEDNAHCVWVITTTDPDKVIKLAFEEFELERGYDTLTVGDAGKVGDTRSVLYVLTGSSVPDLIVSMSNQMWLHLQSDDSIGSPGFKAVYQEIEKGGCGDPGIPAYGKRTGSSFLHGDTLTFECPAAFELVGERVITCQQNNQWSGNKPSCVFSCFFNFTASSGIILSPNYPEEYGNNMNCVWLIISEPGSRIHLIFNDFDVEPQFDFLAVKDDGISDITVLGTFSGNEVPSQLASSGHIVRLEFQSDHSTTGRGFNITYTTFGQNECHDPGIPINGRRFGDRFLLGSSVSFHCDDGFVKTQGSESITCILQDGNVVWSSTVPRCEAPCGGHLTASSGVILPPGWPGYYKDSLHCEWIIEAKPGHSIKMTFDRFQTEVNYDTLEVRDGPASSSPLIGEYHGTQAPQFLISTGNFMYLLFTTDNSRSSIGFLIHYESVTLESDSCLDPGIPVNGHRHGGDFGIRSTVTFSCDPGYTLSDDEPLVCERNHQWNHALPSCDALCGGYIQGKSGTVLSPGFPDFYPNSLNCTWTIEVSHGKGVQMIFHTFHLESSHDYLLITEDGSFSEPVARLTGSVLPHTIKAGLFGNFTAQLRFISDFSISYEGFNITFSEYDLEPCDDPGVPAFSRRIGFHFGVGDSLTFSCFLGYRLEGATKLTCLGGGRRVWSAPLPRCVAECGASVKGNEGTLLSPNFPSNYDNTHECIYKIETEAGKGIHLRTRSFQLFEGDTLKVYDGKDSSSRPLGTFTKNELLGLILNSTSNHLWLEFNTNGSDTDQGFQLTYTSFDLVKCEDPGIPNYGYRIRDEGHFTDTVVLYSCNPGYAMHGSNTLTCLSGDRRVWDKPLPSCIAECGGQIHAATSGRILSPGYPAPYDNNLHCTWIIEADPGKTISLHFIVFDTEMAHDILKVWDGPVDSDILLKEWSGSALPEDIHSTFNSLTLQFDSDFFISKSGFSIQFSTSIAATCNDPGMPQNGTRYGDSREAGDTVTFQCDPGYQLQGQAKITCVQLNNRFFWQPDPPTCIAACGGNLTGPAGVILSPNYPQPYPPGKECDWRVKVNPDFVIALIFKSFNMEPSYDFLHIYEGEDSNSPLIGSYQGSQAPERIESSGNSLFLAFRSDASVGLSGFAIEFKEKPREACFDPGNIMNGTRVGTDFKLGSTITYQCDSGYKILDPSSITCVIGADGKPSWDQVLPSCNAPCGGQYTGSEGVVLSPNYPHNYTAGQICLYSITVPKEFVVFGQFAYFQTALNDLAELFDGTHAQARLLSSLSGSHSGETLPLATSNQILLRFSAKSGASARGFHFVYQAVPRTSDTQCSSVPEPRYGRRIGSEFSAGSIVRFECNPGYLLQGSTALHCQSVPNALAQWNDTIPSCVVPCSGNFTQRRGTILSPGYPEPYGNNLNCIWKIIVTEGSGIQIQVISFATEQNWDSLEIHDGGDVTAPRLGSFSGTTVPALLNSTSNQLYLHFQSDISVAAAGFHLEYKTVGLAACQEPALPSNSIKIGDRYMVNDVLSFQCEPGYTLQGRSHISCMPGTVRRWNYPSPLCIATCGGTLSTLGGVILSPGFPGSYPNNLDCTWRISLPIGYGAHIQFLNFSTEANHDFLEIQNGPYHTSPMIGQFSGTDLPAALLSTTHETLIHFYSDHSQNRQGFKLAYQAYELQNCPDPPPFQNGYMINSDYSVGQSVSFECYPGYILIGHPVLTCQHGINRNWNYPFPRCDAPCGYNVTSQNGTIYSPGFPDEYPILKDCIWLITVPPGHGVYINFTLLQTEAVNDYIAVWDGPDQNSPQLGVFSGNTALETAYSSTNQVLLKFHSDFSNGGFFVLNFHAFQLKKCQPPPAVPQAEMLTEDDDFEIGDFVKYQCHPGYTLVGTDILTCKLSSQLQFEGSLPTCEAQCPANEVRTGSSGVILSPGYPGNYFNSQTCSWSIKVEPNYNITIFVDTFQSEKQFDALEVFDGSSGQSPLLVVLSGNHTEQSNFTSRSNQLYLRWSTDHATSKKGFKIRYAAPYCSLTHPLKNGGILNRTAGAVGSKVHYFCKPGYRMVGHSNATCRRNPLGMYQWDSLTPLCQAVSCGIPESPGNGSFTGNEFTLDSKVVYECHEGFKLESSQQATAVCQEDGLWSNKGKPPMCKPVACPSIEAQLSEHVIWRLVSGSLNEYGAQVLLSCSPGYYLEGWRLLRCQANGTWNIGDERPSCRAGHCGSPDPIVNGHISGDGFSYRDTVVYQCNPGFRLVGTSVRICLQDHKWSGQTPVCVPITCGHPGNPAHGFTNGSEFNLNDVVNFTCNTGYLLQGVSRAQCRSNGQWSSPLPTCRVVNCSDPGFVENAIRHGQQNFPESFEYGMSILYHCKKGFHLLGSSALTCMANGLWDRSLPKCLAISCGHPGVPANAVLTGELFTYGAVVHYSCRGSESLIGNDTRVCQEDSHWSGALPHCTGNNPGFCGDPGTPAHGSRLGDDFKTKSLLRFSCEMGHQLRGSPERTCLLNGSWSGLQPVCEAVLCPQPPPVQNGTVEGSDFRWGSSISYSCMDGYQLSHSAILSCEGRGVWKGEIPQCLPVFCGDPGIPAEGRLSGKSFTYKSEVFFQCKSPFILVGSSRRVCQADGTWSGIQPTCIDPAHNTCPDPGTPHFGIQNSSRGYEVGSTVFFRCRKGYHIQGSTTRTCLANLTWSGIQTECIPHACRQPETPAHADVRAIDLPTFGYTLVYTCHPGFFLAGGSEHRTCKADMKWTGKSPVCKSKGVREVNETVTKTPVPSDVFFVNSLWKGYYEYLGKRQPATLTVDWFNATSSKVNATFSEASPVELKLTGIYKKEEAHLLLKAFQIKGQADIFVSKFENDNWGLDGYVSSGLERGGFTFQGDIHGKDFGKFKLERQDPLNPDQDSSSHYHGTSSGSVAAAILVPFFALILSGFAFYLYKHRTRPKVQYNGYAGHENSNGQASFENPMYDTNLKPTEAKAVRFDTTLNTVCTVV

SEQ ID NO: 9489 - protein, 427 aa, Homo sapiens
MGSVRTNRYSIVSSEEDGMKLATMAVANGFGNGKSKVHTRQQCRSRFVKKDGHCNVQFINVGEKGQRYLADIFTTCVDIRWRWMLVIFCLAFVLSWLFFGCVFWLIALLHGDLDASKEGKACVSEVNSFTAAFLFSIETQTTIGYGFRCVTDECPIAVFMVVFQSIVGCIIDAFIIGAVMAKMAKPKKRNETLVFSHNAVIAMRDGKLCLMWRVGNLRKSHLVEAHVRAQLLKSRITSEGEYIPLDQIDINVGFDSGIDRIFLVSPITIVHEIDEDSPLYDLSKQDIDNADFEIVVILEGMVEATAMTTQCRSSYLANEILWGHRYEPVLFEEKHYYKVDYSRFHKTYEVPNTPLCSARDLAEKKYILSNANSFCYENEVALTSKEEDDSENGVPESTSTDTPPDIDLHNQASVPLEPRPLRRESEI

SEQ ID NO: 9490 - protein, 698 aa, Homo sapiens
MQAHELFRYFRMPELVDFRQYVRTLPTNTLMGFGAFAALTTFWYATRPKPLKPPCDLSMQSVEVAGSGGARRSALLDSDEPLVYFYDDVTTLYEGFQRGIQVSNNGPCLGSRKPDQPYEWLSYKQVAELSECIGSALIQKGFKTAPDQFIGIFAQNRPEWVIIEQGCFAYSMVIVPLYDTLGNEAITYIVNKAELSLVFVDKPEKAKLLLEGVENKLIPGLKIIVVMDAYGSELVERGQRCGVEVTSMKAMEDLGRANRRKPKPPAPEDLAVICFTSGTTGNPKGAMVTHRNIVSDCSAFVKATENTVNPCPDDTLISFLPLAHMFERVVECVMLCHGAKIGFFQGDIRLLMDDLKVLQPTVFPVVPRLLNRMFDRIFGQANTTLKRWLLDFASKRKEAELRSGIIRNNSLWDRLIFHKVQSSLGGRVRLMVTGAAPVSATVLTFLRAALGCQFYEGYGQTECTAGCCLTMPGDWTAGHVGAPMPCNLIKLVDVEEMNYMAAEGEGEVCVKGPNVFQGYLKDPAKTAEALDKDGWLHTGDIGKWLPNGTLKIIDRKKHIFKLAQGEYIAPEKIENIYMRSEPVAQVFVHGESLQAFLIAIVVPDVETLCSWAQKRGFEGSFEELCRNKDVKKAILEDMVRLGKDSGLKPFEQVKGITLHPELFSIDNGLLTPTMKAKRPELRNYFRSQIDDLYSTIKV

SEQ ID NO: 9491 - protein, 797 aa, Homo sapiens
MAHRCLRLWGRGGCWPRGLQQLLVPGGVGPGEQPCLRTLYRFVTTQARASRNSLLTDIIAAYQRFCSRPPKGFGKYFPNGKNGKKASEPKEVMGEKKESKPAATTRSSGGGGGGGGKRGGKKDDSHWWSRFQKGDIPWDDKDFRMFFLWTALFWGGVMFYLLLKRSGREITWKDFVNNYLSKGVVDRLEVVNKRFVRVTFTPGKTPVDGQYVWFNIGSVDTFERNLETLQQELGIEGENRVPVVYIAESDGSFLLSMLPTVLIIAFLLYTIRRGPAGIGRTGRGMGGLFSVGETTAKVLKDEIDVKFKDVAGCEEAKLEIMEFVNFLKNPKQYQDLGAKIPKGAILTGPPGTGKTLLAKATAGEANVPFITVSGSEFLEMFVGVGPARVRDLFALARKNAPCILFIDEIDAVGRKRGRGNFGGQSEQENTLNQLLVEMDGFNTTTNVVILAGTNRPDILDPALLRPGRFDRQIFIGPPDIKGRASIFKVHLRPLKLDSTLEKDKLARKLASLTPGFSGADVANVCNEAALIAARHLSDSINQKHFEQAIERVIGGLEKKTQVLQPEEKKTVAYHEAGHAVAGWYLEHADPLLKVSIIPRGKGLGYAQYLPKEQYLYTKEQLLDRMCMTLGGRASEEIFFGRITTGAQDDLRKVTQSAYAQIVQFGMNEKVGQISFDLPRQGDMVLEKPYSEATARLIDDEVRILINDAYKRTVALLTEKKADVEKVALLLLEKEVLDKNDMVELLGPRPFAEKSTYEEFVEGTGSLDEDTSLPEGLKDWNKEREKEKEEPPGEKVAN

SEQ ID NO: 9492 - protein, 338 aa, Homo sapiens
MINSTSTQPPDESCSQNLLITQQIIPVLYCMVFIAGILLNGVSGWIFFYVPSSKSFIIYLKNIVIADFVMSLTFPFKILGDSGLGPWQLNVFVCRVSAVLFYVNMYVSIVFFGLISFDRYYKIVKPLWTSFIQSVSYSKLLSVIVWMLMLLLAVPNIILTNQSVREVTQIKCIELKSELGRKWHKASNYIFVAIFWIVFLLLIVFYTAITKKIFKSHLKSSRNSTSVKKKSSRNIFSIVFVFFVCFVPYHIARIPYTKSQTEAHYSCQSKEILRYMKEFTLLLSAANVCLDPIIYFFLCQPFREILCKKLHIPLKAQNDLDISRIKRGNTTLESTDTL

SEQ ID NO: 9493 - protein, 1474 aa, Homo sapiens
MARLAAVLWNLCVTAVLVTSATQGLSRAGLPFGLMRRELACEGYPIELRCPGSDVIMVENANYGRTDDKICDADPFQMENVQCYLPDAFKIMSQRCNNRTQCVVVAGSDAFPDPCPGTYKYLEVQYDCVPYKVEQKVFVCPGTLQKVLEPTSTHESEHQSGAWCKDPLQAGDRIYVMPWIPYRTDTLTEYASWEDYVAARHTTTYRLPNRVDGTGFVVYDGAVFYNKERTRNIVKYDLRTRIKSGETVINTANYHDTSPYRWGGKTDIDLAVDENGLWVIYATEGNNGRLVVSQLNPYTLRFEGTWETGYDKRSASNAFMVCGVLYVLRSVYVDDDSEAAGNRVDYAFNTNANREEPVSLTFPNPYQFISSVDYNPRDNQLYVWNNYFVVRYSLEFGPPDPSAGPATSPPLSTTTTARPTPLTSTASPAATTPLRRAPLTTHPVGAINQLGPDLPPATAPVPSTRRPPAPNLHVSPELFCEPREVRRVQWPATQQGMLVERPCPKGTRGIASFQCLPALGLWNPRGPDLSNCTSPWVNQVAQKIKSGENAANIASELARHTRGSIYAGDVSSSVKLMEQLLDILDAQLQALRPIERESAGKNYNKMHKRERTCKDYIKAVVETVDNLLRPEALESWKDMNATEQVHTATMLLDVLEEGAFLLADNVREPARFLAAKENVVLEVTVLNTEGQVQELVFPQEEYPRKNSIQLSAKTIKQNSRNGVVKVVFILYNNLGLFLSTENATVKLAGEAGPGGPGGASLVVNSQVIAASINKESSRVFLMDPVIFTVAHLEDKNHFNANCSFWNYSERSMLGYWSTQGCRLVESNKTHTTCACSHLTNFAVLMAHREIYQGRINELLLSVITWVGIVISLVCLAICISTFCFLRGLQTDRNTIHKNLCINLFLAELLFLVGIDKTQYEIACPIFAGLLHYFFLAAFSWLCLEGVHLYLLLVEVFESEYSRTKYYYLGGYCFPALVVGIAAAIDYRSYGTEKACWLRVDNYFIWSFIGPVSFVIVVNLVFLMVTLHKMIRSSSVLKPDSSRLDNIKSWALGAIALLFLLGLTWAFGLLFINKESVVMAYLFTTFNAFQGVFIFVFHCALQKKVHKEYSKCLRHSYCCIRSPPGGTHGSLKTSAMRSNTRYYTGTQSRIRRMWNDTVRKQTESSFMAGDINSTPTLNRGTMGNHLLTNPVLQPRGGTSPYNTLIAESVGFNPSSPPVFNSPGSYREPKHPLGGREACGMDTLPLNGNFNNSYSLRSGDFPPGDGGPEPPRGRNLADAAAFEKMIISELVHNNLRGSSSAAKGPPPPEPPVPPVPGGGGEEEAGGPGGADRAEIELLYKALEEPLLLPRAQSVLYQSDLDESESCTAEDGATSRPLSSPPGRDSLYASGANLRDSPSYPDSSPEGPSEALPPPPPAPPGPPEIYYTSRPPALVARNPLQGYYQVRRPSHEGYLAAPGLEGPGPDGDGQMQLVTSL

SEQ ID NO: 9494 - protein, 210 aa, Homo sapiens
MVCGGFACSKNALCALNVVYMLVSLLLIGVAAWGKGLGLVSSIHIIGGVIAVGVFLLLIAVAGLVGAVNHHQVLLFFYMIILGLVFIFQFVISCSCLAINRSKQTDVINASWWVMSNKTRDELERSFDCCGLFNLTTLYQQDYDFCTAICKSQSPTCQMCGEKFLKHSDEALKILGGVGLFFSFTEILGVWLAMRFRNQKDPRANPSAFL

SEQ ID NO: 9495 - protein, 3522 aa, Homo sapiens
MAVTGLSGQISSAPLDLPAIKLAYSTSHELCMVLVLLWREPPSLILSNPDAFMKGTNERQNGREADGLLEKELYAAEGEASLGPGPVQRHMKGEELRRRVSSAKIARSNQENQSEGRCRVLWKKSGDGQDRGKVTVTDGGPSPKQSTIWVVVQVLDENDNKPQFPEKVYQIKLPERDRKKRGEPIYRAFAFDRDEGPNAEISYSIVDGNDDGKFFIDPKTGMVSSRKQFTAGSYDILTIKAVDNGRPQKSSTARLHIEWIKKPPPSPIPLTFDEPFYNFTVMESDRVTEIVGVVSVQPANTPLWFDIVGGKHAREMFYILQTACGQNCSTEGGNFDSAFDAEKGVGTIVIAKPLDAEQRSIYNMSVEVTDGTNVAVTQVFIKVLDNNDNGPEFSQPNYDVTISEDVLPDTEILQIEATDRDEKHKLSYTVHSSIDSISMRKFRIDPSTGVLYTAERLDHEAQDKHILNIMVRDQEFPYRRNLARVIVNVEDANDHSPYFTNPLYEASVFESAALGSAVLQVTALDKDKGENAELIYTIEAGNTGNMFKIEPVLGIITICKEPDMTTMGQFVLSIKVTDQGSPPMSATAIVRISVTMSDNSHPKFIHKDYQAEVNENVDIGTSVILISAISQSTLIYEVKDGDINGIFTINPYSGVITTQKALDYERTSSYQLIIQATNMAGMASNATVNIQIVDENDNAPVFLFSQYSGSLSEAAPINSIVRSLDNSPLVIRATDADSNRNALLVYQIVESTAKKFFTVDSSTGAIRTIANLDHETIAHFHFHVHVRDSGSPQLTAESPVEVNIEVTDVNDNPPVFTQAVFETILLLPTYVGVEVLKVSATDPDSEVPPELTYSLMEGSLDHFLIDSNSGVLTIKNNNLSKDHYMLIVKVSDGKFYSTSMVTIMVKEAMDSGLHFTQSFYSTSISENNTNITKVAIVNAVGNRLNEPLKYSILNPGNKFKIKSTSGVIQTTGVPFDREEQELYELVVEASRELDHLRVARVVVRVNIEDINDNSPVFVGLPYYAAVQVDAEPGTLIYQVTAIDKDKGPNGEVTYVLQDDYGHFEINPNSGNVILKEAFNSDLSNIEYGVTILAKDGGKPSLSTSVELPITIVNKAMPVFDKPFYTASVNEDIRMNTPILSINATSPEGQGIIYIIIDGDPFKQFNIDFDTGVLKVVSPLDYEVTSAYKLTIRASDALTGARAEVTVDLLVNDVNDNPPIFDQPTYNTTLSEASLIGTPVLQVVSIDADSENNKMVHYQIVQDTYNSTDYFHIDSSSGLILTARMLDHELVQHCTLKVRSIDSGFPSLSSEVLVHIYISDVNDNPPVFNQLIYESYVSELAPRGHFVTCVQASDADSSDFDRLEYSILSGNDRTSFLMDSKSGVITLSNHRKQRMEPLYSLNVSVSDGLFTSTAQVHIRVLGANLYSPAFSQSTYVAEVRENVAAGTKVIHVRATDGDPGTYGQISYAIINDFAKDRFLIDSNGQVITTERLDRENPLEGDVSIFVRALDGGGRTTFCTVRVIVVDENDNAPQFMTVEYRASVRADVGRGHLVTQVQAIDPDDGANSRITYSLYSEASVSVADLLEIDPDNGWMVTKGNFNQLKNTVLSFFVKAVDGGIPVKHSLIPVYIHVLPPETFLPSFTQSQYSFTIAEDTAIGSTVDTLRILPSQNVWFSTVNGERPENNKGGIFVIEQETGTIKLDKRLDRETSPAFHFKVAATIPLDKVDIVFTVDVDIKVLDLNDNKPVFETSSYDTIIMEGMPVGTKLTQVRAIDMDWGANGQVTYSLHSDSQPEKVMEAFNIDSNTGWISTLKDLDHETDPTFTFSVVASDLGEAFSLSSTALVSVRVTDINDNAPVFAQEVYRGNVKESDPPGEVVAVLSTWDRDTSDVNRQVSYHITGGNPRGRFALGLVQSEWKVYVKRPLDREEQDIYFLNITATDGLFVTQAMVEVSVSDVNDNSPVCDQVAYTALLPEDIPSNKIILKVSAKDADIGSNGYIRYSLYGSGNSEFFLDPESGELKTLALLDRERIPVYSLMAKATDGGGRFCQSNIHLILEDVNDNPPVFSSDHYNTCVYENTATKALLTRVQAVDPDIGINRKVVYSLADSAGGVFSIDSSSGIIILEQPLDREQQSSYNISVRATDQSPGQSLSSLTTVTITVLDINDNPPVFERRDYLVTVPEDTSPGTQVLAVFATSKDIGTNAEITYLIRSGNEQGKFKINPKTGGISVSEVLDYELCKRFYLVVEAKDGGTPALSAVATVNINLTDVNDNPPKFSQDVYSAVISEDALVGDSVILLIAEDVDSQPNGQIHFSIVNGDRDNEFTVDPVLGLVKVKKKLDRERVSGYSLLVQAVDSGIPAMSSTATVNIDISDVNDNSPVFTPANYTAVIQENKPVGTSILQLVVTDRDSFHNGPPFSFSILSGNEEEEFVLDPHGILRSAVVFQHTESLEYVLCVQAKDSGKPQQVSHTYIRVRVIEESTHKPTAIPLEIFIVTMEDDFPGGVIGKIHATDQDMYDVLTFALKSEQKSLFKVNSHDGKIIALGGLDSGKYVLNVSVSDGRFQVPIDVVVHVEQLVHEMLQNTVTIRFENVSPEDFVGLHMHGFRRTLRNAVLTQKQDSLRIISIQPVAGTNQLDMLFAVEMHSSEFYKPAYLIQKLSNARRHLENIMRISAILEKNCSGLDCQEQHCEQGLSLDSHALMTYSTARISFVCPRFYRNVRCTCNGGLCPGSNDPCVEKPCPGDMQCVSYEASRRPFLCQCPPGKLGECSGHTSLSFAGNSYIKYRLSENSKEEDFKLALRLRTLQSNGIIMYTRANPCIILKIVDGKLWFQLDCGSGPGILGISGRAVNDGSWHSVFLELNRNFTSLSLDDSYVERRRAPLYFQTLSTESSIYFGALVQADNIRSLTDTRVTQVLSGFQGCLDSVILNNNELPLQNKRSSFAEVVGLTELKLGCVLYPDACKRSPCQHGGSCTGLPSGGYQCTCLSQFTGRNCESEITACFPNPCRNGGSCDPIGNTFICNCKAGLTGVTCEEDINECEREECENGGSCVNVFGSFLCNCTPGYVGQYCGLRPVVVPNIQAGHSYVGKEELIGIAVVLFVIFILVVLFIVFRKKVFRKNYSRNNITLVQDPATAALLNKSNGIPFRNLRGSGDGRNVYQEVGPPQVPVRPMAYTPCFQSDSRSNLDKIVDGLGGEHQEMTTFHPESPRILTARRGVVVCSVAPNLPAVSPCRSDCDSIRKNGWDAGTENKGVDDPGEVTCFAGSNKGSNSEVQSLSSFQSDSGDDNASIVTVIQLVNNVVDTIENEVSVMDQGQNYNRAYHWDTSDWMPGARLSDIEEVPNYENQDGGSAHQGSTRELESDYYLGGYDIDSEYPPPHEEEFLSQDQLPPPLPEDFPDQYEALPPSQPVSLASTLSPDCRRRPQFHPSQYLPPHPFPNETDLVGPPASCEFSTFAVSMNQGTEPTGPADSVSLSLHNSRGTSSSDVSANCGFDDSEVAMSDYESVGELSLASLHIPFVETQHQTQV

SEQ ID NO: 9496 - protein, 158 aa, Homo sapiens
MRKGTSIAWNSPKPEYFLGSVDKIPDKDHLSEEKNFKESCLFDRDLREQLTTIDKETLQGAAKPDAHFRTMPCGQLLHFLQRNTIIAAVSGVAILMAIVLLLLGLASYIRKKQPSSPLANTTYNIFIMDGKTWWHNSEEKNFTKLAKKQKQLKSSSCV

SEQ ID NO: 9497 - protein, 1229 aa, Homo sapiens
MGDMTNSDFYSKNQRNESSHGGEFGCTMEELRSLMELRGTEAVVKIKETYGDTEAICRRLKTSPVEGLPGTAPDLEKRKQIFGQNFIPPKKPKTFLQLVWEALQDVTLIILEIAAIISLGLSFYHPPGEGNEGCATAQGGAEDEGEAEAGWIEGAAILLSVICVVLVTAFNDWSKEKQFRGLQSRIEQEQKFTVVRAGQVVQIPVAEIVVGDIAQVKYGDLLPADGLFIQGNDLKIDESSLTGESDQVRKSVDKDPMLLSGTHVMEGSGRMLVTAVGVNSQTGIIFTLLGAGGEEEEKKDKKGVKKGDGLQLPAADGAAASNAADSANASLVNAKQQDGAAAMEMQPLKSAEGGDADDRKKASMHKKEKSVLQGKLTKLAVQIGKAGLVMSAITVIILVLYFTVDTFVVNKKPWLPECTPVYVQYFVKFFIIGVTVLVVAVPEGLPLAVTISLAYSVKKMMKDNNLVRHLDACETMGNATAICSDKTGTLTTNRMTVVQAYVGDVHYKEIPDPSSINTKTMELLINAIAINSAYTTKILPPEKEGALPRQVGNKTECGLLGFVLDLKQDYEPVRSQMPEEKLYKVYTFNSVRKSMSTVIKLPDESFRMYSKGASEIVLKKCCKILNGAGEPRVFRPRDRDEMVKKVIEPMACDGLRTICVAYRDFPSSPEPDWDNENDILNELTCICVVGIEDPVRPEVPEAIRKCQRAGITVRMVTGDNINTARAIAIKCGIIHPGEDFLCLEGKEFNRRIRNEKGEIEQERIDKIWPKLRVLARSSPTDKHTLVKGIIDSTHTEQRQVVAVTGDGTNDGPALKKADVGFAMGIAGTDVAKEASDIILTDDNFSSIVKAVMWGRNVYDSISKFLQFQLTVNVVAVIVAFTGACITQDSPLKAVQMLWVNLIMDTFASLALATEPPTETLLLRKPYGRNKPLISRTMMKNILGHAVYQLALIFTLLFVGEKMFQIDSGRNAPLHSPPSEHYTIIFNTFVMMQLFNEINARKIHGERNVFDGIFRNPIFCTIVLGTFAIQIVIVQFGGKPFSCSPLQLDQWMWCIFIGLGELVWGQVIATIPTSRLKFLKEAGRLTQKEEIPEEELNEDVEEIDHAERELRRGQILWFRGLNRIQTQIRVVKAFRSSLYEGLEKPESRTSIHNFMAHPEFRIEDSQPHIPLIDDTDLEEDAALKQNSSPPSSLNKNNSAIDSGINLTTDTSKSATSSSPGSPIHSLETSL

SEQ ID NO: 9498 - protein, 1198 aa, Homo sapiens
MGDMTNSDFYSKNQRNESSHGGEFGCTMEELRSLMELRGTEAVVKIKETYGDTEAICRRLKTSPVEGLPGTAPDLEKRKQIFGQNFIPPKKPKTFLQLVWEALQDVTLIILEIAAIISLGLSFYHPPGEGNEGCATAQGGAEDEGEAEAGWIEGAAILLSVICVVLVTAFNDWSKEKQFRGLQSRIEQEQKFTVVRAGQVVQIPVAEIVVGDIAQVKYGDLLPADGLFIQGNDLKIDESSLTGESDQVRKSVDKDPMLLSGTHVMEGSGRMLVTAVGVNSQTGIIFTLLGAGGEEEEKKDKKAKQQDGAAAMEMQPLKSAEGGDADDRKKASMHKKEKSVLQGKLTKLAVQIGKAGLVMSAITVIILVLYFTVDTFVVNKKPWLPECTPVYVQYFVKFFIIGVTVLVVAVPEGLPLAVTISLAYSVKKMMKDNNLVRHLDACETMGNATAICSDKTGTLTTNRMTVVQAYVGDVHYKEIPDPSSINTKTMELLINAIAINSAYTTKILPPEKEGALPRQVGNKTECGLLGFVLDLKQDYEPVRSQMPEEKLYKVYTFNSVRKSMSTVIKLPDESFRMYSKGASEIVLKKCCKILNGAGEPRVFRPRDRDEMVKKVIEPMACDGLRTICVAYRDFPSSPEPDWDNENDILNELTCICVVGIEDPVRPEVPEAIRKCQRAGITVRMVTGDNINTARAIAIKCGIIHPGEDFLCLEGKEFNRRIRNEKGEIEQERIDKIWPKLRVLARSSPTDKHTLVKGIIDSTHTEQRQVVAVTGDGTNDGPALKKADVGFAMGIAGTDVAKEASDIILTDDNFSSIVKAVMWGRNVYDSISKFLQFQLTVNVVAVIVAFTGACITQDSPLKAVQMLWVNLIMDTFASLALATEPPTETLLLRKPYGRNKPLISRTMMKNILGHAVYQLALIFTLLFVGEKMFQIDSGRNAPLHSPPSEHYTIIFNTFVMMQLFNEINARKIHGERNVFDGIFRNPIFCTIVLGTFAIQIVIVQFGGKPFSCSPLQLDQWMWCIFIGLGELVWGQVIATIPTSRLKFLKEAGRLTQKEEIPEEELNEDVEEIDHAERELRRGQILWFRGLNRIQTQIRVVKAFRSSLYEGLEKPESRTSIHNFMAHPEFRIEDSQPHIPLIDDTDLEEDAALKQNSSPPSSLNKNNSAIDSGINLTTDTSKSATSSSPGSPIHSLETSL

SEQ ID NO: 9499 - protein, 694 aa, Homo sapiens [sequence omitted]

SEQ ID NO: 9500 - protein, 403 aa, Homo sapiens
MGAEFTKNNGRGKCEPGTEVLEEGEGCWEPGYPLVLGQSTAITHLNIQKRSAEEMALTPTNLNNKMSLQMKMDCQEQQLTKKNNGFFQKLNVTEGAMQDLLKEIIKVDHILDRSDDEDDISSENPQTDFLHKVDTEKWGMLELEAEHDQDLSKQDKQETDVDEDPQASTSLQFSKKNLLELCLKGMFLKLNYWNTKIGLQVKELGADYIDGTEKIDNIIKKINVTENTVKSLLKDMLTLKGQIEKLEDRGLDLDQGTSTEVNTCNEVYELKKKVIERLEDLCKNVELLSAKLRMYQMEAEDTDSHSSEEIDTEEMEALLPQAPASFLVQKSPPRNTAWKRALRIFIMFDVLTVTGLLCYILFFGATFLFERVLLRMLGCRTTWDLREMREPFLNLEVEALLPS

SEQ ID NO: 9501 - protein, 760 aa, Homo sapiens [sequence omitted]

SEQ ID NO: 9502 - protein, 107 aa, Homo sapiens
MNDLLDKFYTYKVQILHLALIYFLVFIFLTIHRLLNLLAFCFFWIPQALFKNWTAALFTGNLLLARDRNLFTVVLLVPGPYNELCMKACAACCLESLRSWSFSLTAK

SEQ ID NO: 9503 - protein, 471 aa, Homo sapiens
MDILCEENTSLSSTTNSLMQLNDDTRLYSNDFNSGEANTSDAFNWTVDSENRTNLSCEGCLSPSCLSLLHLQEKNWSALLTAVVIILTIAGNILVIMAVSLEKKLQNATNYFLMSLAIADMLLGFLVMPVSMLTILYGYRWPLPSKLCAVWIYLDVLFSTASIMHLCAISLDRYVAIQNPIHHSRFNSRTKAFLKIIAVWTISVGISMPIPVFGLQDDSKVFKEGSCLLADDNFVLIGSFVSFFIPLTIMVITYFLTIKSLQKEATLCVSDLGTRAKLASFSFLPQSSLSSEKLFQRSIHREPGSYTGRRTMQSISNEQKACKVLGIVFFLFVVMWCPFFITNIMAVICKESCNEDVIGALLNVFVWIGYLSSAVNPLVYTLFNKTYRSAFSRYIQCQYKENKKPLQLILVNTIPALAYKSSQLQMGQKKNSKQDAKTTDNDCSMVALGKQHSEEASKDNSDGVNEKVSCV

SEQ ID NO: 9504 - protein, 645 aa, Homo sapiens
MNMKQKSVYQQTKALLCKNFLKKWRMKRESLLEWGLSILLGLCIALFSSSMRNVQFPGMAPQNLGRVDKFNSSSLMVVYTPISNLTQQIMNKTALAPLLKGTSVIGAPNKTHMDEILLENLPYAMGIIFNETFSYKLIFFQGYNSPLWKEDFSAHCWDGYGEFSCTLTKYWNRGFVALQTAINTAIIEITTNHPVMEELMSVTAITMKTLPFITKNLLHNEMFILFFLLHFSPLVYFISLNVTKERKKSKNLMKMMGLQDSAFWLSWGLIYAGFIFIISIFVTIIITFTQIIVMTGFMVIFILFFLYGLSLVALVFLMSVLLKKAVLTNLVVFLLTLFWGCLGFTVFYEQLPSSLEWILNICSPFAFTTGMIQIIKLDYNLNGVIFPDPSGDSYTMIATFSMLLLDGLIYLLLALYFDKILPYGDERHYSPLFFLNSSSCFQHQRTNAKVIEKEIDAEHPSDDYFEPVAPEFQGKEAIRIRNVKKEYKGKSGKVEALKGLLFDIYEGQITAILGHSGAGKSSLLNILNGLSVPTEGSVTIYNKNLSEMQDLEEIRKITGVCPQFNVQFDILTVKENLSLFAKIKGIHLKEVEQEVQRILLELDMQNIQDNLAKHLSEGQKRKLTFGITILGDPQWMRLTSWLIEK

SEQ ID NO: 9505 - protein, 594 aa, Homo sapiens
MFKNKTTCLRGSDTAALVPVPLATPLLLEGRSEPSTRACAVSGGQAALPGAPVRPAPDRAARCAPRAKRVGANAGARGQGRGAAAGPERPPHVQGRRSAPRGAVGARRALLGAVGKAGGLTRARETRRRGEEGVPAAGTPRWLQQEGATQVAVRLPLVSVRHDGPLPLSAVALGAPGLPTASSPAAAVTAAILRLPRRLAAEEYIFLHYLFVFIFLKGLYYSYFKTIVETPSFLNGVWMIMNDKLTEYPLVINTLKRFNLYPEVILASWYWIYTKIMDFIAIQTKICRTVTRGEGLSPTESCEGLGDLACFYVAVIFILNGLMMALFFIYGTYLSGSRLGGLVTVLCFFFSHGECTCVMWTPPLRESFSYPFLVLQMLLVTHILRATKLYRGSLIALCISNLFFMLPWQFAQFVLLTQGILAMKPHFLKINVSELSLWVIQGCFWLFGTVILKYLTSKIFGIADDGYIIMQINVVGLFPLGQYFLELLDFQMSAVYSGSDLIWKPPGTGISPSVPSSLLSLYLELPSWSHSTLPFTRMFRENPKGILPTPMAVVFLRLLEGRTLSAFLGFSSSLGPGEGQHYEKEGEWESHLLP

SEQ ID NO: 9506 - protein, 1797 aa, Homo sapiens
MDDRCYPVIFPDERNFRPFTSDSLAAIEKRIAIQKEKKKSKDQTGEVPQPRPQLDLKASRKLPKLYGDIPRELIGKPLEDLDPFYRNHKTFMVLNRKRTIYRFSAKHALFIFGPFNSIRSLAIRVSVHSYPFIAPFTNMFIIGTVIINCVFMATGPAKNSNSNNTDIAECVFTGIYIFEALIKILARGFILDEFSFLRDPWNWLDSIVIGIAIVSYIPGITIKLLPLRTFRVFRALKAISVVSRLKVIVGALLRSVKKLVNVIILTFFCLSIFALVGQQLFMGSLNLKCISRDCKNISNPEAYDHCFEKKENSPEFKMCGIWMGNSACSIQYECKHTKINPDYNYTNFDNFGWSFLAMFRLMTQDSWEKLYQQTLRTTGLYSVFFFIVVIFLGSFYLINLTLAVVTMAYEEQNKNVAAEIEAKEKMFQEAQQLLKEEKEALVAMGIDRSSLTSLETSYFTPKKRKLFGNKKRKSFFLRESGKDQPPGSDSDEDCQKKPQLLEQTKRLSQNLSLDHFDEHGDPLQRQRALSAVSILTITMKEQEKSQEPCLPCGENLASKYLVWNCCPQWLCVKKVLRTVMTDPFTELAITICIIINTVFLAMEHHKMEASFEKMLNIGNLVFTSIFIAEMCLKIIALDPYHYFRRGWNIFDSIVALLSFADVMNCVLQKRSWPFLRSFRVLRVFKLAKSWPTLNTLIKIIGNSVGALGSLTVVLVIVIFIFSVVGMQLFGRSFNSQKSPKLCNPTGPTVSCLRHWHMGDFWHSFLVVFRILCGEWIENMWECMQEANASSSLCVIVFILITVIGKLVVLNLFIALLLNSFSNEERNGNLEGEARKTKVQLALDRFRRAFCFVRHTLEHFCHKWCRKQNLPQQKEVAGGCAAQSKDIIPLVMEMKRGSETQEELGILTSVPKTLGVRHDWTWLAPLAEEEDDVEFSGEDNAQRITQPEPEQQAYELHQENKKPTSQRVQSVEIDMFSEDEPHLTIQDPRKKSDVTSILSECSTIDLQDGFGWLPEMVPKKQPERCLPKGFGCCFPCCSVDKRKPPWVIWWNLRKTCYQIVKHSWFESFIIFVILLSSGALIFEDVHLENQPKIQELLNCTDIIFTHIFILEMVLKWVAFGFGKYFTSAWCCLDFIIVIVSVTTLINLMELKSFRTLRALRPLRALSQFEGMKVVVNALIGAIPAILNVLLVCLIFWLVFCILGVYFFSGKFGKCINGTDSVINYTIITNKSQCESGNFSWINQKVNFDNVGNAYLALLQVATFKGWMDIIYAAVDSTEKEQQPEFESNSLGYIYFVVFIIFGSFFTLNLFIGVIIDNFNQQQKKISGQDIFMTEEQKKYYNAMKKLGSKKPQKPIPRPLNKCQGLVFDIVTSQIFDIIIISLIILNMISMMAESYNQPKAMKSILDHLNWVFVVIFTLECLIKIFALRQYYFTNGWNLFDCVVVLLSIVSTMISTLENQEHIPFPPTLFRIVRLARIGRILRLVRAARGIRTLLFALMMSLPSLFNIGLLLFLIMFIYAILGMNWFSKVNPESGIDDIFNFKTFASSMLCLFQISTSAGWDSLLSPMLRSKESCNSSSENCHLPGIATSYFVSYIIISFLIVVNMYIAVILENFNTATEESEDPLGEDDFDIFYEVWEKFDPEATQFIKYSALSDFADALPEPLRVAKPNKYQFLVMDLPMVSEDRLHCMDILFAFTARVLGGSDGLDSMKAMMEEKFMEANPLKKLYEPIVTTTKRKEEERGAAIIQKAFRKYMMKVTKGDQGDQNDLENGPHSPLQTLCNGDLSSFGVAKGKVHCD

SEQ ID NO: 9507 - protein, 959 aa, Homo sapiens
MTEYELLIQISDSVHYTEGALVVRVLDVNDNPPVFSQDFYQVTVPESIPVGYSVLTLSATDLESNENISYRILSSSKEFSIDPKNGTIFTISPVLLLDTISTTRFLVEASDGGNPDPRALTLVEIGIEDMNNYAPEFTVKSYNLSLSEDALVGSTLVTFSNIDHDWTRENTYVEYSIISGNSQNNFHVETKFFHSEYPYKQVGYLVLLHSLDREASASHELVILASDSGCPPLSSTAVISIQVLDVNDNPPNFSSLSYHTHVKESTPLGSHITVVSANDRDTGSHAEIIYNIISGNEKGHFYLEENTGVLYLIKPLDYEKMTKFTLTVQASDAEKKHFSFAVVFVSVLDDNDHAPQFMFSSFSCIVPENLPISSTICSINALDFDAGPYGELTYSIVSPCFLTHGMSYDHDLFLIDPLTGDIHAKQILDYENGNKYCLTVQAKDKGDATASLVVWVDIEGIDEFEPIFTQDQYFFTLPEKNKDRQLIGRVEASDADAGIDGVILYSLGTSSPFFSVNRTNGNIYLIRALPLIKSQLNKEDTLEMKIIAHSPKSDSKFASCTVFVNVSFSSEGTPLAVFASSFSISLVVSFLVFLILICILIVMILRHKQKDTINNYEEKKTSSLDADLRVTRDASVLKAFQKTDDCSNEVVPVDATPEWLSLISIMEKDIVNLYRYSNSSGHCSVEGETAEDKEIQRINEHPYRKCSDSALSDHESRVPDSGIPRDSDQLSCLSGETDVMVTAETAEASQTFGEGDQGEGCSTTCAQNNVLPQTVQKREAKESILADVRKESVFISGDQEVRCAALSTQTTSDHDGKDNYHWNYLLSWEPKFQPLASVFNDIAKLKDEHLHMPGIPKEKKSFVFPPPLITAVAQPGIKAVPPRMPAVNLGQVPPKHPRSPIPYHLGSLPEGMTPNFSPSLSLLTMQPPALSPLLREGELLGTHISGTCHELKAEDEVQI

SEQ ID NO: 9508 - protein, 434 aa, Homo sapiens
VLAAQPRRRPGTPVLCAKPWPRGPGHGPGARGEAASRGAVTGRASAMKTLIAAYSGVLRGERQAEADRSQRSHGGPALSREGSGRWGTGSSILSALQDLFSVTWLNRSKVEKQLQVISVLQWVLSFLVLGVACSAILMYIFCTDCWLIAVLYFTWLVFDWNTPKKGGRRSQWVRNWAVWRYFRDYFPIQLVKTHNLLTTRNYIFGYHPHGIMGLGAFCNFSTEATEVSKKFPGIRPYLATLAGNFRMPVLREYLMSGGICPVSRDTIDYLLSKNGSGNAIIIVVGGAAESLSSMPGKNAVTLRNRKGFVKLALRHGADLVPIYSFGENEVYKQVIFEEGSWGRWVQKKFQKYIGFAPCIFHGRGLFSSDTWGLVPYSKPITTVVGEPITIPKLEHPTQQDIDLYHTMYMEALVKLFDKHKTKFGLPETEVLEVN

SEQ ID NO: 9509 - protein, 462 aa, Homo sapiens
MDNGMFSGFIMIKNLLLFCISMNLSSHFGFSQMPTSSVKDETNDNITIFTRILDGLLDGYDNRLRPGLGERITQVRTDIYVTSFGPVSDTEMEYTIDVFFRQSWKDERLRFKGPMQRLPLNNLLASKIWTPDTFFHNGKKSIAHNMTTPNKLLRLEDDGTLLYTMRLTISAECPMQLEDFPMDAHACPLKFGSYAYPNSEVVYVWTNGSTKSVVVAEDGSRLNQYHLMGQTVGTENISTSTGEYTIMTAHFHLKRKIGYFVIQTYLPCIMTVILSQVSFWLNRESVPARTVFGVTTVLTMTTLSISARNSLPKVAYATAMDWFIAVCYAFVFSALIEFATVNYFTKRGWAWDGKKALEAAKIKKKREVILNKSTNAFTTGKMSHPPNIPKEQTPAGTSNTTSVSVKPSEEKTSESKKTYNSISKIDKMSRIVFPVLFGTFNLVYWATYLNREPVIKGAASPK

SEQ ID NO: 9510 - protein, 728 aa, Homo sapiens
MCASVKYNIRGPALIPRMKTKHRIYYITLFSIVLLGLIATGMFQFWPHSIESSNDWNVEKRSIRDVPVVRLPADSPIPERGDLSCRMHTCFDVYRCGFNPKNKIKVYIYALKKYVDDFGVSVSNTISREYNELLMAISDSDYYTDDINRACLFVPSIDVLNQNTLRIKETAQAMAQLSRWDRGTNHLLFNMLPGGPPDYNTALDVPRDRALLAGGGFSTWTYRQGYDVSIPVYSPLSAEVDLPEKGPGPRQYFLLSSQVGLHPEYREDLEALQVKHGESVLVLDKCTNLSEGVLSVRKRCHKHQVFDYPQVLQEATFCVVLRGARLGQAVLSDVLQAGCVPVVIADSYILPFSEVLDWKRASVVVPEEKMSDVYSILQSIPQRQIEEMQRQLFMEPVRRENWSAANHQMNSLIWPREQWDSQIINDRIYPYAAISYEEWNDPPAVKWGSVSNPLFLPLIPPQSQGFTAIVLTYDRVESLFRVITEVSKVPSLSKLLVVWNNQNKNPPEDSLWPKIRVPLKVVRTAENKLSNRFFPYDEIETEAVLAIDDDIIMLTSDELQFGYEVWREFPDRLVGYPGRLHLWDHEMNKWKYESEWTNEVSMVLTGAAFYHKYFNYLYTYKMPGDIKNWVDAHMNCEDIAMNFLVANVTGKAVIKVTPRKKFKCPECTAIDGLSLDQTHMVERSECINKFASVFGTMPLKVVEHRADPVLYKDDFPEKLKSFPNIGSL

SEQ ID NO: 9511 - protein, 718 aa, Homo sapiens
MCASVKYNIRGPALIPRMKTKHRIYYITLFSIVLLGLIATGMFQFWPHSIESSNDWNVEKRSIRDVPVVRLPADSPIPERGDLSCRMHTCFDVYRCGFNPKNKIKVYIYALKKYVDDFGVSVSNTISREYNELLMAISDSDYYTDDINRACLFVPSIDVLNQNTLRIKETAQAMAQLSRWDRGTNHLLFNMLPGGPPDYNTALDVPRDRALLAGGGFSTWTYRQGYDVSIPVYSPLSAEVDLPEKGPGPRQYFLLSSQVGLHPEYREDLEALQVKHGESVLVLDKCTNLSEGVLSVRKRCHKHQVFDYPQVLQEATFCVVLRGARLGQAVLSDVLQAGCVPVVIADSYILPFSEVLDWKRASVVVPEEKMSDVYSILQSIPQRQIEEMQRQARWFWEAYFQSIKAIALATLQIINDRIYPYAAISYEEWNDPPAVKWGSVSNPLFLPLIPPQSQGFTAIVLTYDRVESLFRVITEVSKVPSLSKLLVVWNNQNKNPPEDSLWPKIRVPLKVVRTAENKLSNRFFPYDEIETEAVLAIDDDIIMLTSDELQFGYEVWREFPDRLVGYPGRLHLWDHEMNKWKYESEWTNEVSMVLTGAAFYHKYFNYLYTYKMPGDIKNWVDAHMNCEDIAMNFLVANVTGKAVIKVTPRKKFKCPECTAIDGLSLDQTHMVERSECINKFASVFGTMPLKVVEHRADPVLYKDDFPEKLKSFPNIGSL

SEQ ID NO: 9512 - protein, 128 aa, Homo sapiens
MHIVFYRQKIIQKYAKNCREAYKTLSSLYSEMQKMNELENKAEPGTHLCIDVEDAMNITRKLWSRTFNCSVPCSDTVPVIAVSVFILFLPVVFYLSSFLHSEQKKRKLILPKRLKSSTSFANIQENSN

SEQ ID NO: 9513 - protein, 829 aa, Homo sapiens
MLSCPKKTFTKQHINIGFKKKGPEENAVQQTLCQGTGGTGQHLGGTSGQPATTARTPPAASTTEAAENPALYQRGKCGGVREEGIHPHPPKPFSSPFLASDIGALNELELCLWRAGWSLLLCDEIGDELLALKMLLWILLLETSLCFAAGNVTGDVCKEKICSCNEIEGDLHVDCEKKGFTSLQRFTAPTSQFYHLFLHGNSLTRLFPNEFANFYNAVSLHMENNGLHEIVPGAFLGLQLVKRLHINNNKIKSFRKQTFLGLDDLEYLQADFNLLRDIDPGAFQDLNKLEVLILNDNLISTLPANVFQYVPITHLDLRGNRLKTLPYEEVLEQIPGIAEILLEDNPWDCTCDLLSLKEWLENIPKNALIGRVVCEAPTRLQGKDLNETTEQDLCPLKNRVDSSLPAPPAQEETFAPGPLPTPFKTNGQEDHATPGSAPNGGTKIPGNWQIKIRPTAAIATGSSRNKPLANSLPCPGGCSCDHIPGSGLKMNCNNRNVSSLADLKPKLSNVQELFLRDNKIHSIRKSHFVDYKNLILLDLGNNNIATVENNTFKNLLDLRWLYMDSNYLDTLSREKFAGLQNLEYLNVEYNAIQLILPGTFNAMPKLRILILNNNLLRSLPVDVFAGVSLSKLSLHNNYFMYLPVAGVLDQLTSIIQIDLHGNPWECSCTIVPFKQWAERLGSEVLMSDLKCETPVNFFRKDFMLLSNDEICPQLYARISPTLTSHSKNSTGLAETGTHSNSYLDTSRVSISVLVPGLLLVFVTSAFTVVGMLVFILRNRKRSKRRDANSSASEINSLQTVCDSSYWHNGPYNADGAHRVYDCGSHSLSD

SEQ ID NO: 9514 - protein, 696 aa, Homo sapiens
MLLWILLLETSLCFAAGNVTGDVCKEKICSCNEIEGDLHVDCEKKGFTSLQRFTAPTSQFYHLFLHGNSLTRLFPNEFANFYNAVSLHMENNGLHEIVPGAFLGLQLVKRLHINNNKIKSFRKQTFLGLDDLEYLQADFNLLRDIDPGAFQDLNKLEVLILNDNLISTLPANVFQYVPITHLDLRGNRLKTLPYEEVLEQIPGIAEILLEDNPWDCTCDLLSLKEWLENIPKNALIGRVVCEAPTRLQGKDLNETTEQDLCPLKNRVDSSLPAPPAQEETFAPGPLPTPFKTNGQEDHATPGSAPNGGTKIPGNWQIKIRPTAAIATGSSRNKPLANSLPCPGGCSCDHIPGSGLKMNCNNRNVSSLADLKPKLSNVQELFLRDNKIHSIRKSHFVDYKNLILLDLGNNNIATVENNTFKNLLDLRWLYMDSNYLDTLSREKFAGLQNLEYLNVEYNAIQLILPGTFNAMPKLRILILNNNLLRSLPVDVFAGVSLSKLSLHNNYFMYLPVAGVLDQLTSIIQIDLHGNPWECSCTIVPFKQWAERLGSEVLMSDLKCETPVNFFRKDFMLLSNDEICPQLYARISPTLTSHSKNSTGLAETGTHSNSYLDTSRVSISVLVPGLLLVFVTSAFTVVGMLVFILRNRKRSKRRDANSSASEINSLQTVCDSSYWHNGPYNADGAHRVYDCGSHSLSD

SEQ ID NO: 9515 - protein, 597 aa, Homo sapiens
MEAEPPLYPMAGAAGPQGDEDLLGVPDGPEAPLDELVGAYPNYNEEEEERRYYRRKRLGVLKNVLAASAGGMLTYGVYLGLLQMQLILHYDETYREVKYGNMGLPDIDSKMLMGINVTPIAALLYTPVLIRFFGTKWMMFLAVGIYALFVSTNYWERYYTLVPSAVALGMAIVPLWASMGNYITRMAQKYHEYSHYKEQDGQGMKQRPPRGSHAPYLLVFQAIFYSFFHLSFACAQLPMIYFLNHYLYDLNHTLYNVQSCGTNSHGILSGFNKTVLRTLPRSGNLIVVESVLMAVAFLAMLLVLGLCGAAYRPTEEIDLRSVGWGNIFQLPFKHVRDYRLRHLVPFFIYSGFEVLFACTGIALGYGVCSVGLERLAYLLVAYSLGASAASLLGLLGLWLPRPVPLVAGAGVHLLLTFILFFWAPVPRVLQHSWILYVAAALWGVGSALNKTGLSTLLGILYEDKERQDFIFTIYHWWQAVAIFTVYLGSSLHMKAKLAVLLVTLVAAAVSYLRIEQKLRRGVAPRQPRIPRPQHKVRGYRYLEEDNSDESDAEGEHGDGAEEEAPPAGPRPGPEPAGLGRRPCPYEQAQGGDGPEEQ

SEQ ID NO: 9516 - protein, 388 aa, Homo sapiens [sequence omitted]

SEQ ID NO: 9517 - protein, 427 aa, Homo sapiens
MGGDLVLGLGALRRRKRLLEQEKSLAGWALVLAGTGIGLMVLHAEMLWFGGCSWALYLFLVKCTISISTFLLLCLIVAFHAKEVQLFMTDNGLRDWRVALTGRQAAQIVLELVVCGLHPAPVRGPPCVQDLGAPLTSPQPWPGFLGQGEALLSLAMLLRLYLVPRAVLLRSGVLLNASYRSIGALNQVRFRHWFVAKLYMNTHPGRLLLGLTLGLWLTTAWVLSVAERQAVNATGHLSDTLWLIPITFLTIGYGDVVPGTMWGKIVCLCTGVMGVCCTALLVAVVARKLEFNKAEKHVHNFMMDIQYTKEMKESAARVLQEAWMFYKHTRRKESHAARRHQRKLLAAINAFRQVRLKHRKLREQVNSMVDISKMHMILYDLQQNLSSSHRALEKQIDTLAGKLDALTELLSTALGPRQLPEPSQQSK

SEQ ID NO: 9518 - protein, 387 aa, Homo sapiens
MPTTIEREFEELDTQRRWQPLYLEIRNESHDYPHRVAKFPENRNRNRYRDVSPYDHSRVKLQNAENDYINASLVDIEEAQRSYILTQGPLPNTCCHFWLMVWQQKTKAVVMLNRIVEKESVKCAQYWPTDDQEMLFKETGFSVKLLSEDVKSYYTVHLLQLENINSGETRTISHFHYTTWPDFGVPESPASFLNFLFKVRESGSLNPDHGPAVIHCSAGIGRSGTFSLVDTCLVLMEKGDDINIKQVLLNMRKYRMGLIQTPDQLRFSYMAIIEGAKCIKGDSSIQKRWKELSKEDLSPAFDHSPNKIMTEKYNGNRIGLEEEKLTGDRCTGLSSKMQDTMEENSESALRKRIREDRKATTAQKVQQMKQRLNENERKRKRPRLTDT

SEQ ID NO: 9519 - protein, 416 aa, Homo sapiens
MPTTIEREFEELDTQRRWQPLYLEIRNESHDYPHRVAKFPENRNRNRYRDVSPYDHSRVKLQNAENDYINASLVDIEEAQRSYILTQARPLPNTCCHFWLMVWQQKTKAVVMLNRIVEKESVKCAQYWPTDDQEMLFKETGFSVKLLSEDVKSYYTVHLLQLENINSGETRTISHFHYTTWPDFGVPESPASFLNFLFKVRESGSLNPDHGPAVIHCSAGIGRSGTFSLVDTCLVLMEKGDDINIKQVLLNMRKYRMGLIQTPDQLRFSYMAIIEGAKCIKGDSSIQKRWKELSKEDLSPAFDHSPNKIMTEKYNGNRIGLEEEKLTGDRCTGLSSKMQDTMEENSESALRKRIREDRKATTAQKVQQMKQRLNENERKRKRWLYWQPILTKMGFMSVILVGAFVGWTLFFQQNAL

SEQ ID NO: 9520 - protein, 353 aa, Homo sapiens
MPTTIEREFEELDTQRRWQPLYLEIRNESHDYPHRVAKFPENRNRNRYRDVSPYDHSRVKLQNAENDYINASLVDIEEAQRSYILTQGPLPNTCCHFWLMVWQQKTKAVVMLNRIVEKESVKCAQYWPTDDQEMLFKETGFSVKLLSEDVKSYYTVHLLQLENINSGETRTISHFHYTTWPDFGVPESPASFLNFLFKVRESGSLNPDHGPAVIHCSAGIGRSGTFSLVDTCLVLMEKGDDINIKQVLLNMRKYRMGLIQTPDQLRFSYMAIIEGAKCIKGDSSIQKRWKELSKEDLSPAFDHSPNKIMTEKYNGNRIGLEEEKLTGDRCTGLSSKMQDTMEENSERPRLTDT

SEQ ID NO: 9521 - protein, 710 aa, Homo sapiens
MDLWNLSWFLFLDALLVISGLVFSFYKHNVQFFVVVVLIKDVDGGMDQDIFDINEGLGLDLFEGDIRLDRAQIRNSIIGEKYRWPHTIPYVLEDSLEMNAKGVILNAFERYRLKTCIDFKPWAGETNYISVFKGSGCWSSVGNRRVGKQELSIGANCDRIATVQHEFLHALGFWHEQSRSDRDDYVRIMWDRILSGREHNFNTYSDDISDSLNVPYDYTSVMHYSKTAFQNGTEPTIVTRISDFEDVIGQRMDFSDSDLLKLNQLYNCSSSLSFMDSCSFELENVCGMIQSSGDNADWQRVSQVPRGPESDHSNMGQCQGSGFFMHFDSSSVNVGATAVLESRTLYPKRGFQCLQFYLYNSGSESDQLNIYIREYSADNVDGNLTLVEEIKEIPTGSWQLYHVTLKVTKKFRVVFEGRKGSGASLGGLSIDDINLSETRCPHHIWHIRNFTQFIGSPNGTLYSPPFYSSKGYAFQIYLNLAHVTNAGIYFHLISGANDDQLQWPCPWQQATMTLLDQNPDIRQRMSNQRSITTDPFMTTDNGNYFWDRPSKVGTVALFSNGTQFRRGGGYGTSAFITHERLKSRDFIKGDDVYILLTVEDISHLNSTQIQLTPAPSVQDLCSKTTCKNDGVCTVRDGKAECRCQSGEDWWYMGERCEKRGSTRDTIVIAVSSTVAVFALMLIITLVSVYCTRKKYRERMSSNRPNLTPQN

SEQ ID NO: 9522 - protein, 1014 aa, Homo sapiens
MVFSVRQCGHVGRTEEVLLTFKIFLVIICLHVVLVTSLEEDTDNSSLSPPPAKLSVVSFAPSSNEVETTSLNDVTLSLLPSNETEKTKITIVKTFNASGVKPQRNICNLSSICNDSAFFRGEIMFQYDKESTVPQNQHITNGTLTGVLSLSELKRSELNKTLQTLSETYFIMCATAEAQSTLNCTFTIKLNNTMNACAAIAALERVKIRPMEHCCCSVRIPCPSSPEELGKLQCDLQDPIVCLADHPRGPPFSSSQSIPVVPRATVLSQVPKATSFAEPPDYSPVTHNVPSPIGEIQPLSPQPSAPIASSPAIDMPPQSETISSPMPQTHVSGTPPPVKASFSSPTVSAPANVNTTSAPPVQTDIVNTSSISDLENQVLQMEKALSLGSLEPNLAGEMINQVSRLLHSPPDMLAPLAQRLLKVVDDIGLQLNFSNTTISLTSPSLALAVIRVNASSFNTTTFVAQDPANLQVSLETQAPENSIGTITLPSSLMNNLPAHDMELASRVQFNFFETPALFQDPSLENLSLISYVISSSVANLTVRNLTRNVTVTLKHINPSQDELTVRCVFWDLGRNGGRGGWSDNGCSVKDRRLNETICTCSHLTSFGVLLDLSRTSVLPAQMMALTFITYIGCGLSSIFLSVTLVTYIAFEKIRRDYPSKILIQLCAALLLLNLVFLLDSWIALYKMQGLCISVAVFLHYFLLVSFTWMGLEAFHMYLALVKVFNTYIRKYILKFCIVGWGVPAVVVTIILTISPDNYGLGSYGKFPNGSPDDFCWINNNAVFYITVVGYFCVIFLLNVSMFIVVLVQLCRIKKKKQLGAQRKTSIQDLRSIAGLTFLLGITWGFAFFAWGPVNVTFMYLFAIFNTLQGFFIFIFYCVAKENVRKQWRRYLCCGKLRLAENSDWSKTATNGLKKQTVNQGVSSSSNSLQSSSNSTNSTTLLVNNDCSVHASGNGNASTERNGVSFSVQNGDVCLHDFTGKQHMFNEKEDSCNGKGRMALRRTSKRGSLHFIEQM

SEQ ID NO: 9523 - protein, 995 aa, Homo sapiens [sequence omitted]

SEQ ID NO: 9524 - protein, 1126 aa, Homo sapiens
MKRSLRKMWRPGEKKEPQGVVYEDVPDDTEDFKESLKVVFEGSAYGLQNFNKQKKLKRCDDMDTFFLHYAAAEGQIELMEKITRDSSLEVLHEMDDYGNTPLHCAVEKNQIESVKFLLSRGANPNLRNFNMMAPLHIAVQGMNNEVMKVLLEHRTIDVNLEGENGNTAVIIACTTNNSEALQILLKKGAKPCKSNKWGCFPIHQAAFSGSKECMEIILRFGEEHGYSRQLHINFMNNGKATPLHLAVQNGDLEMIKMCLDNGAQIDPVEKGRCTAIHFAATQGATEIVKLMISSYSGSVDIVNTTDGCHETMLHRQVSYLSFSSLFDHHELADYLISVGADINKIDSEGRSPLILATASASWNIVNLLLSKGAQVDIKDNFGRNFLHLTVQQPYGLKNLRPEFMQMQQIKELVMDEDNDGCTPLHYACRQGGPGSVNNLLGFNVSIHSKSKDKKSPLHFAASYGRINTCQRLLQDISDTRLLNEGDLHGMTPLHLAAKNGHDKVVQLLLKKGALFLSDHNGWTALHHASMGGYTQTMKVILDTNLKCTDRLDEDGNTALHFAAREGHAKAVALLLSHNADIVLNKQQASFLHLALHNKRKEVVLTIIRSKRWDECLKIFSHNSPGNKCPITEMIEYLPECMKVLLDFCMLHSTEDKSCRDYYIEYNFKYLQCPLEFTKKTPTQDVIYEPLTALNAMVQNNRIELLNHPVCKEYLLMKWLAYGFRAHMMNLGSYCLGLIPMTILVVNIKPGMAFNSTGIINETSDHSEILDTTNSYLIKTCMILVFLSSIFGYCKEAGQIFQQKRNYFMDISNVLEWIIYTTGIIFVLPLFVEIPAHLQWQCGAIAVYFYWMNFLLYLQRFENCGIFIVMLEVILKTLLRSTVVFIFLLLAFGLSFYILLNLQDPFSSPLLSIIQTFSMMLGDINYRESFLEPYLRNELAHPVLSFAQLVSFTIFVPIVLMNLLIGLAVGDIAEVQKHASLKRIAMQVELHTSLEKKLPLWFLRKVDQKSTIVYPNKPRSGGMLFHIFCFLFCTGEIRQEIPNADKSLEMEILKQKYRLKDLTFLLEKQHELIKLIIQKMEIISETEDDDSHCSFQDRFKKEQMEQRNSRWNTVLRAVKAKTHHLEP

SEQ ID NO: 9525 - protein, 567 aa, Homo sapiens
MSGESGQPEAGPSHAGLDWPNPERNRAGAPGGVIRRAGSQGPRSWIQKVLEQIMDSPRQCVTPSEVVPVTVLAVQRYLLEDEPRDTVPKPPLYCYDVTISDGVYQEKCYLDPSLNSLVYQNILKVGIQMRISRVSCLYNEKRIGQGILCIDNVHCGETSDSISLETPFRNRAHQEKPERPLRGGKSHYLALWNNEDPYGDIWLTDKQPEEHNFSDTKIISLSHLEMTWTNRRNFPALLVRILHKSKLRYYGKPDKKMIEPYQTFLEVADSSGTVSVIMWNALCPEWYKSLRVGLVLLLQDYSVKKSYPFRIQPVPVDPQIKLISTMEICLNLRDPPTNIIIIPEKQVKPEWRLPKLNHRFTTRSELDDMPENCICDVIGLLVFVGRVQRSKKKENREDFWSYRWIHIADGTSEQPFIVELFSTSQPEIFENIYPMAYFVCTQLKVVRNDNQVPKLLYLTTTNESGVFITGHRGQPYTYDAKVKNFIQWIRTKSDSGEQKNMVIGGYYPYPPVPETFSKYSSSIKGTNVIASPSKYVYILYVWLMLFQLVIFILFFYGSDLKFSNIHR

SEQ ID NO: 9526 - protein, 533 aa, Homo sapiens
MTWTNRRNFPALLVRILHKSKLRYYGKPDKKMIEPYQTFLEVADSSGTVSVIMWNALCPEWYKSLRVGLVLLLQDYSVKKSYPFRIQPVPVDPQIKLISTMEICLNLRDPPTNIIIIPEKQVKPEWRLPKLNHRFTTRSELDDMPENCICDVIGLLVFVGRVQRSKKKENREDFWSYRWIHIADGTSEQPFIVELFSTSQPEIFENIYPMAYFVCTQLKVVRNDNQVPKLLYLTTTNESGVFITGHRGQPYTYDAKNANRPSTSQAARVEIQERNGKRHQDDEPVNSQYFQTTSTNLSLSNKIRILQGPHANPVAVPQPGASVQTKGIKPGMPSIFNRRANINANLQGKARNTISDRWESQLWREKKFGLIDHLHYSRVYPESIPRKFMFEHRKFLSDQYNSQPAKYVPPEGRPPKLDDFKSARSLGHFEVTILGLNHEIAIDVAFLPMYCPEDIRTSQIDTLLTSMNYSCAYPQDTTGNDRLPGPRAVAGDIIKAATELDRVHIVGILDICNLGNNKVEVYLHKIYSPENTS

SEQ ID NO: 9527 - protein, 322 aa, Homo sapiens
MHHCLGKYVTAIISLFLLSFFLREKIQNAEYKLLLIRAGKLLVINHSSPLPGDLSDVNHSSLCEALYSRQKVDHALLMNFASNLSDYFLLLEDHIHCTPKFAAAISSALSAWKELPWVILEFSHLSISGKVFCTSDFSRLNTFFLLFHKDTPTHLLLSEFRLLLAQNIPIHFSPSVFHHTGNYSVFDDMCFSVEKDRVFGEPDNPVATVLTDMVSMLAVILQYTYTLNKEGYSTLNPLKGNYLTVILDRPQKNTQIAVGRYRLQQGQVEPGYDPQEDPKSCARYALLGPLVGGNLDQVVFSEEESVEQLNCIRLLVLASQES

SEQ ID NO: 9528 - protein, 220 aa, Homo sapiens
KQTETKWEYNNVGIDLSPEPKSFNYPLLSSPGDQLEIQLTEQLRSLIPNEDVRKFMSHVIWTLKMECSETHVQGSCAKLMSRTGLLMKLLSEQQEAKALNVEWDTDQQKTNYINENMEQNEQKEQKSSELMKEVPGYDYKNKLIFAISVTVILIILIIIFCFIEVKTIINSGFQNTILCLCGFRIHKLKTNVTFPLDILLLSFKAEVCFVLLLQCIFQDC

SEQ ID NO: 9529 - protein, 1606 aa, Homo sapiens
MPAPPQESTENLVPFLDTWDSAGEQPLEPEQFLASQQDLKDKLSPQERLPVSPKKLKKDPAQRWSLAEIIGITRQLSTPQSQKQTLQNEYSSTDTPYPGSLPPELRVKSDEPPGPSEQVGPSQFHLEPETQNPETLEDIQSSSLQQEAPAQLPQLLEEEPSSMQQEAPALPPESSMESLTLPNHEVSVQPPGEDQAYYHLPNITVKPADVEVTITSEPTNETESSQAQQETPIQFPEEVEPSATQQEAPIEPPVSPMEHELSISEQQQPVQPSESSREVESSLTQQETPGQPPEHHEVTVSPPGHHQTHHLDSPSVSVKPPDVQLTIAAEPSAEVGTSLVHQEATARLSGSGNDVEPPAIQHGGPPLLPESSEEAGPLAVQQETSFQSPEPINNENPSPTQQEAAAEHPQTAEEGESSLTHQEAPAQTPEFPNVVVAQPPEHSHLTQATVQPLDLGFTITPESMTEVELSPTMKETPTQPPKKVVPQLRVYQGVTNPTPGQDQAQHPVSPSVTVQLLDLGLTITPEPTTEVGHSTAPKRTIVSPKHPEVTLPHPDQVQTQHSHLTRATVQPLDLGFTITPKSMTEVEPSTALMTTAPPPGHPEVTLPPSDKGQAQHSHLTQATVQPLDLELTITTKPTTEVKPSPTTEETSTQPPDLGLAIIPEPTTETGHSTALEKTTAPHPDRVQTLHQSLTEVTGPPTELEPAQDSLVQSESYTQNKALTAPEEHKASTSTNICELCTCGDEMLSCIDLNPEQRLRQVPVPEPNTHNGTFTILNFQGNYISYIDGNVWKAYSWTEKLILRENNLTELHKDSFEGLLSLQYLDLSCNKIQSIERHTFEPLPFLKFINLSCNVITELSFGTFQAWHGMQFLHKLILNHNPLTTVEDPYLFKLPALKYLDMGTTLVPLTTLKNILMMTVELEKLILPSHMACCLCQFKNSIEAVCKTVKLHCNSACLTNTTHCPEEASVGNPEGAFMKVLQARKNYTSTELIVEPEEPSDSSGINLSGFGSEQLDTNDESDFISTLSYILPYFSAVNLDVKSLLLPFIKLPTTGNSLAKIQTVGQNRQRVKRVLMGPRSIQKRHFKEVGRQSIRREQGAQASVENAAEEKRLTSPAPREVEQPHTQQGPEKLAGNAVYTKPSFTQEHKAAVSVLKPFSKGAPSTSSPAKALPQVRDRSKDLTHAISILESAKARVTNTKTSKPIVHARKKYRFHKTRSHVTHRTTKVKKSPKVRKKSYLSRLMLANRLPFSAAKSLINSPSQGAFSSLGDLSPQENPFLEVSALSEHFIGKNNTKHTTARNAFEENDFMENTNMPEGTISENTNYNHPPEADSAGTAFNLGPTVKQTETKWEYNNVGTDLSPEPKSFNYPLLSSPGDQFEIQLTQQLQSLIPNNNVRRLIAHVIRTLKMDCSGAHVQVTCAKLISRTGHLMKLLSGQQEVKASKIEWDTDQWKIENYINESTEAQSEQKEKSLELKKEVPGYGYTDKLILALIVTGILTILIILFCLIVICCHRRSLQEDEEGFSRGIFRFLPWRGCSSRRESQDGLSSFGQPLWFKDLYKPLSATRINNHAWKLHKKSSNEDKILNRDPGDSEAPTEGEESEALP

SEQ ID NO: 9530 - protein, 611 aa, Homo sapiens
MACCLCQFKNSIEAVCKTVKLHCNSACLTNTTHCPEEASVGNPEGAFMKVLQARKNYTSTELIIEPEEPSDSSGINLSGFGSEQLDTNDESDVTSTLSYILPYFSAVNLDVKSLLLPFIKLPTTGNSLAKIQTVGKNRQRLNRVLMGPRSIQKRHFKEVGRQSIRREQGAQASVENTAEEKRLGSPAPRELKQPHTQQGPEKLAGNAVYTKPSFTQEHKAAVSVLKPFSKGAPSTSSPAKALPQVRDRWKDLTHAISILESAKARVTNMKTSKPIVHSRKKYRFHKTRSRMTHRTPKVKKSPKVRKKSYLSRLMLSNRLPFSAAKSLINSPSQGAFSSLRDLSPQENPFLEVSAPSEHFIENNNTKDTTARNAFEENVFMENTNMPEGTISENTNHNHPPEADSAGTAFNLGPTVKQTETKWEYNNVGTDLSPEPKSFNYPLLSSPGDQFEIQLTQQLQSVIPNNNVRRLIAHVIRTLKMDCSGAHVQVTCAKLVSRTGHLMKLLSGQQEVKASKIEWDTDQWKTENYINESTEAQSEQKEKSLEFTKELPGYGYTKKLILALIVTGILTILIILLCLIEICCHRRSLQEDEEGFPRDSEAPTEEESEALP

SEQ ID NO: 9531 - protein, 698 aa, Homo sapiens
MAAAGAAVARSPGIGAGPALRARRSPPPRAARLPRLLVLLAAAAVGPGAGGAARLYRAGEDAVWVLDSGSVRGATANSSAAWLVQFYSSWCGHCIAYAPTWRALAGDVRDWASAIRVAALDCMEEKNQAVCHDYDIHFYPTFRYFKAFTKEFTTGENFKGPDRELRTVRQTMIDFLQNHTEGSRPPACPRLDPIQPSDVLSLLDNRGSHYVAIVFESNSSYLGWEVILDLIPYESIVVTRALDGDKAFLEKLGVSSVPSCYLIYPNGSHGLINVVKPLRAFFSSYLKSLPDVRKKSLPLPEKPHKEENSEIVVWREFDKSKLYTVDLESGLHYLLRVELAAHKSLAGAELKTLQGLCDCLGQAVPWTAAVKKLLEMLQEWLASLPLDRIPYNAVLDLVNNKMRISGIFLTNHIKWVGCQGSRSELRGYPCSLWKLFHTLTVEASTHPDALVGTGFEDDPQAVLQTMRRYVHTFFGCKECGEHFEEMAKESMDSVKTPDQAILWLWKKHNMVNGRLAGHLSEDPRFPKLQWPTPDLCPACHEEIKGLASWDEGHVLTFLKQHYGRDNLLDTYSADQGDSSEGGTLARGEEEEKRLTPPEVSHGDRDTQSVRPPGALAPGPALPESLHHSLDGKLQSLDGPGAHKEVGGAAPFLGVDFSSLDMSLCVVLYVASSLFLMVMYFFFRVRSRRWKVKHHHPAV

SEQ ID NO: 9532 - protein, 675 aa, Homo sapiens
GRVGGRVGGGRGGGSAQPGNRSGTCAESPALAPAAGRTAAAAASAASGGGGGAGRGRCGAAVPRGRGRRVGAGQRQRARALAGDVRDWASAIRVAALDCMEEKNQAVCHDYDIHFYPTFRYFKAFTKEFTTGENFKGPDRELRTVRQTMIDFLQNHTEGSRPPACPRLDPIQPSDVLSLLDNRGSHYVAIVFESNSSYLGREVILDLIPYESIVVTRALDGDKAFLEKLGVSSVPSCYLIYPNGSHGLINVVKPLRAFFSSYLKSLPDVRKKSLPLPEKPHKEENSEIVVWREFDKSKLYTVDLESGLHYLLRVELAAHKSLAGAELKTLKDFVTVLAKLFPGRPPVKKLLEMLQEWLASLPLDRIPYNAVLDLVNNKMRISGIFLTNHIKWVGCQGSRSELRGYPCSLWKLFHTLTVEASTHPDALVGTGFEDDPQAVLQTMRRYVHTFFGCKECGEHFEEMAKESMDSVKTPDQAILWLWKKHNMVNGRLAGHLSEDPRFPKLQWPTPDLCPACHEEIKGLASWDEGHVLTFLKQHYGRDNLLDTYSADQGDSSEGGTLARGEEEEKRLTPPEVSHGDRDTQSVRPPGALGPRPALPESLHHSLDGKLQSLDGPGAHKEVGGAAPFLGVDFSSLDMSLCVVLYVASSLFLMVMYFFFRVRSRRWKVKHHHPAV

SEQ ID NO: 9533 - protein, 926 aa, Homo sapiens
MADDDVLFEDVYELCEVIGKGPFSVVRRCINRETGQQFAVKIVDVAKFTSSPGLSTEDLKREASICHMLKHPHIVELLETYSSDGMLYMVFEFMDGADLCFEIVKRADAGFVYSEAVASHYMRQILEALRYCHDNNIIHRDVKPHCVLLASKENSAPVKLGGFGVAIQLGESGLVAGGRVGTPHFMAPEVVKREPYGKPVDVWGCGVILFILLSGCLPFYGTKERLFEGIIKGKYKMNPRQWSHISESAKDLVRRMLMLDPAERITVYEALNHPWLKERDRYAYKIHLPETVEQLRKFNARRKLKGAVLAAVSSHKFNSFYGDPPEELPDFSEDPTSSGLLAAERAVSQVLDSLEEIHALTDCSEKDLDFLHSVFQDQHLHTLLDLYDKINTKSSPQIRNPPSDAVQRAKEVLEEISCYPENNDAKELKRILTQPHFMALLQTHDVVAHEVYSDEALRVTPPPTSPYLNGDSPESANGGMDMENVTRVRLVQFQKNTDEPMGITLKMNELNHCIVARIMHGGMIHRQGTLHVGDEIREINGISVANQTVEQLQKMLREMRGSITFKIVPSYRTQSSSCERDSPSTSRQSPANGHSSTNNSVSDLPSTTQPKGRQIYVRAQFEYDPAKDDLIPCKEAGIRFRVGDIIQIISKDDHNWWQGKLENSKNGTAGLIPSPELQEWRVACIAMEKTKQEQQASCTWFGKKKKQYKDKYLAKHNAVFDQLDLVTYEEVVKLPAFKRKTLVLLGAHGVGRRHIKNTLITKHPDRFAYPIPHTTRPPKKDEENGKNYYFVSHDQMMQDISNNEYLEYGSHEDAMYGTKLETIRKIHEQGLIAILDVEPQALKVLRTAEFAPFVVFIAAPTITPGLNEDESLQRLQKESDILQRTYAHYFDLTIINNEIDETIRHLEEAVELVCTAPQWVPVSWVY

SEQ ID NO: 9534 - protein, 871 aa, Homo sapiens
RRCINRETGQQFAVKIVDVAKFTSSPGLSTEDLKREASICHMLKHPHIVELLETYSSDGMLYMVFEFMDGADLCFEIVKRADAGFVYSEAVASHYMRQILEALRYCHDNNIIHRDVKPHCVLLASKENSAPVKLGGFGVAIQLGESGLVAGGRVGTPHFMAPEVVKREPYGKPVDVWGCGVILFILLSGCLPFYGTKERLFEGIIKGKYKMNPRQWSHISESAKDLVRRMLMLDPAERITVYEALNHPWLKERDRYAYKIHLPETVEQLRKFNARRKLKGAVLAAVSSHKFNSFYGDPPEELPDFSEDPTSSGAVSQVLDSLEEIHALTDCSEKDLDFLHSVFQDQHLHTLLDLYDKINTKSSPQIRNPPSDAVQRAKEVLEEISCYPENNDAKELKRILTQPHFMALLQTHDVVAHEVYSDEALRVTPPPTSPYLNGDSPESANGGMDMENVTRVRLVQFQKNTDEPMGITLKMNELNHCIVARIMHGGMIHRQGTLHVGDEIREINGISVANQTVEQLQKMLREMRGSITFKIVPSYRTQSSSCEDLPSTTQPKGRQIYVRAQFEYDPAKDDLIPCKEAGIRFRVGDIIQIISKDDHNWWQGKLENSKNGTAGLIPSPELQEWRVACIAMEKTKQEQQASCTWFGKKKKQYKDKYLAKHNAVFDQLDLVTYEEVVKLPAFKRKTLVLLGAHGVGRRHIKNTLITKHPDRFAYPIPHTTRPPKKDEENGKNYYFVSHDQMMQDISNNEYLEYGSHEDAMYGTKLETIRKIHEQGLIAILDVEPQALKVLRTAEFAPFVVFIAAPTITPGLNEDESLQRLQKESDILQRTYAHYFDLTIINNEIDETIRHLEEAVELVCTAPQWVPVSWVY

SEQ ID NO: 9535 - protein, 574 aa, Homo sapiens
MASTEGANNMPKQVEVRMHDSHLGSEEPKHRHLGLRLCDKLGKNLLLTLTVFGVILGAVCGGLLRLASPIHPDVVMLIAFPGDILMRMLKMLILPLIISSLITGLSGLDAKASGRLGTRAMVYYMSTTIIAAVLGVILVLAIHPGNPKLKKQLGPGKKNDEVSSLDAFLDLIRNLFPENLVQACFQQIQTVTKKVLVAPPPDEEANATSAVVSLLNETVTEVPEETKMVIKKGLEFKDGMNVLGLIGFFIAFGIAMGKMGDQAKLMVDFFNILNEIVMKLVIMIMWYSPLGIACLICGKIIAIKDLEVVARQLGMYMVTVIIGLIIHGGIFLPLIYFVVTRKNPFSFFAGIFQAWITALGTASSAGTLPVTFRCLEENLGIDKRVTRFVLPVGATINMDGTALYEAVAAIFIAQMNGVVLDGGQIVTVSLTATLASVGAASIPSAGLVTMLLILTAVGLPTEDISLLVAVDWLLDRMRTSVNVVGDSFGAGIVYHLSKSELDTIDSQHRVHEDIEMTKTQSIYDDMKNHRESNSNQCVYAAHNSVIVDECKVTLAANGKSADCSVEEEPWKREK

SEQ ID NO: 9536 - protein, 301 aa, Homo sapiens
MHPEPAPPPSRSSPELPPSGGSTTSGSRRSRRRSGDGEPPGAPPPPPSAVTYPDWIGQSYSEVMSLNEHSMQALSWRKLYLSRAKLKASSRTSALLSGFAMVAMVEVQLDADHDYPPGLLIAFSACTTVLVAVHLFALMISTCILPNIEAVSNVHNLNSVKESPHERMHRHIELAWAFSTVIGTLLFLAEVVLLCWVKFLPLKKQPGQPRPTSKPPASGAAANVSTSGITPGQAAAIASTTIMVPFGLIFIVFAVHFYRSLVSHKTDRQFQELNELAEFARLQDQLDHRGDHPLTPGSHYA

SEQ ID NO: 9537 - protein, 338 aa, Homo sapiens
MTVEKEAPDAHFTVDKQNISLWPRASHIAAENLLQPPPKSGPSLVPGKTPTVRAALICLTLVLVASVLLQAVLYPRFMGTISDVKTNVQLLKGRVDNISTLDSEIKKNSDGMEAAGVQIQMVNESLGYVRSQFLKLKTSVEKANAQIQILTRSWEEVSTLNAQIPELKSDLEKASALNTKIRALQGSLENMSKLLKRQNDILQVVSQGWKYFKGNFYYFSLIPKTWYSAEQFCVSRNSHLTSVTSESEQEFLYKTAGGLIYWIGLTKAGMEGDWSWVDDTPFNKVQSVRFWIPGEPNNAGNNEHCGNIKAPSLQAWNDAPCDKTFLFICKRPYVPSEP

SEQ ID NO: 9538 - protein, 370 aa, Homo sapiens
MAITLEEAPWLGWLLVKALMRFAFMVVNNLVAIPSYICYVIILQPLRVLDSKRFWYIEGIMYKWLLGMVASWGWYAGYTVMEWGEDIKAVSKDEAVMLVNHQATGDVCTLMMCLQDKGLVVAQMMWLMDHIFKYTNFGIVSLVHGDFFIRQGRSYRDQQLLLLKKHLENNYRSRDRKWIVLFPEGGFLRKRRETSQAFAKKNNLPFLTNVTLPRSGATKIILNALVAQQKNGSPAGGDAKELDSKSKGLQWIIDTTIAYPKAEPIDIQTWILGYRKPTVTHVHYRIFPIKDVPLETDDLTTWLYQRFVEKEDLLSHFYETGAFPPSKGHKEAVSREMTLSNLWIFLIQSFAFLSGYMWYNIIQYFYHCLF

SEQ ID NO: 9539 - protein, 1507 aa, Homo sapiens
MEENSKKDHRALLNQGEEDELSVFLVFSRGLRTHSFTKSPQEPSKHKTRNKSEASRFEKYWVKRVHRLHLLSEDDFDSDPTGATSAASFISVAKPSNSICVPLLHRHPPTKCQNYTSQQPQKAKWLLGVDKTELTKEVFGYRDHNVRKAFCLVASVLTCGGLLLVFYWRPQWRVWANCIPCPLQEADTVLLRTTVRAFLFSILKAMIVSSVLPLWHNSVAGIIFQKDEFQRYMRKKVFCLYLSTLKFPVSKKWEESLVADRHSVINQALIKPELKLRCMEVQKIRYVWNDLEKRFQKVGLLEDSNSCSDIHQTFGLGLTSEEQEVRRLVCGPNAIEVEIQPIWKLLVKQVLNPFYVFQAFTLTLWLSQGYIEYSVAIIILTVISIVLSVYDLRQQSVKLHNLVEDHNKVQVTIIVKDKGLEELESRLLVPGDILILPGKFSLPCDAVLIDGSCVVNEGMLTGQQILVLFALFPQPCCMFPCSTVVHTSSLRDTPHLSPVGFSSNSQYEDFDLARNAVEERHGESIPVTKTPLPQMENTMPWKCHSLEDYRKHVLFCGTEVIQVKPSGQGPVRAVVLQTGYNTAKGDLVRSILYPRPLNFKLYSDAFKFIVFLACLGVMGFFYALGVYMYHGVPPKDTVTMALILLTVTVPPVLPAALTIGNVYAQKRLKKKKIFCISPQRINMCGQINLVCFDKRPEESAGHSYLPRLEATFEVQPWLLERISPRLRAEQLTSTGVQGAHCMWGTEDHGVWLEYGLTGTLTEDGLDLWGTVPTADNCSKYPILVPTVAEAAVSDRRHFAGDSQDDEGASFQEAHSFASGQAVPWSPLCAAMASCHSLILLNGTIQGDPLDLKMFEGTAWKMEDCIVDSCKFGTSVSNIIKPGPKASKSPVEAIITLCQFPFSSSLQRMSVIAQLAGENHFHVYMKGAPEMVARFCRSETVPKNFPQELRSYTVQGFRVIALAHKTLKMGNLSEVEHLAREKVESELTFLGLLIMENRLKKETKLVLKELSEARIRTVMITGDNLQTAITVAKNSEMIPPGSQVIIVEADEPEEFVPASVTWQLVENQETGPGKKEIYMHTGNSSTPRGEGGSCYHFAMSGKSYQVIFQHFNSLLPKILVNGTVFARMSPGQKSSLIEEFQKLNYYVGMCGDGANDCGALKAAHAGISLSEQEASVASPFTSKTTNIQCVPHLIREGRAALVSSFGVFKYLTMYGIIQFISALLLYWVKRRGKDMRKKSKEDRKNWRLTGTLRNQWQPFKHVKAEIHFPKPPRMEQLQLFGNYQYLMQDVAITLMVCLTMSSTHAYPKLAPYRPAGQLLSPPLLLSIFLNSCFSCIVQISAFLYVKQQPWYCEVYQYSFETTTLWPITTINYITVAFIFSKGKPFRKPIYTNYIFSFLLLAALGLTIFILFSDFQVIYRGMEDSILQNHELWLLIKREFGFYSKSQYRTWQKKLAEDSTWPPINRTDYSGDGKNGFYINGGYESHEQIPKRKLKLGGQPTEQHFWARL

SEQ ID NO: 9540 - protein, 472 aa, Homo sapiens
MAGKVRSLLPPLLLAAAGLAGLLLLCVPTRDVREPPALKYGIVLDAGSSHTSMFIYKWPADKENDTGIVGQHSSCDVPGGGISSYADNPSGASQSLVGCLEQALQDVPKERHAGTPLYLGATAGMRLLNLTNPEASTSVLMAVTHTLTQYPFDFRGARILSGQEEGVFGWVTANYLLENFIKYGWVGRWFRPRKGTLGAMDLGGASTQITFETTSPAEDRASEVQLHLYGQHYRVYTHSFLCYGRDQVLQRLLASALQTHGFHPCWPRGFSTQVLLGDVYQSPCTMAQRPQNFNSSARVSLSGSSDPHLCRDLVSGLFSFSSCPFSRCSFNGVFQPPVAGNFVAFSAFFYTVDFLRTSMGLPVATLQQLEAAAVNVCNQTWAQQLLSRGYGFDERAFGGVIFQKKAADTAVGWALGYMLNLTNLIPADPPGLRKGTDFSSWVVLLLLFASALLAALVLLLRQVHSAKLPSTI

SEQ ID NO: 9541 - protein, 495 aa, Homo sapiens
MAGKVRSLLPPLLLAAAGLAGLLLLCVPTRDVREPPALKYGIVLDAGSSHTSMFIYKWPADKENDTGIVGQHSSCDVPGGGISSYADNPSGASQSLVGCLEQALQDVPKERHAGTPLYLGATAGMRLLNLTNPEASTSVLMAVTHTLTQYPFDFRGARILSGQEEGVFGWVTANYLLENFIKYGWVGRWFRPRKGTLGAMDLGGASTQITFETTSPAEDRASEVQLHLYGQHYRVYTHSFLCYGRDQVLQRLLASALQTHGFHPCWPRGFSTQVLLGDVYQSPCTMAQRPQNFNSSARVSLSGSSDPHLCRDLVSGLFSFSSCPFSRCSFNGVFQPPVAGNFVAFSAFFYTVDFLRTSMGLPVATLQQLEAAAVNVCNQTWAQLQARVPGQRARLADYCAGAMFVQQLLSRGYGFDERAFGGVIFQKKAADTAVGWALGYMLNLTNLIPADPPGLRKGTDFSSWVVLLLLFASALLAALVLLLRQVHSAKLPSTI

SEQ ID NO: 9542 - protein, 773 aa, Homo sapiens
MAEAHQAVAFQFTVTPDGIDLRLSHEALRQIYLSGLHSWKKKFIRFKNGIITGVYPASPSSWLIVVVGVMTTMYAKIDPSLGIIAKINRTLETANCMSSQTKNVVSGVLFGTGLWVALIVTMRYSLKVLLSYHGWMFTEHGKMSRATKIWMGMVKIFSGRKPMLYSFQTSLPRLPVPAVKDTVNRYLQSVRPLMKEEDFKRMTALAQDFAVGLGPRLQWYLKLKSWWATNYVSDWWEEYIYLRGRGPLMVNSNYYAMDLLYILPTHIQAARAGNAIHAILLYRRKLDREEIKPIRLLGSTIPLCSAQWERMFNTSRIPGEETDTIQHMRDSKHIVVYHRGRYFKVWLYHDGRLLKPREMEQQMQRILDNTSEPQPGEARLAALTAGDRVPWARCRQAYFGRGKNKQSLDAVEKAAFFVTLDETEEGYRSEDPDTSMDSYAKSLLHGRCYDRWFDKSFTFVVFKNGKMGLNAEHSWADAQIVAHLWEYVMSIDSLQLGYAEDGHCKGDINPNIPYPTRLQWDIPGECQEVIETSLNTANLLANDVDFHSFPFVAFGKGIIKKCRTSPDTFVQLALQLAHYKDMGKFCLTYEASMTRLFREGRTETVRSCTTESCDFVRAMVDPAQTVEQRLKLFKLASEKHQHMYRLAMTGSGIDRHLFCLYVVSKYLAVESPFLKEVLSEPWRLSTSQTPQQQVELFDLENNPEYVSSGGGFGPVADDGYGVSYILVGENLINFHISSKFSCPETDSHRFGRHLKEAMTDIITLFGLSSNSKK

SEQ ID NO: 9543 - protein, 1464 aa, Homo sapiens [sequence omitted]

SEQ ID NO: 9544 - protein, 299 aa, Homo sapiens
MITFLPIIFSILIVVTFVIGNFANGFIALVNSIEWFKRQKISFADQILTALAVSRVGLLWVLVLNWYATELNPAFNSIEVRITAYNVWAVINHFSNWLATSLSIFYLLKIANFSNLIFLHLKRRVKSVVLVILLGPLLFLVCHLFVINMNQIIWTKEYEGNMTWKIKLRSAMYLSNTTVTILANLVPFTLTLISFLLLICSLCKHLKKMQLHGKGSQDPSMKVHIKALQTVTSFLLLCAIYFLSIIMSVWSFESLENKPVFMFCEAIAFSYPSTHPFILIWGNKKLKQTFLSVLWQMRY

SEQ ID NO: 9545 - protein, 309 aa, Homo sapiens
MITFLPIIFSILIVVTFVIGNFANGFIALVNSIEWFKRQKISFADQILTALAVSRVGLLWVLVLNWYATELNPAFNSIEVRITAYNVWAVINHFSNWLATSLSIFYLLKIANFSNLIFLHLKRRVKSVVLVILLGPLLFLVCHLFVINMNQIIWTKEYEGNMTWKIKLRSAMYLSNTTVTILANLVPFTLTLISFLLLICSLCKHLKKMQLHGKGSQDPSMKVHIKALQTVTSFLLLCAIYFLSIIMSVWSFESLENKPVFMFCEAIAFSYPSTHPFILIWGNKKLKQTFLSVLWHVRYWVKGEKPSSS

SEQ ID NO: 9546 - protein, 903 aa, Homo sapiens
MIPVLTSKKASELPVSEVASILQADLQNGLNKCEVSHRRAFHGWNKFDISEDEPLWKKYISQFKNPLIMLLLASAVISVLMHQFDDAVSITVAILIVVTVAFVQEYRSEKSLEELSKLVPPECHCVREGKLEHTLARDLVPGDTVCLSVGDRVPADLRLFEAVDLSIDESSLTGETTPCSKVTAPQPAATNGDLASRSNIAFMGTLVRCGKAKGVVIGTGENSEFGEVFKMMQAEEAPKTPLQKSMDLLGKQLSFYSFGIIGIIMLVGWLLGKDILEMFTISVSLAVAAIPEGLPIVVTVTLALGVMRMVKKRAIVKKLPIVETLGCCNVICSDKTGTLTKNEMTVTHIFTSDGLHAEVTGVGYNQFGEVIVDGDVVHGFYNPAVSRIVEAGCVCNDAVIRNNTLMGKPTEGALIALAMKMGLDGLQQDYIRKAEYPFSSEQKWMAVKCVHRTQQDRPEICFMKGAYEQVIKYCTTYQSKGQTLTLTQQQRDVYQQEKARMGSAGLRVLALASGPELGQLTFLGLVGIIDPPRTGVKEAVTTLIASGVSIKMITGDSQETAVAIASRLGLYSKTSQSVSGEEIDAMDVQQLSQIVPKVAVFYRASPRHKMKIIKSLQKNGSVVAMTGDGVNDAVALKAADIGVAMGQTGTDVCKEAADMILVDDDFQTIMSAIEEGKGIYNNIKNFVRFQLSTSIAALTLISLATLMNFPNPLNAMQILWINIIMDGPPAQSLGVEPVDKDVIRKPPRNWKDSILTKNLILKILVSSIIIVCGTLFVFWRELRDNVITPRDTTMTFTCFVFFDMFNALSSRSQTKSVFEIGLCSNRMFCYAVLGSIMGQLLVIYFPPLQKVFQTESLSILDLLFLLGLTSSVCIVAEIIKKVERSREKIQKHVSSTSSSFLEV

SEQ ID NO: 9547 - protein, 923 aa, Homo sapiens
MIPVLTSKKASELPVSEVASILQADLQNGLNKCEVSHRRAFHGWNKFDISEDEPLWKKYISQFKNPLIMLLLASAVISVLMHQFDDAVSITVAILIVVTVAFVQEYRSEKSLEELSKLVPPECHCVREGKLEHTLARDLVPGDTVCLSVGDRVPADLRLFEAVDLSIDESSLTGETTPCSKVTAPQPAATNGDLASRSNIAFMGTLVRCGKAKGVVIGTGENSEFGEVFKMMQAEEAPKTPLQKSMDLLGKQLSFYSFGIIGIIMLVGWLLGKDILEMFTISVSLAVAAIPEGLPIVVTVTLALGVMRMVKKRAIVKKLPIVETLGCCNVICSDKTGTLTKNEMTVTHIFTSDGLHAEVTGVGYNQFGEVIVDGDVVHGFYNPAVSRIVEAGCVCNDAVIRNNTLMGKPTEGALIALAMKMGLDGLQQDYIRKAEYPFSSEQKWMAVKCVHRTQQDRPEICFMKGAYEQVIKYCTTYQSKGQTLTLTQQQRDVYQQEKARMGSAGLRVLALASGPELGQLTFLGLVGIIDPPRTGVKEAVTTLIASGVSIKMITGDSQETAVAIASRLGLYSKTSQSVSGEEIDAMDVQQLSQIVPKVAVFYRASPRHKMKIIKSLQKNGSVVAMTGDGVNDAVALKAADIGVAMGQTGTDVCKEAADMILVDDDFQTIMSAIEEGKGIYNNIKNFVRFQLSTSIAALTLISLATLMNFPNPLNAMQILWINIIMDGPPAQSLGVEPVDKDVIRKPPRNWKDSILTKNLILKILVSSIIIVCGTLFVFWRELRDNVITPRDTTMTFTCFVFFDMFNALSSRSQTKSVFEIGLCSNRMFCYAVLGSIMGQLLVIYFPPLQKVFQTESLSILDLLFLLGLTSSVCIVAEIIKKVERSREKIQKHVWLWERSGQQLVEIHPHLETGLPLTEDVSCV

SEQ ID NO: 9548 - protein, 919 aa, Homo sapiens
MKVARFQKIPNGENETMIPVLTSKKASELPVSEVASILQADLQNGLNKCEVSHRRAFHGWNKFDISEDEPLWKKYISQFKNPLIMLLLASAVISVLMHQFDDAVSITVAILIVVTVAFVQEYRSEKSLEELSKLVPPECHCVREGKLEHTLARDLVPGDTVCLSVGDRVPADLRLFEAVDLSIDESSLTGETTPCSKVTAPQPAATNGDLASRSNIAFMGTLVRCGKAKGVVIGTGENSEFGEVFKMMQAEEAPKTPLQKSMDLLGKQLSFYSFGIIGIIMLVGWLLGKDILEMFTISVSLAVAAIPEGLPIVVTVTLALGVMRMVKKRAIVKKLPIVETLGCCNVICSDKTGTLTKNEMTVTHIFTSDGLHAEVTGVGYNQFGEVIVDGDVVHGFYNPAVSRIVEAGCVCNDAVIRNNTLMGKPTEGALIALAMKMGLDGLQQDYIRKAEYPFSSEQKWMAVKCVHRTQQDRPEICFMKGAYEQVIKYCTTYQSKGQTLTLTQQQRDVYQQEKARMGSAGLRVLALASGPELGQLTFLGLVGIIDPPRTGVKEAVTTLIASGVSIKMITGDSQETAVAIASRLGLYSKTSQSVSGEEIDAMDVQQLSQIVPKVAVFYRASPRHKMKIIKSLQKNGSVVAMTGDGVNDAVALKAADIGVAMGQTGTDVCKEAADMILVDDDFQTIMSAIEEGKGIYNNIKNFVRFQLSTSIAALTLISLATLMNFPNPLNAMQILWINIIMDGPPAQSLGVEPVDKDVIRKPPRNWKDSILTKNLILKILVSSIIIVCGTLFVFWRELRDNVITPRDTTMTFTCFVFFDMFNALSSRSQTKSVFEIGLCSNRMFCYAVLGSIMGQLLVIYFPPLQKVFQTESLSILDLLFLLGLTSSVCIVAEIIKKVERSREKIQKHVSSTSSSFLEV

SEQ ID NO: 9549 - protein, 888 aa, Homo sapiens
MKVARFQKIPNGENETMIPVLTSKKASELPVSEVASILQADLQNGLNKCEVSHRRAFHGWNKFDISEDEPLWKKYISQFKNPLIMLLLASAVISVLMHQFDDAVSITVAILIVVTVAFVQEYRSEKSLEELSKLVPPECHCVREGKLEHTLARDLVPGDTVCLSVGDRVPADLRLFEAVDLSIDESSLTGETTPCSKVTAPQPAATNGDLASRSNIAFMGTLVRCGKAKGVVIGTGENSEFGEVFKMMQAEEAPKTPLQKSMDLLGKQLSFYSFGIIGIIMLVGWLLGKDILEMFTISVSLAVAAIPEGLPIVVTVTLALGVMRMVKKRAIVKKLPIVETLGCCNVICSDKTGTLTKNEMTVTHIFTSDGLHAEVTGVGYNQFGEVIVDGDVVHGFYNPAVSRIVEAGCVCNDAVIRNNTLMGKPTEGALIALAMKMGLDGLQQDYIRKAEYPFSSEQKWMAVKCVHRTQQDRPEICFMKGAYEQVIKYCTTYQSKGQTLTLTQQQRDVYQQEKARMGSAGLRVLALASGPELGQLTFLGLVGIIDPPRTGVKEAVTTLIASGVSIKMITGDSQETAVAIASRLGLYSKTSQSVSGEEIDAMDVQQLSQIVPKVAVFYRASPRHKMKIIKSLQKNGSVVAMTGDGVNDAVALKAADIGVAMGQTGTDVCKEAADMILVDDDFQTIMSAIEEGKGIYNNIKNFVRFQLSTSIAALTLISLATLMNFPNPLNAMQILWINIIMDGPPAQSLGVEPVDKDVIRKPPRNWKDSILTKNLILKILVSSIIIVCGTLFVFWRELRDNVITPRDTTMTFTCFVFFDMFNALSSRSQTKSVFEIGLCSNRMFCYAVLGSIMGQLLVIYFPPLQKVFQTESLSILGLALGEEWTAAG

SEQ ID NO: 9550 - protein, 1240 aa, Homo sapiens
MDLAPYFTSEPLSAVQKLGGPVVLHCSAQPVTTRISWLHNGKTLDGNLEHIKIHQGTLTILSLNSSLLGYYQCLANNSIGAIVSGPATVSVAVLGDFGSSTKHVITAEEKSAGFIGCRVPESNPKAEVRYKIRGKWLEHSTENYLILPSGNLQILNVSLEDKGSYKCAAYNPVTHQLKVEPIGRKLLVSRPSSDDVHILHPTHSQALAVLSRSPVTLECVVSGVPAPQVYWLKDGQDIAPGSNWRRLYSHLATDSVDPADSGNYSCMAGNKSGDVEYVTYMVNVLEHASISKGLQDQIVSLGATVHFTCDVHGNPAPNCTWFHNAQPIHPSARHLTAGNGLKISGVTVEDVGMYQCVADNGIGFMHSTGRLEIENDGGFKPVIITAPVSAKVADGDFVTLSCNASGLPVPVIRWYDSHGLITSHPSQVLRSKSRKSQLSRPEGLNLEPVYFVLSQAGASSLHIQAVTQEHAGKYICEAANEHGTTQAEASLMVVPFETNTKAETVTLPDAAQNDDRSKRDGSETGLLSSFPVKVHPSAVESAPEKNASGISVPDAPIILSPPQTHTPDTYNLVWRAGKDGGLPINAYFVKYRKLDDGVGMLGSWHTVRVPGSENELHLAELEPSSLYEVLMVARSAAGEGQPAMITFRTSKEKTASSKNTQASSPPVGIPKYPVVSEAANNNFGVVLTDSSRHSGVPEAPDRPTISTASETSVYVTWIPRANGGSPITAFKVEYKRMRTSNWLVAAEDIPPSKLSVEVRSLEPGSTYKFRVIAINHYGESFRSSASRPYQVVGFPNRFSSRPITGPHIAYTEAVSDTQIMLKWTYIPSSNNNTPIQGFYIYYRPTDSDNDSDYKRDVVEGSKQWHMIGHLQPETSYDIKMQCFNEGGESEFSNVMICETKVKRVPGASEYPVKDLSTPPNSLGSGGNVGPATSPARSSDMLYLIVGCVLGVMVLILMVFIAMCLWKNRQQNTIQKYDPPGYLYQGSDMNGQMVDYTTLSGASQINGNVHGGFLTNGGLSSGYSHLHHKVPNAVNGIVNGSLNGGLYSGHSNSLTRTHVDFEHPHHLVNGGGMYTAVPQIDPLECVNCRNCRNNNRCFTKTNSTFSSSPPPVVPVVAPYPQDGLEMKPLSHVKVPVCLTSAVPDCGQLPEESVKDNVEPVPTQRTCCQDIVNDVSSDGSEDPAEFSRGDSCAHSETEINIVSWNALILPPVPEGCAEKTMWSPPGIPLDSPTEVLQQPRET

SEQ ID NO: 9551 - protein, 575 aa, Homo sapiens
MKRSLQALYCQLLSFLLILALTEALAFAIQEPSPRESLQVLPSGTPPGTMVTAPHSSTRHTSVVMLTPNPDGPPSQAAAPMATPTPRAEGHPPTHTISTIAATVTAPHSESSLSTGPAPAAMATTSSKPEGRPRGQAAPTILLTKPPGATSRPTTAPPRTTTRRPPRPPGSSRKGAGNSSRPVPPAPGGHSRSKEGQRGRNPSSTPLGQKRPLGKIFQIYKGNFTGSVEPEPSTLTPRTPLWGYSSSPQPQTVAATTVPSNTSWAPTTTSLGPAKDKPGLRRAAQGGGSTFTSQGGTPDATAASGAPVSPQAAPVPSQRPHHGDPQDGPSHSDSWLTVTPGTSRPLSTSSGVFTAATGPTPAAFDTSVSAPSQGIPQGASTTPQAPTHPSRVSESTISGAKEETVATLTMTDRVPSPLSTVVSTATGNFLNRLVPAGTWKPGTAGNISHVAEGDKPQHRATICLSKMDIAWVILAISVPISSCSVLLTVCCMKRKKKTANPENNLSYWNNTITMDYFNRHAVELPREIQSLETSEDQLSEPRSPANGDYRDTGMVLVNPFCQETLFVGNDQVSEI

SEQ ID NO: 9552 - protein, 164 aa, Homo sapiens
IAHVIRTLKMDCSGAHVQVTCAKLISRTGHLMKLLSGQQEVKASKIEWDTDQWKIENYINESTEAQSEQKEKSLELKKEVPGYGYTDKLILALIVTGILTILIILFCLIVVRTIINSGFQNAVLSLCGFRAHKLKTKATFPLDILLQSFKAECFVLLLQCIFQD

SEQ ID NO: 9553 - protein, 677 aa, Homo sapiens
MKVLGRSFFWVLFPVLPWAVQAVEHEEVAQRVIKLHRGRGVAAMQSRQWVRDSCRKLSGLLRQKNAVLNKLKTAIGAVEKDVGLSDEEKLFQVHTFEIFQKELNESENSVFQAVYGLQRALQGDYKDVVNMKESSRQRLEALREAAIKEETEYMELLAAEKHQVEALKNMQHQNQSLSMLDEILEDVRKAADRLEEEIEEHAFDDNKSVKGVNFEAVLRVEEEEANSKQNITKREVEDDLGLSMLIDSQNNQYILTKPRDSTIPRADHHFIKDIVTIGMLSLPCGWLCTAIGLPTMFGYIICGVLLGPSGLNSIKSIVQVETLGEFGVFFTLFLVGLEFSPEKLRKVWKISLQGPCYMTLLMIAFGLLWGHLLRIKPTQSVFISTCLSLSSTPLVSRFLMGSARGDKEGDIDYSTVLLGMLVTQDVQLGLFMAVMPTLIQAGASASSSIVVEVLRILVLIGQILFSLAAVFLLCLVIKKYLIGPYYRKLHMESKGNKEILILGISAFIFLMLTVTELLDVSMELGCFLAGALVSSQGPVVTEEIATSIEPIRDFLAIVFFASIGLHVFPTFVAYELTVLVFLTLSVVVMKFLLAALVLSLILPRSSQYIKWIVSAGLAQVSEFSFVLGSRARRAGVISREVYLLILSVTTLSLLLAPVLWRAAITRCVPRPERRSSL

SEQ ID NO: 9554 - protein, 348 aa, Homo sapiens
MDNITWMASHTGWSDFILMGLFRQSKHPMANITWMANHTGWSDFILLGLFRQSKHPALLCVVIFVVFLMALSGNAVLILLIHCDAHLHTPMYFFISQLSLMDMAYISVTVPKMLLDQVMGVNKISAPECGMQMFFYVTLAGSEFFLLATMAYDRYVAICHPLRYPVLMNHRVCLFLSSGCWFLGSVDGFTFTPITMTFPFRGSREIHHFFCEVPAVLNLSCSDTSLYEIFMYLCCVLMLLIPVVIISSSYLLILLTIHGMNSAEGRKKAFATCSSHLTVVILFYGAAIYTYMLPSSYHTPEKDMMVSVFYTILTPVVNPLIYSLRNKDVMGALKKMLTVEPAFQKAME

SEQ ID NO: 9555 - protein, 523 aa, Homo sapiens
MVPPRRHRGAGRPGVLSSSPPFRLRSAKFSGIALEDLRRALKTRLQMVCVFVMNRMNSQNSGFTQRRRMALGIVILLLVDVIWVASSELTSYVFTQYNKPFFSTFAKTSMFVLYLLGFIIWKPWRQQCTRGLRGKHAAFFADAEGYFAACTTDTTMNSSLSEPLYVPVKFHDLPSEKPESTNIDTEKTPKKSRVRFSNIMEIRQLPSSHALEAKLSRMSYPVKEQESILKTVGKLTATQVAKISFFFCFVWFLANLSYQEALSDTQVAIVNILSSTSGLFTLILAAVFPSNSGDRFTLSKLLAVILSIGGVVLVNLAGSEKPAGRDTVGSIWSLAGAMLYAVYIVMIKRKVDREDKLDIPMFFGFVGLFNLLLLWPGFFLLHYTGFEDFEFPNKVVLMCIIINGLIGTVLSEFLWLWGCFLTSSLIGTLALSLTIPLSIIADMCMQKVQFSWLFFAGAIPVFFSFFIVTLLCHYNNWDPVMVGIRRIFAFICRKHRIQRVPEDSEQCESLISMHSVSQEDGAS

SEQ ID NO: 9556 - protein, 1533 aa, Homo sapiens [sequence omitted]

SEQ ID NO: 9557 - protein, 1533 aa, Homo sapiens
MYIRVSYDTKPDSLLHLMVKDWQLELPKLLISVHGGLQNFEMQPKLKQVFGKGLIKAAMTTGAWIFTGGVSTGVISHVGDALKDHSSKSRGRVCAIGIAPWGIVENKEDLVGKDVTRVYQTMSNPLSKLSVLNNSHTHFILADNGTLGKYGAEVKLRRLLEKHISLQKINTRLGQGVPLVGLVVEGGPNVVSIVLEYLQEEPPIPVVICDGSGRASDILSFAHKYCEEGGIINESLREQLLVTIQKTFNYNKAQSHQLFAIIMECMKKKELVTVFRMGSEGQQDIEMAILTALLKGTNVSAPDQLSLALAWNRVDIARSQIFVFGPHWPPLGSLAPPTDSKATEKEKKPPMATTKGGRGKGKGKKKGKVKEEVEEETDPRKIELLNWVNALEQAMLDALVLDRVDFVKLLIENGVNMQHFLTIPRLEELYNTRLGPPNTLHLLVRDVKKSNLPPDYHISLIDIGLVLEYLMGGAYRCNYTRKNFRTLYNNLFGPKRPKALKLLGMEDDEPPAKGKKKKKKKKEEEIDIDVDDPAVSRFQYPFHELMVWAVLMKRQKMAVFLWQRGEESMAKALVACKLYKAMAHESSESDLVDDISQDLDNNSKDFGQLALELLDQSYKHDEQIAMKLLTYELKNWSNSTCLKLAVAAKHRDFIAHTCSQMLLTDMWMGRLRMRKNPGLKVIMGILLPPTILFLEFRTYDDFSYQTSKENEDGKEKEEENTDANADAGSRKGDEENEHKKQRSIPIGTKICEFYNAPIVKFWFYTISYLGYLLLFNYVILVRMDGWPSLQEWIVISYIVSLALEKIREILMSEPGKLSQKIKVWLQEYWNITDLVAISTFMIGAILRLQNQPYMGYGRVIYCVDIIFWYIRVLDIFGVNKYLGPYVMMIGKMMIDMLYFVVIMLVVLMSFGVARQAILHPEEKPSWKLARNIFYMPYWMIYGEVFADQIDLYAMEINPPCGENLYDEEGKRLPPCIPGAWLTPALMACYLLVANILLVNLLIAVFNNTFFEVKSISNQVWKFQRYQLIMTFHDRPVLPPPMIILSHIYIIIMRLSGRCRKKREGDQEERDRGLKLFLSDEELKRLHEFEEQCVQEHFREKEDEQQSSSDERIRVTSERVENMSMRLEEINERETFMKTSLQTVDLRLAQLEELSNRMVNALENLAGIDRSDLIQARSRASSECEATYLLRQSSINSADGYSLYRYHFNGEELLFEDTSLSTSPGTGVRKKTCSFRIKEEKDVKTHLVPECQNSLHLSLGTSTSATPDGSHLAVDDLKNAEESKLGPDIGISKEDDERQTDSKKEETISPSLNKTDVIHGQDKSDVQNTQLTVETTNIEGTISYPLEETKITRYFPDETINACKTMKSRSFVYSRGRKLVGGVNQDVEYSSITDQQLTTEWQCQVQKITRSHSTDIPYIVSEAAVQAEHKEQFADMQDEHHVAEAIPRIPRLSLTITDRNGMENLLSVKPDQTLGFPSLRSKSLHGHPRNVKSIQGKLDRSGHASSVSSLVIVSGMTAEEKKVKKEKASTETEC

SEQ ID NO: 9558 - protein, 502 aa, Homo sapiens
MLLRSAGKLNVGTKKEDGESTAPTPRPKVLRCKCHHHCPEDSVNNICSTDGYCFTMIEEDDSGLPVVTSGCLGLEGSDFQCRDTPIPHQRRSIECCTERNECNKDLHPTLPPLKNRDFVDGPIHHRALLISVTVCSLLLVLIILFCYFRYKRQETRPRYSIGLEQDETYIPPGESLRDLIEQSQSSGSGSGLPLLVQRTIAKQIQMVKQIGKGRYGEVWMGKWRGEKVAVKVFFTTEEASWFRETEIYQTVLMRHENILGFIAADIKGTGSWTQLYLITDYHENGSLYDYLKSTTLDAKSMLKLAYSSVSGLCHLHTEIFSTQGKPAIAHRDLKSKNILVKKNGTCCIADLGLAVKFISDTNEVDIPPNTRVGTKRYMPPEVLDESLNRNHFQSYIMADMYSFGLILWEVARRCVSGGIVEEYQLPYHDLVPSDPSYEDMREIVCIKKLRPSFPNRWSSDECLRQMGKLMTECWAHNPASRLTALRVKKTLAKMSESQDIKL

SEQ ID NO: 9559 - protein, 372 aa, Homo sapiens
MRGRSWHWAAWRGQAHRSTHTWQCPLGDLCPRHQLGGQLCRKWWESGQTWPWRLELPMLSDWLQGSFVWARKGPIGPGEPLELLCNVSGALPPAGRHAAYSVGWEMAPAGAPGPGRLVAQLDTEGVGSLGPGYEGRHIAMEKVASRTYRLRLEAARPGDAGTYRCLAKAYVRGSGTRLREAASARSRPLPVHVREEGVVLEAVAWLAGGTVYRGETASLLCNISVRGGPPGLRLAASWWVERPEDGELSSVPAQLVGGVGQDGVAELGVRPGGGPVSVELVGPRSHRLRLHSLGPEDEGVYHCAPSAWVQHADYSWYQAGSARSGPVTVYPYMHALDTLFVPLLVGTGVALVTGATVLGTITCCFMKRLRKR

SEQ ID NO: 9560 - protein, 691 aa, Homo sapiens
MELRSTAAPRAEGYSNVGFQNEENFLENENTSGNNSIRSRAVQSREHTNTKQDEEQVTVEQDSPRNREHMEDDDEEMQQKGCLERRYDTVCGFCRKHKTTLRHIIWGILLAGYLVMVISACVLNFHRALPLFVITVAAIFFVVWDHLMAKYEHRIDEMLSPGRRLLNSHWFWLKWVIWSSLVLAVIFWLAFDTAKLGQQQLVSFGGLIMYIVLLFLFSKYPTRVYWRPVLWGIGLQFLLGLLILRTDPGFIAFDWLGRQVQTFLEYTDAGASFVFGEKYKDHFFAFKVLPIVVFFSTVMSMLYYLGLMQWIIRKVGWIMLVTTGSSPIESVVASGNIFVGQTESPLLVRPYLPYITKSELHAIMTAGFSTIAGSVLGAYISFGVPSSHLLTASVMSAPASLAAAKLFWPETEKPKITLKNAMKMESGDSGNLLEAATQGASSSISLVANIAVNLIAFLALLSFMNSALSWFGNMFDYPQLSFELICSYIFMPFSFMMGVEWQDSFMVARLIGYKTFFNEFVAYEHLSKWIHLRKEGGPKFVNGVQQYISIRSEIIATYALCGFANIGSLGIVIGGLTSMAPSRKRDIASGAVRALIAGTVACFMTACIAGILSSTPVDINCHHVLENAFNSTFPGNTTKVIACCQSLLSSTVAKGPGEVIPGGNHSLYSLKGCCTLLNPSTFNCNGISNTF

SEQ ID NO: 9561 - protein, 298 aa, Homo sapiens
  VARIANT 214: Xaa = Any Amino Acid
MTDATVSFAKDFLAGGVAAAISKMAVVPIQRVKLLLQVQHASKQVTADKQYKGIIDCVVCISKEQGVLSFWRGNLANVIRYFPTQAFNFAFKDKYKQIFLGDVDKRTQFWRYFEGNLTSGSAAGATSLCFVYPLDFALTRLAANVGKAGAEREFRSLGDCLVKIYKSDGIKGLYQGFNMSVQGIIIYRAAYFSIYDTAKGMLPDPKNTHILISXMITQTVTAVAGLTSYPFDTIRHHMMMQSGCKGTDIMYTGMLNCWRKIARDVGGKASFKGAWSSVFRGTGGAFVLVLHNEIKKYT

SEQ ID NO: 9562 - protein, 1436 aa, Homo sapiens
MARAQALVLALTFQLCAPETETPAAGCTFEEASDPAVPCEYSQAQYDDFQWEQVRIHPGTRAPADLPHGSYLMVNTSQHAPGQRAHVIFQSLSENDTHCVQFSYFLYSRDGHRPGTLGVYVRVNGGPLGSAVWNMTGSHGRQWHQAELAVSTFWPNEYQVLFEALISPDRRGYMGLDDILLLSYPCAKAPHFSRLGDVEVNAGQNASFQCMAAGRAAMRQRFLLQRQSGALVPAAGVRHISHRRFLATFPLAAVSRAEQDLYRCVSQAPRGAGVSNFAELIVKEPPTPIAPPQLLRAGPTYLIIQLNTNSIIGDGPIVRKEIEYRMARGPWAEVHAVSLQTYKLWHLDPDTEYEISVLLTRPGDGGTGRPGPPLISRTKCAEPMRAPKGLAFAEIQARQLTLQWEPLGYNVTRCHTYTVSLCYHYTLGSSHNQTIRECVKTEQGVSRYTIKNLLPYRNVHVRLVLTNPEGRKEGKEVTFQTDEDVPSGIAAESLTFTPLEDMIFLKWEEPQEPNGLITQYEISYQSIESSDPAVNVPGPRRTISKLRNETYHVFSNLHPGTTYLFSVRARTGKGFGQAALTEITTNISAPSFDYADMPSPLGESENTITVLLRPAQGRGAPISVYQVIVEEERARRLRRERGGQDCFPVPLTFEAALARGLVHYFGAELAASSLPEAMPFTVGDNQTYRGFWNPPLEPRKAYLIYFQAASHLKGETRLNCIRIARKAACKESKRPLEVSQRSEEMGLILGICAGGLAVLILLLGAIIVIIRKGKPVNMTKATVNYRQEKTHMMSAVDRSFTDQSTLQEDERLGLSFMDTHGYSTRGDQRSGGVTEASSLLGGSPRRPCGRKGSPYHTGQLHPAVRVADLLQHINQMKTAEGYGFKQEYESFFEGWDATKKKDKVKGSRQEPMPAYDRHRVKLHPMLGDPNADYINANYIDGYHRSNHFIATQGPKPEMVYDFWRMVWQEHCSSIVMITKLVEVGRVKCSRYWPEDSDTYGDIKIMLVKTETLAEYVVRTFALERRGYSARHEVRQFHFTAWPEHGVPYHATGLLAFIRRVKASTPPDAGPIVIHCSAGTGRTGCYIVLDVMLDMAECEGVVDIYNCVKTLCSRRVNMIQTEEQYIFIHDAILEACLCGETTIPVSEFKATYKEMIRIDPQSNSSQLREEFQTLNSVTPPLDVEECSIALLPRNRDKNRSMDVLPPDRCLPFLISTDGDSNNYINAALTDSYTRSAAFIVTLHPLQSTTPDFWRLVYDYGCTSIVMLNQLNQSNSAWPCLQYWPEPGRQQYGLMEVEFMSGTADEDLVARVFRVQNISRLQEGHLLVRHFQFLRWSAYRDTPDSKKAFLHLLAEVDKWQAESGDGRTIVHCLNGGGRSGTFCACATVLEMIRCHNLVDVFFAAKTLRNYKPNMVETMDQYHFCYDVALEYLEGLESR

SEQ ID NO: 9563 - protein, 1436 aa, Homo sapiens [sequence omitted]

SEQ ID NO: 9564 - protein, 1430 aa, Homo sapiens [sequence omitted]

SEQ ID NO: 9565 - protein, 889 aa, Homo sapiens
MEGGLADGEPDRTSLLGDSKDVLGPSTVVANSDESQLLTPGKMSQRQGKEAYPTPTKDLHQPSLSPASPHSQGFERGKEDISQNKDESSLSMSKSKSESKLYNGSEKDSSTSSKLTKKESLKVQKKNYREEKKRATKELLSTITDPSVIVMADWLKIRGTLKSWTKLWCVLKPGVLLIYKTQKNGQWVGTVLLNACEIIERPSKKDGFCFKLFHPLEQSIWAVKGPKGEAVGSITQPLPSSYLIIRATSESDGRCWMDALELALKCSSLLKRTMIREGKEHDLSVSSDSTHVTFYGLLRANNLHSGDNFQLNDSEIERQHFKDQDMYSDKSDKENDQEHDESDNEVMGKSEESDTDTSERQDDSYIEPEPVEPLKETTYTEQSHEELGEAGEASQTETVSEENKSLIWTLLKQVRPGMDLSKVVLPTFILEPRSFLDKLSDYYYHADFLSEAALEENPYFRLKKVVKWYLSGFYKKPKGLKKPYNPILGETFRCLWIHPRTNSKTFYIAEQVSHHPPISAFYVSNRKDGFCLSGSILAKSKFYGNSLSAILEGEARLTFLNRGEDYVMTMPYAHCKGILYGTMTLELGGTVNITCQKTGYSAILEFKLKPFLGSSDCVNQISGKLKLGKEVLATLEGHWDSEVFITDKKTDNSEVFWNPTPDIKQWRLIRHTVKFEEQGDFESEKLWQRVTRAINAKDQTEATQEKYVLEEAQRQAARDRKTKNEEWSCKLFELDPLTGEWHYKFADTRPWDPLNDMIQFEKDGVIQTKVKHRTPMVSVPKMKHKPTRQQKKVAKGYSSPEPDIQDSSGSEAQSVKPSTRRKKGIELGDIQSSIESIKQTQEEIKRNIMALRNHLVSSTPATDYFLQQKDYFIIFLLILLQVIINFMFK

SEQ ID NO: 9566 - protein, 874 aa, Homo sapiens
MEGGLADGEPDRTSANSDESQLLTPGKMSQRQGKEAYPTPTKDLHQPSLSPASPHSQGFERGKEDISQNKDESSLSMSKSKSESKLYNGSEKDSSTSSKLTKKESLKVQKKNYREEKKRATKELLSTITDPSVIVMADWLKIRGTLKSWTKLWCVLKPGVLLIYKTQKNGQWVGTVLLNACEIIERPSKKDGFCFKLFHPLEQSIWAVKGPKGEAVGSITQPLPSSYLIIRATSESDGRCWMDALELALKCSSLLKRTMIREGKEHDLSVSSDSTHVTFYGLLRANNLHSGDNFQLNDSEIERQHFKDQDMYSDKSDKENDQEHDESDNEVMGKSEESDTDTSERQDDSYIEPEPVEPLKETTYTEQSHEELGEAGEASQTETVSEENKSLIWTLLKQVRPGMDLSKVVLPTFILEPRSFLDKLSDYYYHADFLSEAALEENPYFRLKKVVKWYLSGFYKKPKGLKKPYNPILGETFRCLWIHPRTNSKTFYIAEQVSHHPPISAFYVSNRKDGFCLSGSILAKSKFYGNSLSAILEGEARLTFLNRGEDYVMTMPYAHCKGILYGTMTLELGGTVNITCQKTGYSAILEFKLKPFLGSSDCVNQISGKLKLGKEVLATLEGHWDSEVFITDKKTDNSEVFWNPTPDIKQWRLIRHTVKFEEQGDFESEKLWQRVTRAINAKDQTEATQEKYVLEEAQRQAARDRKTKNEEWSCKLFELDPLTGEWHYKFADTRPWDPLNDMIQFEKDGVIQTKVKHRTPMVSVPKMKHKPTRQQKKVAKGYSSPEPDIQDSSGSEAQSVKPSTRRKKGIELGDIQSSIESIKQTQEEIKRNIMALRNHLVSSTPATDYFLQQKDYFIIFLLILLQVIINFMFK

SEQ ID NO: 9567 - protein, 406 aa, Homo sapiens
MRNHTEITEFILLGLTDDPNFQVVIFVFLLITYMLSITGNLTLITITLLDSHLQTPMYFFLRNFSILEISFTTVSIPKFLGNIISGDKTISFNNCIVQLFFFILLGVTEFYLLAAMSYDRYVAICKPLHCLSIMNRRVCTLLVFTSWLTPMYFFLRNFSFLEISFTTVCIPRFLGAIITRNKTISYNNCAAQLFFFIFMGVTEFYILTAMSYDRYVAICKPLHYTSIMNRKLCTLLVLCAWLSGFLTIFPPLMLLLQLDYCASNVIDHFACDYFPLLQLSCSDTWLLEVIGFYFALVTLLFTLALVILSYMYIIRTILRIPSASQRKKAFSTCSSHMIVISISYGSCIFMYANPSAKEKASLTKGIAILNTSVAPMLNPFIYTLRNQQVKQAFKNVVHKVVFYANQ

SEQ ID NO: 9568 - protein, 1009 aa, Homo sapiens
MVGEGPYLISDLDQRGRRRSFAERYDPSLKTMIPVRPCARLAPNPVDDAGLLSFATFSWLTPVMVKGYRQRLTVDTLPPLSTYDSSDTNAKRFRVLWDEEVARVGPEKASLSHVVWKFQRTRVLMDIVANILCIIMAAIGPTVLIHQILQQTERTSGKVWVGIGLCIALFATEFTKVFFWALAWAINYRTAIRLKVALSTLVFENLVSFKTLTHISVGEVLNILSSDSYSLFEAALFCPLPATIPILMVFCAAYAFFILGPTALIGISVYVIFIPVQMFMAKLNSAFRRSAILVTDKRVQTMNEFLTCIRLIKMYAWEKSFTNTIQDIRRRERKLLEKAGFVQSGNSALAPIVSTIAIVLTLSCHILLRRKLTAPVAFSVIAMFNVMKFSIAILPFSIKAMAEANVSLRRMKKILIDKSPPSYITQPEDPDTVLLLANATLTWEHEASRKSTPKKLQNQKRHLCKKQRSEAYSERSPPAKGATGPEEQSDSLKSVLHSISFVVRKGKILGICGNVGSGKSSLLAALLGQMQLQKGVVAVNGTLAYVSQQAWIFHGNVRENILFGEKYDHQRYQHTVRVCGLQKDLSNLPYGDLTEIGERGLNLSGGQRQRISLARAVYSDRQLYLLDDPLSAVDAHVGKHVFEECIKKTLRGKTVVLVTHQLQFLESCDEVILLEDGEICEKGTHKELMEERGRYAKLIHNLRGLQFKDPEHLYNAAMVEAFKESPAEREEDAVLAPGNEKDEGKESETGSEFVDTKVPEHQLIQTESPQEGTVTWKTYHTYIKASGGYLLSLFTVFLFLLMIGSAAFSNWWLGLWLDKGSRMTCGPQGNRTMCEVGAVLADIGQHVYQWVYTASMVFMLVFGVTKGFVFTKTTLMASSSLHDTVFDKILKSPMSFFDTTPTGRLMNRFSKDMDELDVRLPFHAENFLQQFFMVVFILVILAAVFPAVLLVVASLAVGFFILLRIFHRGVQELKKVENVSRSPWFTHITSSMQGLGIIHAYGKKESCIT

SEQ ID NO: 9569 - protein, 1359 aa, Homo sapiens
MVGEGPYLISDLDQRGRRRSFAERYDPSLKTMIPVRPCARLAPNPVDDAGLLSFATFSWLTPVMVKGYRQRLTVDTLPPLSTYDSSDTNAKRFRVLWDEEVARVGPEKASLSHVVWKFQRTRVLMDIVANILCIIMAAIGPVILIHQILQQTERTSGKVWVGIGLCIALFATEFTKVFFWALAWAINYRTAIRLKVALSTLVFENLVSFKTLTHISVGEVLNILSSDSYSLFEAALFCPLPATIPILMVFCAAYAFFILGPTALIGISVYVIFIPVQMFMAKLNSAFRRSAILVTDKRVQTMNEFLTCIRLIKMYAWEKSFTNTIQDIRRRERKLLEKAGFVQSGNSALAPIVSTIAIVLTLSCHILLRRKLTAPVAFSVIAMFNVMKFSIAILPFSIKAMAEANVSLRRMKKILIDKSPPSYITQPEDPDTVLLLANATLTWEHEASRKSTPKKLQNQKRHLCKKQRSEAYSERSPPAKGATGPEEQSDSLKSVLHSISFVVRKGKILGICGNVGSGKSSLLAALLGQMQLQKGVVAVNGTLAYVSQQAWIFHGNVRENILFGEKYDHQRYQHTVRVCGLQKDLSNLPYGDLTEIGERGLNLSGGQRQRISLARAVYSDRQLYLLDDPLSAVDAHVGKHVFEECIKKTLRGKTVVLVTHQLQFLESCDEVILLEDGEICEKGTHKELMEERGRYAKLIHNLRGLQFKDPEHLYNAAMVEAFKESPAEREEDAGIIVLAPGNEKDEGKESETGSEFVDTKVPEHQLIQTESPQEGTVTWKTYHTYIKASGGYLLSLFTVFLFLLMIGSAAFSNWWLGLWLDKGSRMTCGPQGNRTMCEVGAVLADIGQHVYQWVYTASMVFMLVFGVTKGFVFTKTTLMASSSLHDTVFDKILKSPMSFFDTTPTGRLMNRFSKDMDELDVRLPFHAENFLQQFFMVVFILVILAAVFPAVLLVVASLAVGFFILLRIFHRGVQELKKVENVSRSPWFTHITSSMQGLGIIHAYGKKESCITYHLLYFNCALRWFALRMDVLMNILTFTVALLVTLSFSSISTSSKGLSLSYIIQLSGLLQVCVRTGTETQAKFTSVELLREYISTCVPECTHPLKVGTCPKDWPSCGEITFRDYQMRYRDNTPLVLDSLNLNIQSGQTVGIVGRTGSGKSSLGMALFRLVEPASGTIFIDEVDICILSLEDLRTKLTVIPQDPVLFVGTVRYNLDPFESHTDEMLWQVLERTFMRDTIMKLPEKLQAEVTENGENFSVGERQLLCVARALLRNSKIILLDEATASMDSKTDTLVQNTIKDAFKGCTVLTIAHRLNTVLNCDHVLVMENGKVIEFDKPEVLAEKPDSAFAMLLAAEVRL

SEQ ID NO: 9570 - protein, 935 aa, Homo sapiens [sequence omitted]

SEQ ID NO: 9571 - protein, 622 aa, Homo sapiens
MEGPGLGSQCRNHSHGPHPPGFGRYGICAHENKELANAREALPLIEDSSNCDIVKATQYGIFERCKELVEAGYDVRQPDKENVSLLHWAAINNRLDLVKFYISKGAVVDQLGGDLNSTPLHWAIRQGHLPMVILLLQHGADPTLIDGEGFSSIHLAVLFQHMPIIAYLISKGQSVNMTDVNGQTPLMLSAHKVIGPEPTGFLLKFNPSLNVVDKIHQNTPLHWAVAAGNVNAVDKLLEAGSSLDIQNVKGETPLDMALQNKNQLIIHMLKTEAKMRANQKFRLWRWLQKCELFLLLMLSVITMWAIGYILDFNSDSWLLKGCLLVTLFFLTSLFPRFLVGYKNLVYLPTAFLLSSVFWIFMTWFILFFPDLAGAPFYFSFIFSIVAFLYFFYKTWATDPGFTKASEEEKKVNIITLAETGSLDFRTFCTSCLIRKPLRSLHCHVCNCCVARYDQHCLWTGRCIGFGNHHYYIFFLFFLSMVCGWIIYGSFIYLSSHCATTFKEDGLWTYLNQIVACSPWVLYILMLATFHFSWSTFLLLNQLFQIAFLGLTSHERISLQKQSKHMKQTLSLRKTPYNLGFMQNLADFFQCGCFGLVKPCVVDWTSQYTMVFHPAREKVLRSV

SEQ ID NO: 9572 - protein, 578 aa, Homo sapiens
MRQQDAPKPTPAARRCSGLARRVLTIAFALLILGLMTWAYAAGVPLASDRYGLLAFGLYGAFLSAHLVAQSLFAYLEHRRVAAAARGPLDAATARSVALTISAYQEDPAYLRQCLASARALLYPRARLRVLMVVDGNRAEDLYMVDMFREVFADEDPATYVWDGNYHQPWEPAAAGAVGAGAYREVEAEDPGRLAVEALVRTRRCVCVAQRWGGKREVMYTAFKALGDSVDYVQVCDSDTRLDPMALLELVRVLDEDPRVGAVGGDVRILNPLDSWVSFLSSLRYWVAFNVERACQSYFHCVSCISGPLGLYRNNLLQQFLEAWYNQKFLGTHCTFGDDRHLTNRMLSMGYATKYTSRSRCYSETPSSFLRWLSQQTRWSKSYFREWLYNALWWHRHHAWMTYEAVVSGLFPFFVAATVLRLFYAGRPWALLWVLLCVQGVALAKAAFAAWLRGCLRMVLLSLYAPLYMCGLLPAKFLALVTMNQSGWGTSGRRKLAANYVPLLPLALWALLLLGGLVRSVAHEARADWSGPSRAAEAYHLAAGAGAYVGYWVAMLTLYWVGVRRLCRRRTGGYRVQV

SEQ ID NO: 9573 - protein, 1165 aa, Homo sapiens
MICQKFCVVLLHWEFIYVITAFNLSYPITPWRFKLSCMPPNSTYDYFLLPAGLSKNTSNSNGHYETAVEPKFNSSGTHFSNLSKTTFHCCFRSEQDRNCSLCADNIEGKTFVSTVNSLVFQQIDANWNIQCWLKGDLKLFICYVESLFKNLFRNYNYKVHLLYVLPEVLEDSPLVPQKGSFQMVHCNCSVHECCECLVPVPTAKLNDTLLMCLKITSGGVIFQSPLMSVQPINMVKPDPPLGLHMEITDDGNLKISWSSPPLVPFPLQYQVKYSENSTTVIREADKIVSATSLLVDSILPGSSYEVQVRGKRLDGPGIWSDWSTPRVFTTQDVIYFPPKILTSVGSNVSFHCIYKKENKIVPSKEIVWWMNLAEKIPQSQYDVVSDHVSKVTFFNLNETKPRGKFTYDAVYCCNEHECHHRYAELYVIDVNINISCETDGYLTKMTCRWSTSTIQSLAESTLQLRYHRSSLYCSDIPSIHPISEPKDCYLQSDGFYECIFQPIFLLSGYTMWIRINHSLGSLDSPPTCVLPDSVVKPLPPSSVKAEITINIGLLKISWEKPVFPENNLQFQIRYGLSGKEVQWKMYEVYDAKSKSVSLPVPDLCAVYAVQVRCKRLDGLGYWSNWSNPAYTVVMDIKVPMRGPEFWRIINGDTMKKEKNVTLLWKPLMKNDSLCSVQRYVINHHTSCNGTWSEDVGNHTKFTFLWTEQAHTVTVLAINSIGASVANFNLTFSWPMSKVNIVQSLSAYPLNSSCVIVSWILSPSDYKLMYFIIEWKNLNEDGEIKWLRISSSVKKYYIHDHFIPIEKYQFSLYPIFMEGVGKPKIINSFTQDDIEKHQSDAGLYVIVPVIISSSILLLGTLLISHQRMKKLFWEDVPNPKNCSWAQGLNFQKPETFEHLFIKHTASVTCGPLLLEPETISEDISVDTSWKNKDEMMPTTVVSLLSTTDLEKGSVCISDQFNSVNFSEAEGTEVTYEAESQRQPFVKYATLISNSKPSETGEEQGLINSSVTKCFSSKNSPLKDSFSNSSWEIEAQAFFILSDQHPNIISPHLTFSEGLDELLKLEGNFPEENNDKKSIYYLGVTSIKKRESGVLLTDKSRVSCPFPAPCLFTDIRVLQDSCSHFVENNINLGTSSKKTFASYMPQFQTCSTQTHKIMENKMCDLTV

SEQ ID NO: 9574 - protein, 958 aa, Homo sapiens
MICQKFCVVLLHWEFIYVITAFNLSYPITPWRFKLSCMPPNSTYDYFLLPAGLSKNTSNSNGHYETAVEPKFNSSGTHFSNLSKTTFHCCFRSEQDRNCSLCADNIEGKTFVSTVNSLVFQQIDANWNIQCWLKGDLKLFICYVESLFKNLFRNYNYKVHLLYVLPEVLEDSPLVPQKGSFQMVHCNCSVHECCECLVPVPTAKLNDTLLMCLKITSGGVIFQSPLMSVQPINMVKPDPPLGLHMEITDDGNLKISWSSPPLVPFPLQYQVKYSENSTTVIREADKIVSATSLLVDSILPGSSYEVQVRGKRLDGPGIWSDWSTPRVFTTQDVIYFPPKILTSVGSNVSFHCIYKKENKIVPSKEIVWWMNLAEKIPQSQYDVVSDHVSKVTFFNLNETKPRGKFTYDAVYCCNEHECHHRYAELYVIDVNINISCETDGYLTKMTCRWSTSTIQSLAESTLQLRYHRSSLYCSDIPSIHPISEPKDCYLQSDGFYECIFQPIFLLSGYTMWIRINHSLGSLDSPPTCVLPDSVVKPLPPSSVKAEITINIGLLKISWEKPVFPENNLQFQIRYGLSGKEVQWKMYEVYDAKSKSVSLPVPDLCAVYAVQVRCKRLDGLGYWSNWSNPAYTVVMDIKVPMRGPEFWRIINGDTMKKEKNVTLLWKPLMKNDSLCSVQRYVINHHTSCNGTWSEDVGNHTKFTFLWTEQAHTVTVLAINSIGASVANFNLTFSWPMSKVNIVQSLSAYPLNSSCVIVSWILSPSDYKLMYFIIEWKNLNEDGEIKWLRISSSVKKYYIHDHFIPIEKYQFSLYPIFMEGVGKPKIINSFTQDDIEKHQSDAGLYVIVPVIISSSILLLGTLLISHQRMKKLFWEDVPNPKNCSWAQGLNFQKMLEGSMFVKSHHHSLISSTQGHKHCGRPQGPLHRKTRDLCSLVYLLTLPPLLSYDPAKSPSVRNTQE

SEQ ID NO: 9575 - protein, 906 aa, Homo sapiens
MICQKFCVVLLHWEFIYVITAFNLSYPITPWRFKLSCMPPNSTYDYFLLPAGLSKNTSNSNGHYETAVEPKFNSSGTHFSNLSKTTFHCCFRSEQDRNCSLCADNIEGKTFVSTVNSLVFQQIDANWNIQCWLKGDLKLFICYVESLFKNLFRNYNYKVHLLYVLPEVLEDSPLVPQKGSFQMVHCNCSVHECCECLVPVPTAKLNDTLLMCLKITSGGVIFQSPLMSVQPINMVKPDPPLGLHMEITDDGNLKISWSSPPLVPFPLQYQVKYSENSTTVIREADKIVSATSLLVDSILPGSSYEVQVRGKRLDGPGIWSDWSTPRVFTTQDVIYFPPKILTSVGSNVSFHCIYKKENKIVPSKEIVWWMNLAEKIPQSQYDVVSDHVSKVTFFNLNETKPRGKFTYDAVYCCNEHECHHRYAELYVIDVNINISCETDGYLTKMTCRWSTSTIQSLAESTLQLRYHRSSLYCSDIPSIHPISEPKDCYLQSDGFYECIFQPIFLLSGYTMWIRINHSLGSLDSPPTCVLPDSVVKPLPPSSVKAEITINIGLLKISWEKPVFPENNLQFQIRYGLSGKEVQWKMYEVYDAKSKSVSLPVPDLCAVYAVQVRCKRLDGLGYWSNWSNPAYTVVMDIKVPMRGPEFWRIINGDTMKKEKNVTLLWKPLMKNDSLCSVQRYVINHHTSCNGTWSEDVGNHTKFTFLWTEQAHTVTVLAINSIGASVANFNLTFSWPMSKVNIVQSLSAYPLNSSCVIVSWILSPSDYKLMYFIIEWKNLNEDGEIKWLRISSSVKKYYIHDHFIPIEKYQFSLYPIFMEGVGKPKIINSFTQDDIEKHQSDAGLYVIVPVIISSSILLLGTLLISHQRMKKLFWEDVPNPKNCSWAQGLNFQKKMPGTKELLGGGWLT

SEQ ID NO: 9576 - protein, 896 aa, Homo sapiens
MICQKFCVVLLHWEFIYVITAFNLSYPITPWRFKLSCMPPNSTYDYFLLPAGLSKNTSNSNGHYETAVEPKFNSSGTHFSNLSKTTFHCCFRSEQDRNCSLCADNIEGKTFVSTVNSLVFQQIDANWNIQCWLKGDLKLFICYVESLFKNLFRNYNYKVHLLYVLPEVLEDSPLVPQKGSFQMVHCNCSVHECCECLVPVPTAKLNDTLLMCLKITSGGVIFQSPLMSVQPINMVKPDPPLGLHMEITDDGNLKISWSSPPLVPFPLQYQVKYSENSTTVIREADKIVSATSLLVDSILPGSSYEVQVRGKRLDGPGIWSDWSTPRVFTTQDVIYFPPKILTSVGSNVSFHCIYKKENKIVPSKEIVWWMNLAEKIPQSQYDVVSDHVSKVTFFNLNETKPRGKFTYDAVYCCNEHECHHRYAELYVIDVNINISCETDGYLTKMTCRWSTSTIQSLAESTLQLRYHRSSLYCSDIPSIHPISEPKDCYLQSDGFYECIFQPIFLLSGYTMWIRINHSLGSLDSPPTCVLPDSVVKPLPPSSVKAEITINIGLLKISWEKPVFPENNLQFQIRYGLSGKEVQWKMYEVYDAKSKSVSLPVPDLCAVYAVQVRCKRLDGLGYWSNWSNPAYTVVMDIKVPMRGPEFWRIINGDTMKKEKNVTLLWKPLMKNDSLCSVQRYVINHHTSCNGTWSEDVGNHTKFTFLWTEQAHTVTVLAINSIGASVANFNLTFSWPMSKVNIVQSLSAYPLNSSCVIVSWILSPSDYKLMYFIIEWKNLNEDGEIKWLRISSSVKKYYIHDHFIPIEKYQFSLYPIFMEGVGKPKIINSFTQDDIEKHQSDAGLYVIVPVIISSSILLLGTLLISHQRMKKLFWEDVPNPKNCSWAQGLNFQKRTDIL

SEQ ID NO: 9577 - protein, 839 aa, Homo sapiens
MICQKFCVVLLHWEFIYVITAFNLSYPITPWRFKLSCMPPNSTYDYFLLPAGLSKNTSNSNGHYETAVEPKFNSSGTHFSNLSKTTFHCCFRSEQDRNCSLCADNIEGKTFVSTVNSLVFQQIDANWNIQCWLKGDLKLFICYVESLFKNLFRNYNYKVHLLYVLPEVLEDSPLVPQKGSFQMVHCNCSVHECCECLVPVPTAKLNDTLLMCLKITSGGVIFQSPLMSVQPINMVKPDPPLGLHMEITDDGNLKISWSSPPLVPFPLQYQVKYSENSTTVIREADKIVSATSLLVDSILPGSSYEVQVRGKRLDGPGIWSDWSTPRVFTTQDVIYFPPKILTSVGSNVSFHCIYKKENKIVPSKEIVWWMNLAEKIPQSQYDVVSDHVSKVTFFNLNETKPRGKFTYDAVYCCNEHECHHRYAELYVIDVNINISCETDGYLTKMTCRWSTSTIQSLAESTLQLRYHRSSLYCSDIPSIHPISEPKDCYLQSDGFYECIFQPIFLLSGYTMWIRINHSLGSLDSPPTCVLPDSVVKPLPPSSVKAEITINIGLLKISWEKPVFPENNLQFQIRYGLSGKEVQWKMYEVYDAKSKSVSLPVPDLCAVYAVQVRCKRLDGLGYWSNWSNPAYTVVMDIKVPMRGPEFWRIINGDTMKKEKNVTLLWKPLMKNDSLCSVQRYVINHHTSCNGTWSEDVGNHTKFTFLWTEQAHTVTVLAINSIGASVANFNLTFSWPMSKVNIVQSLSAYPLNSSCVIVSWILSPSDYKLMYFIIEWKNLNEDGEIKWLRISSSVKKYYIHDHFIPIEKYQFSLYPIFMEGVGKPKIINSFTQDDIEKHQSD

SEQ ID NO: 9578 - protein, 416 aa, Homo sapiens
MYRHGISSQRSWPLWTTIFIFLGVAAILGVTIGLLVHFLAVEKTYYYQGDFHISGVTYNDNCENAASQASTNLSKDIETKMLNAFQNSSIYKEYVKSEVIKLLPNANGSNVQLQLKFKFPPAEGVSMRTKIKAKLHQMLKNNMASWNAVPASIKLMEISKAASEMLTNNCCGRQVANSIITGNKIVNGKSSLEGAWPWQASMQWKGRHYCGASLISSRWLLSAAHCFAKKNNSKDWTVNFGVVVNKPYMTRKVQNIIFHENYSSPGLHDDIALVQLAEEVSFTEYIRKICLPEAKMKLSENDNVVVTGWGTLYMNGSFPVILQEAFLKIIDNKICNASYAYSGFVTDSMLCAGFMSGEADACQNDSGGPLAYPDSRNIWHLVGIVSWGDGCGKKNKPGVYTRVTSYRNWITSKTGL

SEQ ID NO: 9579 - protein, 493 aa, Homo sapiens [sequence omitted]

SEQ ID NO: 9580 - protein, 525 aa, Homo sapiens
MLRTILDAPQRLLKEGRASRQLVLVVVFVALLLDNMLFTVVVPIVPTFLYDMEFKEVNSSLHLGHAGSSPHALASPAFSTIFSFFNNNTVAVEESVPSGIAWMNDTASTIPPPATEAISAHKNNCLQGTGFLEEEITRVGVLFASKAVMQLLVNPFVGPLTNRIGYHIPMFAGFVIMFLSTVMFAFSGTYTLLFVARTLQGIGSSFSSVAGLGMLASVYTDDHERGRAMGTALGGLALGLLVGAPFGSVMYEFVGKSAPFLILAFLALLDGALQLCILQPSKVSPESAKGTPLFMLLKDPYILVAAGSICFANMGVAILEPTLPIWMMQTMCSPKWQLGLAFLPASVSYLIGTNLFGVLANKMGRWLCSLIGMLVVGTSLLCVPLAHNIFGLIGPNAGLGLAIGMVDSSMMPIMGHLVDLRHTSVYGSVYAIADVAFCMGFAIGPSTGGAIVKAIGFPWLMVITGVINIVYAPLCYYLRSPPAKEEKLAILSQDCPMETRMYATQKPTKEFPLGEDSDEEPDHEE

SEQ ID NO: 9581 - protein, 1371 aa, Homo sapiens
AGCGGLARLSVPCWRIWPQRAAKIAGPGRKRRSPDPDAVADPGALWLSTKRLKMSGGASATGPRRGPPGLEDTTSKKKQKDRANQESKDGDPRKETGSRYVAQAGLEPLASGDPSASASHAAGITGSRHRTRLFFPSSSGSASTPQEEQTKEGACEDPHDLLATPTPELLLDWRQSAEEVIVKLRVGVGPLQLEDVDAAFTDTDCVVRFAGGQQWGGVFYAEIKSSCAKVQTRKGSLLHLTLPKKVPMLTWPSLLVEADEQLCIPPLNSQTCLLGSEENLAPLAGEKAVPPGNDPVSPAMVRSRNPGKDDCAKEEMAVAADAATLVDEPESMVNLAFVKNDSYEKGPDSVVVHVYVKEICRDTSRVLFREQDFTLIFQTRDGNFLRLHPGCGPHTTFRWQVKLRNLIEPEQCTFCFTASRIDICLRKRQSQRWGGLEAPAARVGGAKVAVPTGPTPLDSTPPGGAPHPLTGQEEARAVEKDKSKARSEDTGLDSVATRTPMEHVTPKPETHLASPKPTCMVPPMPHSPVSGDSVEEEEEEEKKVCLPGFTGLVNLGNTCFMNSVIQSLSNTRELRDFFHDRSFEAEINYNNPLGTGGRLAIGFAVLLRALWKGTHHAFQPSKLKAIVASKASQFTGYAQHDAQEFMAFLLDGLHEDLNRIQNKPYTETVDSDGRPDEVVAEEAWQRHKMRNDSFIVDLFQGQYKSKLVCPVCAKVSITFDPFLYLPVPLPQKQKVLPVFYFAREPHSKPIKFLVSVSKENSTASEVLDSLSQSVHVKPENLRLAEVIKNRFHRVFLPSHSLDTVSPSDTLLCFELLSSELAKERVVVLEVQQRPQVPSVPISKCAACQRKQQSEDEKLKRCTRCYRVGYCNQLCQKTHWPDHKGLCRPENIGYPFLVSVPASRLTYARLAQLLEGYARYSVSVFQPPFQPGRMALESQSPGCTTLLSTGSLEAGDSERDPIQPPELQLVTPMAEGDTGLPRVWAAPDRGPVPSTSGISSEMLASGPIEVGSLPAGERVSRPEAAVPGYQHPSEAMNAHTPQFFIYKIDSSNREQRLEDKGDTPLELGDDCSLALVWRNNERLQEFVLVASKELECAEDPGSAGEAARAGHFTLDQCLNLFTRPEVLAPEEAWYCPQCKQHREASKQLLLWRLPNVLIVQLKRFSFRSFIWRDKINDLVEFPVRNLDLSKFCIGQKEEQLPSYDLYAVINHYGGMIGGHYTACARLPNDRSSQRSDVGWRLFDDSTVTTVDESQVVTRYAYVLFYRRRNSPVERPPRAGHSEHHPDLGPAAEAAASQASRIWQELEAEEEPVPEGSGPLGPWGPQDWVGPLPRGPTTPDEGCLRYFVLGTVAALVALVLNVFYPLVSQSRWR

SEQ ID NO: 9582 - protein, 796 aa, Homo sapiens
MTKDKEPIVKSFHFVCLMIIIVGTRIQFSDGNEFAVDKSKRGLIHVPKDLPLKTKVLDMSQNYIAELQVSDMSFLSELTVLRLSHNRIQLLDLSVFKFNQDLEYLDLSHNQLQKISCHPIVSFRHLDLSFNDFKALPICKEFGNLSQLNFLGLSAMKLQKLDLLPIAHLHLSYILLDLRNYYIKENETESLQILNAKTLHLVFHPTSLFAIQVNISVNTLGCLQLTNIKLNDDNCQVFIKFLSELTRGPTLLNFTLNHIETTWKCLVRVFQFLWPKPVEYLNIYNLTIIESIREEDFTYSKTTLKALTIEHITNQVFLFSQTALYTVFSEMNIMMLTISDTPFIHMLCPHAPSTFKFLNFTQNVFTDSIFEKCSTLVKLETLILQKNGLKDLFKVGLMTKDMPSLEILDVSWNSLESGRHKENCTWVESIVVLNLSSNMLTDSVFRCLPPRIKVLDLHSNKIKSVPKQVVKLEALQELNVAFNSLTDLPGCGSFSSLSVLIIDHNSVSHPSADFFQSCQKMRSIKAGDNPFQCTCELREFVKNIDQVSSEVLEGWPDSYKCDYPESYRGSPLKDFHMSELSCNITLLIVTIGATMLVLAVTVTSLCIYLDLPWYLRMVCQWTQTRRRARNIPLEELQRNLQFHAFISYSEHDSAWVKSELVPYLEKEDIQICLHERNFVPGKSIVENIINCIEKSYKSIFVLSPNFVQSEWCHYELYFAHHNLFHEGSNNLILILLEPIPQNSIPNKYHKLKALMTQRTYLQWPKEKSKRGLFWANIRAAFNMKLTLVTENNDVKS

SEQ ID NO: 9583 - protein, 758 aa, Homo sapiens
MAVSAGSARTSPSSDKVQKDKAELISGPRQDSRIGKLLGFEWTDLSSWRRLVTLLNRPTDPASLAVFRFLFGFLMVLDIPQERGLSSLDRKYLDGLDVCRFPLLDALRPLPLDWMYLVYTIMFLGALGMMLGLCYRISCVLFLLPYWYVFLLDKTSWNNHSYLYGLLAFQLTFMDANHYWSVDGLLNAHRRNAHVPLWNYAVLRGQIFIVYFIAGVKKLDADWVEGYSMEYLSRHWLFSPFKLLLSEELTSLLVVHWGGLLLDLSAGFLLFFDVSRSIGLFFVSYFHCMNSQLFSIGMFSYVMLASSPLFCSPEWPRKLVSYCPQRLQQLLPLKAAPQPSVSCVYKRSRGKSGQKPGLRHQLGAAFTLLYLLEQLFLPYSHFLTQGYNNWTNGLYGYSWDMMVHSRSHQHVKITYRDGRTGELGYLNPGVFTQSRRWKDHADMLKQYATCLSRLLPKYNVTEPQIYFDIWVSINDRFQQRIFDPRVDIVQAAWSPFQRTSWVQPLLMDLSPWRAKLQEIKSSLDNHTEVVFIADFPGLHLENFVSEDLGNTSIQLLQGEVTVELVAEQKNQTLREGEKMQLPAGEYHKVYTTSPSPSCYMYVYVNTTELALEQDLAYLQELKEKVENGSETGPLPPELQPLLEGEVKGGPEPTPLVQTFLRRQQRLQEIERRRNTPFHERFFRFLLRKLYVFRRSFLMTCISLRNLILGRPSLEQLAQEVTYANLRPFEAVGELNPSNTDSSHSNPPESNPDPVHSEF

SEQ ID NO: 9584 - protein, 1007 aa, Homo sapiens
MEQAGTRPAATEHPRLRRPMPWLLLLPLLLLLLLLLPGPAASQLRYSVPEEQAPGALVGNVARALGLELRRLGPGCLRINHLGAPSPRYLELDLTSGALFVNERIDREALCEQRPRCLLSLEVLAHNPVAVSAVEVEILDINDNSPRFPRPNYQLQVSESVAPGARFHIESAQDPDVGANSVQTYELSPSEHFELDLKPLQENSKVLELVLRKGLDREQAALHHLVLTAVDGGIPARSGTAQISVRVLDTNDNSPAFDQSTYRVQLREDSPPGTLVVKLNASDPDEGSNGELRYSLSSYTSDRERQLFSIDASTGEVRVIGGLDYEEASSYQIYVQATDRGPVPMAGHCKVLVDIVDVNDNAPEVVLTDLYSPVPENATPNTIVAVLSVNDQDSGPNRKVSLGLEATLPFRLNGFGNSYTLVVSGPLDRERVAVYNITVTATDGGIPQLTSLRTLKVEISDINDNPPSFLEDSYSIYIQENNLPGVLLCTVQATDPDEKENAEVTYSLLEREIQGLPVTSYVSINSASGSLYAVNSFDYEKFREFFVTVEAQDKGSPPLSSTVTANVYVVDMNDHAPHILYPTSTNSSAAFEMVPRTAPAGYLVTKVIAMDSDSGQNAWLFYHLAQTSDLDLFKVELHTGEIRTTRKMGDESGSTFNLTVVVRDNGEPSLSASVAITVAVVDRVSKILPDTQRHVKSPRTYSEITLYLIIALSTVSFIFLLTIIILSIIKCYRYTAYGTACCGGFCGVRERSPAELYKQANNNIDARIPHGLKVQPHFIEVRGNGSLTKTYCYKACLTAGSGSDTFMFYNTGAQTGPGPSGAQAAVTDSRNLTGQSGQNAGNLIILKNEAVSQNEPRQPNPDWRYSASLRAGMHSSVHLEEAGILRAGPGGPDQQWPTVSSATPEPEAGEVSPPVGAGVNSNSWTFKYGPGNPKQSGPGELPDKFIIPGSPAIISIRQEPTNSQIDKSDFITFGKKEETKKKKKKKKGNKTQEKKEKGNSTTDNSDQ
